(19) United States
(12) Patent Application Publication
(10) Pub. No.: US 2007/0161031 A1
(43) Pub. Date: Jul. 12, 2007

(54) Functional arrays for high throughput characterization of gene expression regulatory elements

(75) Inventors: Nathan D. Trinklein, Redwood City, CA (US); Shelley F. Aldred, Hayward, CA (US); Sara J. Cooper, Seattle, WA (US); Richard M. Myers, Stanford, CA (US)

Correspondence Address: WILSON SONSINI GOODRICH & ROSATI, 650 PAGE MILL ROAD, PALO ALTO, CA, 94304-1050, US

(73) Assignee: The Board of Trustees of the Leland Stanford Junior University, Palo Alto, CA (US)

(21) Appl. No.: 11/636,385

(22) Filed: Dec. 7, 2006

Related U.S. Application Data
(60) Provisional application No. 60/750,929, filed on Dec. 16, 2005.

(51) Int. Cl. C40B 30/06; C40B 40/02; C40B 50/06

(52) U.S. Cl. 435/6; 435/325

(57) ABSTRACT

The present invention provides compositions, kits, assemblies, libraries, arrays, and high throughput methods for large scale structural and functional characterization of gene expression regulatory elements in a genome of an organism, especially in a human genome. In one aspect of the invention, an array of expression constructs is provided, each of the expression constructs comprising: a nucleic acid segment operably linked with a reporter sequence in an expression vector such that expression of the reporter sequence is under the transcriptional control of the nucleic acid segment, the nucleic acid segment varying in the library and having a diversity of at least 50. The nucleic acid segments can be a large library of gene expression regulatory elements such as transcriptional promoters. The present invention can have a wide variety of applications such as in personalized medicine, pharmacogenomics, and correlation of polymorphisms with phenotypic traits.

### CROSS-REFERENCE

[0001] This application claims the benefit of U.S. Provisional Application No. 60/750,929, filed Dec. 16, 2005 and U.S. Provisional Application No. 60/762,056, filed Jan. 24, 2006 which are incorporated herein by reference in their entirety.

### STATEMENT AS TO FEDERALLY SPONSORED RESEARCH

[0002] This invention was made with the support of the United States government under the National Institutes of Health (NIH) Grant 1 U01 HG03162-01 from the National Human Genome Research Institute.

### BACKGROUND OF THE INVENTION

[0003] The regulation of human gene expression is a critical, highly coordinated, and complex process. Gene regulation plays a crucial role in virtually every biological process from coordinating cell division to responding to extracellular stimuli and directing transcription during development (Ahituv et al. 2004; Blais and Dynlacht 2004; Pirkkala et al. 2001). While knowledge of regulation at the level of individual genes is progressing, global characterization of gene regulation currently represents one of the major challenges and fundamental goals for biomedical research. An initial step in achieving this goal is the comprehensive identification of transcriptional regulatory elements in the human genome. Towards this end, the ENCODE (Encyclopedia of DNA Elements) project began in 2004 as a collective effort of many labs to identify the functional elements in 1% of the human genome (The ENCODE Project Consortium 2004).

[0004] Promoters are the best-characterized transcriptional regulatory sequences in complex genomes because of their predictable location immediately upstream of transcription start sites (TSS). They are often described as having two separate segments: core and extended promoter regions. The core promoter is generally within 50 bp of the TSS, where the pre-initiation complex forms and the general transcription machinery assembles. The extended promoter can contain specific regulatory sequences that control spatial and temporal expression of the downstream gene (reviewed in (Butler and Kadonaga 2002)). Despite a substantial body of literature describing transcriptional promoters, due to the 3′ bias in isolation and synthesis of cDNAs (Kimmel and Berger 1987) and the existence of alternative promoters regulating alternative RNA isoforms (Landry et al. 2003), the identification of the true start sites for all human transcripts is far from complete. Several groups have recently developed large resources of full-length enriched cDNA sequences including the Database of Transcriptional Start Sites (DBTSS) which contains 11,234 human genes (Suzuki et al. 2002; Suzuki et al. 2004) as well as the Mammalian Gene Collection (MGC) which contains 12,228 genes (Gerhard et al. 2004). These databases provide sequences enriched for the 5′ ends of genes, but they still contain a significant number of incomplete and artifactual sequences, emphasizing the need for further experimental validation to identify the true transcription start sites and corresponding promoters of all the genes in the human genome. The Eukaryotic Promoter Database is one such resource, but it currently contains only 1,871 human promoters (Cavin Perier et al. 1998; Praz et al. 2002), a small fraction of the estimated total.

[0005] Several technologies currently exist to study the functional regions of the human genome. Expression microarrays enable researchers to measure the steady state level of all the genes in the genome under different conditions. Another technique that combines chromatin immunoprecipitation and genomic microarrays (CHIP-chip) can determine the binding sites of a transcription factor across the genome. Sequencing the genomes of many different individuals and even different species can also show which sequences in the genome are under selective constraint. Additionally, assays of epigenetic modifications such as DNA-methylation status add more information to regulatory element studies. All of these experimental approaches produce valuable observations, but they do not directly measure the function of DNA regulatory elements. The present invention provides innovative solutions to problems in functional characterization of regulatory elements and uses of the information generated in the functional studies for research, diagnosis, prevention and treatment of diseases or conditions.

### SUMMARY OF THE INVENTION

[0006] The present invention relates to high throughput methods for structural and functional characterization of gene expression regulatory elements in a genome of an organism, preferably a mammalian genome, and more preferably a human genome. The gene expression regulatory elements include, but are not limited to transcriptional promoters, enhancers, insulators, suppressors, and inducers. In preferred embodiments, the regulator element is a transcriptional promoter. Each of the regulatory elements can be characterized in terms of its genomic location, sequence, variation, mutation, polymorphism, transcriptional regulatory activity in different cell or tissue type, and binding affinity with other regulatory factors, such as transcription factors. Information on the structure and function of the gene expression regulatory elements can have a wide variety of applications, including but not limited to diagnosis and treatment of diseases in a personalized manner (also known as “personalized medicine”) by association with phenotype such as disease resistance, disease susceptibility or drug response. Identification and characterization of the regulatory elements in terms of cell- or tissue-specificity can also aid in the design of gene therapy with enhanced therapeutic efficacy and reduced side effects. “Disease” includes but is not limited to any condition, trait or characteristic of an organism that it is desirable to change. For example, the condition may be physical, physiological or psychological and may be symptomatic or asymptomatic.

[0007] In one aspect of the invention, a method is provided for determining transcriptional regulatory activity of a plurality of different nucleic acid segments. The method comprises: operably linking each of the plurality of different nucleic acid segments with a reporter sequence in an expression vector such that expression of the reporter sequence is under transcriptional control of each of the different nucleic acid segments; expressing the reporter sequence; and determining the expression level of the reporter controlled by each of the different nucleic acid segments.

[0008] The plurality of different nucleic acid segments are preferably DNA segments derived from the region 5′ of the transcription start site of different genes, expanding a region from about +100 to about −3000 bp, optionally about +50 to about −2000, about +20 to about −1800, about +20 to about −1500, about +10 to about −1500, about +10 to about −1200, about +20 to about −1000, about +20 to about −900, about +20 to about −800, about +20 to about −700, about +20 to about −600, about +20 to about −500, about +20 to about −400, or about +20 to about −300, relative to a transcription start site (TSS). The diversity of the plurality of different nucleic acid segments can be at least 50, optionally at least about 80, 120, 160, 200, 400, 500, 600, 800, 1000, 1500, 2000, 3000, 5000, 8000, or 10,000. Examples of the plurality of different nucleic acid segments include, but are not limited to at least 2, optionally at least 5, 10, 20, 50, 100, 200, 500, 1000, 5000, 10000, or 25000 nucleotides selected from the group consisting of SEQ ID NOs: 1-45096 or fragments thereof.

[0009] The plurality of different DNA segments can be derived from the 5′ untranscribed region of different genes by using a computer-aided method for predicting putative transcriptional regulatory elements, such as promoters. The computer-aided method comprises: aligning a library of cDNA for different genes with a genome of an organism; defining a transcription start site for each of the different genes; and selecting a segment in the genome that comprises a sequence 5′ from the transcription start site, the selected segment constituting a member of the plurality of different DNA segments.

[0010] The methods of the present invention for selecting putative gene expression regulatory elements can be implemented in various configurations in a plurality of computing systems, including but not limited to supercomputers, personal computers, personal digital assistants (PDAs), networked computers, distributed computers on the internet or other microprocessor systems. The methods and systems described herein above are amenable to execution on various types of executable mediums other than a memory device such as a random access memory (RAM). Other types of executable mediums can be used, including but not limited to, a computer readable storage medium which can be any memory device, compact disc, zip disk or floppy disk.

[0011] The present invention also provides compositions, assemblies of articles, and kits, preferably for carrying out the methods of the present invention. For example, an array of different gene expression regulatory elements is provided, preferably an array of different transcriptional promoters. The diversity of the array is preferably at least 50, optionally at least 80, 120, 160, 200, 400, 500, 600, 800, 1000, 1500, 2000, 3000, 5000, 8000, 10,000, or 25,000. Also provided are a library of expression vectors each of which comprises a different gene expression regulatory element, preferably operably linked with a reporter sequence such that expression of the reporter sequence is under transcriptional control of each of the gene expression regulatory element. Examples of the different gene expression regulatory elements include, but are not limited to at least 2, optionally at least 5, 10, 20, 50, 100, 200, 500, 1000, 5000, 10000, or 25000 nucleotides selected from the group consisting of SEQ ID NOs: 1-45096 or fragments thereof, or nucleic acids having sequences with at least 70% homology thereto. Examples of the reporter sequence include but are not limited to genes encoding luciferase, fluorescent protein (such as green fluorescent protein), and β-galactosidase. In addition, kits are provided which comprise reagents and instructions for performing methods of the present invention, or for performing tests or assays utilizing any of the compositions, libraries, arrays, or assemblies of articles of the present invention. The kits may further comprise buffers, restriction enzymes, adaptors, primers, a ligase, a polymerase, dNTPS and instructions necessary for use of the kits.

[0012] The present invention also provides a method for determining the base present at a polymorphism of a transcriptional regulator element in the genome of an individual. The method comprises: providing a nucleic acid sample from the individual; amplifying a predetermined region of the transcriptional regulator element in the genome to produce a nucleic acid fragment; hybridizing a nucleic acid fragment to an array of different transcriptional regulator elements immobilized to a solid support; and generating a hybridization pattern resulting from the hybridization; and determining the base present at the polymorphism in the individual based upon an analysis of the hybridization pattern. The transcriptional regulator element is preferably a core promoter or an expanded promoter. The array of different transcriptional regulator elements are preferably the arrays provided in the present invention, and are capable of interrogating one or more polymorphic sites. The identity of the polymorphic base is determined from the hybridization information. The method can also be used to determine the base present at a polymorphism of a transcriptional regulator element in the genomes of a population of individuals.

[0013] In addition, the present invention provides a method for determining transcriptional activity of a plurality of transcriptional regulator elements in the genome of an individual. The method comprises: providing a nucleic acid sample from the individual; amplifying a predetermined region of a plurality of transcriptional regulator elements in the genome to produce a plurality of nucleic acid fragments; inserting each of the nucleic acid fragments into a reporter construct to generate a library of reporter constructs; expressing the library of reporter constructs in cells; and determining the transcriptional activity of the transcriptional regulator elements in the cells by correlating with the levels of reporter expressed in the cells. The method may further comprise: comparing the transcriptional activity of the transcriptional regulator elements with a profile of the same transcriptional regulator elements obtained from a reference sample. Examples of the plurality of transcriptional regulator elements include, but are not limited to at least 2, optionally at least 5, 10, 20, 50, 100, 200, 500, 1000, 5000, 10000, or 25000 nucleotides selected from the group consisting of SEQ ID NOs: 1-45096 or fragments thereof.

[0014] The method can be used for diagnosing a disease or condition associated with aberrant transcriptional activity of a regulatory element, such as beta-thalassemia, cardiovascular disease, Alzheimer disease, schizophrenia, bi-polar disorder, glaucoma, epilepsy, multiple sclerosis and lupus. The transcriptional activity of a particular regulatory element, such as a promoter, or a panel of promoters in the individual being tested can be compared with those of a panel of promoters in a reference sample derived from the same individual or another individual. A difference in the transcriptional activity may indicate that the individual being tested has a disease associated with aberrant transcriptional activity.

[0015] The method can also be used for treating a disease or condition associated with aberrant transcriptional activity of a regulatory element, such as beta-thalassemia, cardiovascular disease, Alzheimer disease, schizophrenia, bi-polar disorder, glaucoma, epilepsy, multiple sclerosis and lupus. The transcriptional activity of a particular regulatory element, such as a promoter, or a panel of promoters in the patient being treated can be compared with those of a panel of promoters in a reference sample derived from the same patient or another individual, and treating the patient with a therapeutic agent that regulates the transcriptional activity of the regulatory element.

[0016] In another aspect this invention provides a library of isolated nucleic acid molecules, each member of the library comprising a different, pre-determined nucleic acid segment from a genome, wherein the segment comprises transcription regulatory sequences, wherein: (a) the library has a diversity of at least 50 different nucleic acid segments; (b) each nucleic acid segment is naturally linked in the genome with a sequence expressed as a cDNA; and (c) the average length of the nucleic acid segments in the library is at least 600 nucleotides. In one embodiment a plurality of the isolated nucleic acid molecules in the library are selected from the group consisting of SEQ ID NOs: 1-45096.

[0017] In another aspect this invention provides a library of expression constructs, each member of the library comprising a different nucleic acid segment from a genome, wherein the segment comprises transcription regulatory sequences, operably linked with a heterologous reporter sequence in an expression vector such that expression of the reporter sequence is under transcriptional control of the transcription regulatory sequences, wherein: (a) the library has a diversity of at least 50 different nucleic acid segments; (b) each nucleic acid segment and is naturally linked in the genome with a sequence expressed as a cDNA; and (c) the average length of the nucleic acid segments in the library is at least 600 nucleotides.

[0018] In another aspect this invention provides a library of recombinant nucleic acid molecules, each member of the library comprising a different, determined nucleic acid segment from a genome linked with a heterologous nucleic acid molecule, wherein the segment comprises transcription regulatory sequences, wherein: (a) the library has a diversity of at least 50 different nucleic acid segments; (b) each nucleic acid segment is naturally linked in the genome with a sequence expressed as a cDNA; and (c) the average length of the nucleic acid segments in the library is at least 600 nucleotides.

[0019] In another aspect this invention provides a library of cells, wherein each cell in the library of cells comprises a different member of a library of expression constructs, wherein each member of the library of expression constructs comprises a different nucleic acid segment from a genome, wherein the segment comprises transcription regulatory sequences, operably linked with a heterologous reporter sequence in an expression vector such that expression of the reporter sequence is under transcriptional control of the transcription regulatory sequences, wherein: (a) the library has a diversity of at least 50 different nucleic acid segments; (b) each nucleic acid segment is naturally linked in the genome with a sequence expressed as a cDNA; and (c) the average length of the nucleic acid segments in the library is at least 600 nucleotides. In one embodiment the cells are human cells. In another embodiment the cells are non-human cells.

[0020] In another aspect this invention provides a collection of cells comprising within the cells a library of expression constructs, each member of the library of expression constructs comprising: a different nucleic acid segment from a genome, wherein the segment comprises transcription regulatory sequences, operably linked with a different heterologous reporter sequence in an expression vector such that expression of the reporter sequence is under transcriptional control of the transcription regulatory sequences.

[0021] In another aspect this invention provides a device comprising at least one plate comprising a plurality of wells, each well containing a different member of the library of cells, wherein each cell in the library of cells comprises a different member of the library of expression constructs, each expression construct comprising a different nucleic acid segment from a genome, wherein the segment comprises transcription regulatory sequences, operably linked with a heterologous reporter sequence in an expression vector such that expression of the reporter sequence is under transcriptional control of the transcription regulatory sequences and wherein each member of the library of cells has a known location among the wells.

[0022] In another aspect this invention provides a kit for characterizing a biological function of a target gene expression regulatory element, comprising: (a) a device comprising at least one plate comprising a plurality of wells, each well containing a different member of the library of expression constructs, each expression construct comprising a different nucleic acid segment from a genome, wherein the segment comprises transcription regulatory sequences operably linked with a heterologous reporter sequence in an expression vector such that expression of the reporter sequence is under transcriptional control of the transcription regulatory sequences, and wherein each member has a known location among the wells; and (b) reporter assay substrates. In one embodiment the kit further comprises instructions for characterizing the biological function of the target gene expression regulatory element.

[0023] In another aspect this invention provides a device comprising a solid substrate comprising a surface and nucleic acid molecules immobilized to the surface, each at a different known location, wherein each molecule comprises a nucleotide sequence of at least 10 nucleotides from a genomic segment comprising transcription regulatory sequences and the device comprises transcription regulatory sequences from at least 50 different genomic segments.

[0024] In another aspect this invention provides a system comprising: (a) a device of this invention; and (b) a reader adapted to detect a signal from an expressed reporter sequenced in each well of the device.

[0025] In one embodiment the device further comprises (c) software comprising: (i) code that executes an algorithm that normalizes signal from all wells of plates based on the signal from the control constructs. In another aspect this invention provides software comprising code that executes the aforementioned algorithm.

[0026] In another aspect this invention provides a method comprising: (a) providing a device comprising at least one plate comprising a plurality of wells, each well containing a different member of a library of cells, wherein each cell in the library of cells comprises a different member of the library of expression constructs, each expression construct comprising a different nucleic acid segment from a genome, wherein the segment comprises transcription regulatory sequences, operably linked with a heterologous reporter sequence in an expression vector such that expression of the reporter sequence is under transcriptional control of the transcription regulatory sequences and wherein each member of the library of cells has a known location among the wells; (b) culturing the cells; and (c) measuring the level of expression of the reporter sequence in each well.

[0027] In one embodiment the step of providing the device comprises: (i) providing a device comprising at least one plate comprising a plurality of wells, each well containing a different member of the library of expression constructs, wherein each member of the library of expression constructs has a known location among the wells; (ii) delivering cells to each of the wells; and (iii) transfecting the cells with the expression constructs. In another embodiment the method further comprises: (d) perturbing the cells in each well; (e) measuring the level of expression of the reporter sequence in each well; and (f) determining whether the level of expression in any well changed after contacting the cells with the test compound. In another embodiment of the method perturbing comprises contacting the cells in each well with a test compound, exposing the cells to different environmental conditions, or genetically modifying the cells either permanently or transiently such as by inducing mutation, overexpressing a transcript for example by transfecting with a cDNA or decreasing expression of a transcript by siRNA.

[0028] In another aspect this invention provides a method comprising: (a) providing a first device and second device, each device comprising at least one plate comprising a plurality of wells, each well containing a different member of a library of cells, wherein each cell in the library of cells comprises a different member of the library of expression constructs, each expression construct comprising a different nucleic acid segment from a genome, wherein the segment comprises transcription regulatory sequences, operably linked with a heterologous reporter sequence in an expression vector such that expression of the reporter sequence is under transcriptional control of the transcription regulatory sequences, wherein each member of the library of cells has a known location among the wells and wherein the first and second devices comprise cells of the same type and the library of expression constructs is the same in the first and second devices; (b) culturing the cells of the first and second devices under different culture conditions; (c) measuring the level of expression of the reporter sequence in each well; and (d) comparing the level of expression of the reporter sequence to each transcription regulatory sequence between the first cell type and the second cell type.

[0029] In another aspect this invention provides a method comprising: (a) providing a first device and second device, each device comprising at least one plate comprising a plurality of wells, each well containing a different member of a library of cells, wherein each cell in the library of cells comprises a different member of the library of expression constructs, each expression construct comprising a different nucleic acid segment from a genome, wherein the segment comprises transcription regulatory sequences, operably linked with a heterologous reporter sequence in an expression vector such that expression of the reporter sequence is under transcriptional control of the transcription regulatory sequences, wherein each member of the library of cells has a known location among the wells and wherein the first device comprises cells of a first type and second device comprises cells of a second type and the library of expression constructs is the same in the first and second devices; (b) culturing the cells of the first and second devices; (c) measuring the level of expression of the reporter sequence in each well; and (d) comparing the level of expression of the reporter sequence to each transcription regulatory sequence between the first cell type and the second cell type.

[0030] In another aspect this invention provides a method for evaluating the level of expression from constructs measured by the method of claim 46 comprising: (a) providing a set of cells comprising a set of control reporter constructs, each control reporter construct comprising a random genomic fragment operatively linked with the heterologous reporter sequence; (b) measuring the level of expression of the reporter sequence in each of cells; (c) determining a mean or average of the expression level among the control constructs; (d) determining, for the level of expression of each of the test constructs, a statistical distance from the mean or average; and (e) determining whether the deviation is statistically significant. In one embodiment the deviation is a standard deviation. In another embodiment random genomic fragments are random fragments selected from the genome of the same size distribution as the experimental fragments. In another embodiment the random genomic fragments are random fragments from middle exons of protein coding genes where the middle exon codes for protein and is a length of at least the size of the experimental fragments and at least 5,000 or 10,000 bases from a known transcription start site in the genome. In another embodiment activity and significance are calculated as a Z-score by the following equation: Z-score promoter activity=(raw promoter activity−mean of random controls)/standard deviation of the random controls. In another aspect this invention provides software comprising code that executes an algorithm that determines the mean and deviations of the method.

[0031] In another aspect this invention provides analysis software that integrates Z-score transformed promoter activity data with Z-score transformed functional data from DNA methylation experiments, transcription factor binding data, histone modification data, DNase hypersensitivity data, nucleosome displacement data or gene expression data.

[0032] In another aspect this invention provides a method for determining a methylation pattern in a sequence of nucleic acid comprising: (a) creating a first set of labeled nucleic acid segments by: (i) obtaining a nucleic acid molecule comprising the sequence from a source; and (ii) labeling the isolated nucleic acid molecule with a first label, whereby labeling creates a first set of labeled nucleic acid segments; (b) creating a second set of labeled nucleic acid segments by: (i) obtaining the nucleic acid molecule having the nucleotide sequence from the source; (ii) contacting the nucleic acid molecule with at least three methyl-sensitive restriction enzymes having different recognition sequences, wherein the enzymes cleave the nucleic acid molecule at un-methylated recognition sequences but not at methylated recognition sequences, thereby nucleic acid fragments; (iii) isolating nucleic acid fragments of at least 100 nucleotides from the mixture; and (iv) labeling the fragments with a second, different label, whereby labeling creates a second set of nucleic acid segments; (c) hybridizing the first and second labeled segments to one or more nucleic acid probes comprising the nucleotide sequence; and (d) determining areas of the nucleotide sequence that are differentially labeled by the first and second labeled segments, wherein differentially labeled areas are un-methylated areas of the nucleotide sequence. In one embodiment the nucleic acid molecule comprises transcription regulatory sequences. In another embodiment the method comprises contacting the nucleic acid molecules with at least six different methyl-sensitive enzymes. In another embodiment the first label generates a first color and the second label generates a second, different color. In another embodiment the method comprises hybridizing the segments to a plurality of probes that tile the nucleotide sequence of the nucleic acid molecules that would be predicted to be digested based on the methyl-sensitive restriction enzyme recognition sequences. In another embodiment the method further comprises performing the method a second time with nucleic acid from a second source, wherein the first and second sources are healthy and diseased tissues or two different types of diseased tissues.

[0033] In another aspect this invention provides a business method comprising commercializing any of the compositions, devices or methods described herein.

### INCORPORATION BY REFERENCE

[0034] All publications and patent applications mentioned in this specification are herein incorporated by reference to the same extent as if each individual publication or patent application was specifically and individually indicated to be incorporated by reference.

### BRIEF DESCRIPTION OF THE DRAWINGS

[0035] The novel features of the invention are set forth with particularity in the appended claims. A better understanding of the features and advantages of the present invention will be obtained by reference to the following detailed description that sets forth illustrative embodiments, in which the principles of the invention are utilized, and the accompanying drawings of which:

[0036] FIG. 1 is a clustergram of 642 putative promoter fragments. The clustergram illustrates the hierarchical clustering of promoter activity among 16 diverse cell lines. Each row indicates the promoter activity of a fragment in each of the cell lines with red indicating the degree of activity and black, no activity. Promoter activity has been normalized and log transformed to reflect comparable values between cell lines. Area A represents a cluster of promoter fragments with strong, ubiquitous activity in all cell lines and Area B represents a cluster of promoter fragments that exhibit variable function across the 16 cell types.

[0037] FIG. 2 illustrates that two promoters differentially regulate testin gene. A) Gene structure of testin (TES) gene. B and C) Promoter activity for promoters of the TES gene in 16 tested cell types represented as a transformed luciferase/renilla ratio. B) Promoter A shows activity in 12 of the 16 tissues, but little activity in two brain cell lines, U87 and T98G. C) Promoter B has significant activity only in U87 and T98G, both brain cell lines.

[0038] FIG. 3 illustrates reporter activity of promoter deletion constructs. A) Diagram of promoter deletion constructs. B) Average promoter activity observed for each of the 6 constructs of decreasing upstream sequence (1,000 bp, 500 bp, 350 bp, 200 bp, 90 bp, 40 bp). The average represents normalized activity of constructs in 45 promoters and seven cell lines (HT1080, HeLa, HCT116, G-402, AGS, T98G, and JEG3). The promoter activity, assayed in triplicate and represented as normalized luciferase/renilla ratio, provides a transfection-normalized value to compare activity within and between cell lines. C) Average activities of promoter fragments for the UDP-glycosyltransferase gene (UGT1A10) across seven cell types. D) Average activities of sperm-associated antigen 4 (SPAG4) promoter fragments across seven cell types. The 898 bp fragment of the SPAG4 promoter shows considerably less activity than the 372 bp fragment.

[0039] FIG. 4 illustrates reporter activity of a negative regulatory element in SPAG4 promoter. Average promoter activity across two cell types, HT1080 and HCT116, of six constructs: 1, SPAG4-372 bp fragment. 2, SPAG4 372 bp promoter cloned in tandem duplicate to control for size. 3, 500 bp of random sequence cloned upstream of the SPAG4 372 bp promoter. 4, SPAG4 898 bp fragment. 5, SPAG4-898 to −372 fragment cloned upstream of heterologous promoter A. 6, SPAG4-8984372 fragment upstream of heterologous promoter B. Error bars indicate one standard deviation from the mean of four replicates of each construct.

[0040] FIG. 5 is a Scatterplot of endogenous RNA transcript levels versus promoter activity. RNA levels, expressed as absolute genomic equivalents, are plotted on the X-axis and the normalized promoter activity is shown on the Y-axis. The correlation coefficient was calculated, r=0.53. (R²=0.28). Quadrants boundaries are set by the median RNA transcript level (0.17 genomic equivalents) and median promoter activity (2.69 luciferase/renilla ratio).

[0041] FIG. 6 shows Table 1. Promoter Activity by Class. Multi-exon and single-exon predictions are subdivided and exhibit significantly different validation rates. Further classification by longest cDNA promoter and alternative (internal) promoter show higher success among longest cDNA predictions within both categories. High Confidence predictions (HiConf) indicate support for a transcription start site either by a RefSeq gene or greater than 1 cDNA within the gene model used for the prediction.

[0042] FIG. 7 shows Table 2. Locations of promoter-binding factors, TAF1 and RNAP II overlap functional promoters. Column 1: number of binding sites for each factor. Column 2: number of all promoter predictions that overlap the binding sites. Column 3: number of binding sites tested by transient transfection reporter assay. Column 4: number and percentage of overlapping fragments with promoter activity.

[0043] FIG. 8A schematically illustrates a method for identifying, isolating and functionally analyzing a large number of regulatory elements, such as human transcriptional promoters.

[0044] FIG. 8B schematically illustrates another embodiment of the method for identifying, isolating and functionally analyzing a large number of regulatory elements, such as human transcriptional promoters.

[0045] FIG. 9A schematically illustrates an embodiment of the method for predicting transcriptional promoters.

[0046] FIG. 9B schematically illustrates another embodiment of the method for predicting transcriptional promoters.

[0047] FIG. 10A schematically illustrates an embodiment of the method for isolating promoters and cloning them into a reporter vector.

[0048] FIG. 10B schematically illustrates another embodiment of the method for isolating promoters and cloning them into a reporter vector.

[0049] FIG. 11A schematically illustrates an embodiment of the method for detecting transcriptional activity of a plurality of promoters in a high throughput manner.

[0050] FIG. 11B schematically illustrates another embodiment of the method for detecting transcriptional activity of a plurality of promoters in a large scale, high throughput manner.

[0051] FIG. 12A schematically illustrates an embodiment of the method for analyzing data obtained in a functional assay of a plurality of promoters.

[0052] FIG. 12B schematically illustrates another embodiment of the method for analyzing data obtained in a functional assay of a large number of promoters.

[0053] FIG. 13 schematically illustrates an embodiment of the method for large scale, high throughput determination of methylation status of promoters genome-wide.

[0054] FIG. 14 schematically shows a gene model that includes each type of the transcription start sites (TSS) and the cDNAs that define them. The promoter prediction algorithm (PPA) according to the present invention defines a gene model as all the collection of cDNAs with at least one base of exon overlap with at least one other cDNA in the same genomic region on the same strand. After the PPA assembles all the cDNAs into gene models, it predicts the TSS within the gene models. TSSs are classified based on their location in the gene model and from the type of cDNA that establishes that TSS. For each gene model, there is a 5′ boundary and a cDNA that defines that most 5′ TSS. Some gene models have cDNAs that predict alternative TSSs downstream of the most 5′ TSS. The PPA predicts alternative TSSs based on these full-length cDNAs from the MGC, DBTSS, or RefSeq that are at least 500 bases downstream of the next closest cDNA. In addition, an alternative TSS is predicted if a cDNA has a first exon that does not overlap any exons from longer cDNAs in the same gene model. A unique first exon increases the confidence in that particular TSS, because it is less likely to be an artificially truncated form of the gene. Because of the issues raised above concerning single-exon cDNAs, the PPA filters out any alternative TSSs predicted by a single-exon cDNA in that gene model. The gene-model building approach and TSS category classifications are described in detail in the accompanying text.

[0055] FIG. 15 shows a table summarizing the output of PPA v1.1 and PPA v1.2. PPA v1.1 predicts 64,526 promoters and PPA v1.2 predicts 45,096 promoters (the sequences of which are designated SEQ ID NOs: 1-45096 listed in the attached CD) in the human genome. The increase in the proportion of predicted promoters representing the 5′ most category, alternative first exons and multi-exon gene models taken with a decrease in the proportion of predicted promoters associated with pseudogenes, putative single-exon genes and random sequence alignments indicate that this 30% reduction in overall promoter number largely represents a reduction of noise that was present in PPA v1.1. Therefore, PPA v1.2 is a significant improvement over PPA v1.1 and is significantly more specific without sacrificing sensitivity. In addition, the ability of the two versions was compared to identify promoters present in the Eukaryotic Promoter Database (EPD), a publicly available database containing ˜1,800 promoter sequences previously identified in the published literature. The overlap with the EPD sequences is very similar with the two versions, again indicating that PPA v1.2 is removing noise from the predictions without losing sensitivity to detect true promoters.

[0056] FIG. 16 shows a table listing proportions of predicted promoter sequences clonable using different sets of restriction enzyme pairs. To facilitate ligation-based cloning of promoter fragments into a reporter vector, a restriction enzyme site sequence is added to the forward and reverse primers for each promoter. For directional cloning, one sequence is added to the forward primer and a different sequence to the reverse primer. If such an approach is to be effective, the amplified promoter sequence to be cloned is preferred not to contain the restriction site sequence to be added to the primers. Preferably, the PPA of the present invention screens each promoter sequence, and one of three restriction site pairs is used depending on which sites are absent in the promoter sequence. Based on the genome-wide promoter analysis, employing three restriction enzyme pairs covers 97% of all of the promoters of the genome whereas using a single pair will cover between 55-78% depending on the pair of enzymes used.

[0057] FIG. 17 shows a table listing predicted and observed percentage of unique clones recovered at different levels of sequencing coverage using pooled cloning strategy.

### DETAILED DESCRIPTION OF THE INVENTION

1. Definitions

[0058] As used herein, the term “nucleic acid” refers to single-stranded and/or double-stranded polynucleotides such as deoxyribonucleic acid (DNA), and ribonucleic acid (RNA) as well as analogs or derivatives of either RNA or DNA. Also included in the term “nucleic acid” are analogs of nucleic acids such as peptide nucleic acid (PNA), phosphorothioate DNA, and other such analogs and derivatives or combinations thereof. Thus, the term also should be understood to include, as equivalents, derivatives, variants and analogs of either RNA or DNA made from nucleotide analogs, single (sense or antisense) and double-stranded polynucleotides, including double-stranded RNA. Deoxyribonucleotides include deoxyadenosine, deoxycytidine, deoxyguanosine and deoxythymidine. For RNA, the uracil base is uridine.

[0059] As used herein, the term “polynucleotide” refers to an oligomer or polymer containing at least two linked nucleotides or nucleotide derivatives, including a deoxyribonucleic acid (DNA), a ribonucleic acid (RNA), and a DNA or RNA derivative containing, for example, a nucleotide analog or a “backbone” bond other than a phosphodiester bond, for example, a phosphotriester bond, a phosphoramidate bond, a phophorothioate bond, a thioester bond, or a peptide bond (peptide nucleic acid). The term “oligonucleotide” also is used herein essentially synonymously with “polynucleotide,” although those in the art recognize that oligonucleotides, for example, PCR primers, generally are less than about fifty to one hundred nucleotides in length.

[0060] Nucleotide analogs contained in a polynucleotide can be, for example, mass modified nucleotides, which allows for mass differentiation of polynucleotides; nucleotides containing a detectable label such as a fluorescent, radioactive, luminescent or chemiluminescent label, which allows for detection of a polynucleotide; or nucleotides containing a reactive group such as biotin or a thiol group, which facilitates immobilization of a polynucleotide to a solid support. A polynucleotide also can contain one or more backbone bonds that are selectively cleavable, for example, chemically, enzymatically or photolytically. For example, a polynucleotide can include one or more deoxyribonucleotides, followed by one or more ribonucleotides, which can be followed by one or more deoxyribonucleotides, such a sequence being cleavable at the ribonucleotide sequence by base hydrolysis. A polynucleotide also can contain one or more bonds that are relatively resistant to cleavage, for example, a chimeric oligonucleotide primer, which can include nucleotides linked by peptide nucleic acid bonds and at least one nucleotide at the 3′ end, which is linked by a phosphodiester bond or other suitable bond, and is capable of being extended by a polymerase. Peptide nucleic acid sequences can be prepared using well known methods (see, for example, Weiler et al. Nucleic acids Res. 25: 2792-2799 (1997)).

[0061] As used herein, to hybridize under conditions of a specified stringency is used to describe the stability of hybrids formed between two single-stranded DNA fragments and refers to the conditions of ionic strength and temperature at which such hybrids are washed, following annealing under conditions of stringency less than or equal to that of the washing step. Typically high, medium and low stringency encompass the following conditions or equivalent conditions thereto:
[0062] 1) high stringency: 0.1×SSPE or SSC, 0.1% SDS, 65° C.;
[0063] 2) medium stringency: 0.2×SSPE or SSC, 0.1% SDS, 50° C.;
[0064] 3) low stringency: 1.0×SSPE or SSC, 0.1% SDS, 50° C.

[0065] Equivalent conditions refer to conditions that select for substantially the same percentage of mismatch in the resulting hybrids. Additions of ingredients, such as formamide, Ficoll, and Denhardt's solution affect parameters such as the temperature under which the hybridization should be conducted and the rate of the reaction. Thus, hybridization in 5×SSC, in 20% formamide at 42° C. is substantially the same as the conditions recited above hybridization under conditions of low stringency. The recipes for SSPE, SSC and Denhardt's and the preparation of deionized formamide are described, for example, in Sambrook et al. (1989) Molecular Cloning, A Laboratory Manual, Cold Spring Harbor Laboratory Press, Chapter 8; see, Sambrook et al., vol. 3, p. B. 13, see, also, numerous catalogs that describe commonly used laboratory solutions). It is understood that equivalent stringencies can be achieved using alternative buffers, salts and temperatures.

[0066] The term “substantially” identical or homologous or similar varies with the context as understood by those skilled in the relevant art and generally means at least 70%, preferably means at least 80%, more preferably at least 90%, and most preferably at least 95% identity.

[0067] The term “fragment,” “segment,” or “DNA segment” refers to a portion of a larger DNA polynucleotide or DNA. A polynucleotide, for example, can be broken up, or fragmented into, a plurality of segments. Various methods of fragmenting nucleic acids are well known in the art. These methods may be, for example, either chemical or physical in nature. Chemical fragmentation may include partial degradation with a DNAse; partial depurination with acid; the use of restriction enzymes; intron-encoded endonucleases; DNA-based cleavage methods, such as triplex and hybrid formation methods, that rely on the specific hybridization of a nucleic acid segment to localize a cleaveage agent to a specific location in the nucleic acid molecule; or other enzymes or compounds which cleave DNA at known or unknown locations. Physical fragmentation methods may involve subjecting the DNA to a high shear rate. High shear rates may be produced, for example, by moving DNA through a chamber or channel with pits or spikes, or forcing the DNA sample through a restricted size flow passage, e.g., an aperture having a cross sectional dimension in the micron or submicron scale. Other physical methods include sonication and nebulization. Combinations of physical and chemical fragmentation methods may likewise be employed such as fragmentation by heat and ion-mediated hydrolysis. See for example, Sambrook et al., “Molecular Cloning: A Laboratory Manual,” 3rd Ed. Cold Spring Harbor Laboratory Press, Cold Spring Harbor, N.Y. (2001) (“Sambrook et al.”) which is incorporated herein by reference in its entirety for all purposes. These methods can be optimized to digest a nucleic acid into fragments of a selected size range. Useful size ranges may be from 100, 200, 400, 700 or 1000 to 500, 800, 1500, 2000, 4000 or 10,000 base pairs. However, larger size ranges such as 4000, 10,000 or 20,000 to 10,000, 20,000 or 500,000 base pairs may also be useful.

[0068] Methods of ligation will be known to those of skill in the art and are described, for example in Sambrook et al. and the New England BioLabs catalog, both of which are incorporated herein in their entireties by reference for all purposes. Methods include using T4 DNA ligase, which catalyzes the formation of a phosphodiester bond between juxtaposed 5 phosphate and 3′ hydroxyl termini in duplex DNA or RNA with blunt or and sticky ends; Taq DNA ligase, which catalyzes the formation of a phosphodiester bond between juxtaposed 5′ phosphate and 3′ hydroxyl termini of two adjacent oligonucleotides that are hybridized to a complementary target DNA; E. coli DNA ligase, which catalyzes the formation of a phosphodiester bond between juxtaposed 5′-phosphate and 3′-hydroxyl termini in duplex DNA containing cohesive ends; and T4 RNA ligase which catalyzes ligation of a 5′ phosphoryl-terminated nucleic acid donor to a 3′ hydroxyl-terminated nucleic acid acceptor through the formation of a 3′->5′ phosphodiester bond, substrates include single-stranded RNA and DNA as well as dinucleoside pyrophosphates; or any other methods described in the art.

[0069] “Genome” designates or denotes the complete, single-copy set of genetic instructions for an organism as coded into the DNA of the organism. A genome may be multi-chromosomal such that the DNA is distributed among a plurality of individual chromosomes. For example, in human there are 22 pairs of chromosomes plus a gender associated XX or XY pair.

[0070] “Polymorphism” refers to the occurrence of two or more genetically determined alternative sequences or alleles in a population. A polymorphic marker or site is the locus at which divergence occurs. Preferred markers have at least two alleles, each occurring at a frequency of preferably greater than 1%, and more preferably greater than 10% or 20% of a selected population. A polymorphism may comprise one or more base changes, an insertion, a repeat, or a deletion. A polymorphic locus may be as small as one base pair. Polymorphic markers include restriction fragment length polymorphisms, variable number of tandem repeats (VNTR's), hypervariable regions, minisatellites, dinucleotide repeats, trinucleotide repeats, tetranucleotide repeats, simple sequence repeats, and insertion elements such as Alu. The first identified allelic form is arbitrarily designated as the reference form and other allelic forms are designated as alternative or variant alleles. The allelic form occurring most frequently in a selected population is sometimes referred to as the wildtype form. Diploid organisms may be homozygous or heterozygous for allelic forms. A diallelic polymorphism has two forms. A triallelic polymorphism has three forms. A polymorphism between two nucleic acids can occur naturally, or be caused by exposure to or contact with chemicals, enzymes, or other agents, or exposure to agents that cause damage to nucleic acids, for example, ultraviolet radiation, mutagens or carcinogens.

[0071] Single nucleotide polymorphisms (SNPs) are positions at which two alternative bases occur in the human population, and are the most common type of human genetic variation. The site is usually preceded by and followed by highly conserved sequences of the allele (e.g., sequences that vary in less than 1/100 or 1/1000 members of the populations). It is estimated that there are as many as 3×10⁶ SNPs in the human genome. Variations that occur at a rate of at least 10% are referred to as common SNPs.

[0072] A single nucleotide polymorphism usually arises due to substitution of one nucleotide for another at the polymorphic site. A transition is the replacement of one purine by another purine or one pyrimidine by another pyrimidine. A transversion is the replacement of a purine by a pyrimidine or vice versa. Single nucleotide polymorphisms can also arise from a deletion of a nucleotide or an insertion of a nucleotide relative to a reference allele.

[0073] The term genotyping refers to the determination of the genetic information an individual carries at one or more positions in the genome. For example, genotyping may comprise the determination of which allele or alleles an individual carries for a single polymorphism or the determination of which allele or alleles an individual carries for a plurality of polymorphisms.

[0074] As used herein, “profiling” refers to detection and/or identification of a plurality of components, generally 3 or more, such as 4, 5, 6, 7, 8, 10, 50, 100, 500, 1000, 10⁴, 10⁵, 10⁶, 10⁷, or more, in a sample. A profile can include the identified loci to which components of a sample detectably bind or are otherwise located. The profile can be detected, e.g., in a multi-well plate, or as a pattern on a solid surface, in which case the profile can be presented as an visual image. The profile can be in the form of a list or database or other such compendium.

[0075] As used herein, an image refers to a collection of data points representative of a profile. An image can be a visual, graphical, tabular, matrix or other depiction of such data. It can be stored in a database.

[0076] As used herein, a database refers to a collection of data items.

[0077] As used herein, in an addressable collection of components of interest, such as a library of transcription regulatory elements (with pre-determined sequences), expression vectors encoding transcription regulatory elements, and cells containing expression vectors encoding transcription regulatory elements, each member of the collection is labeled and/or is positionally located to permit identification of each of member of the components. The addressable collection is typically an array or other encoded (such as bio-barcoded with unique nucleic acid tags) collection in which each locus contains a single, unique component and is identifiable. The collection can be in the liquid phase if other discrete identifiers, such as chemical, electronic, colored, fluorescent or other tags are included.

[0078] As used herein, an address refers to a unique identifier whereby an addressed entity can be identified. An addressed moiety is one that can be identified by virtue of its address. Addressing can be effected by position on a surface or by other identifier, such as a tag encoded with a bar code or other symbology, a chemical tag, an electronic, such RF tag, a color-coded tag or other such identifier.

[0079] As used herein, a nucleotide barcode refers to a specific type of address, more specifically, predesigned, predetermined and unique nucleotide sequence tag which can be used to uniquely identify each member in a collection of transcription regulatory elements, expression vectors encoding transcription regulatory elements, and cells containing expression vectors encoding transcription regulatory elements. Such a nucleic acid barcode may be 3-200, 5-200, 8-100, or 10-50 nucleotides in length, and discrete and tailorable hybridization and melting properties. Barcodes are heterologous to the molecules they tag.

[0080] An “array” comprises a support, preferably solid, comprising a plurality of different, known locations at which an item can be placed. Arrays include, for example, microtiter plates with addressable wells and chips comprising bound molecules at addressable locations. Members of the array may be identified by virtue of an identifiable or detectable label, such as by color, fluorescence, electronic signal (i.e., RF, microwave or other frequency that does not substantially alter the interaction of the molecules of interest), bar code (such as bio-barcode with unique nucleic acid tags) or other symbology, chemical or other such label. For example, the members of the array may be positioned in a container such as a well of a multi-well plate (such as a microtiter plate with 96, 384, or 1536 loci) or a vial, or immobilized to discrete identifiable loci on the surface of a solid phase or directly or indirectly linked to or otherwise associated with the identifiable label, such as affixed to a microsphere or other particulate support (herein referred to as beads) and suspended in solution or spread out on a surface. A microarray, which is used by those of skill in the art, generally is a positionally addressable array, such as an array on a solid support, in which the loci of the array are at high density. Examples of hybridization arrays, also described as “microarrays” or colloquially “chips” have been generally described in the art, for example, U.S. Pat. Nos. 5,143,854, 5,445,934, 5,744,305, 5,677,195, 5,800,992, 6,040,193, 5,424,186 and Fodor et al., Science, 251:767-777 (1991).

[0081] Arrays may generally be produced using a variety of techniques, such as mechanical synthesis methods or light directed synthesis methods that incorporate a combination of photolithographic methods and solid phase synthesis methods. Techniques for the synthesis of these arrays using mechanical synthesis methods are described in, e.g., U.S. Pat. Nos. 5,384,261, and 6,040,193, which are incorporated herein by reference in their entirety for all purposes. Although a planar array surface is preferred, the array may be fabricated on a surface of virtually any shape or even a multiplicity of surfaces. Arrays may be nucleic acids on beads, gels, polymeric surfaces, fibers such as fiber optics, glass or any other appropriate substrate. (See U.S. Pat. Nos. 5,770,358, 5,789,162, 5,708,153, 6,040,193 and 5,800,992.)

[0082] As used herein, a support (also referred to as a matrix support, a matrix, an insoluble support or solid support) refers to any solid or semisolid or insoluble support to which an item, e.g., a molecule of interest, typically a biological molecule, organic molecule or biospecific ligand can be linked or contacted. Such materials include any materials that are used as affinity matrices or supports for chemical and biological molecule syntheses and analyses, such as, but are not limited to: polystyrene, polycarbonate, polypropylene, nylon, glass, dextran, chitin, sand, pumice, agarose, polysaccharides, dendrimers, buckyballs, polyacrylamide, silicon, rubber, and other materials used as supports for solid phase syntheses, affinity separations and purifications, hybridization reactions, immunoassays and other such applications. The matrix herein can be particulate or can be a be in the form of a continuous surface, such as a microtiter dish or well, a glass slide, a silicon chip, a nitrocellulose sheet, nylon mesh, or other such materials.

[0083] As used herein, matrix or support particles refer to matrix materials that are in the form of discrete particles. The particles have any shape and dimensions, but typically have at least one dimension that is 100 μm or less, 50 μm or less and typically have a size that is 100 mm³ or less, 50 mm³ or less, 10 mm³ or less, and 1 mm³ or less, 100 μm³ or less and may be order of cubic microns. Such particles are collectively called “beads.” They are often, but not necessarily, spherical. Such reference, however, does not constrain the geometry of the matrix, which can be any shape, including random shapes, needles, fibers, and elongated. Roughly spherical “beads”, particularly microspheres that can be used in the liquid phase, are also contemplated. The “beads” can include additional components, such as magnetic or paramagnetic particles (see, e.g., Dyna beads (Dynal, Oslo, Norway)) for separation using magnets, as long as the additional components do not interfere with the methods and analyses herein.

[0084] As used herein, a “library” is a collection of items. In certain embodiments the library is “addressable,” i.e., members of the library comprise an identifying tag or are physically located at a different, discrete, known locations, such as contained within different wells of a multi-well plate or different containers.

[0085] As used herein, “array library” refers to the collections of addressable elements or components created by physical separation of the mixed library into a number of discrete collections.

[0086] As used herein, biological sample refers to any sample obtained from a living or viral source and includes any cell type or tissue of a subject from which nucleic acid or protein or other macromolecule can be obtained. Biological samples include, but are not limited to, cell lystates, cells, body fluids, such as blood, plasma, serum, cerebrospinal fluid, synovial fluid, urine and sweat, tissue and organ samples from animals and plants, such as humans, non-human mammals such as monkeys, dogs, pigs, horses, cats, rabbits, rats, and mice, and other vertebrates such as birds and fish. Also included are soil and water samples and other environmental samples, viruses, bacteria, fungi algae, protozoa and components thereof. The methods herein can be practiced using biological samples and in some embodiments, such as for profiling, can also be used for testing any sample.

[0087] As used herein, “a reporter gene construct” is a nucleic acid molecule that includes a nucleic acid encoding a reporter operatively linked to a transcriptional control sequences. Transcription of the reporter gene is controlled by these sequences. The activity of at least one or more of these control sequences is directly or indirectly regulated by transcription factors and other proteins or biomolecules. The transcriptional control sequences include the promoter and other regulatory regions, such as enhancer sequences, that modulate the activity of the promoter, or control sequences that modulate the activity or efficiency of the RNA polymerase that recognizes the promoter, or control sequences are recognized by effector molecules. Such sequences are herein collectively referred to as transcriptional regulatory elements or sequences.

[0088] As used herein, “reporter” or “reporter moiety” refers to any moiety that allows for the detection of a molecule of interest, such as a protein expressed by a cell, or a biological particle. Typical reporter moieties include, include, for example, light emitting proteins such as luciferase, fluorescent proteins, such as red, blue and green fluorescent proteins (see, e.g., U.S. Pat. No. 6,232,107, which provides GFPs from Renilla species and other species), the lacZ gene from E. coli, alkaline phosphatase, secreted embryonic alkaline phosphatase (SEAP), chloramphenicol acetyl transferase (CAT), hormones and cytokines and other such well-known genes. For expression in cells, nucleic acid encoding the reporter moiety can be expressed as a fusion protein with a protein of interest or under to the control of a promoter of interest. The expression of these reporter genes can also be monitored by measuring levels of mRNA transcribed from these genes.

[0089] As used herein, the phrase “operatively linked” generally means the sequences or segments have been covalently joined into one piece of DNA, whether in single or double stranded form, whereby control or regulatory sequences on one segment control or permit expression or replication or other such control of other segments. The two segments are not necessarily contiguous. It means a juxtaposition between two or more components so that the components are in a relationship permitting them to function in their intended manner. Thus, in the case of a regulatory region operatively linked to a reporter or any other polynucleotide, or a reporter or any polynucleotide operatively linked to a regulatory region, expression of the polynucleotide/reporter is influenced or controlled (e.g., modulated or altered, such as increased or decreased) by the regulatory region. For gene expression a sequence of nucleotides and a regulatory sequence(s) are connected in such a way to control or permit gene expression when the appropriate molecular signal, such as transcriptional activator proteins, are bound to the regulatory sequence(s). Operative linkage of heterologous nucleic acid, such as DNA, to regulatory and effector sequences of nucleotides, such as promoters, enhancers, transcriptional and translational stop sites, and other signal sequences refers to the relationship between such DNA and such sequences of nucleotides. For example, operative linkage of heterologous DNA to a promoter refers to the physical relationship between the DNA and the promoter such that the transcription of such DNA is initiated from the promoter by an RNA polymerase that specifically recognizes, binds to and transcribes the DNA in reading frame.

[0090] As used herein, regulatory molecule refers to a polymer of deoxyribonucleic acid (DNA) or ribonucleic acid (RNA), or an oligonucleotide mimetic, or a polypeptide or other molecule that is capable of enhancing or inhibiting expression of a gene.

[0091] As used herein, the term “regulatory region” means a nucleotide sequence that influences expression, positively or negatively, of an operatively linked gene. Regulatory regions include sequences of nucleotides that confer inducible (i.e., require a substance or stimulus for increased transcription) expression of a gene. When an inducer is present, or at increased concentration, gene expression increases. Regulatory regions also include sequences that confer repression of gene expression (i.e., a substance or stimulus decreases transcription). When a repressor is present or at increased concentration, gene expression decreases. Regulatory regions are known to influence, modulate or control many in vivo biological activities including cell proliferation, cell growth and death, cell differentiation and immune-modulation. Regulatory regions typically bind one or more trans-acting proteins which results in either increased or decreased transcription of the gene. In certain embodiments, the regulatory regions are cis-acting.

[0092] Particular examples of gene regulatory regions are promoters and enhancers. Promoters are sequences located around the transcription start site, typically positioned 5′ of the transcription start site. Enhancers are known to influence gene expression when positioned 5′ or 3′ of the gene, or when positioned in or a part of an exon or an intron. Enhancers also can function at a significant distance from the gene, for example, at a distance from about 3 Kb, 5 Kb, 7 Kb, 10 Kb, 15 Kb or more.

[0093] As used herein, a promoter region refers to the portion of DNA of a gene that controls transcription of the DNA to which it is operatively linked. The promoter region includes specific sequences of DNA that are sufficient for RNA polymerase recognition, binding and transcription initiation. This portion of the promoter region is referred to as the core promoter. In addition, the promoter region includes sequences that modulate this recognition, binding and transcription initiation activity of the RNA polymerase. These sequences can be cis acting or can be responsive to trans acting factors. Promoters, depending upon the nature of the regulation, can be constitutive or regulated.

[0094] Regulatory regions also include, in addition to promoter regions, sequences that facilitate translation, splicing signals for introns, maintenance of the correct reading frame of the gene to permit in-frame translation of mRNA and, stop codons, leader sequences and fusion partner sequences, internal ribosome binding sites (IRES) elements for the creation of multigene, or polycistronic, messages, polyadenylation signals to provide proper polyadenylation of the transcript of a gene of interest and stop codons and can be optionally included in an expression vector.

[0095] As used herein, a composition refers to any mixture. It can be a solution, a suspension, liquid, powder, a paste, aqueous, non-aqueous or any combination thereof.

[0096] As used herein, a combination refers to any association between among two or more items. The combination can be two or more separate items, such as two compositions or two collections, can be a mixture thereof, such as a single mixture of the two or more items, or any variation thereof.

[0097] As used herein, a kit refers to a packaged combination, optionally including instructions and/or reagents for their use.

[0098] As used herein, two nucleic acid segments are “heterologous” with respect to each other if their sequences are not found in the same genome or are not normally linked to one another within 10000 nucleotides in the same genome.

[0099] As used herein, a nucleic acid molecule is “isolated” if it is removed from its natural milieu in a genome and/or cell.

[0100] A nucleic acid molecule is “pure” or “purified” if it is the predominant biomolecular species in a mixture.

2. Introduction

[0101] The present invention relates to high throughput methods for structural and functional characterization of gene expression regulatory elements in a genome of an organism, preferably a mammalian genome, and more preferably a human genome. The inventive methods can be utilized as a high-throughput and easy-to-use system for characterization of the regulatory elements on a large scale, preferably on a genome-wide scale. Compositions, assemblies, libraries, arrays and kits are also provided to allow one to measure activity of the regulatory element in the genome in multiple experimental conditions in an efficient and economic way. In preferred embodiments, promoter macroarrays are provided for determining transcription factor binding and promoter activity on the same DNA fragment. Such functional libraries or arrays of the regulatory elements can have a wide variety of applications in research, diagnosis, prevention and treatment of diseases or conditions.

[0102] In one aspect, by using the invention, activity of a large number of different regulatory elements can be assessed or determined across diverse cell types or through a differentiation time-course to find tissue-specific and ubiquitous promoters. The activity of the regulatory elements can be detected or determined under different conditions, such as before and after the addition of an siRNA, cDNA, or other compound or drug to identify promoters that are up-regulated or down-regulated in response to a specific treatment. Effects of transcription factors binding to the regulatory element can also be assessed efficiently. The collection of these regulatory elements can be further analyzed for a sequence motif that is functionally relevant, for status of DNA methylation or other epigenetic modifications.

[0103] In another aspect, the functional arrays provided by the present invention enables researchers to directly measure the functional activity of promoter fragments that the previous approaches do not. In addition, the spotted promoter arrays or oligo-based promoter arrays also enable chromatin immunoprecipitation and methylation studies to be performed on the exact same promoter fragments and with an intergrated computational platform. The integration of multiple types of independent data related to promoter function provides a profoundly new capability in the study of genome-wide transcriptional regulation. This process and methodology allow, for the first time, the simultaneous study of promoter activity, transcription factor binding, and DNA methylation on a large number of promoter fragments throughout the human genome.

[0104] While not wishing to be bound by theory, it is believed that functional assays are important because although experimental tools like expression microarrays and chromatin immunoprecipitation produce valuable observations, they do not explain the mechanism or function of the DNA regulatory elements themselves. Functional data from promoters can show that increased promoter activity and thus increased rates of transcription initiation result in high transcript levels detected in a microarray experiment rather than post-transcriptional mechanisms that stabilize the transcript. Furthermore, the promoter functional assay localizes the activity of interest to a specific DNA fragment and enables the discovery of the exact functional motifs contained in that region.

[0105] It is also believed that any one experimental platform alone is not sufficient to fully describe a biological system. A gene may be highly expressed as measured by a microarray based on nucleic acid hybridization, but it cannot be determined why. A transcription factor may bind near a particular gene in the genome, but the functional consequences of binding cannot be determined. A stretch of sequence may be highly conserved, but the reason natural selection has acted to preserve this sequence is unknown. A promoter may be methylated in one cell type and unmethylated in another, but the functional consequences of this difference is not immediately clear. In addition, a promoter may show increased activity in a cell-based functional assay upon the addition of a compound, but one can only make guesses as to why its activity changed without other lines of experimental evidence. Each experimental approach also has its own inherent biases and unique issues related to that particular approach. Thus, the inventors believe that it is only when researchers integrate the information gathered from many diverse techniques they are able to gain a full picture of a biological system, independent of the limitations specific to any one experiment.

[0106] The present invention provides an innovative methodology and products to facilitate an integrated approach to regulatory element network analysis and use the information generated therefrom for researching the molecular genetic mechanisms of predisposition, onset and/or development of diseases, for development of effective measures for diagnosis, prevention and treatment of diseases.

3. Libraries of Transcription Regulatory Elements

[0107] This invention provides a library of genomic nucleic acid segments comprising transcription regulatory elements. The libraries of this invention are characterized by, among other things, the length of the segments that populate the library and the high percentage of segments in which the transcriptional regulatory elements naturally control the transcription of mRNAs with biological function (that is, mRNAs that play a biological role in an organism). In one embodiment, the human genomic segments of this invention can be selected using an algorithm that is described in FIG. 9B, and more fully described in the examples.

[0108] Each genomic nucleic acid segment selected for the library is operatively linked in nature with a sequence in the genome that aligns with a known cDNA molecule. The library comprises a low percentage of segments (e.g., less than 30%, 25%, 20%, 15%, 10%, 5%, 2%, or 1%) that are linked to cDNA alignment artifacts. These artifacts result from inaccuracies of the alignment algorithm or from genomic DNA contamination of the original cDNA libraries that were sequenced. These artifacts are identified as intronless (ungapped) alignments represented by a small number of independent cDNAs from existing cDNA libraries, as pseudogenes and as single exon genes. More specifically, a library of genetic sequences, such a GenBank, contains a number of molecules reported as cDNAs. When these sequences are aligned against the sequence of the genome, certain locations of the genome are mapped by many reported cDNAs, so that the alignment cannot be considered random: One can be highly confident that these locations represent biologically relevant cDNAs and that the up-stream sequences are active transcription regulatory sequences. Other locations in the genome are mapped by few reported cDNAs or none. If the cDNA sequences are unspliced (that is they contain no introns) and the number of cDNAs mapping to a location in the genome is no more than what one would expect under a random model, then these alignments are considered artifacts.

[0109] The segments of the libraries of this invention also function well in regulating transcription because they contain more sequences involved in regulation of transcription. The libraries of this invention include segments having an average length of at least 600 nucleotides. In certain embodiments, the average length of segments in the library is between 700 nucleotides and 1200 nucleotides. More particularly, the average length can be between 800 nucleotides and 1100 nucleotides or between 950 nucleotides and 1050 nucleotides. Furthermore, the segments in the library can have a range of different lengths. For example, in one embodiment, at least 90% of the segments have lengths ranging from 200 to 1300 nucleotides or between 700 nucleotides and 1300 nucleotides. In another embodiment no more than 5% of the nucleic acid segments are naturally linked to cDNA alignment artifacts. Each segment contains a start site for transcription. Most of the genomic sequence of the segments is up-stream of the transcriptional start site, typically at least 500 base pairs. The segments typically have at least one nucleotide beyond the transcriptional start site and a majority have approximately 100 nucleotides downstream of the transcriptional start site.

[0110] The present invention also provides a library of gene expression regulatory elements, preferably a library of transcriptional promoters, preferably with diversity of at least 50, optionally at least 80, 120, 160, 200, 400, 500, 600, 800, 1000, 1500, 2000, 3000, 5000, 8000, or 10,000. Examples of the transcriptional promoters include, but are not limited to, at least 2, optionally at least 5, 10, 20, 50, 100, 200, 500, 1000, 5000, 10000, or 25000 nucleotides selected from the group consisting of SEQ ID NOs: 1-45096, or fragments thereof, such as fragments of SEQ ID NOs: 1-45096 of about 100-1800, about 300-1500, about 500-1400, about 600-1300, about 700-1200, or about 800-1000 nucleotide in length, or nucleic acids having sequences with at least 70%, 75%, 80%, 85%, 90%, 95%, or 98% homology thereto.

[0111] The gene expression regulatory elements include, but are not limited to, transcriptional promoters, enhancers, insulators, silencers, suppressors, and inducers. In preferred embodiments, the regulator element is a transcriptional promoter. Each of the regulatory elements can be characterized in terms of its genomic location, sequence, variation, mutation, polymorphism, transcriptional regulatory activity in different cell or tissue type, and binding affinity with other regulatory factors, such as transcription factors. Information on the structure and function of the gene expression regulatory elements can have a wide variety of applications, including but not limited to diagnosis and treatment of diseases in a personalized manner (also known as “personalized medicine”) by association with phenotype such as disease resistance, disease susceptibility or drug response. Identification and characterization of the regulatory elements in terms of cell- or tissue-specificity can also aid in the design of transgenic expression constructs for gene therapy with enhanced therapeutic efficacy and reduced side effects. “Disease” includes but is not limited to any condition, trait or characteristic of an organism that it is desirable to change. For example, the condition may be physical, physiological or psychological and may be symptomatic or asymptomatic.

[0112] The promoter library (or the regulatory element library) may exist in an in silico form and a physical form. The in silico form is a database of sequences from the human genome representing transcriptional promoters (with preferred size ranges as described above) and related genomic information such as the gene model and transcript it is associated with. The physical form of the promoter library may be a set of a plurality of individual nucleic acid fragments of the promoters, or plasmids each of which contains a unique promoter fragment from the human genome that is cloned upstream of a reporter gene cassette. The library preferably represents at least 50%, 70%, 80%, 90%, 95%, or 99% of all promoters in the human genome.

[0113] The physical form of the promoter library may be represented in several ways. One form may be as an archived library of plasmids that are frozen in small E. coli cultures. These frozen cultures can be stored indefinitely and expanded in liquid culture to produce more of the plasmids. Another form of the library may be purified plasmid DNAs that can be immediately ready for transfection. Based on the library of gene expression regulatory elements, preferably a library of transcriptional promoters, a wide variety of tools or kits can be built, such as plasmid functional macroarrays and spotted promoter microarrays, which are described below.

[0114] The promoter library includes a panel of plasmids, each made up of a common vector/plasmid backbone with a unique insert representing a single promoter from the human genome. The promoter fragment may be cloned immediately 5′ to a reporter gene cassette. This library can be a starting point from which two types of arrays: a plasmid functional macroarray and a spotted promoter microarray are built.

[0115] The plurality of different nucleic acid segments are preferably DNA segments derived from the region immediately 5′ of the transcription start site of different genes, expanding a region from about +100 to about −3000 bp, optionally about +50 to about −2000, about +20 to about −1800, about +20 to about −1500, about +10 to about −1500, about +10 to about −1200, about +20 to about −1000, about +20 to about −900, about +20 to about −800, about +20 to about −700, about +20 to about −600, about +20 to about −500, about +20 to about −400, or about +20 to about −300, relative to a transcription start site (TSS). The diversity of the plurality of different nucleic acid segments can be at least 50, optionally at least about 80, 120, 160, 200, 400, 500, 600, 800, 1000, 1500, 2000, 3000, 5000, 8000, or 10,000. Examples of the plurality of different nucleic acid segments include, but are not limited to at least 2, optionally at least 5, 10, 20, 50, 100, 200, 500, 1000, 5000, 10000, or 25000 nucleotides selected from the group consisting of SEQ ID NOs: 1-45096, or fragments thereof, such as fragments of SEQ ID NOs: 1-45096 of about 100-1800, about 300-1500, about 500-1400, about 600-1300, about 700-1200, or about 800-1000 nucleotide in length.

[0116] The plurality of different DNA segments can be derived from the 5′ untranscribed region of different genes by using a computer-aided method for predicting putative transcriptional regulatory elements, such as promoters. The computer-aided method comprises: aligning a library of cDNA for different genes with a genome of an organism; defining a transcription start site for each of the different genes; and selecting a segment in the genome that comprises a sequence 5′ from the transcription start site, the selected segment constituting a member of the plurality of different DNA segments.

[0117] The methods of the present invention for selecting putative gene expression regulatory elements can be implemented in various configurations in any computing systems, including but not limited to supercomputers, personal computers, personal digital assistants (PDAs), networked computers, distributed computers on the internet or other microprocessor systems. The methods and systems described herein above are amenable to execution on various types of executable mediums other than a memory device such as a random access memory (RAM). Other types of executable mediums can used, including but not limited to, a computer readable storage medium which can be any memory device, compact disc, zip disk or floppy disk.

[0118] FIG. 8A schematically illustrates an embodiment of the methodology disclosed herein. The flow chart in FIG. 8A illustrates a process for identifying, isolating and functionally analyzing a large number of regulatory elements, such as human transcriptional promoters. It is preferred that transcriptional promoters are predicted throughout the human genome by using a computer-aided method provided in the present invention as detailed below. The predicted putative promoter sequences are amplified and cloned into an expression vector containing a reporter to build a library of expression vectors containing a library of promoters which are transfected or otherwise introduced into tissue culture cells. Transcriptional activation of the promoters results in expression of the reporter. Activity of the reporter is then assayed and correlated with the activity of the promoters.

[0119] FIG. 8B schematically illustrates another embodiment of the methodology disclosed herein. The flow chart in FIG. 8B illustrates a process for identifying, isolating and functionally analyzing a large number of regulatory elements, such as human transcriptional promoters. It is preferred that transcriptional promoters, including the expanded promoters, are predicted throughout the human genome by using a computer-aided method provided in the present invention as detailed below. The predicted putative promoter sequences are amplified and cloned into an expression vector containing a reporter to build a library of expression vectors containing a library of promoters which are transfected or otherwise introduced into tissue culture cells. Transcriptional activation of the promoters results in expression of the reporter. Activity of the reporter is then assayed and correlated with the activity of the promoters. In addition, the promoter sequences can be amplified and utilized to build a large scale (preferably genome-wide) promoter array. The promoter array can be used for a wide variety of applications such as to study binding of transcription factors at all of the promoters on the array (e.g. used in conjunction with chromatin immunoprecipitation (CHIP), resulting in a CHIP-chip), and to access the status of DNA methylation of the promoters. This methodology illustrated in FIG. 8B integrates promoter reporter activity, transcription factor binding, and epigenetic status, which should give the most complete measure of promoter function in a cell-based system. Alternately, the sequences in the library may be used to design an oligo-based promoter microarray for the same uses described above.

[0120] FIG. 9A schematically illustrates an embodiment of the method for predicting transcriptional promoters. As illustrated in FIG. 9A and further described in a Promoter Prediction Algorithm (PPA v1.1) in Example 1, preferably all of cDNAs available in Genbank (including those from the Mammalian Gene Collection (MGC)) are utilized for the prediction of promoters. This process filters out low quality cDNA sequences and low quality alignments, assembles all the cDNA alignments into a set of gene models based on exon overlap, and makes all promoter predictions relative to this set of gene models. In contrast, previous approaches predicted a promoter for each cDNA and filtered out redundant fragments but made no association with a gene. Therefore, for the previous approaches there was no systematic way to designate a promoter as being the primary promoter or an alternative promoter to the same gene.

[0121] FIG. 9B schematically illustrates another embodiment of the method for predicting transcriptional promoters. As illustrated in FIG. 9B and further described in Example 2, this process uses a less stringent quality control for cDNAs. It allows 200 bp of unaligned sequence at the 5′ end of cDNAs. As demonstrated in Example 2, this process utilizes cDNAs that align to multiple places in the genome and filters out likely processed pseudogenes. This process also predicts alternative promoters in a gene model based on cDNAs with unique first exons, and removes alternative TSSs defined by intron-less cDNAs. Further more this process records if the alternative TSSs result in a different open reading frame compared to the longest cDNA in the gene model. Also significantly, this process gathers 2,000 bases of putative promoter sequence from which primers are designed to amplify a promoter fragment between 700 and 2,000 basepairs. The inventors believe that there is a significant amount of transcriptional regulation controlled in the distal promoter region, and subsequent functional assays performed with these fragments will be more informative than experiments done with promoter fragments <700 basepairs.

[0122] FIG. 10A schematically illustrates an embodiment of the method for isolating promoters and cloning them into a reporter vector. As illustrated in FIG. 10A and further described in Example 1, about 500-700 bp of the predicted promoter sequences are PCR amplified and cloned into a reporter (e.g., luciferase) vector via a recombination-based cloning system. Each of the recombination reaction containing each of the promoter-reporter construct is transformed into bacteria, and the clones are screened by PCR and analyzed for containing the correct constructs.

[0123] FIG. 10B schematically illustrates another embodiment of the method for isolating promoters and cloning them into a reporter vector. As illustrated in FIG. 10B and further described in Example 2, promoter fragments are stratified and amplified based on restriction site content to maximize the number of promoters to be cloned. If a single restriction enzyme pair is used for cloning, those fragments that contained internal restriction sites would have to be filtered out, resulting in a loss of a significant number of promoters. According this embodiment, at least 3 restriction enzyme pairs are used that are compatible with the reporter vector. By stratifying the target promoter fragments based on these enzyme pairs, more than 98% of the promoters in the genome can be cloned. The amplified promoter products are pooled and ligated into a reporter vector. By using a pooling and sequencing strategy, a tremendous economy of scale can be achieved. By pooling the PCR products, only a small number of digestions, ligations, and transformations need to be performed, which saves considerable amounts of time and costs associated with these treatments. To capture nearly all of the fragments in the pool, at least 3 cycles of sequencing-arraying with primers of the clones are performed.

4. Libraries of Expression Constructs

[0124] In another embodiment, this invention provides libraries of expression constructions comprising the genomic segments of this invention. The library comprises a collection of members, each of which contains a different nucleic acid segment from the genome. The expression constructs are recombinant nucleic acid molecules comprising a nucleic acid segment of this invention operably linked with a heterologous reporter sequence. A nucleotide sequence is operably linked with an expression control sequence when the nucleotide sequence is under the transcriptional regulatory control of the expression control sequence. The reporter sequence is heterologous to the genomic segment in that it is not naturally under the transcriptional regulatory control of the genomic segment sequence in the genome from which the nucleic acid segment comes. This recombinant nucleic acid molecule is further comprised within a vector that can be used to either infect or transiently or stably transfect cells and that may be capable of replicating inside a cell.

[0125] It should be noted that other than transcriptional promoters, libraries and arrays can be built for other types of regulatory elements following a similar principle to that for promoters described above. The vectors used in each case may be slightly different, however each preferably still contains a reporter cassette or construct. Different types of regulatory elements may be cloned in different positions relative to the reporter cassette.

[0126] 4.1. Reporter Sequences

[0127] This invention contemplates a number of different reporter sequences that may be under the control of the transcriptional regulatory elements of the genomic segments.

[0128] In one embodiment, the reporter sequence encodes a reporter protein, such as a light emitting protein (e.g., luciferase, a flourescent protein (e.g., red, blue and green fluorescent proteins), alkaline phosphatase, secreted embryonic alkaline phosphatase (SEAP), chloramphenicol acetyl transferase (CAT), hormones and cytokines. In libraries using proteins that emit a detectable signal it may be useful, but not essential, for all of the reporter proteins to emit the same signal. This simplifies detection during high-throughput methods.

[0129] Alternatively, the expression constructs in the library may contain different reporter sequences which emit different detectable signals. For example, the reporter sequence in each of the constructs can be a unique, pre-determined nucleotide barcode. This allows assaying a large number of the nucleic acid segments in the same batch or well of cells. In an embodiment, in each construct a unique promoter sequence is cloned upstream of a unique barcode reporter sequence yielding a unique promoter/barcode reporter combination. The active promoter can drive the production of a transcript containing the unique barcode sequence. Thus, in a library of expression constructs, each promoter's activity produces a unique transcript whose level can be measured. Since each reporter is unique, the library of expression constructs can be transfected into one large pool of cells (as opposed to separate wells) and all of the RNAs may be harvested as a pool. The levels of each of the barcoded transcripts can be detected using a microarray with the complementary barcode sequences. So the amount of fluorescence on each array spot corresponds to the strength of the promoter that drove the nucleotide barcode's transcription.

[0130] Optionally, the expression constructs in the library may contain a first reporter sequence and a second reporter sequence. The first reporter sequence and a second reporter sequence are preferred to be different. For example, the first reporter sequence may encode the same reporter protein (e.g., luciferase or GFP), and the second reporter sequence may be a unique nucleotide barcode. In this way, transcription can yield a hybrid transcript of a reporter protein coding region and a unique barcode sequence. Such a construct could be used either in a well-by-well approach for reading out the signal emitted by the reporter protein (e.g., luminescence) and/or in a pooled approach by reading out the barcodes.

[0131] By using the unique, molecular barcode for each member of the library, a large library (e.g. a library with diversity of at least 100, 150, 200, 500, 1000, 2000, or 25,000) can be assayed in a single container (such as a vial or a well in a plate) rather than in thousands of individual wells. This approach is more efficient and economic as it can reduce costs at all levels: reagents, plasticware, and labor.

[0132] 4.2. Vectors

[0133] The expression construct may be any vector that facilitates expression of the reporter sequence in the construct in a host cell. Any suitable vector can be used. There are many known in the art. Examples of vectors that can be used include, for example, plasmids or modified viruses. The vector is typically compatible with a given host cell into which the vector is introduced to facilitate replication of the vector and expression of the encoded reporter. Examples of specific vectors that may be useful in the practice of the present invention include, but are not limited to, E. coli bacteriophages, for example, lambda derivatives, or plasmids, for example, pBR322 derivatives or pUC plasmid derivatives; phage DNAs, e.g., the numerous derivatives of phage 1, e.g., NM989, and other phage DNA, e.g., M13 and filamentous single stranded phage DNA; yeast vectors such as the 2μ plasmid or derivatives thereof; vectors useful in eukaryotic cells, for example, vectors useful in insect cells, such as baculovirus vectors, vectors useful in mammalian cells such as retroviral vectors, adenoviral vectors, adenovirus viral vectors, adeno-associated viral vectors, SV40 viral vectors, herpes simplex viral vectors and vaccinia viral vectors; vectors derived from combinations of plasmids and phage DNAs, plasmids that have been modified to employ phage DNA or other expression control sequences; and the like.

5. Recombinant Cells

[0134] In another aspect this invention provides recombinant cells comprising the expression libraries of this invention. Two different embodiments are contemplated in particular.

[0135] In a first embodiment each cell or group of cells comprises a different member of the expression library. Such a library of cells is particularly useful with the arrays of this invention. Typically, the library is indexed. For example, each different cell harboring a different expression vector can be maintained in a separate container that indicates the identity of the genomic segment within. The index also can indicate the particular gene or genes that is/are under the transcriptional regulatory control of the sequences naturally in the genome.

[0136] In a second embodiment, a culture of cells is transfected with a library of expression constructs so that all of the members of the library exist in at least one cell and each cell has at least one member of the expression library. The second embodiment is particularly useful with libraries in which the reporter sequences are unique sequences that can be detected independently.

[0137] Useful cell types include primary and transformed mammalian cell lines to which exogenous DNA may be introduced by lipofection, electroporation, or infection. Libraries in such cells may be maintained in growing cultures in appropriate growth media or as frozen cultures supplemented with Dimethyl Sulfoxide and stored in liquid Nitrogen.

6. Functional Arrays: Multiwell Plates

[0138] In another aspect, this invention provides devices comprising multiwell plates, also called macroarrays, each well of which contains a different member of expression library of this invention. While this invention contemplates multiwell plates in a variety of formats and array layouts, there are a number of standard formats well known in the art. In particular, it is contemplated that a library of expression vectors can be contained within the wells of one or more 96-well, 384-well or 1536-well microtiter plates.

[0139] In a preferred embodiment, an array of diverse, different gene expression regulatory elements is provided, preferably an array of different transcriptional promoters. The diversity of the array is preferably at least at least 50, optionally at least 80, 120, 160, 200, 400, 500, 600, 800, 1000, 1500, 2000, 3000, 5000, 8000, 10,000, or 25,000. Also provided are a library of expression vectors each of which comprises a different gene expression regulatory element, preferably operably linked with a reporter sequence such that expression of the reporter sequence is under transcriptional control of each of the gene expression regulatory element.

[0140] For the plasmid functional macroarray, each member of the promoter library may be transfected separately into E. coli. Each E. coli stock may be grown up to make >100 ug of each plasmid and then the plasmid DNAs are purified from the rest of the parts of the bacterial cells. Small aliquots of each plasmid (with appropriate transfection reagents) may be arrayed in a 96-well, 384-well, or 1536-well format. This macroarray of plasmids can be used for a number of different applications. Its primary use is preferably in the transfection of living cells. Once the plasmids are delivered to living cells, the amount of activity detected from the reporter gene product reflects the transcriptional activity provided by the promoter fragment. Thus, the plasmid macroarray enables the high-throughput study of promoter function in living cells. Promoter functional assays may be conducted in a variety of cell types, in response to a change in the cellular environment, in response to an alteration in a gene sequence or function, or in the presence of a small molecule or protein sequence of interest.

[0141] In a more preferred embodiment, a highly diverse array of expression vectors is provided which comprise at least 200 different gene expression regulatory elements in the expression vectors. As described in detail in the EXAMPLE section, surprisingly the inventors discovered that promoter functional assays in a 384-well format could efficiently and accurately measure transcriptional activities of a diverse promoter library comparable to a 96-well format. The variance between replicate experimental wells in either format is almost identical and the correlation of measurements between 96 and 384-well format is very high (R=0.98). In addition, the reporter activity for even weak promoters is still within the linear range of detection for commercially available luminometers. Thus, such highly diverse functional arrays can be used efficiently and effectively to measure transcriptional activities of a large number of regulatory elements under various conditions in a single panel or experiment, e.g., in a 384-well or higher density format.

[0142] 6.1. Microtiter Arrays with “naked” nucleic acids

[0143] In one embodiment, this invention contemplates microtiter arrays in which the wells contain expression vectors outside of a cellular environment. In particular, microtiter arrays are contemplated in which each well contains an expression vector of this invention in dried form. Such devices can be stored and shipped easily and are ready for use. In other embodiments the wells contain a solution comprising the nucleic acids. In another embodiment, the solution can contain all the elements necessary for transfecting cells that are added to the plates.

[0144] 6.2. Microtiter Arrays with recombinant cells

[0145] Microtiter arrays in which each well comprises a recombinant cell containing an expression vector of this invention are useful for carrying out high-throughput screening assays. To generate such arrays, DNA may be mixed with serum-free media and a transfection reagent (such as a lipofection reagent), incubated, and added to a group of cells. After an incubation time, the exogenous DNA will be present in the cells. Alternate methods for delivery include electroporation and infection.

7. Functional Arrays: Nucleic Acid Probe Arrays

[0146] In another aspect this invention provides DNA arrays in which the probes attached to a solid substrate comprise sequences from the nucleic acid segment libraries of this invention. Methods of making nucleic acid arrays are well known in the art. See, for example, U.S. Pat. Nos. 5,807,522 and 6,110,426 (Brown and Shalon); 6,054,270 and 6,054,270 (Southern); and 6,040,193; 5,744,305; 5,871,928; 6,610,482; 6,261,776; 6,291,183 (Affymetrix).

[0147] Methods and techniques applicable to array synthesis also have been described in U.S. Pat. Nos. 5,143,854, 5,242,974, 5,252,743, 5,324,633, 5,384,261, 5,424,186, 5,451,683, 5,482,867, 5,491,074, 5,527,681, 5,550,215, 5,571,639, 5,578,832, 5,593,839, 5,599,695, 5,624,711, 5,631,734, 5,795,716, 5,831,070, 5,837,832, 5,856,101, 5,858,659, 5,936,324, 5,968,740, 5,974,164, 5,981,185, 5,981,956, 6,025,601, 6,033,860, 6,040,193, and 6,090,555. All of the above patents incorporated herein by reference in their entireties for all purposes.

[0148] The sequence of the probe can comprise the entire sequence of a genomic segment of this invention. Alternatively, a transcription regulatory sequence of this invention can be represented by one or more probes comprising a sequence of at least 21 nucleotides from a transcription regulatory sequence. The sequence can be between 21 and 35 nucleotides long, between 36 and 45 nucleotides long, between 46 and 55 nucleotides longs between 56-65 nucleotides long, or longer. In certain embodiments, a transcriptional regulatory sequence is represented by 2, 3, 4, 5, 6, 7, 8, 9 or 10 probes comprising overlapping and/or non-overlapping nucleotides sequences from the transcriptional regulatory sequence. The probes of this invention can be single stranded or double stranded.

[0149] To construct a spotted promoter microarray, small aliquots of plasmid DNA representing each member of the promoter library may be used. Because each plasmid in the library is made up of the same vector backbone with a unique promoter insert, primers to the vector sequence flanking the promoter insert can be designed to allow PCR amplification of the unique insert in each vector using the same set of primers for the entire library. An individual PCR reaction is then conducted for each member of the library generating a large amount of PCR product representing the unique promoter fragment. Being amplified from a plasmid template, the PCR reaction should be very robust and consistent across all promoters, which may not the case if they were amplified from genomic DNA. These purified PCR products are then used to make a spotted microarray on a glass slide either by contact print or ink-jet deposition where each feature represents a unique promoter fragment.

[0150] The microarrays of this invention can be used for a number of different experimental purposes. One application is in conjunction with chromatin immunoprecipitation (ChIP). Chromatin immunoprecipitation involves cross-linking proteins to DNA in a living cell, shearing up the chromatin/DNA complex, and immunoprecipitating with an antibody to a protein of interest. The challenge is to identify the DNA sequences that are bound to the protein of interest. One option is to hybridize the ChIP DNA to a microarray to identify the targets that are enriched ChIP. Many researchers already hybridize such experimental outputs to tiled-oligo microarrays to identify binding sites across the genome. However, such experiments are prohibitively expensive for many labs. The spotted promoter microarrays or promoter-specific oligo-based micorarrays provided in the present invention meet the demands of researchers conducting ChIP experiments to study promoters specifically and are looking for a less expensive alternative to tiled oligo arrays.

[0151] Another application of this spotted promoter microarray or promoter-specific oligo-based microarray is for conducting genome-wide assays of promoter DNA-methylation status, preferably using the method for determining methylation status of regulatory elements in a high throughput manner as described above, or using a number of different techniques exist for differentially labeling hypo-methylated and hyper-methylated DNA sequences. The results of this differential labeling at promoter sequences can be visualized on the spotted promoter microarray or promoter-specific oligo-based microarray to determine which promoters are under or over-methylated.

[0152] In general, any technique that results in differential labeling of one type of sequence over another can be applied to a spotted promoter microarray or promoter-specific oligo-based microarray including DNA-hypersensitivity, histone-modifications, and more. Compared to other oligo-based promoter arrays developed by others in the field, the benefit for using this spotted promoter microarray or promoter-specific oligo-based microarray for such an assay is that the fragments on the array are the exact same fragments that may be tested for functional activity using the plasmid functional macroarray system.

8. Kits

[0153] In an embodiment, a kit is provided for a functional macroarray of promoters. The kit includes: transfection-ready set of promoter plasmids arrayed in 96 or 384 wells. The kit may further include: reporter assay substrates; reagents for induction or repression of a particular biological pathway (cytokines or other purified proteins, small molecules, cDNAs, siRNAs, etc.), and/or data analysis software.

[0154] In addition, kits are provided which comprise reagents and instructions for performing methods of the present invention, or for performing tests or assays utilizing any of the compositions, libraries, arrays, or assemblies of articles of the present invention. The kits may further comprise buffers, restriction enzymes, adaptors, primers, a ligase, a polymerase, dNTPS and instructions necessary for use of the kits, optionally including troubleshooting information.

[0155] In another embodiment, a kit is provided for a CHIP assay. The kit includes: a spotted promoter microarray or promoter-specific oligo-based microarray; and one or more ChIP-grade antibody. The kit may further include: DNA amplification and labeling reagents; and/or data analysis software.

[0156] In yet another embodiment, a kit is provided for a DNA-methylation assay, comprising: a spotted promoter microarray or promoter-specific oligo-based microarray; and enzyme sets for methylation assay. The kit may further include: DNA amplification and labeling reagents; and/or data analysis software.

[0157] In still another embodiment, an assembly of articles is provided for a comprehensive promoter analysis, comprising: a plasmid functional macroarray kit; a promoter microarray kit for ChIP; and a DNA-methylation assay kit. The assembly may further include: analysis software for data integration.

9. Methods of Use

[0158] 9.1. Introduction

[0159] The functional arrays of this invention are useful for performing high-throughput experiments to screen activity of the transcriptional regulatory sequences of this invention. This increase in throughput of functional promoter assays is important for several reasons: First, removing limits on the numbers of regulatory elements that can be assayed in a single panel allows researchers to interrogate elements corresponding to entire biological networks in a single experiment. For example, there are well over a thousand genes that are implicated in cancer development and progression. By scaling the promoter functional assays to include promoters of over a hundred of genes, for example over a thousand genes, researchers can study all of the promoters of all cancer related genes at once.

[0160] Furthermore, many genes have alternative promoters, therefore, increasing the throughput of these assays will allow alternative promoters to be included in a study. Particular alternative promoters have been shown to confer distinct regulation of different isoforms of the same gene, and this is an important aspect of promoter biology that needs to be included in a comprehensive study.

[0161] Increasing throughput will also enable the study of promoter sequence variants on a much larger scale. Since each promoter in the genome will likely have several SNPs on average, increasing the throughput will allow a comprehensive analysis of all existing haplotypes of a given set of promoters rather than having to pick the most common haplotypes.

[0162] Further, assaying a large number of regulatory elements in a single experiment will allow researchers to conduct statistical analyses with much greater power. The previous promoter activity experiments have shown that promoter activity data often breaks down into clusters of similar activity, just like gene clusters in microarray expression experiments. In an experiment with a small number of promoters, each sub-cluster is often too small to make any statistically significant claims as to important features unique to that cluster, such as the over-representation of certain motifs or higher-order sequence characteristics. The larger the dataset, the more power there is to perform these statistical analyses; and a diversity of promoters beyond 200 or 1,000 in a single panel would be very desirable.

[0163] A wide variety of biological samples can be tested according to the present invention, including isolated cells, cell cultures, body fluid (blood, bone marrow, saliva, spinal cord fluid, and semen), biopsy and tissue samples. The tissue samples can be any which are derived from a patient, whether human, other domestic animal, or veterinary animal. Vertebrate animals are preferred, such as humans, mice, horses, cows, dogs, and cats. The samples may be fixed or unfixed, homogenized, lysed, cryopreserved, etc. It is most desirable that matched tissue samples be used as controls. Thus, for example, a suspected colorectal cancer tissue will be compared to a normal colorectal epithelial tissue.

[0164] In one aspect of the invention, a method is provided for determining transcriptional regulatory activity of a plurality of different nucleic acid segments. The method comprises: operably linking each of the plurality of different nucleic acid segments with a reporter sequence in an expression vector such that expression of the reporter sequence is under transcriptional control of each of the different nucleic acid segments; expressing the reporter sequence; and determining the expression level of the reporter controlled by each of the different nucleic acid segments.

[0165] The present invention also provides compositions, assemblies, and kits, preferably for carrying out the methods of the present invention. For example, an array of different gene expression regulatory elements is provided, preferably an array of different transcriptional promoters. The diversity of the array is preferably at least at least 50, optionally at least 80, 120, 160, 200, 400, 500, 600, 800, 1000, 1500, 2000, 3000, 5000, 8000, 10,000, or 25,000. Also provided are a library of expression vectors each of which comprises a different gene expression regulatory element, preferably operably linked with a reporter sequence such that expression of the reporter sequence is under transcriptional control of each of the gene expression regulatory element.

[0166] 9.2. Methods of High-Throughput Screening of Promoter Activity

[0167] 9.2.1. Basic Method

[0168] A multiwell plate array of cell harboring the expression constructs of this invention is useful for high-throughput screening of promoter activity. In the basic method, a multiwell plate having a member of an expression library of this invention in each well is filled with a cell type of interest under conditions so that the cells are transfected with the vectors. The cells are then incubated under conditions chosen by the operator. Cells in which the promoters are “turned on” will express the reporter sequences under their transcriptional control. The investigator then checks each well of the device to measure the amount of reporter transcribed. Generally, this involves measuring the signal produced by a reporter protein encoded by the reporter sequence. For example, if the reporter protein is a fluorescent protein, then light is directed to each well and the amount of fluorescence is measured. The amount of signal measured is a function of the expression of the reporter sequence which, in turn, is a function of the activity of the transcriptional regulatory sequences.

[0169] FIG. 11A schematically illustrates an embodiment of the method for detecting transcriptional activity of a plurality of promoters in a high throughput manner. As illustrated in FIG. 11A and further described in Example 1, a large number of promoters contained in a library of reporter constructs are arrayed in a 96-well plate and transfected into tissue culture cells. Expression of the reporter is detected and correlated with the transcriptional activity of the promoters.

[0170] FIG. 11B schematically illustrates another embodiment of the method for detecting transcriptional activity of a plurality of promoters in a large scale, high throughput manner. As illustrated in FIG. 11B and further described in Example 2, more than a hundred promoters contained in a library of reporter constructs are arrayed in a multi-well format (e.g. a 96-well or 384-plate format) and transfected into tissue culture cells. The library of reporter constructs and a transfection reagent mix can be transfected or added into tissue culture cells in a 96- or 394-well format. Alternatively and more efficiently, the library of reporter constructs and a transfection reagent mix are arrayed in a 96- or 394-well format and tissue culture cells are added into the wells later (the so-called “reverse transfection”). Expression of the reporter is detected and correlated with the transcriptional activity of the promoters.

[0171] By expanding from 96-well plates to 384-well plates and pre-aliquoting the plasmid DNAs, throughput can be expanded from hundreds to >1,000 promoter assays in a single experiment. Scaling this experiment to more than 1,000 independent promoter fragments greatly improves the scope of the research project and gives more power to the downstream statistical analyses of these data. The larger the dataset, the more amenable it is to approaches such as principle component analysis and hierarchical clustering. By studying more than 1,000 promoters at once in multiple experiments, sub-clusters of promoter activity data are large enough to look for over-represented motifs or higher-order sequence characteristics.

[0172] As further described in Example 2, the steps of the process are refined to increase the accuracy of promoter prediction and efficiency of every step, thus enabling functionally assaying multiple hundreds or thousands of promoters in a single experiment and allowing thorough interrogations of entire biological pathways in a single experiment. Instead of having to choose only their best candidates for assay because of a limitation on size of the experiment, by using the present invention researchers can include hundreds of genes of interest, therefore receiving much more complete and biologically relevant datasets.

[0173] FIG. 12A schematically illustrates an embodiment of the method for analyzing data obtained in a functional assay of a plurality of promoters. As illustrated in FIG. 12A and further described in Example 1, a much larger set of negative control fragments (e.g., about 100) is utilized to get a more confident measure of the background signal from random genomic fragments.

[0174] FIG. 12B schematically illustrates another embodiment of the method for analyzing data obtained in a functional assay of a large number of promoters. As illustrated in FIG. 12B and further described in Example 2, a set of plate normalization constructs are utilized in the promoter functional assays described above to allow control for plate-to-plate variation in cell growth, transfection, and assay conditions. The values of each well in a plate are normalized across an experiment based on this set of controls. A Z-score-based analysis allows for even better comparison of data between experiments because it takes into account the variance in the distribution of the negative control values.

[0175] 9.2.2. Detecting The Effect Of Perturbation

[0176] In another embodiment of the methods of this invention, the investigator can test the effect of a system perturbation on the activity of a library of transcription regulatory sequences. The basic method described above is performed under a first set of conditions to determine the amount of activity of the promoters. Then the cells are perturbed, i.e., subject to different conditions, in a manner chosen by the investigator. Perturbations can include, for example, exposing the cells to a test compound, changing environmental conditions such as temperature, pH or nutrition, or genetically modifying the cells to introduce new or modified genetic material or changes in amounts of genetic material. After perturbation, the amount of activity of each promoter in the library is examined and compared to its activity in the first state. Promoters that show altered activity can be isolated and studied further. In this way it can be determined, for example, which transcription regulatory sequences have their activity modulated by a compound of interest.

[0177] In a variation of this method, the test is performed in parallel. That is, two identical devices of this invention are examined for promoter activity. However, one device is subjected to a first set of conditions and the other device is subjected to a second set of conditions. In this way, the relative activity of the transcription regulatory sequences under the two conditions can be examined, and sequences that have different activity can be identified and isolated.

[0178] 9.2.3. Comparison Between Cell Types

[0179] It also can be useful to identify differences in transcription regulatory sequence activity in two cell types. For example gene expression differs when cells transform from normal to cancerous. Promoters that are overactive in cancer cells may be targets of pharmacological intervention. The arrays of this invention are useful to identify such transcription regulatory sequences. Accordingly, the investigator provides two sets of arrays comprising expression constructs in the wells. Once cell type is used for transformation in a first device and a second cell type, for transformation in a second device. The expression of reporter sequences between the two devices is compared to identify those expressed differently in the two cell types.

[0180] 9.2.4. Tests in Mixed Cultures

[0181] Using expression constructs in which the transcription regulatory sequences are operably linked to unique reporter sequences opens the possibility of performing tests without the use of multiwell plates. In such situations a single culture of cells contains the entire expression library distributed among the cells. The culture can be incubated under conditions chosen by the investigator. Then the expression products are isolated. As described in the section entitled “Reporter Sequences” because each one has a unique nucleotide sequence tag or barcode associated with its partner nucleic acid segment, the amount of each of the reporter sequences can be measured by measuring the amount of transcript comprising each unique sequence. For example, the molecules can be detected on a DNA array that contains probes complementary to the unique sequences. The amount of hybridization to each probe indicates the amount of the reporter sequence expressed, which, in turn, reflects the activity of the transcription regulatory sequences.

10. Promoter Variants

[0182] 10.1. Identification of Promoter Variants Having Different Activity

[0183] There are many published accounts of sequence changes in promoter regions causing changes in human phenotypes or disease status. One of the classic examples is Beta-thalassemia. Just in the past few years, promoter sequence changes have also been linked to cardiovascular disease, Alzheimer disease, schizophrenia, bi-polar disorder, glaucoma, epilepsy, multiple sclerosis and lupus among others. Very recent work has also shown that a 3 base pair deletion in the promoter of the SRY gene is associated with complete sex reversal. Functional variants in the promoter of the C-reactive Protein gene have also been identified. This is particularly important because serum levels of C-reactive Protein are a key predictor of heart disease risk.

[0184] Association studies and efforts such as the Hap-Map project often detect potentially biologically interesting variation in the sequences of promoters between individuals in the human population. The big question then revolves around whether or not those sequence changes actually affect the function of the promoter or if they are essentially silent, non-functional changes. The assays provided herein can be used to compare the activity of promoter variants

[0185] This invention provides methods for identifying variants in transcriptional regulatory sequences that are associated with phenotypic differences in a population. The methods involve the following steps. First, one identifies and selects transcriptional regulatory sequences that exhibit sequence polymorphism in a population, such as SNPs, from a database of sequences or other information source. Then, one tests these variants for transcripion regulation activity in an assay of this invention. Polymorphic forms that exhibit differences in activity in these assays are selected for further study. In such a study, two populations are selected that have different phenotypic traits. For example, a first population having a disease and a second population not having the disease are selected. Generally, the investigator will select a promoter that regulates expression of a gene suspected to have some connection with the phenotype in question. The population is large enough to provide statistically significant results. Each individual in the two populations are then tested to determine which form of the variant the individual has. Statistical analysis will indicate whether the polymorphic form is associated with the phenotype. Polymorphic forms found to associate with a specific phenotype then can be used in diagnostic tests to determine how likely it is that the individual has the phenotype.

[0186] More generally, the products provided in the present invention can also be used to correlate polymorphisms in a gene expression regulatory element with a phenotypic trait more efficiently. Correlation of individual polymorphisms or groups of polymorphisms with phenotypic characteristics is a valuable tool in the effort to identify DNA variation that contributes to population variation in phenotypic traits. Phenotypic traits include physical characteristics, risk for disease, and response to the environment. Polymorphisms that correlate with disease are particularly interesting because they represent mechanisms to accurately diagnose disease and targets for drug treatment. Hundreds of human diseases have already been correlated with individual polymorphisms but there are many diseases that are known to have an, as yet unidentified, genetic component and many diseases for which a component is or may be genetic.

[0187] Many diseases may correlate with multiple genetic changes making identification of the polymorphisms associated with a given disease more difficult. One approach to overcome this difficulty is to systematically explore the limited set of common gene variants for association with disease. The functional studies enabled by a regulatory element macroarray will facilitate the sorting out of sequence variants that affect the function of a regulatory element away from those that do not. Therefore, researchers may look for correlation of functional sequence variants with phenotypic traits, changing the focus from finding variants merely correlated with a phenotype towards identifying variants that may cause a particular phenotype.

[0188] To identify correlation between one or more alleles in the gene expression regulatory region and one or more phenotypic traits, individuals are tested for the presence or absence of polymorphic markers or marker sets and for the phenotypic trait or traits of interest. The presence or absence of a set of polymorphisms is compared for individuals who exhibit a particular trait and individuals who exhibit lack of the particular trait to determine if the presence or absence of a particular allele is associated with the trait of interest. For example, it might be found that the presence of allele A1 at polymorphism A in the promoter region of a gene correlates with heart disease. As an example of a correlation between a phenotypic trait and more than one polymorphism, it might be found that allele A1 at polymorphism A and allele B1 at polymorphism B correlate with a phenotypic trait of interest.

[0189] Markers or groups of markers in a gene expression regulatory region that correlate with the symptoms or occurrence of disease can be used to diagnose disease or predisposition to disease without regard to phenotypic manifestation. To diagnose disease or predisposition to disease, individuals are tested for the presence or absence of polymorphic markers or marker sets that correlate with one or more diseases. If, for example, the presence of allele A1 at polymorphism A correlates with coronary artery disease then individuals with allele A1 at polymorphism A may be at an increased risk for the condition.

[0190] Individuals can be tested before symptoms of the disease develop. Infants, for example, can be tested for genetic diseases such as beta-thalassemia at birth. Individuals of any age could be tested to determine risk profiles for the occurrence of future disease. Often early diagnosis can lead to more effective treatment and prevention of disease through dietary, behavior or pharmaceutical interventions. Individuals can also be tested to determine carrier status for genetic disorders. Potential parents can use this information to make family planning decisions.

[0191] Individuals who develop symptoms of disease that are consistent with more than one diagnosis can be tested to make a more accurate diagnosis. If, for example, symptom S is consistent with diseases X, Y or Z but allele A1 at polymorphism A correlates with disease X but not with diseases Y or Z an individual with symptom S is tested for the presence or absence of allele A1 at polymorphism A. Presence of allele A1 at polymorphism A is consistent with a diagnosis of disease X.

[0192] 10.2. Pharmacogenomics

[0193] In addition, the products provided in the present invention can also be used for pharmacogenomics. Pharmacogenomics refers to the study of how your genes affect your response to drugs. There is great heterogeneity in the way individuals respond to medications, in terms of both host toxicity and treatment efficacy. There are many causes of this variability, including: severity of the disease being treated; drug interactions; and the individuals age and nutritional status. Despite the importance of these clinical variables, inherited differences in the form of genetic polymorphisms can have an even greater influence on the efficacy and toxicity of medications. Genetic polymorphisms in drug-metabolizing enzymes, transporters, receptors, and other drug targets have been linked to inter-individual differences in the efficacy and toxicity of many medications. (See, Evans and Relling, Science 286: 487-491 (2001) which is herein incorporated by reference for all purposes). The functional studies enabled by a regulatory element macroarray will facilitate the sorting out of sequence variants that affect the function of a regulatory element away from those that do not. Therefore, researchers may look for correlation of functional sequence variants with phenotypic traits, changing the focus from finding variants merely correlated with a phenotype towards identifying variants that may cause a particular phenotype.

[0194] In a manner similar to that above, transcription regulatory sequences encoding genes suspected to be involved in drug metabolism are screened to identify those that exist in polymorphic forms in a population. These sequences are tested for functional differences in the assays of this invention. Those that exhibit functional differences are then examined in populations having different responses to a drug to determine whether a polymorphic form is associated with differences in drug reaction.

[0195] An individual patient has an inherited ability to metabolize, eliminate and respond to specific drugs. Correlation of polymorphisms in a gene expression regulatory region with pharmacogenomic traits identifies those polymorphisms that impact drug toxicity and treatment efficacy. This information can be used by doctors to determine what course of medicine is best for a particular patient and by pharmaceutical companies to develop new drugs that target a particular disease or particular individuals within the population, while decreasing the likelihood of adverse affects. Drugs can be targeted to groups of individuals who carry a specific allele or group of alleles. For example, individuals who carry allele A1 at polymorphism A may respond best to medication X while individuals who carry allele A2 respond best to medication Y. A trait may be the result of a single polymorphism but will often be determined by the interplay of several genes.

[0196] In addition some drugs that are highly effective for a large percentage of the population, prove dangerous or even lethal for a very small percentage of the population. These drugs typically are not available to anyone. Pharmacogenomics can be used to correlate a specific genotype with an adverse drug response. If pharmaceutical companies and physicians can accurately identify those patients who would suffer adverse responses to a particular drug, the drug can be made available on a limited basis to those who would benefit from the drug.

[0197] Similarly, some medications may be highly effective for only a very small percentage of the population while proving only slightly effective or even ineffective to a large percentage of patients. Pharmacogenomics allows pharamaceutical companies to predict which patients would be the ideal candidate for a particular drug, thereby dramatically reducing failure rates and providing greater incentive to companies to continue to conduct research into those drugs.

[0198] 10.3. Marker-Assisted Breeding

[0199] The products provided in the present invention can also be used for marker assisted breeding. Genetic markers can assist breeders in the understanding, selecting and managing of the genetic complexity of animals and plants. Agriculture industry, for example, has a great deal of incentive to try to produce crops with desirable traits (high yield, disease resistance, taste, smell, color, texture, etc.) as consumer demand increases and expectations change. However, many traits, even when the molecular mechanisms are known, are too difficult or costly to monitor during production. Readily detectable polymorphisms in a gene expression regulatory region which are in close physical proximity to the desired genes can be used as a proxy to determine whether the desired trait is present or not in a particular organism. This provides for an efficient screening tool which can accelerate the selective breeding process.

[0200] In a manner similar to that above, transcription regulatory sequences encoding genes suspected to be involved in the phenotypic trait of interest are screened to identify those that exist in polymorphic forms in a population. These sequences are tested for functional differences in the assays of this invention. Those that exhibit functional differences are then examined in populations having traits to determine whether a polymorphic form is associated with this trait.

[0201] It should be noted that the methods, libraries, arrays, kits and assemblies provided in the present invention are not limited to any particular type of nucleic acid sample: plant, bacterial, animal (including human) total genome DNA, RNA, cDNA and the like may be analyzed using some or all of the methods disclosed in this invention. The word “DNA” may be used below as an example of a nucleic acid. It is understood that this term includes all nucleic acids, such as DNA and RNA, unless a use below requires a specific type of nucleic acid.

11. Software

[0202] The present invention provides data analysis software that normalizes promoter strength measurements and calculates the statistical significance of each measurement with a background model. The data analysis algorithm first normalizes the data in each plate using a plurality (e.g., a set of 4, 8 or 16) standard controls. These normalized raw values for each experimental construct are then compared to the promoter activity of a panel of at least 48, 96, or 384 random genomic fragments to assess their significance above background. These random fragments can be chosen truly randomly throughout the genome or from middle exons of protein coding genes that are at least 1000 basepairs in length and at least 5000 bases from a known transcription start site. For each experiment, the average and standard deviation of the random fragment values are calculated. A z-score is then calculated for each experimental promoter activity from the following equation: Z-score promoter activity=(raw promoter activity−mean of random controls)/standard deviation of the random controls. The confidence level for each Z-score is equal to the area under the curve assuming a Gaussian distribution of the negative control fragments after correction for multi-hypothesis testing. (i.e. fragments with a Z-score ≧are considered active at a p<0.01 confidence level.) The Z-score transformed promoter activity data can then be compared to Z-transformed data of other types such as DNA methylation, chromatin IP combined with genomic microarrays, expression array data, etc.

12. Methylation

[0203] The present invention also provides a method for determining methylation status of CpG dinucleotides within a nucleic acid molecule, in particular, regulatory elements. In certain embodiments, the method is performed in a high throughput manner. Many regulatory elements are CpG-rich, and many CpG-rich regions represent regulatory elements. Therefore, measuring the methylation status of CpG-rich sequences provides insight into the function of many transcriptional regulatory elements. FIG. 13 schematically illustrates an embodiment of the method for large scale, high throughput determination of methylation status of CpG-rich sequence regions genome-wide. As illustrated in FIG. 13 and further described in Example 3, high-molecular weight genomic DNA is prepared from cell lines or tissues and digested with at least three (preferably 6) different methyl-sensitive restriction enzymes. If the CpG-rich sequences in DNA from the source are not methylated, the methyl-sensitive enzymes will cleave these sequences into small fragments. The digested DNA greater than 100 bp in length is purified and labeled with a detectable marker such as a fluorescent label. Undigested genomic DNA is labeled with a different detectable marker. Labeling can either proceed by cleavage and end-labeleing, or by hybridization of random labeled primers followed by extension of the primers. Both samples are applied in a competitive hybridization assay to a genomic microarray, such as a spotted promoter or CpG island array or an oligo array that tiles across genomic regions of interest. In DNA in which the CpG-rich areas are unmethylated, there will be a significant depletion of these CpG-rich regions, as this area will have been cleaved into small fragments less than 100 nucleotides. However, these regions will not be depleted in the un-digested DNA used as a control.

[0204] Individual methyl-sensitive restriction enzymes (restriction enzymes that cleave nucleic acid molecules having un-methylated recognition sequences, but not methylated recognition sequences) have been used previously to measure DNA-methylation, but they have usually been used to mark and retrieve the pieces of unmethylated DNA. The novel aspect of the approach is that it measures the depletion of these regions relative to the rest of the genome. Using a cocktail of enzymes, each with a different recognition site, enables a depletion of unmethylated regions that does not occur to the same extent under the treatment with any one enzyme alone. Examples of methylation-sensitive restriction enzymes include: AatII, AciI, AclI, AfeI, AgeI, AscI, AsiSI, AvaI, BceAI, BmgBI, BsaAI, BsaHI, BsiEI, BsiWI, BsmBI, BspDI, BspEI, BsrBI, BsrFI, BssHII, BstBI, BstUI, ClaI, EagI, FauI, FseI, FspI, HaeII, HgaI, HhaI, HinPII, HpaII, Hpy99I, HpyCH4IV, KasI, MluI, Nael, NarI, NgoMIV, NotI, NruI, PaeR7I, PmlII Pvui, RsrII, SacII, SalI, SfoI, SgrAI, SmaI, SnaBI, TilI, XhoI.

[0205] By using the method, DNA methylation status at CG-rich regions of the entire genome can be measured efficiently. The major advantage of this method is that it is very efficient, inexpensive, and measures over 97% of the “CpG islands” in the human genome with a very high specificity. DNA methylation is implicated in carcinogenesis and transcriptional regulation. Therefore, profiling the methylation status of the genome could help classify different cancers and explain mechanisms of gene regulation.

[0206] CpG Island and promoter arrays could be designed specifically for this assay. One embodiment of an oligonucleotide array design would be to implement an algorithm that specifically designs an array depending on the set of methyl-sensitive restriction enzymes used. This algorithm would first map a defined set of methyl-sensitive restriction enzyme recognition sites throughout a mammalian genome sequence of interest. Preferably more than 2 MSRE and approximately 6 MSRE would be used in this embodiment. A genome-wide map of the MSRE sites describes where the genomic DNA would be cut if it was not methylated at that location. After mapping a set of MSRE sites, the algorithm then calculates the distance between each neighboring MSRE site. The algorithm then clusters those MSRE sites that are less than 100 bp from each other and defines the coordinates of genomic regions bounded by at least 2 MSRE sites where the distance between neighboring MSREs within that region is less than 100 bp. These are regions of the genome that would be depleted if they were unmethylated and digested by the MSREs. Conversely, the algorithm also records those regions that would not be depleted upon digestion with the set of MSRE. These are regions that are greater than 100 bp in length that do not have MSRE recognition sequences closer than 100 bp to each other. These regions would not be depleted in the MSRE treatment and contain few, if any, CpG dinucleotides. The algorithm ultimately produces two lists of genomic regions: one that could be depleted by treatment with one or more MSRE and one that would not be depleted by treatment with one or more MSRE. Examples of depleted regions are shown in SEQ ID NOs. 45,296. Examples of recovered regions are shown in SEQ ID NOs. 45,496. The algorithm would then design oligonucleotide probes approximately 25, 30, 35, 40, 45, 50, 55, or 60 bases in length that cover 10%, 20%, 30%, 40%, 50%, 60%, 70%, 80%, 90%, or 99% of the putative “depleted regions” and another set of oligonucleotide probes approximately 25, 30, 35, 40, 45, 50, 55, or 60 bases in length that cover 10%, 20%, 30%, 40%, or 50% of the putative “recovered regions”. Hybridization and labelling of a genomic DNA sample treated with a plurality of MSRE and an untreated and labeled sample would then identify which regions were depleted, thus unmethylated in the genomic sample hybridized to the custom-designed array. The set of “recovered regions” serve as controls that are used to build an error model to measure the significance of depleted signals at putatively unmethylated regions.

[0207] Additionally, enzyme complexes that specifically cleave methylated DNA such as McrBC, could be used to perform the reciprocal experiment (identify depleted methylated regions). This approach could also be applied to whole tissues and other mammalian models.

[0208] The present invention relies on many patents, applications and other references for details known to those of the art. Therefore, when a patent, application, or other reference is cited or repeated below, it should be understood that it is incorporated by reference in its entirety for all purposes as well as for the proposition that is recited. As used in the specification and claims, the singular form “a,” “an,” and “the” include plural references unless the context clearly dictates otherwise. For example, the term “an agent” includes a plurality of agents, including mixtures thereof. An individual is not limited to a human being but may also be other organisms including but not limited to mammals, plants, bacteria, or cells derived from any of the above.

[0209] Throughout this disclosure, various aspects of this invention are presented in a range format. It should be understood that the description in range format is merely for convenience and brevity and should not be construed as an inflexible limitation on the scope of the invention. Accordingly, the description of a range should be considered to have specifically disclosed all the possible subranges as well as common individual numerical values within that range. For example, description of a range such as from 1 to 6 should be considered to have specifically disclosed subranges such as from 1 to 3, from 1 to 4, from 1 to 5, from 2 to 4, from 2 to 6, from 3 to 6 etc., as well as individual numbers within that range, for example, 1, 2, 3, 4, 5, and 6. The same holds true for ranges in increments of 10⁵, 10⁴, 10³, 10², 10, 10⁻¹, 10⁻², 10⁻³, 10⁻⁴, or 10⁻⁵, for example. This applies regardless of the breadth of the range.

[0210] The practice of the present invention may employ, unless otherwise indicated, conventional techniques of organic chemistry, polymer technology, molecular biology (including recombinant techniques), cell biology, biochemistry, and immunology, which are within the skill of the art. Such conventional techniques include polymer array synthesis, hybridization, ligation, and detection of hybridization using a label. Specific illustrations of suitable techniques can be had by reference to the example hereinbelow. However, other equivalent conventional procedures can, of course, also be used. Such conventional techniques can be found in standard laboratory manuals such as Genome Analysis: A Laboratory Manual Series (Vols. I-IV), Using Antibodies: A Laboratory Manual, Cells: A Laboratory Manual, PCR Primer: A Laboratory Manual, and Molecular Cloning: A Laboratory Manual (all from Cold Spring Harbor Laboratory Press), all of which are herein incorporated in their entirety by reference for all purposes.

### EXAMPLES

### Example 1

### Prediction and Transcriptional Assays of Putative Human Core Promoters in 1% of the Human Genome

[0211] In this example, several important biological questions regarding promoter function were addressed. The correlation of endogenous transcript levels and promoter activity for a sample of genes were calculated. While other transcriptional regulatory elements such as enhancers, silencers and insulators all modulate the function of promoters and affect steady state RNA levels in vivo, the contribution of promoters was quantified and demonstrate that in many cases promoters play a key role in controlling RNA levels.

[0212] The promoter activities of deletion constructs for a set of 45 promoters, allowing the identification of core promoter elements and other elements within the extended promoter that contribute to regulation of transcription initiation were studied. Finally, identification of significant overlaps between functional promoter regions and binding of TBP-associated factor (TAFL, also TAF11250) and RNA Polymerase 2 (RNAP II), and elements conserved among mammalian genomes was made, each of which were identified in independent experiments done by other ENCODE Consortium members. Together these results reveal an unprecedented view of promoter activity in 1% of the human genome and lend insight into promoter function in the genome as a whole.

Results

921 Predicted ENCODE Promoters Using Promoter Prediction Algorithm (PPA v1.1)

[0213] By aligning 153,645 human cDNAs to the genome and merging transcripts with overlapping exons on the same strand, 38,412 gene models in the human genome were predicted (See Methods). In agreement with previous observations, approximately 13,450 (35%) of these contained only putative single-exon transcripts (Imanishi et al. 2004). From these gene models, 56,940 were predicted potential transcription start sites in the genome, with roughly half of the genes predicted to have multiple promoters. Within the 30 Mb of the ENCODE region, there were 613 gene models, 27% of which were comprised of single-exon transcripts, many of unknown function. A total of 921 transcription start sites were predicted associated with these gene models. These predictions overlap nearly 80% of the 875 known genes (July 2003 freeze of UCSC Genome Browser) and 74% of ensembl genes (July 2003 freeze of UCSC Genome Browser) (Karolchik et al. 2003). Consistent with the genome-wide estimates, 45% of the ENCODE genes was predicted to have more than one promoter which is substantially higher than previous estimates (Landry et al. 2003). While there are a number of well-characterized single-exon genes (Gentles and Karlin 1999; Hentschel and Bimstiel 1981), the large number of putative single-exon transcripts was identified in the full-length cDNA libraries might result from genomic polyA stretches or other library artifacts. As a result, only a sample of the predicted single-exon promoters was tested. All together, 642 putative promoters were cloned and measured their promoter activities in 16 cell lines. These included 528 putative promoters based on multi-exon transcript and 114 single exon-based predictions and represent 443 of the gene models shown in Table 1.

Identification of 387 Functional Promoters in the ENCODE Region

[0214] The level of activity of a cloned promoter in the transient transfection assay as a transformed ratio of luciferase (experimental) to renilla (transfection control) signal, normalizing for transfection efficiency and allowing comparison between experiments was defined. As described in the Methods, the threshold for positive promoter activity as three standard deviations above the mean ratio of the 102 negative control DNA fragments was considered. A fragment as a functional promoter if it had activity exceeding this threshold was considered as Well. One-3 outliers per cell type within the 102 negative controls were identified, estimating a false positive rate for the assay of 1-3%. Using the thresholds defined for each cell type individually, 387 fragments, representing 303 unique gene models, in the ENCODE region showed promoter activity in at least one of the 16 cell types. A much higher validation rate among promoters predicted by multi-exon gene models (66%) than those predicted by single exon transcripts (32% Table 1) was observed. Predicted alternative promoters were less likely to show significant activity compared to predictions based on longest cDNAs in each gene model. And finally, the high confidence predictions were most likely to be active promoters.

[0215] In addition to these classes, it was that the ENCODE region, like the remaining 99% of the human genome contains a prominent class of divergently transcribed genes regulated by putative bidirectional promoters. In agreement with previously published work (Trinklein et al. 2004), 44 identified and 32 tested promoters involved in bidirectional gene pairs and found that 31 functioned in at least one of the tested cell types. All of those tested in both orientations functioned bidrectionally.

[0216] Overall, 60% of the putative promoter fragments tested were functional in at least one cell type (FIG. 1). Many of these exhibited a high degree of variation in promoter activity between cell types (FIG. 1B), suggesting that regulatory elements within the extended promoter guide cell-type specific expression, even taken out of genomic context. It was not expected that the promoter assays will recapitulate perfectly the regulation of the endogenous gene, but there were several instances in which the promoters directed cell-type specific expression similarly in vitro as they do in vivo. For example, the promoter of the hepatocyte growth factor (MET) gene was active in only seven of the 16 cell lines and was most highly active in one of the liver cell lines, HepG2. This is consistent with the expression of MET in a variety of tissues, but predominantly liver and other tissues of mesenchymal origin (Rubin et al. 1993). The osteoclast-associated receptor (OSCAR) promoter was active in only four cell lines, one of which is MG-63, an osteosarcoma cell line. This gene is thought to be expressed exclusively in osteoclasts (Kim et al. 2002). Although the data support the expression of this gene in osteoclasts, promoter activity was observed in additional tissues, suggesting that the assay does not capture all of the regulation controlling the specific expression of this gene. In addition to tissue-specific activity, there were prominent cluster of 118 promoters identified (30% of the total) that had strong, ubiquitous activity in all 16 cell lines (FIG. 1A). Within this cluster, 101 promoter fragments (86%) overlapped CpG Islands, as predicted by the UCSC Genome Browser Database (Karolchik et al. 2003). These data indicate a close association between the presence of CpG dinucleotides and strong, ubiquitous promoter activity. However, 12% (25/202) of the fragments tested that overlap CpG islands had no promoter activity in any of the 16 cell types. Overlap of CpG islands with the predicted TSS was less common in these 25 cases, but a significant difference was not observed in CpG content or length between functional and non-functional promoters overlapping CpG islands. These data suggest that while the CpG island overlap is an important indicator, it is not sufficient to predict promoter activity.

Sequence Characteristics of Promoters

[0217] The global sequence content as well as the presence of known DNA motifs within this large data set provide additional insight into promoter function. Because many promoters overlap CpG islands, there is a strong shift in the distribution of GC content in functional promoters. All active promoter fragments have a significantly higher GC content (57%) compared to putative promoter fragments with no observed activity (48%). The overlap with CpG islands and increased GC content within active promoters is the most striking sequence characteristic distinguishing functional promoters from predicted but non-functional promoters in the assay.

[0218] The presence of previously characterized promoter-specific motifs was determined in the functionally characterized promoters by doing a simple pattern match for the consensus sequences within the functional promoters. Sixty-one functional promoters (16% of total) were identified containing a TATA-box (TATA(T/A)(T/A)) and 72 functional promoters (19% of total) containing a CAAT (CCAAT) box. However, in agreement with previous work, no significant correlation was found between the presence of these motifs and promoter activity (Trinklein et al. 2003). This suggests that while these motifs may be functionally important, there is no universally required element within promoters necessary for promoter activity.

[0219] Using a set of constrained elements identified for all ENCODE targets based on comparisons of human genomic sequence to orthologous sequence from 6-9 mammalian species for each target (Cooper et al. 2005), the extent of constraint was characterized in the 500 bp functional promoters that were identified. Twelve point five percent of bases that were found within functional promoters are constrained, whereas 10% of bases within non-functional promoters were constrained. Both of these are well above the total of 4.3% constrained bases in 30 Mb of the ENCODE regions as defined by these methods. Interestingly, the vast majority of constraint above random is observed within ±50 basepairs from the transcription start site (Supplementary FIG. 1). The steep peak seen at position +1 relative to the transcription start site is very encouraging as it speaks to the accuracy of the TSS predictions. These data also suggest that the basal elements are more likely to be evolutionarily constrained. However, the extended promoter contains more constraint than expected by chance, showing evidence for a reduced but still significant density of functional and constrained elements in this region

More than 20% of Genes have Functional Alternative Promoters

[0220] Multiple promoters were predicted, each regulating a unique RNA isoform, for 45% of multi-exon genes in the ENCODE regions and have functional data supporting multiple active promoters for approximately 22% of the gene models that was tested in the transient assay. Most of these (54/66) had two functional promoters, but the UDP glycosyltransferase 1 gene (UGT1), shows evidence for seven functional promoters. Despite requiring full-length clones for alternative promoter prediction, only half of these predictions were validated. This may be explained by highly tissue-specific alternative promoters, or by annotated full-length cDNAs that are not truly full-length. Interestingly, in some cases, use of these alternative promoters results in predicted altered protein products. Of the 66 gene models with more than one functional promoter, 42 alternative isoforms have similarity to each other, and only six have identical amino acid sequences. The remaining 18 result in protein products with no significant similarity to each other. The method of defining gene models can be affected by chimeric transcripts or mis-aligned cDNAs. In these cases, two potentially unrelated transcripts can be included in the same gene model, and these transcripts define alternative promoters of the same gene model with different ORFs. Six of the 18 cases mentioned above involve short single-exon transcripts that overlap one or more exons in a longer multi-exon gene, and it is not surprising that these transcripts have different predicted ORFs. Upon manual inspection, it was observed that in ten of the remaining 12 cases, transcripts derived from alternative promoters have a similar exon structure with the exception of the 5′ exons. These transcripts use an alternative start codon that results in a completely different ORF. These proteins may have important biological functions of their own, or the existence of an alternate promoter and downstream transcript may act as a regulatory mechanism for the functional protein. Work from other groups has provided examples in which a secondary, unrelated protein, sharing coding exons with a primary transcript plays a role in the regulation of the primary transcript (Yang et al. 1998). In some cases, these transcripts may act as regulatory RNAs, creating no protein at all, or they may be completely unrelated genes, sharing exonic sequences.

[0221] In addition to changing the amino acid sequence of the protein, alternative promoters provide distinct regulation for alternate isoforms of the same gene. Results indicate that 60% of alternative promoter pairs have significantly different expression patterns among the 16 cell lines were tested. For example, the testin (TES) gene has evidence for two promoters. The TES gene is ubiquitously expressed and has three isoforms and two putative promoters (Tatarelli et al. 2000). It was found that one promoter was active in two of the brain cell lines (FIG. 2A), and a second promoter was active in twelve remaining cell lines (FIG. 2B). In this case, the protein product is unaffected by the alternative promoter, but these promoters may be used to provide differential regulation of this gene in various tissues. Looking closely at the data from Tatarelli et al., it was seen that expression in the brain is much lower than other tissues, and this may be explained by the use of an alternative promoter. This is just one example of alternative promoters functioning to differentially regulate transcription of alternate RNA isoforms.

Functional Regions within Extended Promoter Fragments

[0222] To understand further the functional elements within the extended promoter region, reporter constructs were generated with a series of nested deletions for 45 of the promoters that were active in the transient assay. The deletion fragments (described in Methods) range in size from 40 bp to 1,000 bp and were cloned upstream of the luciferase gene as diagrammed in FIG. 3A. These fragments were assayed for promoter activity as before and the average activity for each deletion construct illustrated a number of interesting points (FIG. 3B). First, promoter activity decreases with deletion of sequences between 350 bp to 40 bp upstream of the TSS, indicating the presence of positive elements between −350 and −40 bp relative to the TSS in many of these promoters. It was found that in 17 of 25 cases, the presence of 40 bp upstream of the predicted transcription start site was sufficient for basal activity that was significantly above background, but only five of these core promoter fragments had activity that was at least 90% of the 500 bp extended promoter fragment.

[0223] It was also observed that, on average, the 500 bp and 1,000 bp promoter fragments showed decreased activity compared to the corresponding 350 bp fragment. Overall there was a reduction in activity of the larger fragments, but a range of behaviors for individual promoters was observed (FIGS. 3C and D). Like the sperm-associated antigen 4 (SPAG4) promoter (FIG. 3D), many (12/22) of the 1,000 bp and 500 bp fragments showed significantly less activity than the 350 bp fragment of the same promoter in all seven tested cell types. These results suggest the presence of negative regulatory elements in the region −350 to −1,000 bp upstream of the TSS for many of these genes. The sequences of these fragments was examined and no simple sequence elements such as stop codons or long repetitive stretches beyond what is expected by chance were observed, nor was any significant secondary structure identified to explain these results (data not shown). Experiments were conducted to demonstrate that the change in activity observed was not a result of increased plasmid size by cloning the 500 bp promoter in duplicate or cloning 500 bp of random sequence upstream of the 500 bp promoter (FIG. 4, compare construct 1 to 2 and 3).

[0224] To test further the hypothesis that these fragments contain a negative regulatory element, the −1,000 to −500 bp fragments of five promoters upstream of two 40 bp heterologous promoters that are otherwise highly active in these cell types were cloned (See FIG. 4, constructs 5 and 6). These results strongly support the presence of a negative element in this region of the SPAG4 promoter. Of the five fragments examined, evidence was found that three of these contain negative regulatory elements. (See Supplementary Data). The others may act as position-specific or gene-specific negative elements.

Endogenous Transcript Levels Correlate with Promoter Activity

[0225] Given the variety of transcriptional regulatory elements known to exist outside of the promoter regions of genes as well as post-transcriptional regulatory mechanisms, the extent to which the activity of promoter fragments correlates to the steady state endogenous transcript levels in the same cell types was quantified. Quantitative RT-PCR was used to assay the absolute endogenous transcript levels for 35 genes whose promoter activity was measured in reporter assays in 14 cell types. In addition more comprehensive data was collected for 96 additional genes in one cell type. It was observed that there was a correlation of r=0.53 between endogenous RNA levels and the promoter activity predicted by its transcription start site (FIG. 5). To assess the significance of this correlation, the correlation coefficient of randomized data 1,000 times was calculated. The average correlation coefficient of these randomized data sets was 0.026 with a standard deviation of 0.04, indicating that the observed correlation is highly significant compared to random (p<10-12). This correlation indicates that the extended promoter fragments contain many of the elements important for regulating the transcription of these genes in vivo.

[0226] The RNA data also allows us to assess false positive and false negative rates which indicate how well promoter activity predicts in vivo RNA transcript levels. Across 14 cell types and 35 genes, 58/273 (21%) active promoter fragments were found to have no detectable RNA transcript and 72/217 (33%) inactive promoters have detectable RNA transcript. There are a variety of biological explanations for these apparent discrepancies. Promoters which function in the assay but do not seem to function in vivo can be explained by a promoter taken out of context, removed from epigenetic signals or relevant regulatory sequences or by an RNA with low abundance and high turnover. These data also confirm the expectation that for a fraction of expressed genes, the promoter was incorrectly predicted. Nonetheless, the degree of correlation observed, indicates much of the regulatory sequence was captured relevant to gene expression.

[0227] In addition to these genes, the correlation was measured between transcript levels and promoter activity for 11 genes with alternative promoters. In many cases, genes with two promoters and unique RNA isoforms showed activity consistent with one another. (See Supplemental FIG. 2.) Of the 11 genes with alternative promoters that were tested, seven had promoter activity patterns that matched the trends seen in the corresponding transcript levels. These data provide further evidence that promoters and alternative promoters contribute significantly to the control of RNA levels within a cell and that are able to recapitulate aspects of this regulation with the transient transfection assay.

Functional Promoters Co-Occur with TAF1, RNAP II Binding

[0228] Other researchers in the ENCODE Consortium have generated data useful to understanding the activity of the promoters that have been identified. Specifically, chromatin IP-microarray experiments examining the occupancy of two promoter-binding proteins, TBP-associated factor (TAF1) and RNA polymerase 2 (RNAP II) have been produced by collaborators Ren and colleagues (Kim et al. 2005) and are confirmed in a reporter assay in their lab. These experiments measure ChIP-enriched targets by genomic tiling microarray hybridization. Using a stringent cutoff for identification of binding (p-value<10-4 for TAF experiments and p-value<10-6 for RNAP II experiments), functional promoter fragments were compared with regions bound by these two transcription factors and made the following observations (Table 2). Of the 258 functional promoters identified in the two cell types common to the experiments (HCT 116 and HeLa), approximately half overlapped either TAF1 or RNAP II sites identified by chromatin IP. Conversely, of the 177 TAF1 binding sites and 203 RNAP II binding sites tested in the reporter assay, over 80% showed significant activity. Finally, of promoters bound to both RNAP II and TAF1-bound, 85% had significant promoter activity.

Discussion

Comparison to Previous Functional Promoter Studies

[0229] The experiments presented here represent the comprehensive functional testing of DNA fragments likely to be transcriptional promoters in a selected 1% of the human genome. Overall, 60% of the predicted promoters showed significant activity in at least one cell type in the transient transfection reporter assay. The fraction of active promoters is substantially lower than the 90% positives established in a previous, smaller study described in 2003 (Trinklein et al. 2003). One likely explanation for the discrepancy is that the promoters predicted in previous work relied exclusively on full-length cDNA sequences from an early version of the Mammalian Gene Collection. This early collection was likely biased towards highly expressed genes, and consequently, the promoters initially predicted were upstream of ubiquitously and highly expressed genes. In addition, the ENCODE targets contain many genes known to be highly tissue specific, including the genes of the HoxA cluster and the beta and alpha globin gene clusters. The promoters of these genes are less likely to be active in a limited panel of cell lines, where factors necessary for transcription initiation may be absent.

[0230] Due to the distinct goal of identifying all functional promoters in this region, the method used to predict promoters in the ENCODE region was also considerably different than the previous study which aimed to verify predictions based exclusively on the MGC full-length cDNA collection. By using alignments of all the cDNAs in GenBank, promoter predictions were included based on weak evidence (either there was no full-length clone to validate the prediction or only a single cDNA supported the existence of a transcription start site). This strategy introduced false predictions, but allowed a more complete identification of promoters within the ENCODE region. In support of this, data for bidirectional promoters is directly comparable to previous work and shows a similar high validation.

[0231] As with the earlier experiment (Trinlrein et al. 2003), false negative results arise due to the artificial nature of the transient reporter assay. By cloning the promoter fragment in a plasmid, the cloned fragment is required to function independently, and may not detect the activity of promoters that require elements outside the 500 bp that were tested. Although care must taken in analyzing negative results, using a large number of random fragments as a baseline for no activity ensures that positive results are more definitive. With a false positive rate of 2%, it is felt that the vast majority of positive promoter activity identified by the assay represents biologically relevant promoter activity. The data presented here represents one of the largest functional promoter datasets and provides a valuable resource for a large number of researchers studying these regions.

A Significant Fraction of Transcripts of Unknown Function have Functional Promoters

[0232] Several recent studies have shown that a significantly larger fraction of the genome is transcribed than previously thought (Bertone et al. 2004; Kapranov et al. 2002). It remains to be seen whether these “transcripts of unknown function” (TUFs) have an important biological activity and if so, how their expression is regulated. About half of the single-exon gene models and a much smaller fraction of multi-exon gene models that was predicted for this study fit the category of transcripts of unknown function, lacking a known function or an ORF of longer than 100 amino acids. Negative results must be cautiously interpreted, but the considerable difference in validation between the single-exon based prediction and multi-exon based predictions suggests a biological difference between the two classes. This difference suggests that either a larger fraction of TUFs are cDNA library or alignment artifacts or that their promoters are less likely to function in the experiments that were designed. Nevertheless, the data indicate that one-third of the sequences upstream of these single exon transcripts are functional promoters, and the presence of an ORF of at least 100 amino acids is not predictive of promoter function in this class of transcripts. In accordance with the low abundance of some of the TUFs, two-thirds of active TUF promoters function in at least one but no more than 10 of the 16 cell types tested, while less than half of the multi-exon predicted promoters meet these criteria, suggesting that TUFs may be more likely to be expressed in a specific time or place. While these data support the hypothesis that some TUFs are regulated and biologically important, the possibility exists that these transcripts are in regions of the genome that have leaky transcriptional activity and the reason for their existence is the presence of a spurious upstream promoter-like sequence. Ongoing experiments within the ENCODE Consortium to characterize the regulatory elements of novel transcribed regions will prove helpful in determining which of the TUFs are functionally relevant and specifically regulated.

Core Promoters and Upstream Regulatory Elements

[0233] Our observations that 68% of 40 bp core promoter fragments maintain basal promoter activity and that these fragments contain much of the constraint observed in promoters emphasize the importance of the core promoter. However, the deletion analyses reported also demonstrate that additional regulatory sequences are present throughout the extended promoter. Successive removal of sequences in the −350 to −40 bp region of the promoters significantly reduces promoter activity in the transient transfection assay, indicating that these regions contain positive regulatory elements. In contrast, the region upstream of −350 tends to contain elements that negatively affect transcription initiation. This trend was particularly striking within a few of the −1,000 to −500 bp regions.

[0234] These experiments can lead to interesting hypotheses about gene regulation. For example, the experiments demonstrate a negative element within the SPAG4 promoter meeting the criteria for classically defined silencers (Ogboume and Antalis 1998). The SPAG4 gene is expressed exclusively in spermatid cells during tail elongation (Tamasky et al. 1998) and an element located between −372 and −898 from the TSS could act to control tissue-specific expression of this gene by inhibiting expression in other cell types. While tissue-specific expression being initiated by a tissue-specific positive element is commonly accepted, precedence for tissue-specific regulation by a negative element has also been previously established in neurons, where gene expression is controlled by the neuron-restrictive silencer element and the factor that binds it (Schoenherr and Anderson 1995; Schoenherr et al. 1996). The fragments containing negative elements that were identified provide a detailed resource for researches interested in the regulation of these genes.

Regulatory Contribution of Promoters to Endogenous Transcript Levels

[0235] One of the fundamental questions in the field of gene expression is the relative contribution of the extended promoter region to the regulation of transcription. Long-range regulatory elements such as enhancers, silencers, and insulators have been identified and shown to play an important role in spatial and temporal regulation of gene expression, particularly during development (Howard and Davidson 2004). However, the extent of this type of regulation remains to be seen. Furthermore, epigenetic alterations, such as DNA methylation and covalent histone modification also contribute to gene expression by altering chromatin conformation (Lunyak et al. 2004). Post-transcriptional mechanisms affecting mRNA processing and stability also play a role in regulating steady-state mRNA levels (Meyer et al. 2004; Wilusz and Wilusz 2004). With all of these contributing factors, there is little experimental evidence to allow a quantitative estimate of the contribution of promoters to human gene expression on a large scale. The studies of promoter activity in the ENCODE region gave us the unique opportunity to measure the correlation of promoter function with mRNA transcript levels.

[0236] The steady-state mRNA levels measured are affected by a variety of transcriptional and post-transcriptional factors, all of which would be expected to reduce the correlation between promoter function and mRNA levels. Nevertheless, it was observed there was a remarkably high correlation between promoter activity and the levels of endogenous mRNA in each cell type, indicating that extended promoters play a significant role in regulating transcript levels. Based on the calculated correlation coefficient of 0.53 (R), 28% (R2) of the variation observed in transcript levels can be attributed to differences in promoter activity. This is likely an underestimate of overall promoter contribution due to the inherent experimental noise in the promoter activity measurements and mRNA quantification. Most genes likely require a combination of regulatory inputs. The continuous distribution of correlations between promoter function and mRNA levels among genes supports this hypothesis. Experimental noise certainly contributes to this continuous distribution; however the wide distribution supports the notion that some genes are regulated entirely by their promoter, while other genes rely on other elements to control expression. Genes that show strong correlation between promoter and RNA levels could be studied further by mutational analysis to locate the specific regions of the promoter that confer the observed regulation.

Integrating Data to Reveal Promoter Function

[0237] The integration of multiple data sets generated by the ENCODE Consortium serves to validate the different experimental approaches. The locations of active promoters and TAF1 and RNAP II binding sites throughout the ENCODE regions overlapped significantly. Of the sites bound by both TAF1 and RNAP II, and that were tested in the reporter assays, 85% were active promoters. The strong overlap between the positive results of the two experiments serves to validate both approaches as they independently identify many of the same functional promoters. The minority of fragments that were bound by both factors but were not functionally active in the reporter assays could represent sites where the preinitiation complex was assembled but paused and not transcriptionally active (Krumm et al. 1995; Krumm et al. 1992). Additional work measuring the levels of the endogenous transcripts of these genes could confirm which sites represent paused complexes rather than false positive chromatin IP results or false negative reporter data.

[0238] Most surprisingly, many examples were found of active promoters measured in the assay that did not bind either TAF1 or RNAP II binding. While, this is partly due to the stringent threshold set for TAF1 and RNAP II binding, one biological explanation is that long-range negative elements acting on these promoters in vivo prevent TAF1 and RNAP II from binding and when taken out of their genomic context and separated from negative elements, these fragments act as promoters in the transient-reporter system. This may reflect true biological activity relevant in certain cell types or under certain conditions.

[0239] Furthermore, seven genes were identified with active promoters that do not bind either TAF1 or RNAP II, but have detectable transcripts in the cell lines tested. The possibility exists that factor binding at these promoters is more difficult to detect because the DNA-protein interactions are harder to capture by chromatin immunoprecipitation for a variety of reasons. Alternatively, some of these promoters may not be bound by TAF1 and do not require TAF1 to initiate transcription. In support of this hypothesis, previous work shows that a temperature-sensitive TAF1 allele in mammalian cells does not have a global defect in RNAP II transcription demonstrating that not all transcription requires TAF1 (Suzuki-Yagawa et al. 1997; Wang and Tjian 1994). As more promoters are identified and characterized, it is becoming clear that only a small fraction of promoters contain a TATA-box and other elements previously thought to be features of the general promoter. Indeed, as more promoters are functionally characterized, the concepts of the “general transcription machinery” and “basal promoter elements” will be continuously refined.

[0240] The data presented represents a functional study of 1% of all human promoters. The data, in combination with other data generated for the ENCODE region, provides new opportunities to identify regulatory elements and better understand the transcriptional regulatory code of human cells. In addition to providing biological insight, the combination of these experimental data sets with complete sequence conservation and motif data may eventually facilitate more accurate promoter prediction throughout the genome.

Methods

Predicting Human Promoters Based on Full-Length cDNA Sequences

[0241] The locations of promoters were predicted for genes in the ENCODE region as previously described with some modifications (Trinklein et al. 2004; Trinklein et al. 2003). All human cDNA alignments were downloaded from the July 2003 freeze with at least 95% identity, available from UCSC Genome Browser (Karolchik et al.

[0242] 2003), which totaled 153,642 alignments. These cDNAs represented all available cDNAs in GenBank at that time. Using the alignments of these cDNAs to the genome, gene models were defined by merging all alignments with at least 1 bp of exon overlap on the same strand. For each gene model, one TSS was defined as the 5′-most base of the gene model; however single-exon transcripts were not permitted to extend 5′ ends of multi-exon genes. Alternative transcription start sites were based only on annotated full-length clones whose 5′ ends were at least 500 bp downstream from the previously defined transcription start site. Throughout the manuscript alternative promoters were defined as distinct sequences resulting in transcription of alternate RNA isoforms.

Cloning and Plasmid Preparation

[0243] Primer3 software was used to design primers by inputting 600 bp of upstream sequence and 100 bp downstream of the predicted TSS (Rozen and Skaletsky 2000). Each primer pair was required to flank the transcription start site. To the 5′ end of each primer, 16 basepair tails were added to facilitate cloning by the Infusion Cloning System (BD Biosciences, Clontech cat no. 639605). (Left primer tail: 5′-CCGAGCTCTTACGCGT-3′, Right primer tail: 5′-CTTAGATCGCAGATCT-3′) The fragments were amplified using the touchdown PCR protocol previously described (Trinklein et al. 2004) and Titanium Taq Enzyme (BD Biosciences, Clontech, cat no 639210). To clone the PCR amplified fragments using the Infusion Cloning System, 2 μl purified PCR product and 100 ng linearized pGL3-Basic vector (Promega) were combined. This mixture was added to the Infusion reagent and incubated at 42° C. for 30 minutes. After incubation, the mixture was diluted and transformed into competent cells (Clontech cat. No. 636758). Clones for insert by PCR were screened and positive clones were prepared as previously described. DNA was quantified with a 96-well spectrophotometer (Molecular Devices, Spectramax 190) and standardized concentrations to 50 ng/μl for transfections.

Negative Control Fragment Selection

[0244] A total of 102 fragments was chosen similar in length to the experimental fragments to assay as negative controls. Twenty-four fragments were picked from coding exons that were at least 5 kb from a predicted transcription start site. The remaining 78 size-matched fragments were chosen randomly from the ENCODE regions. Because they were randomly chosen fragments, the GC content was similar to the ENCODE-wide average of approximately 43%. Primers were designed and followed all downstream protocols identically to those performed for putative promoter fragments.

Cell Culture Transient Transfections and Reporter Gene Activity Assays

[0245] Each of the 16 cell lines were obtained (AGS, Be(2)-C, G-402, HCT116, HepG2, HeLa, HMCB, HT1080, JEG-3, MG-63, MRC-5, Panc-1, SK-N-SH, SNU-182, T98G, and U-87 MG) from ATCC and grown in the media suggested by ATCC. (See Supplemental Methods for more information.)

[0246] Transfections of cultured human cell lines were performed as previously described (Trinklein et al. 2004) and 5,000 cells per well were seeded in 96-well plates (see Supplemental Methods). Twenty-four hours after seeding, 50 ng of experimental luciferase plasmid was co-transfected with 10 ng of renilla control plasmid (pRL-TK, Promega Cat. No. E2241) in duplicate using 0.3 μl of FuGene (Roche) transfection reagent per well. Cells were lysed 24-48 hours post-transfection, depending on cell type. Luciferase and renilla activity was measured using the PE Wallac Luminometer and the Dual Luciferase Kit (Promega, Cat. No. E1960). The protocol suggested by the manufacturer was following with the exceptions of injecting 60 μl each of the luciferase and renilla substrate reagents and reading for 5 seconds.

Data Analysis & Verification

[0247] All data was reported as a transformed ratio of luciferase to renilla. The mean ratio of the 102 negative controls was determined, and eliminated outliers by Dixon's test (Dixon 1950). By this test, 0-3 outliers were identified in each cell line. Only two outliers appeared in multiple cell types. The activity of putative promoters was assessed by defining a threshold three standard deviations above the mean ratio of the negatives. It was normalized for comparison between cell types by dividing each ratio by the mean ratio of the negative controls for that cell type adding one and taking the log2 of each ratio. (Activity=log2((Luciferase/Renilla)/AvgNeg+1). Forty-eight promoters were prepared independently to verify the data to assess reproducibility. Each sample began with a new transformation, bacterial culture, DNA extraction, quantification, and transfection. Promoter activity in four cell lines was assayed and found a correlation of 0.93 between transformed luciferase/renilla ratios of the two independent samples.

Sequence Analysis and Comparative Studies

[0248] For motif discovery, promoters into clusters were divided based on the clustering displayed in FIG. 1 and used MEME (Bailey and Elkan 1994) to search for motifs over represented within each cluster. High GC content confounded the search and no significant motifs were identified. Bioprospector (Liu et al. 2001) were used to identify motifs which differentiated between functional and non-functional promoters, but did not recover any significant motifs.

[0249] Constrained elements were identified for all ENCODE target regions based on analyses performed by other members of the ENCODE consortium (Cooper and Sidow, unpublished). Constrained element annotations were generated for the October 2004 ENCODE sequence data freeze (The ENCODE Project Consortium 2004), using Genomic Evolutionary Rate Profiling (GERP, described in detail in (Cooper et al. 2005)) analyses of multiple sequence alignments built using MLAGAN alignment software (Brudno et al. 2003). These constrained elements collectively cover 4.3% of all human ENCODE bases, and all elements are statistically significant at 95% confidence (Cooper et al. 2005). (See Supplemental Materials) More information, along with updated constrained element annotations and scores will be available through the ENCODE portal of the UC-Santa Cruz genome browser http://genome.ucsc.edu/ENCODE).

Promoter Deletions Series

[0250] For each of 45 promoters, additional amplicons were designed and constructed plasmids with promoter inserts averaging 1,000, 330, 210, 90, and 40 upstream bases, in addition to the 500 bp fragments already cloned. (Primer sequences available as supplemental materials.) Each of the smaller fragments were subcloned from the original promoter, and amplified the 1,000 basepair fragments from genomic DNA. These fragments were cloned using restriction enzymes and ligation, as described previously (Trinklein et al. 2004; Trinklein et al.

[0251] 2003). After cloning, the constructs were transfected and assayed as described above in seven cell lines: HT1080, HCT116, AGS, T98G, U87 MG, HeLa, and JEG-3.

RNA Preparation and cDNA Synthesis

[0252] RNA was isolated using QIAGEN RNA/DNA Mini Kit (Cat. No. 14123) from duplicate samples of 14 cell types (AGS, G-402, HCT116, HeLa, HepG2, HMCB, HT1080, JEG-3, MG-63, MRC-5, Panc-1, SNU-182, T98G, and U-87 MG). Each cell line was grown in monolayer and lysed 4×10⁶ cells in 0.5 ml lysis buffer. RNA pellets were resuspended in 100 μl RNase-free water. The RNA samples were then reverse transcribed by using a mix of random hexamers, poly-T first strand synthesis primers, and Superscript reverse transcriptase (Invitrogen).

Quantitative RT-PCR

[0253] Amplicons were designed to the cDNA sequence of each gene and performed real-time PCR to quantitate the absolute amount of cDNA for each gene (amplicon size range between 60-100 base pairs). Each reaction contained 3.5 mM MgCl2, 0.125 mM dNTPs, 0.5 μM forward primer, 0.5 μM reverse primer, 0.5× Sybr Green (Molecular Probes), 1U Stoffel fragment (Applied Biosystems), and template DNA in a final volume of 20 μl. For each amplicon there was a standard curve of 50 ng, 5 ng, 500 pg, and 50 pg total genomic DNA in addition to the replicate cDNA samples. Product accumulation was measured for 40 cycles on the Bio-Rad Icycler, and calculated the threshold cycle for each dilution of the standard curve and then performed a linear regression to fit the threshold cycle from the cDNA sample to this standard curve to measure the absolute number of genomic equivalents of that gene in the pool of cDNA from each of the 14 cell lines. The levels of beta-actin were measured and GAPDH in each cDNA preparation to normalize for any variation in absolute quantities of cDNA in each prep. Three genomic controls were also measured to estimate the background levels of contaminating genomic DNA or other background signal. For false positive and false negative calculations, RNA transcript was considered detectable at 10-fold over the genomic background controls.

### Example 2

### Large-Scale Structural and Functional Characterization of Human Expanded Promoters

1) Promoter Prediction Algorithm (PPA v1.2)

This example provides a preferred embodiment of the method illustrated in FIG. 9B.

A. Post-Processing of cDNA Alignments

[0254] As of Jul. 6, 2005, there were more than 200,000 human cDNA sequences aligned to the human genome (hg17) by the BLAT algorithm at UCSC. These alignments are all publicly available at the website of genome.ucsc.edu.

[0255] The PPA downloads these alignments and filters out those that have less than 95% sequence identity, those that have more than 200 bases at the 5′ end of the cDNA sequence that do not align to the genome, and those that align to random sequence not assembled into the reference chromosome sequences. These filters are implemented to remove cDNAs that have low quality sequence at the 5′ end and, therefore, predict dubious transcription start sites. As of Jul. 6, 2005, there were 223,100 cDNAs that met these criteria.

[0256] cDNAs that align to multiple places in the genome that meet the above criteria are further analyzed to distinguished putative processed pseudogenes from highly similar or duplicated genes. Processed pseudogenes are formed when endogenous mRNAs are reverse transcribed into DNA and inserted in the genome, therefore, one feature that distinguishes processed pseudogenes is that they often appear as single exon genes. Since processed pseudogenes are an artifact of viral replication, they are not good indicators of transcriptional promoters, therefore, the PPA attempts to filter out these sequences. Single exon genes can be identified by intron length, and the PPA measures intron length by calculating the ratio of the length of each cDNA to the length of the genomic alignment of that cDNA. A ratio of 1 represents a single exon gene, whereas a ratio of 0.1 represents a gene where 90% of the genomic alignment is intronic sequence. The distribution of all alignment ratios shows that 0.95 is an appropriate threshold for calling an alignment “intronless.” The threshold is slightly less than 1 to take into account random sequencing errors and alignment artifacts that create small single base deletions and insertions. The PPA cannot simply filter out all single exon genes because there are a significant number of real single exon genes. Instead, the PPA makes note when a cDNA aligns to multiple places in the genome and what the smallest alignment ratio is for all the alignments of that cDNA. If the smallest ratio is less than 0.95, additional alignment ratios greater than 0.95 are categorized as pseudogenes, ratios with a difference greater than 0.2 above the smallest alignment ratio are also called pseudogenes, and ratios with a difference of less than 0.2 above the smallest ratio are called likely gene family members. FIG. 15 is a table showing that nearly 2,500 pseudogenes are identified and filtered out by PPA v1.2.

[0257] Compared with PPA v1.1, PPA v1.2 has the following distinct features:

[0258] PPA 1.2 uses a less stringent quality control for cDNAs. It allows 200 bp of unaligned sequence at the 5′ end of cDNAs. It has been shown that the 100 bp cutoff used in PPA 1.1 may be overly stringent.

[0259] PPA 1.2 deals with cDNAs that align to multiple places in the genome and filters out likely processed pseudogenes in a way that was not implemented in PPA 1.1.

[0260] PPA 1.2 filters out alignments to random, unassembled sequence.

[0261] B. Assembling Gene Models

[0262] After the PPA finishes post-processing the cDNA alignments, it begins assembling the aligned cDNAs into gene models. The concept of a “gene” has become exceptionally complicated when viewed from a genomic perspective. Overlapping genes, anti-sense transcripts, trans-splicing, and alternative promoters all make a gene a difficult entity to define. A project at the NCBI called Unigene takes an approach of aligning cDNA sequences to each other and merging those with a certain amount of similar sequence into “unigene” clusters. This approach is problematic because, among other things, genes with similar protein domains may align to each other because of this underlying similarity but not because they were part of the same gene. In contrast, the PPA compares all cDNA genomic alignments to each other and assembles gene models based on cDNAs whose exons align to the same region and same strand of the genome. This distinct approach is superior because it uses the entire cDNA sequence to assign it to a genomic locus and then measures which cDNAs have exons that overlap based on their alignments to a common reference genomic sequence. The PPA defines a gene model as all the collection of cDNAs with at least one base of exon overlap with at least one other cDNA in the same genomic region on the same strand. FIG. 1 shows an example of a group of cDNAs that comprise a gene model.

[0263] Gene models defined by a single cDNA are less reliable than gene models defined by many cDNA sequences because they are based on a single observation, and are even more dubious when the only cDNA is a single-exon cDNA. Many functional and biologically relevant RNA molecules are processed in some way, such as splicing, which creates gaps in the alignment of the RNA sequence to the genome. While true single-exon genes exist, as described above, a large fraction of single-exon cDNA alignments represent pseudogenes. In addition, random pieces of contaminating genomic DNA present in cDNA libraries would appear to be single-exon genes since those pieces of genomic DNA would not be spliced or processed in any sort of way. The previous studies have also shown that the majority of “single-exon genes” represented by a single cDNA do not have functional transcriptional promoters. For all of these reasons, the PPA filters out gene models that are defined by one single-exon cDNA alignment due to the low probability that they actually represent a biologically relevant gene.

[0264] C. Predicting and Categorizing TSSs and Transcriptional Promoters

[0265] After the PPA assembles all the cDNAs into gene models, it predicts the transcription start sites (TSS) within the gene models. TSSs are classified based on their location in the gene model and from the type of cDNA that establishes that TSS (see FIG. 14). For each gene model, there is a 5′ boundary and a cDNA that defines that most 5′ TSS. Some gene models have cDNAs that predict alternative TSSs downstream of the most 5′ TSS. These shorter cDNAs may be incomplete products and therefore would not predict true biological TSSs. Some cDNAs, however, come from libraries that have been enriched for full-length cDNAs such as the Mammalian Gene Collection or the DBTSS. Other cDNAs have been hand-curated to assess quality and are part of the Refseq database built at the NCBI. The PPA predicts alternative TSSs based on these full-length cDNAs from the MGC, DBTSS, or RefSeq that are at least 500 bases downstream of the next closest cDNA. In addition, an alternative TSS is predicted if a cDNA has a first exon that does not overlap any exons from longer cDNAs in the same gene model. A unique first exon increases the confidence in that particular TSS, because it is less likely to be an artificially truncated form of the gene. Therefore, the PPA also predicts alternative TSSs from cDNAs containing unique first exons. Because of the issues raised above concerning single-exon cDNAs, the PPA filters out any alternative TSSs predicted by a single-exon cDNA in that gene model. FIG. 1 shows an example of a hypothetical gene model that has each type of TSS and the cDNAs that define them. Furthermore, the PPA also compares the open reading frames encoded by different cDNAs in a gene model and records how the usage of alternative TSSs may affect the protein product produced by those transcripts.

[0266] Once the PPA establishes the final list of TSSs for each gene model in the genome, the PPA then gathers promoter sequence associated with each TSS. A transcriptional promoter contains two general parts: a core promoter which extends approximately 75 bp upstream and 20 bp downstream of the transcription start site and an extended promoter region that extends up to 2,000 bp upstream of the TSS. The core promoter is the region where RNA polymerase and other basal factors assemble to initiate transcription and the extended promoter region often contains gene-specific regulatory elements that control the spacial and temporal regulation of the gene. Based on these promoter boundaries defined in large part by the previous work, the PPA gathers promoter sequence that extends 2,100 bp upstream and 200 bp downstream of each TSS.

[0267] In order to PCR amplify and clone these promoter fragments, the PPA then calls the primer3 primer design program developed at MIT to design PCR primers that amplify each of these promoter fragments ranging from 700-2,000 bp products depending on the local sequence content of each promoter. For each promoter fragment the PPA requires that PCR primers include the TSS in each amplified fragment and that primers avoid repetitive DNA.

[0268] In order to clone each promoter fragment by ligation, each promoter sequence must be screened for the restriction enzyme pair that is used for the directional ligation reaction. Towards this end, the PPA screens each promoter sequence, and one of three restriction site pairs will be used depending on which sites are absent in the promoter sequence. Based on the genome-wide promoter analysis, employing three restriction enzyme pairs cover 97% of all of the promoters of the genome whereas using a single pair will cover between 55-78% depending on the pair of enzymes used (see the Table in FIG. 16 for details). Once the promoter sequences have been stratified based on restriction site content, the PPA adds the appropriate restriction enzyme recognition sequences at the 5′ end of the forward and reverse primers to allow efficient directional cloning into the plasmid.

[0269] The PPA algorithm also selects a set of 384 negative control fragments from the genome matched to the same size distribution of the promoter fragments. Approximately 25% of these fragments are random middle exon sequences that are at least 10 kb from both ends of the gene. The remaining negative control fragments are chosen randomly from the genome excluding the regions predicted to be promoters by the PPA.

[0270] Compared with PPA v 1.1, PPA v1.2 has the following distinct features:

[0271] PPA v1.2 predicts alternative promoters in a gene model based on cDNAs with unique first exons in addition to using the criteria established in PPA v1.1.

[0272] PPA v1.2 removes alternative TSSs defined by single-exon cDNAs whereas PPA v1.1 does not.

[0273] PPA v1.2 also records if the alternative TSSs result in a different open reading frame compared to the longest cDNA in the gene model.

[0274] PPA v1.2 gathers 2,000 bases of putative promoter sequence from which primers are designed to amplify a promoter fragment between 700 and 2,000 bp. The inventors believe that there is a significant amount of transcriptional regulation controlled in the distal promoter region, and subsequent functional assays performed with these fragments will be more informative than experiments done with promoter fragments <700 basepairs.

[0275] FIG. 15 shows a table that summarizes the categories of promoters predicted by both algorithms. PPA v1.1 predicts 64,526 promoters and PPA v1.2 predicts 45,096 promoters (the sequences of which are designated SEQ ID NOs: 1-45096 listed in the attached DVD) in the human genome. This 30% reduction in overall promoter number largely represents a reduction of noise that was present in PPA v 1.1. Table 1 summarizes the number of promoters in each category using both PPA v1.1 and PPA v1.2.

[0276] Furthermore, FIG. 15 shows the results of a comparison with promoters in the Eukaryotic Promoter Database (EPD). The EPD is database that currently contains 1,806 human promoters that have experimentally validated TSSs. This is a reasonable set of human promoters to test the sensitivity of the algorithms. PPA v1.1 predicts 91.3% and 97.4% of the TSSs that are within 200 bp and 500 bp of the TSSs in EPD, respectively. Likewise, PPA v1.2 predicts 90.8% and 96.5% of the TSSs that are within 200 bp and 500 bp of the TSSs in EPD, respectively. Therefore, both algorithms capture nearly all the promoters present in the EPD. The small number of EPD promoters that were picked up by PPA v1.1 that were missed by PPA v1.2 were looked at and interestingly, all of these appear to be mis-annotations in the EPD to regions upstream of pseudogenes. Therefore, PPA v1.2 is a significant improvement over PPA v1.1 and is significantly (30%) more specific without sacrificing sensitivity.

2) Large-Scale Promoter Cloning

[0277] This example provides a preferred embodiment of the method illustrated in FIG. 10B.

[0278] Several different approaches for high-throughput cloning of human promoter fragments exist including ligation-based methods and recombination-based methods. The new recombination-based cloning products, such as the Gateway system from Invitrogen and the InFusion system from Clontech, are effective and have become very popular in recent years. In Example 1, the Infusion system was used to clone over 1,000 promoter fragments. While effective, the reagents for both Gateway and InFusion are quite expensive. Another disadvantage is that as many as 20 extra bases need to be added to the 5′ end of each PCR primer, significantly raising the cost of oligos. The experience using both ligation-based and recombination-based cloning methods has reliably shown success rates of >90% each at both the PCR and cloning steps.

[0279] To clone more than 5,000 fragments, it was estimated that it becomes more time efficient to use a pooling approach to minimize the effort involved with handling and tracking thousands of individual reactions. By pooling hundreds of samples into single reactions, the burden is shifted to the sequencing effort needed to identify all the anonymously cloned fragments. Major academic and commercial sequencing centers have become incredibly high-throughput and are able to sequence hundreds of thousands of clones quickly and efficiently. It is believed that taking advantage of this expertise greatly benefits a large-scale cloning effort.

[0280] A pilot study was conducted where 384 PCR products were pooled and random fragments were cloned from this pool. Plasmids (fragment to be tested for promoter activity cloned 5′ to a luciferase reporter cassette) were constructed representing 24 putative novel promoters and 12 negative control fragments. This panel of 36 plasmids was then transfected into tissue culture cells (HT1080 fibrosarcoma cells) in 96- and 384-well formats in duplicate. Fifty ng of plasmid was then transfected into each 96-well format well and 20 ng of plasmid into each 384-well format well. After transfection, the cells were moved back to 37° C. for 24 hours. After those 24 hours, luciferase assay reagent was added to each well (Steady-Glo from Promega), 100 uL for 96-well format and 30 uL for 384-well format. Five minutes were waited and then the visible light output was read from each well for 10 seconds using a plate luminometer.

[0281] As less DNA was transfected into fewer cells in the 384-well format, it was expected that the absolute amount of visible light from each well would be less than that seen for the 96-well format. Indeed, this is what was seen with light about ˜50% decreased in the 384-well format. However, this reduced level still fell well within the linear detection range for the luminometer. It was an attempt to find out whether the scaling-down process (to smaller wells) leads to an increase in the variability between replicate wells transfected with the same plasmid construct (i.e. an increase in experimental noise).

[0282] To address this question, the standard deviation was first calculated between replicates for each construct in each well format. However, the standard deviation numbers could not be compared between the two well formats because of the difference in absolute levels of reporter activity. To correct for different activity levels, it was calculated that the Coefficient of Variance (CV, standard deviation divided by the mean) for each construct in each well format. The smaller the CV, the more agreement there is between replicate wells. For the 96-well format, the average CV was 0.15. For the 384-well format, the average CV was 0.12. So the variability between replicates is almost identical for the two formats, and if anything, the 384-well format performed slightly better. In addition, the promoter activity of each fragment tested was compared between the two formats and saw an overall correlation of 0.99. This indicates that the data gathered from a 384-well format is as of least as good of quality as that taken from a 96-well format.

[0283] By sequencing 384 clones (1× coverage), 188 unique fragments (49%) were successfully recovered. While not the 63% expected by random Poisson sampling, this was close to what was expected, knowing that each fragment would not be equally represented due to PCR and cloning biases. The table in FIG. 17 shows the expected percentage of unique clones recovered at different levels of coverage based on our pilot experiment. The following modified protocol applies to any multi-well plate, preferably to a 384-well plate.

Step 1: First Round Pooling

[0284] Each of the 25,000 promoters is individually PCR amplified in 384-well format. The forward and reverse PCR primers already mixed are used to save plasticware, handling, and space. High-fidelity PCR polymerase is used to amplify promoters and expect a ˜90-92% PCR success rate with less than one error per 10 kb. The success rate is measured by running 384 PCR reactions on a gel. These PCR products are then combined into 65 pools of 384 fragments. To work with pools of 384 it is decided to limit the bias of rare over-represented fragments. This way, an over-represented fragment is contained within one pool and does not out-compete fragments in other pools that are more evenly represented.

[0285] The fragments in each of the 65 pools are purified and digested with the appropriate restriction enzyme pair to yield sticky ends. The digested fragments are again be purified, quantitated, and then ligated into our reporter vector. Our reporter vector is also engineered to contain a flexible multiple cloning site and to be compatible with recombination-based shuttling systems. For this purpose, the sequences flanking of the promoter are engineered to allow efficient shuttling into different vector constructs. The vector is plasmid-based and is designed to be used primarily in transient gene delivery systems.

[0286] Each ligation reaction is treated as a mini-library. Each ligation is transformed into high-efficiency chemically competent E. coli and plate the transformed bacteria on 0.150 mm agar plates with the appropriate selectable marker. Part of the negotiated service for sequencing includes colony picking, plasmid preparation, glycerol stock production, and sequencing. Before sending the plates to the sequencing service, 192 colonies are picked, purified plasmids are prepared from each, and a test digest is prepared to ensure that there are 1 kb inserts in at least 99% of the clones. Then, from each library, 768 colonies (2× coverage) are picked from each plate and grown in 2 ml cultures overnight. From each culture, a 50 uL aliquot are archived as a glycerol stock, and the rest of the culture will be used to sequence the promoter insert in each plasmid.

[0287] Based on a study-summarized in FIG. 17, it is expected that ˜15,200 unique sequences are retrieved (˜66% of successful PCR reactions) from the original ˜25,000 promoters in all the pools. Using automated sequence analysis tools, each sequence is aligned to read to our database of promoter sequences from the reference human genome sequence. Successfully cloned promoters are identified, and notes are made of the promoters that are not cloned. A liquid handling robot is then employed to rearray the PCR primers of those promoter fragments that are not cloned in the first round.

Steps 2: Second Round Pooling

[0288] The following step is the same as Step 1, the only difference being that in the beginning they had roughly 33% of the number of promoters used in the previous step. First all PCR amplifications are repeated from the rearrayed primers. It may seem wasteful to regenerate the PCR products since what left could be rearrayed from the original PCR reactions. Based on this experience, there is a significant decline in the cloning efficiency of fragments left in frozen PCR reactions for more than a week, so fresh PCT products are used.

[0289] As before, PCR products are pooled, digested, ligated, transformed, and picked twice as many colonies (2× coverage) as original PCR reactions. It is then sequenced to identify newly cloned fragments and make note of the promoters that are not successfully cloned. It is expected that a smaller percentage of unique fragments will be retrieved in the second round because the second round will be enriched for PCR failures and hard to clone fragments. After these 2 rounds it is expected that ˜75% of the 25,000 total promoters will have been cloned.

[0290] An alternative strategy to conducting 2 rounds of pooling, deconvoluting, and rearraying, would be to do a single round and sequence more clones to gain a greater coverage. Based on random sampling, fewer unique clones are recovered with each increase in fold-coverage, therefore the cost per unique clone increases as a library is sequenced to greater depth.

Step 3: Individual Cloning

[0291] The PCR primers are rearrayed and individually clone the remaining promoters that are unable to be cloned in the previous 2 rounds, in addition to the promoters for which alternative restriction enzyme pairs or blunt clone due to their incompatibility with our 3 primary restriction sites are used. Many of the promoters that are not cloned in the pooling strategy represent PCR failures, therefore each PCR reaction is run on a high-throughput slab gel to identify the failed PCRs that are not worth pursuing. The successful PCR reactions are then rearrayed and purified individually in 96-well format in less than a week to avoid decreases in cloning efficiency. Finally, the same steps of digestion, ligation, and transformation are preformed, only on each fragment individually in 96-well format.

[0292] 3) Large-Scale Functional Promoter Assay

[0293] This example provides a preferred embodiment of the method illustrated in FIG. 11B.

[0294] After all of the promoters in the human genome are cloned, a non-redundant set of promoter-containing plasmids (along with the negative controls) are mass-produced in E. coli, purified, diluted to the same concentration (50 ng/ul), and stored in 96-well blocks (2 ml/well). Using a liquid handling robot, 50 ng of each plasmid is re-arrayed into multiple sets of 60 384-well plates. An optional step is to also add 10 ng of the same transfection control plasmid to each well. The transfection control plasmid has a ubiquitous promoter that drives a different reporter than the one used on the experimental promoter plasmid. Each plate contains a column (16 wells) of plate normalization constructs (PNC). The set of PNC comprises 8 positive control fragments spanning a range of promoter strengths and 8 negative control fragments. The plasmid DNAs are dried in each well and stored for subsequent applications.

[0295] The large-scale plasmid delivery to living cells can be performed using one of the following approaches:

[0296] Approach 1—High-throughput conventional transient transfection: Resuspend plasmids in a transfection reagent mix including a lipofection reagent such as Fugene (Roche) and serum-free media. The transfection reagent forms liposomal complexes with the plasmid DNA and is then ready to be added to tissue culture cells growing in 384-well plates.

[0297] Approach 2—High-throughput reverse transfection: Alternatively, resuspend plasmids in a transfection reagent mix similar to that described above but also including a liquefied matrix of either glycerin or agar. Next, deposit this transfection mixture to the bottom of an empty 384-well tissue culture plate and allow it to solidify in the matrix. Then, living cells can be plated on top of this transfection matrix and the cells will take up the promoter plasmids that are contained in the matrix. Details of reverse transfection of cDNAs are described in U.S. Pat. Nos. 6,544,790; 6,670,129; 6,951,757; and U.S. application Ser. Nos. 09/817,003; and 10/379,130, all of which are incorporated herein by reference in their entireties for all purposes.

[0298] Once the plasmids from the library have been delivered to cells in one of the ways described above, they must be given 24-48 hours to allow time for expression of the reporter gene. The experiment may also include a change in experimental condition such as addition of a compound or change in the environment. After there has been sufficient amount of time for the expression of the reporter gene, the level of the reporter product is measured either by the addition of the appropriate substrate (for luminescent reporters) or by excitation by the appropriate wavelength of light (for fluorescent reporters). The substrate for the luminescent reporters (for both the experimental plasmid and transfection control plasmid if it is used) is delivered either to living cells or by lysing the cells in each well with a lysis buffer and mixing the substrate with the cell extract. The last step is to read the signal produced in each well (by each reporter) by the appropriate device (luminometer or fluorometer).

4) Data Analysis for Large-scale Functional Promoter Assay

[0299] This example provides a preferred embodiment of the method illustrated in FIG. 12B.

[0300] Once the raw data has been collected, the first step is to normalize based on the transfection control if a transfection control plasmid has been used by calculating the ratio of experimental signal divided by the transfection control signal. Then average any replicate transfections that have been performed.

[0301] The next step is to normalize for any plate-to-plate variation using the plate normalization constructs (PNC). The mean signal and standard deviation is calculated for each of the 16 individual constructs across all of the plates in the PNC and then calculate the signal difference of each construct from the mean for each plate. The difference for each construct is normalized by dividing by the standard deviation of that construct. This normalization is necessary to correct for the larger variances of the positive control fragments in the PNC that are due to larger absolute values. Then the 16 normalized differences in each plate are averaged together to derive a plate normalization factor, and it factor is used to normalize the data for each plate. This ultimately produces a normalized raw promoter activity value for each promoter.

[0302] The normalized raw promoter values are most relevant in the context of the negative control fragments. Therefore, the next step is to measure the distribution of the values of the negative control fragments and express each promoter value in terms of the mean and standard deviation of the distribution of the negative controls. This results in a Z-score value for each promoter that is calculated as [(raw promoter activity−mean of negative controls)/standard deviation of the negative controls]. This Z-score-based analysis allows for better comparison of data between experiments because it takes into account the variance in the distribution of the negative control values. Z-score measure of promoter activity takes into account the variance of cell lines and corrects for it.

### Example 3

### Assay for Determining DNA Methylation Status Genome-Wide

[0303] This example provides a preferred embodiment of the method for determining DNA methylation illustrated in FIG. 13. The process is as follows.

[0304] From either tissue culture cells or tissue samples, prepare high-molecular weight DNA using either a DNA affinity column (such as those provided in the DNeasy Kit from Qiagen) or by repeated phenol-chloroform extractions. Make sure the 260/280 ratio is >1.8 and that there are no residual traces of phenol in the sample.

[0305] Next digest 10 ug of the genomic DNA with 2 ul each of the following 3 methyl-sensitive restriction enzymes: HpaII, HgaI, HpyCH4 IV. Perform digestion in a total volume of 100 ul for 2-4 hours. These enzymes are optimized to work in the same buffer conditions (NEB Buffer #1) that is provided by the enzyme supplier (NEB).

[0306] Purify the DNA from the digest using the DNeasy columns from Qiagen. Elute in a final volume of 85 ul of water. Use this elution in a second digestion reaction using 2 ul each of the following 3 methyl-sensitive restrictrion enzymes: AciI, HhaI, BstU I. Perform digestion in a total volume of 100 ul for 2-4 hours. These enzymes are optimized to work in the same buffer conditions (NEB Buffer #4+bovine serum albumin) that is provided by the enzyme supplier (NEB).

[0307] Purify the DNA from the digest using the DNeasy columns from Qiagen. Elute in a final volume of 100 ul of water. This series of digestions with methyl-sensitive enzymes should deplete all unmethylated regions of the genome. The DNeasy columns only bind to DNA >100 bp so smaller pieces produced by the digestion are purified away.

[0308] Next label the digested DNA with a fluorescent nucleotide or primer (cy3 or cy5 dUTP or dCTP). Also label an undigested control sample of the same genomic DNA with a different fluorescent label than that used on the digested sample. Apply both samples in a competitive hybridization to a genomic microarray following standard procedures. The microarray can either be a spotted promoter or CpG island array or an oligo array that tiles across genomic regions of interest.

[0309] After washing and scanning the microarray, for each microarray feature, calculate the log (base 2) ratio of the digested DNA signal to the undigested DNA signal. Use negative control regions that should not be depleted by the enzyme treatment to measure the variation of log ratios around 0. A log ratio of 0 corresponds to equal signals from both colors representing equal amounts of a particular target in both the treated and untreated samples.

[0310] While preferred embodiments of the present invention have been shown and described herein, it will be obvious to those skilled in the art that such embodiments are provided by way of example only. Numerous variations, changes, and substitutions will now occur to those skilled in the art without departing from the invention. It should be understood that various alternatives to the embodiments of the invention described herein may be employed in practicing the invention. It is intended that the following claims define the scope of the invention and that methods and structures within the scope of these claims and their equivalents be covered thereby.

### SEQUENCE LISTING

[0311] SEQ ID NOs: 1-45,496 are provided on a compact disc as file name 33102-701.201.SeqList.ST25.txt, enclosed with this filing.

### REFERENCES

[0312] Ahituv, N., E. M. Rubin, and M. A. Nobrega. 2004. Exploiting human—fish genome comparisons for deciphering gene regulation. Hum Mol Genet 13 Spec No 2: R261-266.
[0313] Bailey, T. L. and C. Elkan. 1994. Fitting a mixture model by expectation maximization to discover motifs in biopolymers. Proc Int Conf Intell Syst Mol Biol 2: 28-36.
[0314] Bertone, P., y. Stolc, T. E. Royce, J. S. Rozowsky, A. E. Urban, X. Zhu, J. L. Rinn, W. Tongprasit, M. Samanta, S. Weissman, M. Gerstein, and M. Snyder. 2004. Global identification of human transcribed sequences with genome tiling arrays. Science 306: 2242-2246.
[0315] Blais, A. and B. D. Dynlacht. 2004. Hitting their targets: an emerging picture of E2F and cell cycle control. Curr Opin Genet Dev 14: 527-532.
[0316] Brudno, M., C. B. Do, G. M. Cooper, M. F. Kim, E. Davydov, E. D. Green, A. Sidow, and S. Batzoglou. 2003. LAGAN and Multi-LAGAN: efficient tools for large-scale multiple alignment of genomic DNA. Genome Res 13: 721-731.
[0317] Butler, J. E. and J. T. Kadonaga. 2002. The RNA polymerase II core promoter: a key component in the regulation of gene expression. Genes Dev 16: 2583-2592.
[0318] Cavin Perier, R., T. Junier, and P. Bucher. 1998. The Eukaryotic Promoter Database EPD. Nucleic Acids Res 26: 353-357.
[0319] Cooper, G. M., E. A. Stone, G. Asimenos, E. D. Green, S. Batzoglou, and A. Sidow. 2005. Distribution and intensity of constraint in mammalian genomic sequence. Genome Res 15: 901-913.
[0320] Dixon, W. 1950. Analysis of extreme Values. Annals of Mathematics and Statistics 21: 488-506.
[0321] The ENCODE Project Consortium. 2004. The ENCODE (ENCyclopedia Of DNA Elements) Project. Science 306: 636-640.
[0322] Gentles, A. J. and S. Karlin. 1999. Why are human G-protein-coupled receptors predominantly intronless? Trends Genet 15: 4749.
[0323] Gerhard, D. S. L. et al. 2004. The status, quality, and expansion of the NIH full-length cDNA project: the Mammalian Gene Collection (MGC). Genome Res 14: 2121-2127.
[0324] Hentschel, C. C. and M. L. Birnstiel. 1981. The organization and expression of histone gene families. Cell 25: 301-313.
[0325] Howard, M. L. and E. H. Davidson. 2004. cis-Regulatory control circuits in development. Dev Biol 271: 109-118.
[0326] Imanishi, T. T. et al. 2004. Integrative annotation of 21,037 human genes validated by full-length cDNA clones. PLoS Biol 2: 856-875.
[0327] Kapranov, P., S. E. Cawley, J. Drenkow, S. Bekiranov, R. L. Strausberg, S. P. Fodor, and T. R. Gingeras. 2002. Large-scale transcriptional activity in chromosomes 21 and 22. Science 296: 916-919.
[0328] Karolchik, D., R. Baertsch, M. Diekhans, T. S. Furey, A. Hinrichs, Y. T. Lu, K. M. Roskin, M. Schwartz, C. W. Sugnet, D. J. Thomas, R. J. Weber, D. Haussler, and W. J. Kent. 2003. The UCSC Genome Browser Database. Nucleic Acids Res 31: 51-54.
[0329] Kim, N., M. Takami, J. Rho, R. Josien, and Y. Choi. 2002. A novel member of the leukocyte receptor complex regulates osteoclast differentiation. J Exp Med 195: 201-209.
[0330] Kim, T. H., L. O. Barrera, C. Qu, S. Van Calcar, N. D. Trinklein, S. J. Cooper, R. M. Luna, C. K. Glass, M. G. Rosenfeld, R. M. Myers, and B. Ren. 2005. Direct isolation and identification of promoters in the human genome. Genome Res 15: 830-839.
[0331] Kimmel, A. R. and S. L. Berger. 1987. Preparation of cDNA and the generation of cDNA libraries: overview. Methods Enzymol 152: 307-316.
[0332] Krumm, A., L. B. Hickey, and M. Groudine. 1995. Promoter-proximal pausing of RNA polymerase II defines a general rate-limiting step after transcription initiation. Genes Dev 9: 559-572.
[0333] Krumm, A., T. Meulia, M. Brunvand, and M. Groudine. 1992. The block to transcriptional elongation within the human c-myc gene is determined in the promoter-proximal region. Genes Dev 6: 2201-2213.
[0334] Landry, J. R., D. L. Mager, and B. T. Wilhelm. 2003. Complex controls: the role of alternative promoters in mammalian genomes. Trends Genet 19: 640-648.
[0335] Liu, X., D. L. Brutlag, and J. S. Liu. 2001. BioProspector: discovering conserved DNA motifs in upstream regulatory regions of co-expressed genes. Pac Symp Biocomput: 127-138.
[0336] Lunyak, V. V., G. G. Prefontaine, and M. G. Rosenfeld. 2004. REST and peace for the neuronal-specific transcriptional program. Ann N Y Acad Sci 1014: 110-120.
[0337] Meyer, S., C. Temme, and E. Wahle. 2004. Messenger RNA turnover in eukaryotes: pathways and enzymes. Crit Rev Biochem Mol Biol 39: 197-216.
[0338] Ogbourne, S. and T. M. Antalis. 1998. Transcriptional control and the role of silencers in transcriptional regulation in eukaryotes. Biochem J 331 (Pt 1): 1-14.
[0339] Pirkkala, L., P. Nykanen, and L. Sistonen. 2001. Roles of the heat shock transcription factors in regulation of the heat shock response and beyond. Faseb J 15: 1118-1131.
[0340] Praz, V., R. Perier, C. Bonnard, and P. Bucher. 2002. The Eukaryotic Promoter Database, EPD: new entry types and links to gene expression data. Nucleic Acids Res 30: 322-324.
[0341] Rozen, S. and H. Skaletsky. 2000. Primer3 on the WWW for general users and for biologist programmers. Methods Mol Biol 132: 365-386.
[0342] Rubin, J. S., D. P. Bottaro, and S. A. Aaronson. 1993. Hepatocyte growth factor/scatter factor and its receptor, the c-met proto-oncogene product. Biochim Biophys Acta 1155: 357-371.
[0343] Schoenherr, C. J. and D. J. Anderson. 1995. The neuron-restrictive silencer factor (NRSF): a coordinate repressor of multiple neuron-specific genes. Science 267: 1360-1363.
[0344] Schoenherr, C. J., A. J. Paquette, and D. J. Anderson. 1996. Identification of potential target genes for the neuron-restrictive silencer factor. Proc Natl Acad Sci USA 93: 9881-9886.
[0345] Suzuki, Y., R. Yamashita, K. Nakai, and S. Sugano. 2002. DBTSS: DataBase of human Transcriptional Start Sites and full-length cDNAs. Nucleic Acids Res 30: 328-331.
[0346] Suzuki, Y., R. Yamashita, S. Sugano, and K. Nakai. 2004. DBTSS, DataBase of Transcriptional Start Sites: progress report 2004. Nucleic Acids Res 32 Database issue: D78-81.
[0347] Suzuki-Yagawa, Y., M. Guermah, and R. G. Roeder. 1997. The ts13 mutation in the TAF(II)250 subunit (CCGI) of TFIID directly affects transcription of D-type cyclin genes in cells arrested in GI at the nonpermissive temperature. Mol Cell Biol 17: 3284-3294.
[0348] Tamasky, H., D. Gill, S. Murthy, X. Shao, D. J. Demetrick, and F. A. van der Hoom. 1998. A novel testis-specific gene, SPAG4, whose product interacts specifically with outer dense fiber protein ODF27, maps to human chromosome 20q11.2. Cytogenet Cell Genet 81: 65-67.
[0349] Tatarelli, C., A. Linnenbach, K. Mimori, and C. M. Croce. 2000. Characterization of the human TESTIN gene localized in the FRA7G region at 7q31.2. Genomics 68: 1-12.
[0350] Trinklein, N. D., S. F. Aldred, S. J. Hartman, D. I. Schroeder, R. P. Otillar, and R. M. Myers. 2004. An abundance of bidirectional promoters in the human genome. Genome Res 14: 62-66.
[0351] Trinklein, N. D., S. J. Aldred, A. J. Saldanha, and R. M. Myers. 2003. Identification and functional analysis of human transcriptional promoters. Genome Res 13: 308-312.
[0352] Wang, E. H. and R. Tjian. 1994. Promoter-selective transcriptional defect in cell cycle mutant ts13 rescued by hTAFII250. Science 263: 811-814.
[0353] Wilusz, C. J. and J. Wilusz. 2004. Bringing the role of mRNA decay in the control of gene expression into focus. Trends Genet 20: 491-497.
[0354] Yang, A., M. Kaghad, Y. Wang, E. Gillett, M. D. Fleming, V. Dotsch, N. C. Andrews, D. Caput, and F. McKeon. 1998. p63, a p53 homolog at 3q27-29, encodes multiple products with transactivating, death-inducing, and dominant-negative activities. Mol Cell 2: 305-316.

What is claimed is:

1. A library of expression constructs, each member of the library comprising a different nucleic acid segment from a genome, wherein the segment comprises transcription regulatory sequences, operably linked with a heterologous reporter sequence in an expression vector such that expression of the reporter sequence is under transcriptional control of the transcription regulatory sequences, wherein:
(a) the library has a diversity of at least 50 different nucleic acid segments;
(b) each nucleic acid segment and is naturally linked in the genome with a sequence expressed as a cDNA; and
(c) the average length of the nucleic acid segments in the library is at least 600 nucleotides.

2. The library of claim 1, wherein the average length of the nucleic acid segments in the library is between 700 nucleotides and 1200 nucleotides.

3. The library of claim 1, wherein the average length of the nucleic acid segments in the library is between 800 nucleotides and 1100 nucleotides.

4. The library of claim 1, wherein at least 90% of the nucleic acid segments in the library have a length between 700 nucleotides and 1300 nucleotides.

5. The library of claim 1, wherein each nucleic acid segment comprises at least 500 nucleotides upstream of a transcriptional start site.

6. The library of claim 1, wherein no more than 5% of the nucleic acid segments are naturally linked to cDNA alignment artifacts.

7. The library of claim 1, wherein the library is indexed to indicate the gene naturally under the transcriptional control of each transcription regulatory sequence in the genome.

8. The library of claim 1, wherein the reporter sequences encode the same reporter molecule.

9. The library of claim 1, wherein the reporter sequence encodes a light-emitting reporter molecule, a fluorescent reporter molecule or a calorimetric molecule.

10. The library of claim 1, wherein each reporter sequence comprises a pre-determined, unique nucleotide barcode and/or a reporter that reports a visible signal.

11. The library of claim 1, wherein the genome is a mammalian genome.

12. The library of claim 1, wherein the genome is a human genome.

13. The library of claim 1, wherein the genome is a mouse genome.

14. The library of claim 1, wherein the diversity of the nucleic acid segment is at least 100.

15. The library of claim 1, wherein the diversity of the nucleic acid segment is at least 500.

16. The library of claim 1, wherein the expression construct is a plasmid or viral construct.

17. The library of claim 1, wherein the nucleic acid segments include at least two of the DNA segments selected from the group consisting of SEQ ID NOs: 1-45096 or fragments thereof or nucleic acids having sequences with at least 70%, 75%, 80%, 85%, 90%, 95%, or 98% homology thereto.

18. A library of isolated nucleic acid molecules, each member of the library comprising a different, pre-determined nucleic acid segment from a genome, wherein the segment comprises transcription regulatory sequences, wherein:
(a) the library has a diversity of at least 50 different nucleic acid segments;
(b) each nucleic acid segment is naturally linked in the genome with a sequence expressed as a cDNA; and
(c) the average length of the nucleic acid segments in the library is at least 600 nucleotides.

19. A library of recombinant nucleic acid molecules, each member of the library comprising a different, determined nucleic acid segment from a genome linked with a heterologous nucleic acid molecule, wherein the segment comprises transcription regulatory sequences, wherein:
(a) the library has a diversity of at least 50 different nucleic acid segments;
(b) each nucleic acid segment is naturally linked in the genome with a sequence expressed as a cDNA; and
(c) the average length of the nucleic acid segments in the library is at least 600 nucleotides.

20. The library of claim 19 wherein the nucleic acid molecule comprises a pair of restriction sites flanking a 5′ and a 3′ side of the segment.

21. The library of claim 19 wherein the nucleic acid molecule comprises sites flanking on the 5′ and 3′ ends the segment that are complementary to PCR primers that may be used for amplification.

22. A library of cells, wherein each cell in the library of cells comprises a different member of a library of expression constructs, wherein each member of the library of expression constructs comprises a different nucleic acid segment from a genome, wherein the segment comprises transcription regulatory sequences, operably linked with a heterologous reporter sequence in an expression vector such that expression of the reporter sequence is under transcriptional control of the transcription regulatory sequences, wherein:
(a) the library has a diversity of at least 50 different nucleic acid segments;
(b) each nucleic acid segment is naturally linked in the genome with a sequence expressed as a cDNA; and
(c) the average length of the nucleic acid segments in the library is at least 600 nucleotides.

23. The library of claim 22 wherein the cells are human cells.

24. The library of claim 22 wherein the cells are non-human cells.

25. A collection of cells comprising within the cells a library of expression constructs, each member of the library of expression constructs comprising: a different nucleic acid segment from a genome, wherein the segment comprises transcription regulatory sequences, operably linked with a different heterologous reporter sequence in an expression vector such that expression of the reporter sequence is under transcriptional control of the transcription regulatory sequences.

26. The collection of cells of claim 25, wherein the cell containing a different expression construct is in an identifiable vial or well.

27. The collection of cells of claim 25 wherein:
(a) the library has a diversity of at least 50 different nucleic acid segments;
(b) each nucleic acid segment is naturally linked in the genome with a sequence expressed as a cDNA; and
(c) the average length of the nucleic acid segments in the library is at least 600 nucleotides.

28. A device comprising at least one plate comprising a plurality of wells, each well containing a different member of a library of expression constructs, each expression construct comprising a different, nucleic acid segment from a genome, wherein the segment comprises transcription regulatory sequences, operably linked with a heterologous reporter sequence in an expression vector such that expression of the reporter sequence is under transcriptional control of the transcription regulatory sequences, and wherein each member has a known location among the wells.

29. The device of claim 28, wherein:
(a) the library has a diversity of at least 50 different nucleic acid segments,
(b) each nucleic acid segment is naturally linked in the genome with a sequence expressed as a cDNA; and
(c) the average length of the nucleic acid segments in the library is at least 600 nucleotides.

30. The device of claim 28, wherein the constructs are in the form of a dried nucleic acid or are in solution.

31. The device of claim 30 wherein the constructs are in a transfection matrix combination.

32. The device of claim 28 comprising a 96-well plate, a 384-well plate or a 1536 well plate.

33. The device of claim 28, wherein the gene expression regulatory elements include at least two of the DNA segments selected from the group consisting of SEQ ID NOs: 145096 or fragments thereof or nucleic acids having sequences with at least 70%, 75%, 80%, 85%, 90%, 95%, or 98% homology thereto.

34.

35. A device comprising at least one plate comprising a plurality of wells, each well containing a different member of the library of cells, wherein each cell in the library of cells comprises a different member of the library of expression constructs, each expression construct comprising a different nucleic acid segment from a genome, wherein the segment comprises transcription regulatory sequences, operably linked with a heterologous reporter sequence in an expression vector such that expression of the reporter sequence is under transcriptional control of the transcription regulatory sequences and wherein each member of the library of cells has a known location among the wells.

36. The device of claim 35 wherein:
(a) the library of expression constructs has a diversity of at least 50 different nucleic acid segments;
(b) each nucleic acid segment is naturally linked in the genome with a sequence expressed as a cDNA; and
(c) the average length of the nucleic acid segments in the library is at least 600 nucleotides.

37. A kit for characterizing a biological function of a target gene expression regulatory element, comprising:
(a) a device comprising at least one plate comprising a plurality of wells, each well containing a different member of the library of expression constructs, each expression construct comprising a different nucleic acid segment from a genome, wherein the segment comprises transcription regulatory sequences operably linked with a heterologous reporter sequence in an expression vector such that expression of the reporter sequence is under transcriptional control of the transcription regulatory sequences, and wherein each member has a known location among the wells; and
(b) reporter assay substrates.

38. The kit of claim 37, further comprising: instructions for characterizing the biological function of the target gene expression regulatory element.

39. A device comprising a solid substrate comprising a surface and nucleic acid molecules immobilized to the surface, each at a different known location, wherein each molecule comprises a nucleotide sequence of at least 10 nucleotides from a genomic segment comprising transcription regulatory sequences and the device comprises transcription regulatory sequences from at least 50 different genomic segments.

40. The device of claim 39 wherein each nucleic acid segment is naturally linked in the genome with a sequence expressed as a cDNA.

41. The device of claim 39 wherein the gene expression regulatory elements include at least two of the DNA segments selected from the group consisting of SEQ ID NOs: 1-45096 or fragments thereof.

42. The device of claim 39 wherein the molecules are no more than 60 nucleotides long.

43. The device of claim 39 wherein each genomic segment is represented by a set comprising a plurality of molecules, each molecule in the set comprising a different a different nucleotide sequence from the genomic segment.

44. A system comprising:
(a) a device of claim 35;
(b) a reader adapted to detect a signal from an expressed reporter sequenced in each well of the device.

45. The system of claim 44 wherein the device comprises a plurality of control constructs that provide a predetermined signal level, and wherein the system further comprises (c) software comprising:
(i) code that executes an algorithm that normalizes signal from all wells of plates based on the signal from the control constructs.

46. Software comprising code that executes the algorithm of claim 45.

47. A method comprising:
(a) providing a device comprising at least one plate comprising a plurality of wells, each well containing a different member of a library of cells, wherein each cell in the library of cells comprises a different member of the library of expression constructs, each expression construct comprising a different nucleic acid segment from a genome, wherein the segment comprises transcription regulatory sequences, operably linked with a heterologous reporter sequence in an expression vector such that expression of the reporter sequence is under transcriptional control of the transcription regulatory sequences and wherein each member of the library of cells has a known location among the wells;
(b) culturing the cells; and
(c) measuring the level of expression of the reporter sequence in each well.

48. The method of claim 45 wherein:
(i) the library has a diversity of at least 50 different nucleic acid segments;
(ii) each nucleic acid segment is naturally linked in the genome with a sequence expressed as a cDNA; and
(iii) the average length of the nucleic acid segments in the library is at least 600 nucleotides.

49. The method of claim 45 wherein the step of providing the device comprises:
(i) providing a device comprising at least one plate comprising a plurality of wells, each well containing a different member of the library of expression constructs, wherein each member of the library of expression constructs has a known location among the wells;
(ii) delivering cells to each of the wells; and
(iii) transfecting the cells with the expression constructs.

50. The method of claim 45 further comprising:
(d) perturbing the cells in each well;
(e) measuring the level of expression of the reporter sequence in each well; and
(f) determining whether the level of expression in any well changed after contacting the cells with the test compound.

51. The method of claim 50 wherein perturbing comprises contacting the cells in each well with a test compound, exposing the cells to different environmental conditions, or genetically modifying the cells either permanently or transiently such as by inducing mutation, overexpressing a transcript for example by transfecting with a cDNA or decreasing expression of a transcript by siRNA.

52. The method of claim 45 wherein the reporter sequence encodes a reporter molecule and measuring expression of the reporter sequence comprises measuring the expression of the reporter molecule.

53. A method comprising:
(a) providing a first device and second device, each device comprising at least one plate comprising a plurality of wells, each well containing a different member of a library of cells, wherein each cell in the library of cells comprises a different member of the library of expression constructs, each expression construct comprising a different nucleic acid segment from a genome, wherein the segment comprises transcription regulatory sequences, operably linked with a heterologous reporter sequence in an expression vector such that expression of the reporter sequence is under transcriptional control of the transcription regulatory sequences, wherein each member of the library of cells has a known location among the wells and wherein the first and second devices comprise cells of the same type and the library of expression constructs is the same in the first and second devices;
(b) culturing the cells of the first and second devices under different culture conditions;
(c) measuring the level of expression of the reporter sequence in each well; and
(d) comparing the level of expression of the reporter sequence to each transcription regulatory sequence between the first cell type and the second cell type.

54. The method of claim 53 wherein the different culture conditions comprise culturing the cells of the second device in the presence of compound not present in the culture of the cells of the first device.

55. A method comprising:
(a) providing a first device and second device, each device comprising at least one plate comprising a plurality of wells, each well containing a different member of a library of cells, wherein each cell in the library of cells comprises a different member of the library of expression constructs, each expression construct comprising a different nucleic acid segment from a genome, wherein the segment comprises transcription regulatory sequences, operably linked with a heterologous reporter sequence in an expression vector such that expression of the reporter sequence is under transcriptional control of the transcription regulatory sequences, wherein each member of the library of cells has a known location among the wells and wherein the first device comprises cells of a first type and second device comprises cells of a second type and the library of expression constructs is the same in the first and second devices;
(b) culturing the cells of the first and second devices;
(c) measuring the level of expression of the reporter sequence in each well; and
(d) comparing the level of expression of the reporter sequence to each transcription regulatory sequence between the first cell type and the second cell type.

56. The method of claim 55 wherein:
(i) the library has a diversity of at least 50 different nucleic acid segments;
(ii) each nucleic acid segment is naturally linked in the genome with a sequence expressed as a cDNA; and
(iii) the average length of the nucleic acid segments in the library is at least 600 nucleotides.

57. The method of claim 55 wherein the step of providing the devices comprises:
(i) providing devices, each device comprising at least one plate comprising a plurality of wells, each well containing a different member of the library of expression constructs, wherein each member of the library of expression constructs has a known location among the wells;
(ii) delivering cells to each of the wells; and
(iii) transfecting or infecting the cells with the expression constructs.

58. A method for evaluating the level of expression from constructs measured by the method of claim 47 comprising:
(a) providing a set of cells comprising a set of control reporter constructs, each control reporter construct comprising a random genomic fragment operatively linked with the heterologous reporter sequence;
(b) measuring the level of expression of the reporter sequence in each of cells;
(c) determining a mean or average of the expression level among the control constructs;
(d) determining, for the level of expression of each of the test constructs, a statistical distance from the mean or average; and
(e) determining whether the deviation is statistically significant.

59. The method of claim 58 wherein the deviation is a standard deviation.

60. The method of claim 58 wherein the random genomic fragments are random fragments selected from the genome of the same size distribution as the experimental fragments.

61. The method of claim 58 wherein the random genomic fragments are random fragments from middle exons of protein coding genes where the middle exon codes for protein and is a length of at least the size of the experimental fragments and at least 5,000 or 10,000 bases from a known transcription start site in the genome.

62. The method of claim 58 wherein activity and significance are calculated as a Z-score by the following equation: Z-score promoter activity=(raw promoter activity−mean of random controls)/standard deviation of the random controls.

63. Software comprising code that executes an algorithm that determines the mean and deviations of claim 58.

64. Analysis software that integrates Z-score transformed promoter activity data with Z-score transformed functional data from DNA methylation experiments, transcription factor binding data, histone modification data, DNase hypersensitivity data, nucleosome displacement data or gene expression data.

65. A method for determining a methylation pattern in a sequence of nucleic acid comprising:
(a) creating a first set of labeled nucleic acid segments by:
(i) obtaining a nucleic acid molecule comprising the sequence from a source; and
(ii) labeling the isolated nucleic acid molecule with a first label, whereby labeling creates a first set of labeled nucleic acid segments;
(b) creating a second set of labeled nucleic acid segments by:
(i) obtaining the nucleic acid molecule having the nucleotide sequence from the source;
(ii) contacting the nucleic acid molecule with at least three methyl-sensitive restriction enzymes having different recognition sequences, wherein the enzymes cleave the nucleic acid molecule at un-methylated recognition sequences but not at methylated recognition sequences, thereby nucleic acid fragments;
(iii) isolating nucleic acid fragments of at least 100 nucleotides from the mixture; and
(iv) labeling the fragments with a second, different label, whereby labeling creates a second set of nucleic acid segments;
(c) hybridizing the first and second labeled segments to one or more nucleic acid probes comprising the nucleotide sequence; and
(d) determining areas of the nucleotide sequence that are differentially labeled by the first and second labeled segments, wherein differentially labeled areas are un-methylated areas of the nucleotide sequence.

66. The method of claim 65 wherein the nucleic acid molecule comprises transcription regulatory sequences.

67. The method of claim 65 comprising contacting the nucleic acid molecules with at least six different methyl-sensitive enzymes.

68. The method of claim 65 wherein the first label generates a first color and the second label generates a second, different color.

69. The method of claim 65 comprising hybridizing the segments to a plurality of probes that tile the nucleotide sequence of the nucleic acid molecule.

70. The method of claim 65 further comprising performing the method a second time with nucleic acid from a second source, wherein the first and second sources are healthy and diseased tissues or two different types of diseased tissues.

71. A business method comprising:
(a) commercializing the compositions, devices or methods of any of claims 1, 18, 19, 22, 25, 28, 34, 38, 43, 45, 46, 52, 54, 57, 62, 63 and 64.

The application's sequence listing, which the Patent Office published only in electronic form, follows.

SEQUENCE LISTING (45496 sequences)

SEQ ID NO: 1 - DNA, 1936 bp, Homo sapien
taaccctaaccctaaccctaaccctaaccctaaccctaaccctaaccctaaccctaaccctaaccctaaccctaaccctaaccctaaccctaaccctaaccctaacccaaccctaaccctaaccctaaccctaaccctaaccctaacccctaaccctaaccctaaccctaaccctaacctaaccctaaccctaaccctaaccctaaccctaaccctaaccctaaccctaacccctaaccctaaccctaaaccctaaaccctaaccctaaccctaaccctaaccctaaccccaaccccaaccccaaccccaaccccaaccccaaccctaacccctaaccctaaccctaaccctaccctaaccctaaccctaaccctaaccctaaccctaacccctaacccctaaccctaaccctaaccctaaccctaaccctaaccctaacccctaaccctaaccctaaccctaaccctcgcggtaccctcagccggcccgcccgcccgggtctgacctgaggagaactgtgctccgccttcagagtaccaccgaaatctgtgcagaggacaacgcagctccgccctcgcggtgctctccgggtctgtgctgaggagaacgcaactccgccggcgcaggcgcagagaggcgcgccgcgccggcgcaggcgcagacacatgctagcgcgtcggggtggaggcgtggcgcaggcgcagagaggcgcgccgcgccggcgcaggcgcagagacacatgctaccgcgtccaggggtggaggcgtggcgcaggcgcagagaggcgcaccgcgccggcgcaggcgcagagacacatgctagcgcgtccaggggtggaggcgtggcgcaggcgcagagacgcaagcctacgggcgggggttgggggggcgtgtgttgcaggagcaaagtcgcacggcgccgggctggggcggggggagggtggcgccgtgcacgcgcagaaactcacgtcacggtggcgcggcgcagagacgggtagaacctcagtaatccgaaaagccgggatcgaccgccccttgcttgcagccgggcactacaggacccgcttgctcacggtgctgtgccagggcgccccctgctggcgactagggcaactgcagggctctcttgcttagagtggtggccagcgccccctgctggcgccggggcactgcagggccctcttgcttactgtatagtggtggcacgccgcctgctggcagctagggacattgcagggtcctcttgctcaaggtgtagtggcagcacgcccacctgctggcagctggggacactgccgggccctcttgctccaacagtactggcggattatagggaaacacccggagcatatgctgtttggtctcagtagactcctaaatatgggattcctgggtttaaaagtaaaaaataaatatgtttaatttgtgaactgattaccatcagaattgtactgttctgtatcccaccagcaatgtctaggaatgcctgtttctccacaaagtgtttacttttggatttttgccagtctaacaggtgaagccctggagattcttattagtgatttgggctggggcctggccatgtgtatttttttaaatttccactgatgattttgctgcatggccggtgttgagaatgactgcgcaaatttgccggatttcctttgctgttcctgcatgtagtttaaacgagattgccagcaccgggtatcattcaccatttttcttttcgttaacttgccgtcagccttttctttgacctcttctttctgttcatgtgtatttgctgtctcttagcccagacttcccgtgtcctttccaccgggcctttgagaggtcacagggtcttgatgctgtggtcttcatctgcaggtgtctgacttccagcaactgctggcctgtgccagggtgcaagctgagcactggagtggagttt

SEQ ID NO: 2 - DNA, 2300 bp, Homo sapien
agtaccctgctccagggcgcctgcaggaatatggctccatcttcacgggcgcccaggaccctggcctgcagagacgcccccgccacaggatccagagcaagcaccgccccctggacgagcgggccctgcaggtctgctggccgcgcatatagcctgtcacacaccaggaggactggatactggggaggagccggggccaccatagggttctgtcccccagaggaggctgactgggatgggatggcagctgattaggcccagcaccaaatattcaccatcccttggccatcctggccctctcaggagaagctgaaggactttcctgtgtgcgtgagcaccaagccggagcccgaggacgatgcagaagagggacttgggggtcttcccagcaacatcagctctgtcagctccttgctgctcttcaacaccaccgagaacctgtatggccagagggcagggccgaggggtgtgggcgggaggcccggcctggcttagtggggacccagggcatcagacacaggtacagcacataggccaggagccagggggtgacgggtggctcggctcgggaggcctgggaccccacagtgcacgctgtgcccctgatgatgtgggagaggaacatgggctcaggacagcgggtgtcagcttgcctgacccccatgtcgcctctgtaggtagaagaagtatgtcttcctggaccccctggctggtgctgtaacaaagacccatgtgatgctgggggcagagacagaggagaagctgtttgatgcccccttgtccatcagcaagagagagcagctggaacagcaggtgggaggggtgggacagaggtggagacaggtgcagtggcccagggccttgccagagctcctctccagtcaaggctgttgggccccttattccacccatgggaggtgcacacaaggtcttgttggctgcccctgcaggtccctgtcacctctcacatgtccctgcctaatcttgcaggtcccagagaactacttctatgtgccagacctgggccaggtgcctgagattgatgttccatcctacctgcctgacctgcccggcattgccaacgacctcatgtacattgccgacctgggccccggcattgccccctctgcccctggcaccattccagaactgcccaccttccacactgaggtagccgagcctctcaaggtaggtgagctgggttctgggatgggagctgggccggggacctccctggtcacacaccttcttccctagacaccccacactttgtgtttcagacctacaagatggggtactaacaccacccccaccgcccccaccaccacccccagctcctgaggtgctggccagtgcacccccactcccaccctcaaccgcggcccctgtaggccaaggcgccaggcaggacgacagcagcagcagcgcgtctccttcaggtgggagcagctctttgaggccacctgatttctggcgtgctcagtgcactcgggtggattttctgtgggtttgttaagtggtcagaaattctcaattttttgaatagtttccatttcaaatatcttgttctacttggttcataaaatagtggttttcaaactgtagagctctggacttctcacttctagggcagagggagcctgaacaagtgaggctctgggttccccattcctaattaaaccaatggaaagaaggggtctaataacaaactacagcaacacatttttcatttcagcttcactgctgtgtctcccagtgtaaccctagcatccagaagtggcacaaaacccctctgctggctcgtgtgtgcaactgagactgtcagagcatggctagctcaggggtccagctctgcagggtgggggctagagaggaagcagggagtatctgcacacaggatgcccgcgctcaggtggttgcagaagtcagtgcccaggcccccacacacagtctccaaaggtccggcctccccagcgcagggctcctcgtttgaggggaggtgacttccctcccagcaggctcttggacacagtaagcttccccagccctgcctgagcagcctttcctccttgccctgttccccacctcccggctccagtccagggagctcccagggaagtggttgacccctccggtggctggccactctgctagagtccatccgccaagctgggggcatcggcaaggccaagctgcgcagcatgaaggagcgaaagctggagaagcagcagcagaaggagcaggagcaaggtgagcgggccctggagcttgcagtcggagggccttgggcaagatcgcct

SEQ ID NO: 3 - DNA, 2300 bp, Homo sapien
ttttctttctgaattgtggccaccttcataccagtctgtcatggaacacttaagccgcttgagtgcctgctggtactcccagccctgccatgcctgagccccctgcacacaaggagccaggagtaatcagggcagaccctttagggcacggggacttctggattgtgaaattggctctctgggggccaaggccttctaacgttggtggaagtggctttggcttattgggtcggattctaggccattcattccaacctttagagacatcccagctttccctagcccagagtctgcagcccctccaccatcccacatcctccccctccctttcctcatgaaccccagtcgcgcctctgccttctcaaacccctccaccatcccacaccctcctcctgcccttcctcatgaaccccagtcgcgcctctgccttctcatccctgcgcaccacacaggctcgctcgtgcccggtgagtgctgaggctgctctgcacgtggagtgtggccctgtgggcaagggctgggctcttggaggtaggggagctacaggggcgactgggaggaggatgttgtgttacacacgcatcagagttaactttgcagtgagagcggccttgctgcggccaaagaacatggaaaagcatgagtggggtgatgtgccttaaagcatcagacacttgggcctcgggcatcaggagccagccacagggatgtctggggaaatggcgttccatgagatgcaagcacacaagaatgcacttggcacatctggggaacagcaggcagctgatatcactgggcccaccccgcaccagggaggatggaagcaggtgaggagctagaccacactgaggcggtggtcgggactcggggtttgctcagtgagccgttcagtatgtgcaggggcagttccccgtctgaatttaggtgacgacactcaggtccagccttgccagtctcagcctccggtctccgttccccctctgcagaggccacattgtctgctgcacgtgatcatgaggggttgtgaagtgcttgccccatcagtagccatgtgtgcatgtgtaaataccatcctctgtgtgccctggaggctgtccttcagatagcatgtacaggtggcagcatagggcctgtccctactgagagtgcagggaactcagcaccgtcaactcctcgaccctgcaggtcagattatccttgtagaggccccctggatggcaccaagatcggccctggcaagtaggtgaccctgacttcagagcccttgcctgagggcctggcctggcagctctgctgttagaagcaggaggtgtgcagagggtggggagcagcccagcctctgtgatcttctccatggcaggatctcccagcaggtagagcagagccggagccaggtgcaggccattggagagaaggtctccttggcccaggccaagattgagaagatcaagggcagcaagaaggccatcaaggtagtccccatacccctgtgtcctgaggctactgggcagtccctccatttccccgtgcctctgaggctgcccagtctctgccctgctgcccacctgtaccttgagctttcttctcgcccaggcttccaactccaccctctcctgccaagcaatcctagccctctgagcctcttggggccccctcagacttgtccctgtgtccacaggtgttctccagtgccaagtaccctgctccagggcgcctgcaggaatatggctccatcttcacgggcgcccaggaccctggcctgcagagacgcccccgccacaggatccagagcaagcaccgccccctggacgagcgggccctgcaggtctgctggccgcgcatatagcctgtcacacaccaggaggactggatactggggaggagccggggccaccatagggttctgtcccccagaggaggctgactgggatgggatggcagctgattaggcccagcaccaaatattcaccatcccttggccatcctggccctctcaggagaagctgaaggactttcctgtgtgcgtgagcaccaagccggagcccgaggacgatgcagaagagggacttgggggtcttcccagcaacatcagctctgtcagctccttgctgctcttcaacaccaccgagaacctgtatggccagagggcagggccgaggggtgtgggcgggaggcccggcctggcttagtggggacccagggcatcagacacaggtacagcacataggccaggagccagggggtgacgggtggctcggctcgggaggcctgggaccccacagtgcacgctgtgcccctga

SEQ ID NO: 4 - DNA, 2300 bp, Homo sapien
tggtgctggatgcacctctgttttctgtggtggctccaagagagtgcacggtccctgctgattgaaagaaggatgaagggcagaagaggggcggggagctgtgtgccctaagatctcattgcctttttatgccgattaacatgcttttagcccctactgagcttatagttaacagaagtttccaggtctttcttcacctgaactgtgtctaaagcaagttccctccaccttctgtatttatacgcttgatttttaaaacctaaatgttgggcttcacatttgttccttgtaaatttcatcttggtgattgcagtctaccctctggcctttaaaaattgtctgagccttgattcgatcatgaaaccagcttacccttcccctgtgtgctggccccagttttctaaccaggtgttgaatgaactggatggactctgccagatccctccgtgcaaggctggaatcagtccattgttcaactgtgccctttggggctgtggttcatttggctctgatttttcctatatgttctctcctccaacccccatagctccatcttgtctacaagattttgttagaagccgtcaaaatcctgctgactcgagatgcactgtgctgcatgttttccccgggcacagcaggctaataatcctgttacaaagagaaatgctgtacatttcgagcagtgctggcccctgggactcaccgcggccttttctaagtgcttacagactctctgtttaataatccattccagaaattttccagggctcattgttgagcttggtgttcgcaactttgagtgatcagcccttctcctttgtgggagcaccaggacagagcagcctttgtccctccccagtctcagttccctcccactgcccctgtggacctcgaatgcagagcttatgcacctaccgaaggtcgtgtcagcacccaaggcagaacgaggctgccctgggaactagggtcaattaagacagcttgtgctggaggaccctttacagcagatgaaggcctctccccagccagaaaagatggagcacacgctgggtggtggtcccgcttcctcactggaaggagatggtgctcttcttttttctttctgaattgtggccaccttcataccagtctgtcatggaacacttaagccgcttgagtgcctgctggtactcccagccctgccatgcctgagccccctgcacacaaggagccaggagtaatcagggcagaccctttagggcacggggacttctggattgtgaaattggctctctgggggccaaggccttctaacgttggtggaagtggctttggcttattgggtcggattctaggccattcattccaacctttagagacatcccagctttccctagcccagagtctgcagcccctccaccatcccacatcctccccctccctttcctcatgaaccccagtcgcgcctctgccttctcaaacccctccaccatcccacaccctcctcctgcccttcctcatgaaccccagtcgcgcctctgccttctcatccctgcgcaccacacaggctcgctcgtgcccggtgagtgctgaggctgctctgcacgtggagtgtggccctgtgggcaagggctgggctcttggaggtaggggagctacaggggcgactgggaggaggatgttgtgttacacacgcatcagagttaactttgcagtgagagcggccttgctgcggccaaagaacatggaaaagcatgagtggggtgatgtgccttaaagcatcagacacttgggcctcgggcatcaggagccagccacagggatgtctggggaaatggcgttccatgagatgcaagcacacaagaatgcacttggcacatctggggaacagcaggcagctgatatcactgggcccaccccgcaccagggaggatggaagcaggtgaggagctagaccacactgaggcggtggtcgggactcggggtttgctcagtgagccgttcagtatgtgcaggggcagttccccgtctgaatttaggtgacgacactcaggtccagccttgccagtctcagcctccggtctccgttccccctctgcagaggccacattgtctgctgcacgtgatcatgaggggttgtgaagtgcttgccccatcagtagccatgtgtgcatgtgtaaataccatcctctgtgtgccctggaggctgtccttcagatagcatgtacaggtggcagcatagggcctgtccctactgagagtgcagggaactcagcaccgtcaactcctcgaccctgcaggtcagattatccttgtagagg

SEQ ID NO: 5 - DNA, 2300 bp, Homo sapien
tacagacaggggacttgcaagcagggagggcagggtgagacattcagaggaaacgacgacaggaaatggtgacagatagggaacgaggatgaagggaagggagagccagtgacgactggcagtggagtggggagcaccgccacctctcctcctccacttgcccctcctgtggcactggacaagctagtgggcttttcgttgtccatgggctttttcggtggggatgtgaccagctttgaacccgtccccttaaacatgctcctcctgcacggaagagacaggggcaggggagagactctctccccaccacccggctcaggccccagcacagcccggcctctggcctcactggcgtctgtgcccagtgacgcaggcaggtgagctcctggcaaattagcattgcaggctgtgctctctcctcctgctctgctgcagctgggagtgtgcagagactggaggggatgacagtcaccctctgttttctgtggtggctctgttttctgtggtgctggatgcacctctgttttctgtggtggctccaagagagtgcacggtccctgctgattgaaagaaggatgaagggcagaagaggggcggggagctgtgtgccctaagatctcattgcctttttatgccgattaacatgcttttagcccctactgagcttatagttaacagaagtttccaggtctttcttcacctgaactgtgtctaaagcaagttccctccaccttctgtatttatacgcttgatttttaaaacctaaatgttgggcttcacatttgttccttgtaaatttcatcttggtgattgcagtctaccctctggcctttaaaaattgtctgagccttgattcgatcatgaaaccagcttacccttcccctgtgtgctggccccagttttctaaccaggtgttgaatgaactggatggactctgccagatccctccgtgcaaggctggaatcagtccattgttcaactgtgccctttggggctgtggttcatttggctctgatttttcctatatgttctctcctccaacccccatagctccatcttgtctacaagattttgttagaagccgtcaaaatcctgctgactcgagatgcactgtgctgcatgttttccccgggcacagcaggctaataatcctgttacaaagagaaatgctgtacatttcgagcagtgctggcccctgggactcaccgcggccttttctaagtgcttacagactctctgtttaataatccattccagaaattttccagggctcattgttgagcttggtgttcgcaactttgagtgatcagcccttctcctttgtgggagcaccaggacagagcagcctttgtccctccccagtctcagttccctcccactgcccctgtggacctcgaatgcagagcttatgcacctaccgaaggtcgtgtcagcacccaaggcagaacgaggctgccctgggaactagggtcaattaagacagcttgtgctggaggaccctttacagcagatgaaggcctctccccagccagaaaagatggagcacacgctgggtggtggtcccgcttcctcactggaaggagatggtgctcttcttttttctttctgaattgtggccaccttcataccagtctgtcatggaacacttaagccgcttgagtgcctgctggtactcccagccctgccatgcctgagccccctgcacacaaggagccaggagtaatcagggcagaccctttagggcacggggacttctggattgtgaaattggctctctgggggccaaggccttctaacgttggtggaagtggctttggcttattgggtcggattctaggccattcattccaacctttagagacatcccagctttccctagcccagagtctgcagcccctccaccatcccacatcctccccctccctttcctcatgaaccccagtcgcgcctctgccttctcaaacccctccaccatcccacaccctcctcctgcccttcctcatgaaccccagtcgcgcctctgccttctcatccctgcgcaccacacaggctcgctcgtgcccggtgagtgctgaggctgctctgcacgtggagtgtggccctgtgggcaagggctgggctcttggaggtaggggagctacaggggcgactgggaggaggatgttgtgttacacacgcatcagagttaactttgcagtgagagcggccttgctgcggccaaagaacatggaaaagcatgagtggggtgatgtgccttaaagcatcagacacttgggcctcgggcatcaggagccagccac

SEQ ID NO: 6 - DNA, 2300 bp, Homo sapien
aatgggggctgcaggcttggagggaggcctcagtgtggcttggaacgtggtgtatggtggtctgccgcgaaggccggcctgcacaggggtgggaggggggtgcttctgcatgggaagcacagacagcgctgcctctcccttgcactcagctctcggggcatgagaggctgactttccgtgagcctgtgggccaggcctctttgaatggggctgagggagctttgccctggttcctttgtgtccccacggtgccacgggaggctccctggcagggtgtggggcagggcagtgagtgaagagttgggatgagtgagttagggcccacggattactcaagacaggacttcaagttgattcaggcgtgttagggagctgtgattggattttgagcagggcagggatgggacagaagagtttggggaaggttcctcaggcatccgtcacggaagggacaagaagggagagagagtggatgccagggacacccagaagctgttattgtagtcaggatacgacaggggtgaggctacagacaggggacttgcaagcagggagggcagggtgagacattcagaggaaacgacgacaggaaatggtgacagatagggaacgaggatgaagggaagggagagccagtgacgactggcagtggagtggggagcaccgccacctctcctcctccacttgcccctcctgtggcactggacaagctagtgggcttttcgttgtccatgggctttttcggtggggatgtgaccagctttgaacccgtccccttaaacatgctcctcctgcacggaagagacaggggcaggggagagactctctccccaccacccggctcaggccccagcacagcccggcctctggcctcactggcgtctgtgcccagtgacgcaggcaggtgagctcctggcaaattagcattgcaggctgtgctctctcctcctgctctgctgcagctgggagtgtgcagagactggaggggatgacagtcaccctctgttttctgtggtggctctgttttctgtggtgctggatgcacctctgttttctgtggtggctccaagagagtgcacggtccctgctgattgaaagaaggatgaagggcagaagaggggcggggagctgtgtgccctaagatctcattgcctttttatgccgattaacatgcttttagcccctactgagcttatagttaacagaagtttccaggtctttcttcacctgaactgtgtctaaagcaagttccctccaccttctgtatttatacgcttgatttttaaaacctaaatgttgggcttcacatttgttccttgtaaatttcatcttggtgattgcagtctaccctctggcctttaaaaattgtctgagccttgattcgatcatgaaaccagcttacccttcccctgtgtgctggccccagttttctaaccaggtgttgaatgaactggatggactctgccagatccctccgtgcaaggctggaatcagtccattgttcaactgtgccctttggggctgtggttcatttggctctgatttttcctatatgttctctcctccaacccccatagctccatcttgtctacaagattttgttagaagccgtcaaaatcctgctgactcgagatgcactgtgctgcatgttttccccgggcacagcaggctaataatcctgttacaaagagaaatgctgtacatttcgagcagtgctggcccctgggactcaccgcggccttttctaagtgcttacagactctctgtttaataatccattccagaaattttccagggctcattgttgagcttggtgttcgcaactttgagtgatcagcccttctcctttgtgggagcaccaggacagagcagcctttgtccctccccagtctcagttccctcccactgcccctgtggacctcgaatgcagagcttatgcacctaccgaaggtcgtgtcagcacccaaggcagaacgaggctgccctgggaactagggtcaattaagacagcttgtgctggaggaccctttacagcagatgaaggcctctccccagccagaaaagatggagcacacgctgggtggtggtcccgcttcctcactggaaggagatggtgctcttcttttttctttctgaattgtggccaccttcataccagtctgtcatggaacacttaagccgcttgagtgcctgctggtactcccagccctgccatgcctgagccccctgcacacaaggagccaggagtaatcagggcagaccctttagggcacggggacttctggattgtgaaattggct

SEQ ID NO: 7 - DNA, 2300 bp, Homo sapien
gttcaagtgattctccttcctcagcctcccgagtagcggggattacaggcatgcaccaccacgcctggctaattttgtatttttagtagagatggagtttcaccatgttggtcagactggtctcgaactcccgacctcaggtgatctgcctgccttcgcctcccaaagtgctgggattacaggcgtgagccgctgcgcccggccgagaggcacacattctgctaagagctttttcctgactcccctaactccaagagggatttgtcactccttagctttgtacccatgactggagtagaatgaatttaatttgagtttagttgtttttgagactctccctggctagtgtagtgtcttattcgtctttgttgtgatcatggcctgcacctaacagatgatcagtagatgtttgcagacagaaagtaaaccactcatcaggtgtattcagtcccattcttgaacgggcttgctgcctcctttttgaggagatctgtgtatgtactcttctttcacgcatatgtgtgagcaaacacacacacactaacaagaaattcatctgaagatgtgcacaggaaatatcttgcatctttaccccctttgtgatcttacatatgggagaactgaggcacagaaataagttaggacagccagcaaacttgcatcagtataaatacaaagaaggggagggaggaacatgcttgaaaggggtgtgctggtctcagagggttgggtttctcagttggctgggcatcagctggccatgctttagttatttgatgggaggaaaaataagtgggaggtgaggagtaactcctgggctctgatgagtattcaaggcaagtacagatctggaaagcctgtatgcaaaggaggaactcactgaaaagtgctggcctgaggagggcagaagggagggctggggaagccagcagcgggagcaaaggagtaggctccaactgggtgaagatgttggtgtggtgcgttatgtaaaatatacaaattattattggaaataaccacgtctcagcagtgctagttctcagtttggagaatgggaaatcgaaaggatcagattcagagacggcaacttactcaaggtcacagcattttaaacccaagtgaaatctcctaggcccttcatgccacactcatccatccctacctacttgtgttgcaaccaagggccccactgtagtgcctaggggagcaggtctagggcacagtgccaggcctgattaatgtcttccttaccattttccagtgaggggctgtgattaggcctatttataggggcctggtcccttaatattctgcctggtgcatctcttgccaatcaaatcagtgctgtctgcagtgtgattgctgctttagtggcaccagggagaggagttaattaaacccaatataaatagactctgccctcactttgcaattccaggagtgtttttccttcctgtcctccacccccacaggcacctctttcctcttgtccccctaagctctagcctgggtgagcagggctggatactcctatacctagagtcactagccactgcccagtctgtttcaggagcaggcctcagattcctcaggggttaaagtgggaagaacccgtgtgtgcacattttttgtgcttttccagaactgtgtaccatttggcagttgatcaggcaatctcccctgctaccccatttctacccctttgtttccagcctcttttttcctctgcaaccaaggtttcttgtttatccaaggtggggagctgaactgagacaaggtatggaaagggtgcctggcaggtagcaagcaccttgtagggggtcagaaatgttgcaccttctctgaactcctccattgaccctacagattccccagtcccgggccctgccctttccctcattcactcagcaggcatcagcagagtcccatctatgcgctcctggcctctcagcaaatgctctgtcccctactcccctatctgtgcaggctgaagctatgtgcatagttgggatgagggctgtgttgtctcaacaccacgctgccctgtggtgggggcgtgccggtggtcgtgggtggctctgacgctccggctccgacccacaggcaccatgactcctgtgaggatgcagcactccctggcaggtcagacctatgccgtgcccttcatccagccagacctgcggcgagaggaggccgtccagcagatggcggatgccctgcagtacctgcagaaggtctctggagacatcttcagcaggtgggtgctgccactcacccccacctgatgagagggccatccc

SEQ ID NO: 8 - DNA, 2300 bp, Homo sapien
ggcatgagccaccacgcccagccagattacaaaatactttgacatcttttctctacagccctcaaaaggaggcagggcaagcacaattaaatcccattacaaatggggtgactgaagctccattcatggcttgcccagggtcacacaaagaatgaatagcagatccctgagcctgtgtgcttccctctgtgccaggctgctttacccaggcatgggtgcaccttgtgcatgggacatttctcctttgttgtgtcctgagtaccttaagccactcagatattgctcaggtggagtgaggggaaaatgttttcaggttgtattagtcaaaacaaaataccacacactgggcgactttaaaatcatacatttatccctcacagttctggaggcttggaagtccaagttcaaggtggcagctggacgggttcccggtgagggctctcttcctggtttgcagacagccaccttctcttcgcatcctcacttggtgggaaaagacagaggagagaaagagagagagagaaaaatgagatagcgagagagagagaaatgagatagagagaaatgagagagagagagagagagagagagggagacacagagacaatgctctcttttcttaccagatctataatgagggccccaccccatgacctcatctaaccgtaattacctaccaaaggcccatctccacataccatcacattaggggttagggtttcaacataagcatttggagaggacataaacattctgtctacaacatgagtggagatccatctcttctttacctctggtaaggggaccacacgctgcagccagcgagacagtggcatgttcttgttacaactcgatctaactcccccagaagaggaggcagggaaggcggacaaaactgggagagggagagagtgttaggaagagagtagggtggccagaggcagcaaataaaatataaaatgcttaattctgaatctcagataaacaaccaataatgttttttagcataagtatgtcccaaactaagcttgggacatatttatgctacgaaattattcgttgtttatctaaaattcaaactagctgggcatcctgtcttttaatctggcaaccctaaaaggcaagggccaaaaatgccggaggcaagccaacggattccaggagggacaactgctggactttggactgatgatgctctttttatatatttaactttttaaaaaagcctcttttctttctttttaccagcttttcactagctttttaaaaattgtggtaaaacatacataacctaaaattcaccgtctaaaccatttttcagcatacagttcagtgggattaagtagattcacactgttgtgccgccatcactaccactcatttccagcacccttccatcaccccagcctgaaactctacccattgaacacgagctgcccaactccgccttgcttccccattcctggcgaccactgcttctgtctctgtgaattttgactattctaggcacttcacaaaactggactcatacgatatctgtagttttgcgtctggcttctctattgaattcttaaaggggggtgggaactaagcagatcacaagggagctgcccacagaggtaaagacaaggtcaggtaggctgagagacgcaggaaagcgggtcaaggcgtagggctggagggcaggggcgggccctgggcgtgggctgggggtcctgccccggggcgcaccccgggcgagggctgcccggaggagccgaggttggcggacagcttggccctgagcttgaggggaaggcagcgatgggacaaaggacggaggtctaggaagagggtctgcagagcagaaagcacgggtaggggcggcctgacgctcggaagacaacgcatgggagccgtgtgcacgtcgggagctcggagtgagcgtgagttccgtgcccaggcccgcgactcggcccgacaggacagcgctccgggtcgacggggtcctggagccgcgctcggggagggcgcagtggagggcgagcggcggcgttaggacccggaggcgcgggcggactgggggcggcggggctaggacccagcggctccggcagagcggaagcggcggcgggagcttccgggagggcggctcgcaggtgaggaggcgtccggggccgcgggaagtagggtcgtgggggcctggcggggcgaagtaggggacccggaggggctggagggaggcgggcgggaggcccgggaccgttcctgaccgagaagcctgcgccaagctggtgttccgcggccgctgcccggtgccc

SEQ ID NO: 9 - DNA, 2300 bp, Homo sapien
gcccagctggccagcaaaggcaggcagagcttctgtgtccacacatgagaatgacctgcagctgttctttgtccaggctgaggtccaggattcccactgcagctcctaggaaatctttaaaattaggtcggggatgagcctgtcagtagattaggtagggaacttttatgaagttgagggtgaaccatctggagggtgaactggctggtgtgattctagaactgggggtggtgcctagcagtgcatttgtgagaagacacagccaggcttggtatatgatgtggtgtgtgtgtatattcacaggcatcgtggagcatatacactttttttgtgtgtgttgaaataaaccttacagattacaaagtacttttttttttttttctgagacagggtctctctctgtcgcccagcctggagtgcagtggtacaatcatagctcactgcagcctcgatctcccaagctcaagtgatcctcccgcctcagcctcccatgtagctgggactacaggtgtgtgacaccatgactggctattttattttatttttgtagagatggaatctcacaatattgcccaggctgatctcaaactcttgggctcaagcagtcctctcgcgtcagcctaccaaagtgctaggattacaggcatgagccaccacgcccagccagattacaaaatactttgacatcttttctctacagccctcaaaaggaggcagggcaagcacaattaaatcccattacaaatggggtgactgaagctccattcatggcttgcccagggtcacacaaagaatgaatagcagatccctgagcctgtgtgcttccctctgtgccaggctgctttacccaggcatgggtgcaccttgtgcatgggacatttctcctttgttgtgtcctgagtaccttaagccactcagatattgctcaggtggagtgaggggaaaatgttttcaggttgtattagtcaaaacaaaataccacacactgggcgactttaaaatcatacatttatccctcacagttctggaggcttggaagtccaagttcaaggtggcagctggacgggttcccggtgagggctctcttcctggtttgcagacagccaccttctcttcgcatcctcacttggtgggaaaagacagaggagagaaagagagagagagaaaaatgagatagcgagagagagagaaatgagatagagagaaatgagagagagagagagagagagagagggagacacagagacaatgctctcttttcttaccagatctataatgagggccccaccccatgacctcatctaaccgtaattacctaccaaaggcccatctccacataccatcacattaggggttagggtttcaacataagcatttggagaggacataaacattctgtctacaacatgagtggagatccatctcttctttacctctggtaaggggaccacacgctgcagccagcgagacagtggcatgttcttgttacaactcgatctaactcccccagaagaggaggcagggaaggcggacaaaactgggagagggagagagtgttaggaagagagtagggtggccagaggcagcaaataaaatataaaatgcttaattctgaatctcagataaacaaccaataatgttttttagcataagtatgtcccaaactaagcttgggacatatttatgctacgaaattattcgttgtttatctaaaattcaaactagctgggcatcctgtcttttaatctggcaaccctaaaaggcaagggccaaaaatgccggaggcaagccaacggattccaggagggacaactgctggactttggactgatgatgctctttttatatatttaactttttaaaaaagcctcttttctttctttttaccagcttttcactagctttttaaaaattgtggtaaaacatacataacctaaaattcaccgtctaaaccatttttcagcatacagttcagtgggattaagtagattcacactgttgtgccgccatcactaccactcatttccagcacccttccatcaccccagcctgaaactctacccattgaacacgagctgcccaactccgccttgcttccccattcctggcgaccactgcttctgtctctgtgaattttgactattctaggcacttcacaaaactggactcatacgatatctgtagttttgcgtctggcttctctattgaattcttaaaggggggtgggaactaagcagatcacaagggagctgcccacagaggtaaagacaaggtcaggtaggctgagagacgcaggaaag

SEQ ID NO: 10 - DNA, 2300 bp, Homo sapien
tgaggagccacatgatctgacatggttaaggatgcctctggcttccctgttgagaatagactgaaggggcaaaaatggaagcagaagagcagttaggaggctcctgtcaaacccacgtggaaggcaggctctgggctgtgttactggactaacactaacaccgtccccttgcacttctgaggggtccctggaacttccccaggggatgagactcctggctagcaggactcagcccctccccttcaactttactcaggacctggtctcccctccttaaggtctctggagcccaacgcacacttcagcccactctcacaggcattctctctgtccacaaaatatcaacgaagagtcttctgtgagtgcagcatggtgtgaacactgggagtacaaggagaaataagacacagttgctgtgctggagaagcttgtgcccagtggtggtgatactgccggaggtgagaccactatgccagcacaggaacaaagacggcaggggcacagggcaattcaggggtgcagatctgggggcatccaagaggctcctaagcctcagtatataaactgacaggtcacagcctgctctaggaaacaccttcttaagggttggagttatctctgtgcatcccatccccaccccaccaagccgcccttggccctgccctcaggagcctctgcttggccttgctaattcctctcttctccctgaagctagagtgaggtccctcttggcagcctttgtatctagagagagccgtccaatagaaacataaggtgagcaacatgcttaattttaaaatttctagtagctacattaaacatttttaagtgaaattaactttaataataaatttatttaacccaatatatccaaaagattatcatttcaacatgcaatcctattttaaaaataactagtgaggtacctgacaaaaaaaaaatcccttttcatactaagtccagaagatctttgtgtattttatactcataggacatctgagtttggatgttacctttttattggaaatatgggatctgcacttagatttcactgaatttacattgaaaaggtaggttcacatacccaagttgtctcacacatacctaaatgttttctggtaactgggtggagtatcagtttttatatttatctttgccttagctaaaaaacaaattaatagtgcaggtcctcagccgcacgcaggcagttttctccacggtccaaatggttgcccgaattcacccagaccccgctgtcgtccgctttttcatgcagacattcaaacaactagcctcccttcctcctggcacccccaccccatcgccagcaccctccaaaccagtttccctcctgtcctcatctcagccacccatgactcacacacacatctggctcccctggcccacttttcacctggtcctcataatctatgcataaacattaacataccacagaatcaatctgcatactgattacttctgctctggtcaaattcttgctttcaggatcaggaggctttctccccacaccaaactgggcctgaggaaatagtgtcttgtcttcctgtcacccctcccgtagttgcatgtctaatgagacaaggggtgtctcaggtgaagcaggacagggaggatgccagcacttgggtgggagaggcttgaggagtgcctgttgggggatgtgttggggaaggatgacttttcacatatggctcattgtgtcgggatgatttcgttgttaaataagcacctacaggatgatttcacattccatacttctaagtttttataatttaaattctttccgccaggctgggtttttttttttttccaaactttaaatctgtggctagaattggtttgatttacataatcctgcccctgagatttagccccacccctgagagccccctcagagccacccacagccaggacacctctgctggcctccccttccccagccttccaacttgtggcaggcccctggctctggcctccccctatatgggaatgagccagctgcaccgctgctgacagtggctgggataatcctccctgagctgttccaaggattagtcctgctgccctgtgcccagctcccacacaacggggtttcggggctgtggaccctgtgccaggaaaggaagggcgcagctcctgcaatgcggagcagccagggcagtgggcaccaggctttagcctccctttctcaccctacagagggcaggcccttcagctccattctcctccaaggctgcagagggggcaggaattgggggtgacaggagagctgtaaggtc

SEQ ID NO: 11 - DNA, 2300 bp, Homo sapien
aataatgtggggagcttttattgtgattttcctcgggttattaaacttgcatgcatggacacttatgggctagaatttgtggtcactgccaacagtggattcatatcgatgggcaccttctttttcttaattgtatcatacatttttattctggtcactgtccaacgacattcctcaaatgatttatccaaagcattcttcacttcgtcggctcacatcaccgtagtggttttgttttttgctccatgcatgtttctctacgtgtggcctttccctactaagtcattggataaattttttgccatcatgaactttgttgtcacccctgtcgtaaatcctgccatctatactttaaggaacaaagatatgaagtttgcaatgagaaggctgaatcaacatattttaaattctatggagacgacataacacatttggttgatgagagcacaggataaatgccatggaccatcaagactcctgtgatcaccatgatcactatggaacgcgcacatttttagtattgcctgaaaaaactgaaaaatctgcaaaaaggatgcattaaatctaagaattgtatttcagataaagttgcaacattttttgttaatcataaaaagtatatatttctatctaatgtgtgtatctaattaacagcaatgactacctttaattttgatgtagttattttatatctgtatataagcacatacacatatatatgacctaggtttatttatcagtatttttatgctgataataagcatcactggaaattaattttcttatggaaattatgtggatccaatggataaaatatgagtttatataaattagtaaatgccaaaatcaaggaagaaacaatttttattttaattgtactttaagttagataaatggtaaggtcaacagcttgttacaacccttaagtattattttcaggctgattgtcaatatgttttgtacaatgttctcacttataggtgggaattgaacaatgagaacacatggacacaggaaggggaacatcacacaccggggcctgttgtggggtggggggaagggggagggatagcattaggagatataactagtgttaaatgacgagttaatgggtgcagcacacccacatggcacatgtatacatatgtaactaacctgcacattgtgcacatgtaccctagaacttaaagtataataaaaaaaaatagactctagtactctgtattatgcaaaatttgtctatgttacacttttttaacaacacaatcctattgcccttgaaatcttcttcaaagcatttctcgagtcactcttaaaaagcatctacaacctaaaagtataggaagagatttatttcctggagaagagaccccattgagatcttaaaagcacatttaatgtgcctgtgcttaacttaaggtgcttaggacaaagaaggcgattgacatctttcaggtaaaacctggtaagtttggtggtcaaggaacacaactgagacatcacttggatgtattcctatgactattttaagaaacataaattgtggtgactcactcagctcacttttaactactgcatggtaattaaagatgcaaaataaaataagttacaagaagtgaggttttttattggttaaagcaatttttctatattttctccgcaagttggtcataaaagttctaagcattcctctttttataaaatcgaagcattattacttactctcttgttaacctatctggattttaattttgtaactttattatatttgttttgctgtgattctttaaaaagcacctttagactcagtgagatagcaaaaatatccaaataggccaaaaaattgtggcaatgtcctctcactcaggaaaattctgtgtgttttctctaatggccaagggaaaacttgtgagactataaaagttagtctcagtacacaaagctcagactggctattcccagatctcttcaggtacatctagtccattcataaagggcttttaattaaccaagtggtttactaaaaaggacaattcactacatattattctcttacagtttttatgcctcattctgtgaaaattgctgtagtctcttccagttatgaagaaggtaggtggaaacaaagacaaaacacatatattagaagaatgaatgaaattgtagcattttattgacaatgagatggttctattagtaggaatctattctgcataattccattttgtgtttaccttctggaaaaatgaaaggattctgtatggttaacttaaatacttagagaaattaatatgaataat

SEQ ID NO: 12 - DNA, 2300 bp, Homo sapien
gcttattctaaaacaagtaaatgtttgcctatggtctgagattctaatccacggagttcattctaatccacattcaacactatcatgtaccagtgggcctcataacccacctagccctgtgatttttcaggttcacttttctaaacttgtgaattaaatatttattttcttagttcagaagaggaaaaaaactcttgtaattgttgcccatttcaggagaaatcttgcatatgaaaacaagagataaatatacacaactgagggctgtggtttaaacaaaatcttgagaatgttttttgaccttatacatttgtgctttagtataacaaaatgatatagacaaaggtaacttttaatagaaccagtcactacattaaaaaaatgacaaattcttctgcttagctaagcaacagagaaggtaaaatactaattcaattcatcaatttaagcaatactcattaagagccaagtatgtgctcactgaataagctgctaaggtttggtggttacagagtgtgcggtgaaatgatgtctacatcacagtccaacattcacagagtttaaaagcctaccaagaatcaagacagacacaaatacctaacatagacgtttgtatatgataagagagccagagtacaatttaggagaagaaattgtatggaaggaaggttcatttccattagaccagaaaagacagcacatttgaaggcctgaataagaaatattctggataagatattgtggctgctaccagaatggctcttgatgatctctacctcttggtatttatacccttatataatctctttcctatagtgtaagctggtcccaggtacttgtttctattgaatagaatagaacaaaagaaatgagatgccacttctgagattagtttataagatactgtgaatttcatcttgtgccctctccctctctctctttctcttgccctctcatttgaatgaagccaactggcatgctgtcagtggcacagtgtaagtcctgttacaagaaattgacgattacctgtagccaaccctaagtgaagaactgaggtcctcagtcctacaaatggagagaaactgaatctagctaagaaccatgtgagtgagctgggaagaagatccaccctcagttgaaatttaagatgacatattgagcagacatactgagacacactgaaagtaagagagcaggaggaaacaaaaccagggtcatacaaagaacacaactgattttgagattctcacataagtattacaccttcagtgagcacgtgtactagaaatttaaaaaataaataaaataaaccttcaaagtgagctagcaaataaatttccctatggtctcagctctgagtggagagagaaaatgttccctgtggagtttatagccagaatccagctctcaaacaggtttcagcctgaactcacacaatctgtgtggcttccaaatttgcaagctgagaatttaattcaaagtggtctcaggttgatagcagtccaaaatgctaggtaggaaaaaaaatcctctctggacaaataaatcatcaaagcaagctcataagagcaggtttcaaaggtcatgagcttctaacacacacacacaaaaatcacacacacaaaatgggggtagcagcaacatgggtagcgtattcaaacttgaaaagactttaaatatttgtattattagatgtagattatgaaacacatattttaatgtggttaatttttttaaggaatcacaactatgagtaaagaccaagaaaattgtgctggatggccacttccaccatggctcccctcctatttaagtctgggtactgtgtcacccgaagtcttcaggcacattgttccaggtctgggtttgcctatgaaagaaactcatgagagctggaaatgaggagtgaagaggaggtcttcacataaagcaggcttaaggattagacatagcaggtttgacagatgtgatggcttgcagaatcctttatgagctcccactgtccatctggataagatttacagacctttcagaaattcctataagcttgggttctgtgcccacactctagactgtcaggctaagatctctgatataaaacagacctcttctgattttgtctagctgcttttctaatatctattcaccaagctcttccaataatagcataaggccctaattaatattaaacttttatcattataatacataggatgtcttctgttttcctgatcaaattctgactactattaaaatataaagaattgtccagaaatatataaaaaaagaatcacacattg

SEQ ID NO: 13 - DNA, 2300 bp, Homo sapien
tgcccagtataagcaatgtgcacaaataaaattagctaacagagatagtatagagtgagaggagaggcagattaatctttgaggaaaagcacaattttatagctgaatggagaaagctgaggtggtttctaagatggagaataagacgaaaaatgtaagtacgttgtctgactgaattcaagaaagaagggtaaaagagaagaaagtagtggtcttatcattaaatgccacagagaggtaaagataaagacaacatattgttttgggtttagtaatttaagggttaccaaattccgttttggaggaggaacagattccatgtccactagaatggaatgaacaagaaatggaggaggaaaataggtagtttttcaaaagttttcaaaaatatgaaaagaagaaatgaagtggtacttggaagagattgttgaaatgggagagactatggtggcttgtttagaagcagttgagatagatccaattgagatagagatattgactatataaacaaaagaatgacaaattaatagtgtaatggataacttgactttggcaaatattgtgaatttttgtgaaagtacaactaaaaggcaatgtcactccaataatcaccagagtaatcaatttgcttattgctgtccctttaaatatagttctctggtatcaactaacatgtttttaactaatgatgcttcttaaagaaaagggaaaagacctttttctttctttcagtcttcaatgattcactgcttcatctcgctccaccaaagataaatgaaatctacatctcttatacattaacaatgcatgacaatttacaaatagctaaatttttggagctaactttaagtacctgaatggaatttaatcaacccactaatctccttctcacttctcagttatttatcaagtttatgtcaagggacaaggaaaaattatccaaacattgtttaaaacaatcatcattaattagtaacacttatccaggggggtttttaacctttcccccactcaaggattattctaatgtcagagtagaataaaaaataagtgcagtgatgctgactcttccaagcttaacatttctcacaagtcaattagctttgtactgggaggagggcgtgaagggctgcttgcggtagttgtgtagcagcagcacaatggccgcagacaaggaaaacagtttctaggaattcctcgtatataattttatatttttgacaagattaatgacccatgctcccttcctctccatttctttttttggaattctgttggtatgtagttactatattttattaaaggaaattagccttatctcttattatattttattaaagaaaattattatattattcctttatatttttattaaaggattttattattattaaaggaaattagccttatctcttattatattttttatgaccttcaaagtagtgtctctgcttaaaagtgtaccctggccgggcgtggtggctcacacctgtaattccagcactttgggaggccgaggcgggtggatcacgaggtcaggagatcgagaccatcctggctaacacggtgaaaccccgtctgtactaaaaatacaaaaaattagcagggcatagtggcgggcgcctgtagtcccagctactcaggaggctcaggcaggagaatggcgtgaacccgggagacggagcttgcggtgagctgagatcgcaccgctgcactccagcctgggcgacagagcaagactccgtctcaaaaaaaaaaaaaaagtataccctgaggcacacatcaagcgacatgtagagttcataaattctggccaaatggtcatacctcaaacctcatcagcagtaaggctctttacttgcactgacaaatatgaacgctggggaatttggaaatgatatataatatataatattatatatataatagatatataatatataatatatataatacatatataatatataatatatataatacatatataatatatatgtaatagatatacaatatataatatgtaatagatatatattatatataatagatatataatatataactttccatgtgattttcctcttaatttttttctagctgatccatatgaattcctcttattaagaaaaataaagcatccaggattcaatgaagaactgactatcaccttgttaatcattcagaaacatgttgcaggcttaagccatttttgatatagatactgaaacaattacttgctaagagcaaacttgaaggtatggataaggccctgagtcatcttcctgagctgaatgata

SEQ ID NO: 14 - DNA, 2300 bp, Homo sapien
tgggaggccaaggtgggaggatcgcttaaactcaggagtttgagaccagcctgggcaacatggtgaaaacctgtctctataaaaaattaaaaaataataataataactggtgtggtgttgtgcacctagagttccaactactagggaagctgagatgagaggataccttgagctggggactggggaggcttaggttacagtaagctgagattgtgccactgcactccagcttggacaaaagagcctgatcctgtctcaaaaaaaagaaagatacccagggcaagttaagttcggaggggcacagagctcccatgccctctgttgaacatgcgaccctcccagcatctcctgtgtccagcaaccctgaaagctctgcaaacccctttcagggtgtttatggaggctttattatgcaagcatgattgataaaacctttggctgttggtgattaagtcagtctccagcccctcttccccctggagttcagtgcatgaggctgaaagttccaagcctcttaccatgtggttgcatggtaatcagccctcctcttgaagaaatttaggagcttgcagtcacccagtcatctcaacaacatccccaaatgcattcttaccatgctggagatcccaaagttcttagaggctcttgtgttagaaacctgggaccaagaccaaatattaaaacaaaagatgctcctgtcacatctatcactgaggtctttgtaagagctttagaagctctgtgccaggaaccagggacagagattaaatatatatttcttttcttttttttgagacagaatcttcctgtgccatccaggctggagtgcagtgatgtgatcatagctcactatagctttggccttctgagatcaagcaatcctcccatctcaacctcccaagtagctaggactacacacgcatgtcacccatgcccagatcatttttgtagagtcagagtttcaccgtggtggccaggttggccatgttggccagatggggtcttcttttgttgcccaggctggccacaaattcctgggctcaagtgatcctcccacctcgtccttgtagagatgagatttagttatgtcgtccaggctgatctcaaactcctgggctaaatcgattgtctcacctcagcctctcaagtatgttatgaaggttatatgttaggaagggtcccaggaggtaaacccacacagatgggatttgggcataggtttggtttcccagggggcagtgctgagctctttgccagtgggaaatgggatgctggtgatttccagtaggtgacctcacagtgactcaagctaccacttactgttgattgtgacgaaatgccagctgaggcacatgccttgggagctaagtggttgctgcccttgaccactgtgaagactggtgtgggaagggtcgttttggatgcacttgagcaggggtccccaacccctgagccatggagccgcaaggagccacacagcaggaggtgagcggtgtcgagtgagggagtgagggaagcttcgtctgtatttacagccactcccctttgctcacattcccgcctgagctccaccttctcagatgagcagcagcattagattctcataggagaacgcaccctgttgtgaaccgtgcatgtgagggatcgaggttgcgctgtccttatgagaatctaatacctattgatctgttactttctcccatcacgctcaggtgggaacatccagttgcaggaaaacaagcttaacacgcccactgattctacattatggtgagttccataattattttattatatattacagtgtaataatggaaataaagtgcctaataaatgcaaatgtgcttacatcttttggcccagctcctacctcccggcagcctctccaggcccagaactttctccagtcagcctctacagaccaagctcatgactctcaatggcctatttaggcccataccctacgtcacggcagcctccgcagatgaggctactgcctcacaacagcctccacaggcacagctccatcgttacaatggcctctttagacccagctcctgcctcccagccttctctccaggccctgaactttctcaagttgacctcaccaggcccagctcatgcttctttgcagcctctccaggcccagctcctgcatcttggtggcccctccaggcccagcctctgcctcccgtcagcctctacagtcccaacgtctgcctcacagcagattcttcacgcccagcttctacctcactgtggaccccccaagccaagctcccaacctttcagcagcttct

SEQ ID NO: 15 - DNA, 2300 bp, Homo sapien
taaggaaggaactgttccagtcctctttctctccttccagtagttccttggcttgtgacagcacagtgtcaattctcatatggcatcctccccgtgtgcctctctctatgtccaaatctcccttttatttaaggacagagtcacagtggattagaacatccccataacatgaagattgcatgaaattatatacataaataactcaacaacatagcttccaaatagaaaacactcagcctttgtcatctcatcattatttgtttacacctttgtattattggtatagctctagtcttttgaaaggtgcagttactcatctttgtgttttccactcctttatagctaagtgtaaggtgcttttgcaaaatccagtactgcatatttgagaaatgctttttattcctacacatactgcatatactgttacacaattcgattttgtaggtctaatgaagttggtctttctatgagttcctatggctaaaaatagtcacaattgtgtactccagtaaattgttagaatgaaggaaaatagtttgagtgaaattatcaatctggtttttctgacttcagctgtgtgtcatgtttggttagtcagagaaacatctaatgtgaggcccctggaggacagctgataagtaagcataccaagtagaatggctactggaaaaagtgtgccagctagagagagagagaaaagagagagttaatttaccatttgctcaagtaaggaatgatccacaaattcaacaaaatctaagtagtcttaaaggacatgtcattgacagatttatcttctagtctcccactttgtctaatactgcttcaaaacaaagcaatttactgaacccagtggtctcattattctggaggtttataaggttaaaaatacctggagttttgggagcagcaatagcactgaagtgggatattagtagtgatgcgtgtgtttacagcacctgtgaacacacagagactgaagcttgaaggctgatgaccctgagttaggggaaaagataaaactttttattagatttttttaatgtcgagaagaaaattatttatctccatatttcctgaatattatcctcttacaattacgtcaatgattctcaccccagttatatattaaaattacctggagatatataaaaactatcaatgttctactcttctacagattaaatcatcatcactgagggtggccctccagcaaccaggtttgagaaccactttagaccagaatttttctctgtgccattcagtaatggcaatgataactgtaggatatgcaaattgcagaaagacaatggcaaatgatttaacttatccccaaacagctgaactatcttaagcctcatggctactttagagtgaccaaatccatgtagatgccagaagttgtgtcatacacctatttcaagggacacatagaatttacctatatatacctacctcaagggtcatgtcagtttactattcccctaaacaacagcttaatagtataaactgctgaactgctgtctgcctaatatttattgtggctatacttcttcttttctgtattaaaggccactgctttcccagcttgctctttgttctccatcatctgttgtgggtcacttgtgctttctgtttttaacacccatgttgctgaagtcatttctccaattcatgatccatgaaactacttcagcagtgaaaatggcacccctcaggttcaagtcaacacttttatatttccctctaggtcaagatccaagctatggaagaaatcaggatatgtcaattttctagagcagtcaagttttctaaaagtctacctagccatgtagttatgtagcctcactctcacttaaacaaagaaaattaaaaagcacaccagaaaagacttttcttgttaaaaacacatgtttattgtagaaaatatagtaaggaaaaagaagaaaatataaggcaactagaatttctctagttagagataactattatttatttgagtgtgtgtatatatctatatatatattgacattcagctcttatgtactagatacacacatctactgtttcataagcttttttcacagaatagattataatcagttatgtttgttatcaccacaacattttcttcttgaagaccttctggaatgaggcatttgcttttctatctagagaccctatcctttcaaaaggtcctttatctgtggaaagagctattctggccacagttactgccaagaaacaaggtgttagaaaaggcctaaagttaagtgcagaactgttgtgttttgatgaat

SEQ ID NO: 16 - DNA, 2300 bp, Homo sapien
gtgcttattctaaaacaagtaaatgtttgcctatggtctgagattctaatccacggagttcattctaatccacattcaacactatcatgtaccagtgggcctcataacccacctagccctgtgatttttcaggttcacttttctaaacttgtgaattaaatatttattttcttagttcagaagaggaaaaaaactcttgtaattgttgcccatttcaggagaaatcttgcatatgaaaacaagagataaatatacacaactgagggctgtggtttaaacaaaatcttgagaatgttttttgaccttatacatttgtgctttagtataacaaaatgatatagacaaaggtaacttttaatagaaccagtcactaaattaaaaaaatgacaaattcttctgcttagctaagcaacagagaaggtaaaatactaattcaattcatcaatttaagcaatactcattaagagccaagtatgtgcttactgaataagctgctaaggtttggtggttacagagtgtgcggtgaaatgatgtctacatcacagtccaacattcacagagtttaaaagcctaccaagaatcaagacagacacaaatacctaacatagacgtttgtatatgataagagagccagagtacaatttaggagaagaaattgtatggaaggaaggttcatttccattagaccagaaaagacagcacatttgaaggcctgaataagaaatattctggataagatattgtggctgctaccagaatggctcttgatgatctctacctcttggtatttatacccttatataatctctttcctatagtgtaagctggtcccaggtacttgtttctattgaatagaatagaacaaaagaaatgagatgccacttctgagattagattataagatactgtgaatttcttcttgtgtcctctccctctctctctttctcttgccctctcatttgaatgaagccaactggcatgctgtcagtggcccagtgtaagtcctgttacaagaaattgatgattacctgtagccaaccctaagtgaagaactgaggtcctcagtcctacaaatggagagaaactgaatctagctaagaaccatgtgagtgagctgggaagaagatccaccctcagttgaaatttaagatgacatattgagcagacatactgagacacactgaaagtaagagagcaggaggaaacaaaaccagggtcatacaaagaacacaactgattttgagattctcacataagtattacaccttcagtgagcacgtgtactagaaatttaaaaaataaataaaataaaccttcaaagtgagctagcaaataaatttccctatggtctcagctctgagtggagagagaaaatgttccctgtggagtttatagccagaatccagctctcaaacaggtttcagcctgaactcacacaatctgtgtggcttccaaatttgcaagctgagaatttaattcaaagtggtctcaggttgatagcagtccaaaatgctaggtaggaaaaaaaatcctctctggacaaataaatcatcaaagcaagctcataagagcaggtttcaaaggtcatgagcttctaacacacacacaaaaatcacacacacaaaatgggggtagcagcaacatgggtagcgtattcaaacttgaaaagactttaaatatttgtattattagatgtagattatgaaacacatattttaatgtggttaatttttttaaggaatcaaaactatgagtaaagaccaagaaaattgtgctggatggccacttccaccatggctcccctcctatttaagtctgggtactgtgtcacccgaagtcttcaggcacattgttccaggtctgggtttgcctatgaaagaaactcatgagagctggaaatgaggagtgaagaggaggtcttcaaataaagcaggcttaaggattagacatagcaggtttgacagatgtgatggcttgcagaatcctttatgagctcccactgtccatctggataagatttacagacctttcagaaattcctataagcttgggttctgtgcccacactctagactgtcaggctaagatctctgatataaaacagacctcttctgattttgtctagctgcttttctaatatctattcaccaagctcttccaataatagcataaggccctaattaatattaaacttttatcattataatacataggatgtcttctgttttcctgatcaaattctgactactattaaaatataaagaattgtccagaaatatataaaaaaagaatcacacattg

SEQ ID NO: 17 - DNA, 2300 bp, Homo sapien
agtcccagctacttgggaggctgaggtgggaggatcacttgagcccagggaggctgagactgcagtgagtcatgatcaggcctctgcactccagcctgggtgacagagtgagaccctgtctcaaaacaacaaaaaagtagcagctaacatcaactgaccttttaccaggtgcctattgataccatagtttaatttcttataactgtttcttatttcacttaccaactctgtcttcagttactcccagatttttactgtgtgtgtacagatgaccttttgtttagattgaattgtctccccagaagtaagattactgtgagtcatggtgaatggacattctccttacccttgatgtaaattgacagggttttgggtgcctcccagctataatcttagcactttgggaggctaagagaggaggattgcttgaggccaagagttggaggaggcagtatggcagtatggtgagaccctgtctccattattttaaaaaattgacaggctttacccgggaaggcttatacacaatttaaacacccctcatagtataagaaggtgcccatttcactgcacctttgccagcacagggtattataatttagtaagtcattttttgtttgattattttacatagacaaaagaactcatattactttacttgtcacatttcaacatctttcctcagcttattagctctatttcttttctgtctgtaaatggttgttgctgttttggtctttgagacagggtcttgctctgtcaccaggctggactgtagtggcataatcatgcctcactgcagccttgacctcccaggctcaaacttcagcattccgagtagctgggactacaagtgtgcaccaccacccccagctaacttttttcttcttttggatagagacagggtctcactctgttgtccagaccggtctctagctcctggccttaagcaatcctcctgcattagcttctgaaattactggaatttcaggcatgagccaccatgcctggcctgggctagtcccatattctctagagttctctttactctgtgctagccaatctctcattatgctgttcacctgttataatgaataattctctgtattaaattttaccactttaaacttttgagtggtttatgcttcctgattggactctgactaatatgttaggaagggtcccaggaggtaaacccacacagatgggatttgggcataggtttggtttcccagggggcagtgctgagctctttgccagtgggaaatggggtgctggtgatttccagtaggtgacctcacagtgactcaagctaccacttactgttgattgtgacgaaatgccagctgaggcacatgccttgggagctaagtggttgctgcccttgaccactgtgaagactggtgtgggaagggtcgctttggatgcacttgagcaggggtccccaacccctgagccatggagccgcaaggagccacacagcaggaggtgagcggtgtcgagtgagggagtgagggaagcttcgtctgtatttagagccactcccctttgctcacattcccgcctgagctccaccttctcagatgagcagcagcattagatgctcataggagaacgcaccctgttgtgaaccgtgcatgtgagggatcgaggttgcgctgtccttatgagaatctaatacctattgatctgtcactttctcccatcacgctcaggtgggaccatccagttgcaggaaaacaagcttaacacgcccactaattctacattatggtgagttctataattattttattatatattacagtgtaataatggaaataaagtgcctaataaatgcaaatgtgcttacatcttttggcccagctcctacctcccggcagcctctccaggcccagaactttctccagtcagcctctacagaccaagctcatgactcacaatggcctatttaggcccataccctacgtcacggcagcctccgcagatgaggctactgcctcacaacagcctccacaggcacagctccatcgttacaatggcctctttagacccagctcctgcctcccagccttctctccaggccctgaactttctcaagtcgacctcaccaggcccagctcatgcttctttgcagcctctccaggcccagctcctgcatcttggtggcccctccaggcccagcctctgcctcccgtcggcctctgcagtcccaacgtctgcctcacagcagattcttcacgcccagcatctacctcactgtggaccccccaagccaagctcccaacctttcagcagct

SEQ ID NO: 18 - DNA, 2300 bp, Homo sapien
tttataatagatactatgtatagcaatctatggttagttttggtcttaaccaggaaaaatcactcttttgagttttgctgtttttaccagattatttttactggatgattgctcatattatttgattattattgcaatttgtctttctggaataggaagcaagaggcctgaattctggttcctattctatcaattgtgtgaattctggaaactcagtttacttttctgggcctcatggttttcatctgaatgatgaccaacttggataaaatggtctttatataattccataggcatttcccttcccaagggcttgagtctttttcaacaattatagagttttccggtccctcttcccagtgcctcagcaccttgctattcatgttcatctgatcagttgtttgcatgctgacttacattaccctgatgggcagtacctgtggctgtttctgctccctcacccagtccataggcttctggttgtaaaaagtgtgcatcttgagactgtggacagttagctccagaggtgacagtataatcacttcacgtagaagaggatagagagagactcatgccagtggtggtgagcaagtattagagatatgatgtgtgcctctgtgagttttggggtctaagataaattatggcactaggaagatggtcctttgtgtcagaagaactggagttgttggtgcaaaaaagtatgatgtcagcatagcagttttatttgtacctcagcaacttctaaaataatctctattaagtgttttcaggaactactttctactataggaaaatgattgaggtgagtatccatctggacacagagaaatataacactgttttctgctcaccctccacttcacatataaatacaatatgtgttaaaggactaaatttctagtgtcacagtttgtactttatagtttgaagtcaataagaaagctcatataccttcctaaaagtcacttgttaatgtttgatattaatctaattttatcataaattaaaagtataaaactacaaatttcttaaagataaaatatccgaatggattcagtcaaattaagcatgataatatcaaatatcagaataggttaccatgcaggaggtactgagtacttaaaagggtggggaatgcaatgaacataaaagctggtaccaaggggaggaggagacagtgatgaattaaaacattatcttaactaatccaagtgctggtcttcaatactttcatgtgtatagacaaagagaaactgcagagatttctcacaacctctgtgtccattttatgcatgtatcttagcagaaacactggtgaaatccctccaaaacatatttattaggcatggaaaaagccttacatgacaggtggcataggctccttatgaaatcattgcaggatgggaagccatttagggcttcataattgtgaaagattgtatagaaactgaggcacttaaatagcagtaagcatgagaaaatgtggtagataatggtggtgattctatttcttgtgaaagtccacttactctagtctgctacagttgtgggctttccgatttcacataccccagtctctatattctctcaatccacagcctacctcaactaagtccgtcccaggcacctcttactgcagtgataatccatctgttaatcatgttttcctcttatgtctactttctgtcagagaattgtgggtgcaaactgggaagggaaggaaattataagaatatgtataagtacaaatggaatatgttggaaatgaggaatagttaatatcacaggtcatttaaacacctgatgaatttcatggatagtcaggaatcttgttcttacctaatctgttaattttagatcagacattacactgaaagtattgatgatgggtttaaatcaggttgcagctcacatgttgtgataatattatgttgattttttgtttttaatatgtgaggaacagaataactgtatactatttattcatagtgacattgcaatattgattttagtacatattattatcttcataatcacaatttcctccccattttcttagttctcataattttagccacagcccagttggctggaccaatggatggagagaatcactcagtggtatctgagtttttgtttctgggactcactcattcatgggagatccagctcctcctcctagtgttttcctctgtgctctatgtggcaagcattactggaaacatcctcattgtgttttctgtgaccactgaccctcacttacactcccccatgtactttctactggccagtctctc

SEQ ID NO: 19 - DNA, 2300 bp, Homo sapien
gtggatcttgactctgaattggctgggacatgcaaaatcgggggcatgcttggtgttgcccaggctcagctctgcctagacacacgtgagggccaagatctggtttgtgtttcatgagctctcccaggatgaagacccagccaggctgtctgaagaaggggtgttcttgagtaggagggaagtactgctccaatacgaaaaatctaacaatagcatagtccttaagagcttgagctttgaagagggagaacagacccatttaaggcatgaaaaataaaggaaactcttgagtccctccaaggaaaattccagccacctggctagcctcaagaagtagatgagcaccctgataagtaagaaggtaataatagcttaaaacaatagtcaagaaaattagagccacaaactaatcttaaatgacgagttaatgggtgcagcacaccaacatggtacatgtatacatacgtaacagacctgcacgttgtgcacatgtaccctaaaacttaaagtataattaaaaaaaaaagaaaattagagccacaaaatgtttgtttccctatagaaactagagataacatcttaacatatgtccctgagttgttttgtagaaacccagaccccgctaaatggaaaataccacctgttggctcgtagatctcagataaggaggaactgaggactgaacactcacaactgttctttgttctaaatttcttcctgagggacctggaggaagtcacacccacaggccagagcagaacattcctttctgctgaccccaagtttgtagccaaaacttaaccaatcacaaatcagaaaatctttgggtttttgtttgtttgtttgagacagagtctcactctgctgcccaggctggagtgcagtggcacgatctcagctcactgaaccctctgcctcccacgttcaaacgattctcatgcttcagcctcctgagtagctgggattacaggtgcacaccaccatgcccagataatttttgtatttttagtagagatggtgttttgccatgtttgtctggctggtctcaaactcctggcctcaagttatccacccaccttggcctcccaaagcgctgagattacaggtgtgaaccactgcacctggtctcaaatcagaaaatctttgaattcatctaatggtcacctatcctgtgggccctcactttgagatattttgccttttttggccaaaccaatatgtagcctccatgtattatatgaccttgcctgcaacctctgccttcccacctttaaaaacccttacacataagccatcagggagattaggccttaaggattagctgcctgatactccttgcttgctgcctgcaataaattcctcaacttctgtctcagcaatgccgatatcagtgcttgactttgataggctgggtgggtggacccaaatttggtttggtgaccctttgagcttagattcaaaattctagttttgtcactctgcagttttgtgatcttgagcaagttacttaacctctctgagccttgtttgtcatgtgtaatgaaaagagctatacttaccttgtgaggtagtcctcaggattcaatgagataataagtactcactaaacaaaactcgttattacaaaagaatcactttgtctctgaagtgggcaattcaacccatttctaggagattttaaacatgattttagatatttggtgtgattttgtgaatgggtttatcgttaatagctttcatgctccagaattttcttgaataataggtttttgcaaagtgcattccatggaatactcatttgggtgacgttaatagacatcactcaaaagctgggtgaatattacaatgtttacttcatctgtaacaagctgagtagctacagtacatatctaagagggggctctaattctcaatattttccaaatttattagatcacagacttttcttttagtgaagtgcttaatgaaacttaagttctgtgaaaagtactttgagaaatattgctttaaaaagaaaaagattgagccctgtatcaggggaaatatctaatattatattaaacaaaaaagtcccactgaagaaaatcatcttattgttcatagaccttagtttaggtattggggccaaaggatggatgaccatttcaaacgatccaggctaagccaggaggagagctcaaagtctgatctggtgagtaagttgtgaagggaatgtgatgaaaaagtacacttctattgcaaagaaatcatgagctaggtttatacgctatgctgtgaatggccaatagattataaattca

SEQ ID NO: 20 - DNA, 2300 bp, Homo sapien
ggagaaagggggaccctcacacactgttgtgggaacgttgattagtacaaccactatggaaaacagatggaggctcctcaaaaaaccaaaaggggccgggcacggtggctcacgcctgtggtcccagcactttgggaggccaaagcagggggatcacaaggtcaggagtttgagaccagcctggccaacatgatgaaaccccatctctactaaaaatataaaaaattagccaggcgtggtggtgcgaccctgtaatcccagctacttgggagactgaggcaggagaatcactggaacacaggaggtggagattgcggtgagcagagagcgcaccattgcactccagcctgggtgacagagcaagactcctccttaaaaaataaataaataaataaaagttggccgggcgcggtgtctcacacctgtaatcccagcactttgggaggtggaggcgggcggatcacaaggtcaggagatcgagaccatcctggccaacatggtgaaatcccgtctctactaaaatacaaaaaattagctgggcgtggtggtgcgcacctataaatcccagctactcgggaggctgaggcaggggaatcgcttaaacacaggaacccgggaggcagaggttgcagtgagccaagatcacaccactgcacaccagcctagtgacagagcaagactccatctcaaaaaacaaacaaaaaaaaaaaaaaccatctaaaagtaaaactgctgtatgatccagtaatttcactaactgggcctatagtcaaaagaaacaaaatcaatatatcgtaaagacatctgcactctcatgtttactgcgggactactcacaatcgccaaaatacggaatcagcctctgagttcatcagcggatgatggataaacagaacgtggtgtgtatacacagtggaatattattcagccatacagaggaacgacagcctgttatttgtacaagatggaactagggatcattatgttaagtgaaataagccaagcacagaaagacaaacattgaatgttctctcccacctactaaaaaagtagctctcgtgaagacagagggtagacgcgtggttaccagaggtggggaaatgtagcggggagagggggagaaagagaagttgattgaagggtacaaatacgtggtttgatagaaggaataagacctagtgttacatagatcatagttggcaattgcctactgtatatttcaaaatggctagaagagaagaatcggaacggttctagcataaagcaaaaacaaatatttaaggcgatagatattccaagtaggctgatttgattttcacaattatatgaatgcattaaactatcacatgtaccctgaaactatgtacatctattatgcatcagtgaaaaagaaaaaagaaacaagaacttagattttaaactcagcactctcctagtgggctccttaaaaatatttttgtttgggaggacaaagtaggaggattccttgagcccgggagcttgaggctgcagtgagatagtgccactgcactccagcctgagcgacagagagatacactggctctaaatataaataatataaatatatatttatggaataaataaatgaataaaatatctttgcatgctggtgagcccagggtacagtctgcccttggcagctcggtgactcagccaaggcggctaaacaatcctcgcccactagacagtggaggtcgccctccagaggaccttatcagatgtacgtgcaaagcagttttcaagacagttttctattcagagtgtggtttagccgttcagggagagagatcacaaaggaaaaccacctttaggaaagcaggtgagaaaggtgtaagttcccaggcttgggggtcctggcccagcctagctgtgggcaaccccgggaaggctgagccccgcaggctgtatggacaaagcatctcgctttccacactggccacaggtctatccctggcagtaaacaggtcacaggtgggcagcaggtctaacacctgtagcgaaagaacgcaggagaggaactgaggctctgctaccagcagatgctccaagcacatcccacggggaggaccatgaacaactcagctggccacaaccaggaaaagggtgtccagggcctcagagctgcttcagtggggccatttccaggctcccaagcagtaatgtgggtgccctctcaagaacagaagcggaacagcctaacgctaatgtttgggaagaagagaacagtgatccccctggttacctcccatctctctctgcagttctcatgcatctgtgca

SEQ ID NO: 21 - DNA, 2300 bp, Homo sapien
aagatggaggtcatgaccagtagaaatctcagcagttctgcctgggctccatgtcatctccctgctattaggcccatcagaatgtaagcacaaatgcctagagaatgacaagcttctttgggactctgctgactagacatgacataagactggacagctcctggggaacttccaagagctggctccaggcagtgactaatcctaggagctgctggcttggctgcctctctcccttccttatttccaagattggtcacctcctgctctgaaatagcaattgattttcagacatgagttgatagaaccatgattttctaatactgttccaaagaggctaaagtacctctgaggagcagtgcaggctaggatcaaactctccctaccttccactccactccctaccttgcccctccacctctgcccactttctatttcttcaggcacagcagcttctaccttatggattacaaattctgatcatctatggttgcattaggaaaagagtactgctactttcattttcttttctaaccactgccctagaagaataacacctcacattctctggtagactgaagcctgcagctgcaaggatgctcagaaaaccagacttctattcattggccacttgctgcacgctctgtccctcgatccttgcaacgtacctttgaggtaggcacaaaaattcccatttacaagtgagaaaaccaaggcaaaagaggttcagtttatttcaggctcaaatgtgcttccaatagcttatagcctctacagctagtgtttgaacccaggtctgaaacaaataggattgacaaggggagggaaaagaggaacagaaattcttttctataagacaattgtttatgcagccaggatttcttaaaatccagtttgtgcctacggacataatctttgaatttgctttgtttctcgatgaataacttggaagctattcaaataacttggaagcttcctttaaaaggaacatcaggaggtgatttttgactaaccctaggtgtcctttctgagccaaatagattttcaaataagaaaatgagaggacatgagcttgaggaaaatgataggcattccaacctcatccgcttgctgacgacctccacgtgatttcaacaatgatttcaaatatttcactttttaagtcagtgtgacttaagtatgaaattgcctctccctaaagctcccctaaggcctaaacagtcgtcattaccatagctgtgacagggagactgttgaatttataatctattggccattcacagcatagcgtataaacctagctcatgatttctttgcaatagaagtgtactttttcatcacattcccttcacaacttactcaccagatcagactttgagctctcctcctggcttagcctggatcgtttgaaatggtcatccatcctttggccccaatacctaaactaaggtctatgaacaataagatgattttcttcagtgggacttttttgtttaatatattagatttgaccttcagcaaggtcaaagggagtccgaactagtctcaggcttcaacatcgaatacgccgcaggccccttcgccctattcttcatagccgaatacacaaacattattataataaacaccctcaccactacaatcttcctaggaacaacatataacgcactctcccctgaactctacacaacatattttgtcaccaagaccctacttctgacctccctgttcttatgaattcgaacagcatacccccgattccgctacgaccaactcatacacctcctatgaaaaaacttcctaccactcaccctagcattacttatatgatatgtctccatacccattacaatctccagcattccccctcaaacctaagaaatatgtctgataaaagagttactttgatagagtaaataataggagtttaaatccccttatttctaggactatgagaatcgaacccatccctgagaatccaaaattctccgtgccacctatcacaccccatcctaaagtaaggtcagctaaataagctatcgggcccataccccgaaaatgttggttatatccttcccgtactaattaatcccctggcccaacccgtcatctactctaccatctttgcaggcacactcatcacagcgctaagctcgcactgattttttacctgagtaggcctagaaataaacatgctagcttttattccagttctaaccaaaaaaataaaccctcgttccacagaagctgccatcaagtatttcctcacgcaagcaaccgcatccataatccttctaatagct

SEQ ID NO: 22 - DNA, 2300 bp, Homo sapien
gtggtttgtagagaatagtcaacggtcggcgaacatcagtgggggtgaggtaaaatggctgagtgaagcattggactgtaaatctaaagacaggggttaagcctctttttaccagctctgaggtgattttcatattgaattgcaaattcgaagaagcagcttcaaacctgccggggcttctcccgccttttttcccggcggcgggagaagtagattgaagccagttgattagggtgcttagctgttaactaagtgtttgtgggtttaagtcccattggtctagtaagggcttagcttaattaaagtggctgatttgcgttcagttgatgcagagtggggttttgcagtccttagctgttgcagaaattaagtattgcaacttactgagggctttgaaggctcttggtctgtatttaacctaaatttctataagattattagcataaaaggggagataggtaggagcagtgtggtaagggcgatgagtgtggggaggaatggggtgggttttgtgtgttcaaactgtcattttatttttacgttgttagatatagggagtagtgtgattgaggtggagtagattaggcgcaggtagaagtagaggttaaggagggtgatgatggctatgatggtggggatgatgaggctattgttttttgtgaattcttcgataatggcccatttgggcaaaaagccggttagcgggggcaggcctcctagggagaggagggtggatggaattaagggtgttagtcatgttagcttgtttcaggtgcgagatagtagtagggttgtggtgctggagtttaagttgagtagtaggaatgcggtagtagttaggataatataaatagttaaattaagaatggttatgttagggttgtacggtagaactgctgttattcatcctatgtgggtaattgaggagtatgctaagattttgcgtagttgggtttggtttaatccacctcaactgcctgccatgatggataagattgaaagagtgaggagaaggcttacgtttaatgagggagaaatttggtatatgattgagatgggggctagtttttgtcatgtgagaaggagcaggccggatgtcagaggggtgccttgggtaacctctgggactcagaagtgaaagggggctattcctagttttattgctatagccattatgattattaatgatgagtattgattggtggtattggttatggttcattgtccggagagtatattgttgaagaggatagctattagaaggattatggatgcggttgcttgcgtgaggaaatacttgatggcagcttctgtggaacgagggtttatttttttggttagaactggaataaaagctagcatgtttatttctaggcctactcaggtaaaaaatcagtgcgagcttagcgctgtgatgagtgtgcctgcaaagatggtagagtagatgacgggttgggccaggggattaattagtacgggaaggatataaccaacattttcggggtatgggcccgatagcttatttagctgaccttactttaggatggggtgtgataggtggcacggagaattttggattctcagggatgggttcgattctcatagtcctagaaataaggggatttaaactcctattatttactctatcaaagtaactcttttatcagacatatttcttaggtttgagggggaatgctggagattgtaatgggtatggagacatatcatataagtaatgctagggtgagtggtaggaagttttttcataggaggtgtatgagttggtcgtagcggaatcgggggtatgctgttcgaattcataagaacagggaggtcagaagtagggtcttggtgacaaaatatgttgtgtagagttcaggggagagtgcgttatatgttgttcctaggaagattgtagtggtgagggtgtttattataataatgtttgtgtattcggctatgaagaatagggcgaaggggcctgcggcgtattcgatgttgaagcctgagactagttcggactccctttgaccttgctgaaggtcaaatctaatatattaaacaaaaaagtcccactgaagaaaatcatcttattgttcatagaccttagtttaggtattggggccaaaggatggatgaccatttcaaacgatccaggctaagccaggaggagagctcaaagtctgatctggtgagtaagttgtgaagggaatgtgatgaaaaagtacacttctattgcaaagaaatcatgagctaggtttatacgctatgctgtgaatggccaatagattataaattca

SEQ ID NO: 23 - DNA, 2300 bp, Homo sapien
atggtcatccatcctttggccccaatacctaaactaaggtctatgaacaataagatgattttcttcagtgggacttttttgtttaatatattagatttgaccttcagcaaggtcaaagggagtccgaactagtctcaggcttcaacatcgaatacgccgcaggccccttcgccctattcttcatagccgaatacacaaacattattataataaacaccctcaccactacaatcttcctaggaacaacatataacgcactctcccctgaactctacacaacatattttgtcaccaagaccctacttctgacctccctgttcttatgaattcgaacagcatacccccgattccgctacgaccaactcatacacctcctatgaaaaaacttcctaccactcaccctagcattacttatatgatatgtctccatacccattacaatctccagcattccccctcaaacctaagaaatatgtctgataaaagagttactttgatagagtaaataataggagtttaaatccccttatttctaggactatgagaatcgaacccatccctgagaatccaaaattctccgtgccacctatcacaccccatcctaaagtaaggtcagctaaataagctatcgggcccataccccgaaaatgttggttatatccttcccgtactaattaatcccctggcccaacccgtcatctactctaccatctttgcaggcacactcatcacagcgctaagctcgcactgattttttacctgagtaggcctagaaataaacatgctagcttttattccagttctaaccaaaaaaataaaccctcgttccacagaagctgccatcaagtatttcctcacgcaagcaaccgcatccataatccttctaatagctatcctcttcaacaatatactctccggacaatgaaccataaccaataccaccaatcaatactcatcattaataatcataatggctatagcaataaaactaggaatagccccctttcacttctgagtcccagaggttacccaaggcacccctctgacatccggcctgctccttctcacatgacaaaaactagcccccatctcaatcatataccaaatttctccctcattaaacgtaagccttctcctcactctttcaatcttatccatcatggcaggcagttgaggtggattaaaccaaacccaactacgcaaaatcttagcatactcctcaattacccacataggatgaataacagcagttctaccgtacaaccctaacataaccattcttaatttaactatttatattatcctaactactaccgcattcctactactcaacttaaactccagcaccacaaccctactactatctcgcacctgaaacaagctaacatgactaacacccttaattccatccaccctcctctccctaggaggcctgcccccgctaaccggctttttgcccaaatgggccattatcgaagaattcacaaaaaacaatagcctcatcatccccaccatcatagccatcatcaccctccttaacctctacttctacctgcgcctaatctactccacctcaatcacactactccctatatctaacaacgtaaaaataaaatgacagtttgaacacacaaaacccaccccattcctccccacactcatcgcccttaccacactgctcctacctatctccccttttatgctaataatcttatagaaatttaggttaaatacagaccaagagccttcaaagccctcagtaagttgcaatacttaatttctgcaacagctaaggactgcaaaaccccactctgcatcaactgaacgcaaatcagccactttaattaagctaagcccttactagaccaatgggacttaaacccacaaacacttagttaacagctaagcaccctaatcaactggcttcaatctacttctcccgccgccgggaaaaaaggcgggagaagccccggcaggtttgaagctgcttcttcgaatttgcaattcaatatgaaaatcacctcagagctggtaaaaagaggcttaacccctgtctttagatttacagtccaatgcttcactcagccattttacctcacccccactgatgttcgccgaccgttgactattctctacaaaccacaaagacattggaacactatacctattattcggcgcatgagctggagtcctaggcacagctctaagcctccttattcgagccgaactgggccagccaggcaaccttctaggtaacgaccacatctacaacgttatcgtcacagcccatgcatttgtaa

SEQ ID NO: 24 - DNA, 2300 bp, Homo sapien
tccccttttatgctaataatcttatagaaatttaggttaaatacagaccaagagccttcaaagccctcagtaagttgcaatacttaatttctgcaacagctaaggactgcaaaaccccactctgcatcaactgaacgcaaatcagccactttaattaagctaagcccttactagaccaatgggacttaaacccacaaacacttagttaacagctaagcaccctaatcaactggcttcaatctacttctcccgccgccgggaaaaaaggcgggagaagccccggcaggtttgaagctgcttcttcgaatttgcaattcaatatgaaaatcacctcagagctggtaaaaagaggcttaacccctgtctttagatttacagtccaatgcttcactcagccattttacctcacccccactgatgttcgccgaccgttgactattctctacaaaccacaaagacattggaacactatacctattattcggcgcatgagctggagtcctaggcacagctctaagcctccttattcgagccgaactgggccagccaggcaaccttctaggtaacgaccacatctacaacgttatcgtcacagcccatgcatttgtaataatcttcttcatagtaatacccatcataatcggaggctttggcaactgactagttcccctaataatcggtgcccccgatatggcgtttccccgcataaacaacataagcttctgactcttacccccctctctcctactcctgcttgcatctgctatagtggaggccggcgcaggaacaggttgaacagtctaccctcccttggcagggaactactcccaccctggagcctccgtagacctaaccatcttctccttacacctagcaggtatctcctctatcttaggagccatcaatttcatcacaacaattattaatataaaaccccctgccataacccaataccaaacgccccttttcgtctgatccgtcctaatcacagcagtcttacttctcctatctctcccagtcctagccgctggcatcactatactactaacagaccgtaacctcaacaccaccttcttcgacccagccggaggaggagaccccattctataccaacacctattctgatttttcggtcaccctgaagtttatattctcatcctaccaggcttcggaataatctcccatattgtaacttactactccgggaaaaaaagaaccatttggatacataggtatggtctgagctatgatatcaattggcttcctagggtttatcgtgtgagcacaccatatatttacagtaggaatagacgtagacacacgagcatatttcacctccgctaccataatcatcgctatccccaccggcgtcaaagtatttagctgactcgccacactccacggaagcaatatgaaatgatctgctgcagtgctctgagccctaggatttatttttcttttcaccgtaggtggcctgactggcattgtattagcaaactcatcactagacatcgtactacacgacacgtactacgttgtagcccacttccactatgtcctatcaataggagctgtatttgccatcataggaggcttcattcactgatttcccctattctcaggctacaccctagaccaaacctacgccaaaatccatttcgctatcatattcatcggcgtaaatctaactttcttcccacaacactttctcggcctatccggaatgccccgacgttactcggactatcccgatgcatacaccacatgaaatatcctatcatctgtaggctcattcatttctctaacagcagtaatattaataattttcataatttgagaagccttcgcttcgaagcgaaaagtcctaatagtagaagaaccctccataaacctggagtgactatatggatgccccccaccctaccacacattcgaagaacccgtatacataaaatctagacaaaaaaggaaggaatcgaaccccccaaagctggtttcaagccaaccccatggcctccatgactttttcaaaaagatattagaaaaaccatttcataactttgtcaaagttaaattataggctaaatcctatatatcttaatggcacatgcagcgcaagtaggtctacaagacgctacttcccctatcatagaagagcttatcatctttcatgatcacgccctcataatcattttccttatctgcttcctagtcctgtacgcccttttcctaacactcacaacaaaactaactaatactaacatctcagacgctcaggaaatagaaaccgtctgaactat

SEQ ID NO: 25 - DNA, 2300 bp, Homo sapien
acagtctaccctcccttggcagggaactactcccaccctggagcctccgtagacctaaccatcttctccttacacctagcaggtatctcctctatcttaggagccatcaatttcatcacaacaattattaatataaaaccccctgccataacccaataccaaacgccccttttcgtctgatccgtcctaatcacagcagtcttacttctcctatctctcccagtcctagccgctggcatcactatactactaacagaccgtaacctcaacaccaccttcttcgacccagccggaggaggagaccccattctataccaacacctattctgatttttcggtcaccctgaagtttatattctcatcctaccaggcttcggaataatctcccatattgtaacttactactccgggaaaaaaagaaccatttggatacataggtatggtctgagctatgatatcaattggcttcctagggtttatcgtgtgagcacaccatatatttacagtaggaatagacgtagacacacgagcatatttcacctccgctaccataatcatcgctatccccaccggcgtcaaagtatttagctgactcgccacactccacggaagcaatatgaaatgatctgctgcagtgctctgagccctaggatttatttttcttttcaccgtaggtggcctgactggcattgtattagcaaactcatcactagacatcgtactacacgacacgtactacgttgtagcccacttccactatgtcctatcaataggagctgtatttgccatcataggaggcttcattcactgatttcccctattctcaggctacaccctagaccaaacctacgccaaaatccatttcgctatcatattcatcggcgtaaatctaactttcttcccacaacactttctcggcctatccggaatgccccgacgttactcggactatcccgatgcatacaccacatgaaatatcctatcatctgtaggctcattcatttctctaacagcagtaatattaataattttcataatttgagaagccttcgcttcgaagcgaaaagtcctaatagtagaagaaccctccataaacctggagtgactatatggatgccccccaccctaccacacattcgaagaacccgtatacataaaatctagacaaaaaaggaaggaatcgaaccccccaaagctggtttcaagccaaccccatggcctccatgactttttcaaaaagatattagaaaaaccatttcataactttgtcaaagttaaattataggctaaatcctatatatcttaatggcacatgcagcgcaagtaggtctacaagacgctacttcccctatcatagaagagcttatcatctttcatgatcacgccctcataatcattttccttatctgcttcctagtcctgtacgcccttttcctaacactcacaacaaaactaactaatactaacatctcagacgctcaggaaatagaaaccgtctgaactatcctgcccgccatcatcctagtccttatcgccctcccatccctacgcatcctttacataacagacgaggtcaacgatccctcctttaccatcaaatcaattggccatcaatggtactgaacctacgaatacaccgactacggcggactaatcttcaactcctacatacttcccccattattcctagaaccaggcgacctgcgactccttgacgttgacaatcgagtagtactcccggttgaagcccccattcgtataataattacatcacaagacgtcttacactcatgagctgtccccacattaggcttaaaaacagatgcaattcccggacgtctaaaccaaaccactttcactgctacacgaccaggggtatactacggccaatgctctgaaatctgtggagcaaaccagttttatgcccatcgtcctagaattaattcccctaaaaatctttgaaatagggcccgtatttaccctatagcaccccctctaccccctctagagcccactgtaaagctaacttagcattaaccttttaagttaaagattaagagaaccaacacctctttacagtgaaatgccccaactaaatactaccgtatgacccaccataattacccccatactccttacactattcctcatcacccaactaaaaatattaaatacaaattaccacctacctccctcaccaaagcccataaaaataaaaaactataacaaaccctgagaaccaaaatgaacgaaaatctgttcacttcattcattgcccccacaatcctaggcctacccgc

SEQ ID NO: 26 - DNA, 2300 bp, Homo sapien
acggatgtgtttaggagtgggacttctaggggatttagcggggtgatgcctgttgggggccagtgtccccctagttggggggtgggagctaggctggagtggtaaaaggctcagaaaaatcctgcgaagaaaaaaacttctgaggtaataaataggattatcccgtatcgaaggcctttctggacaggtggtgtgtggtggccttggtatgtgctttctcgtgttacatcgcgccatcattggtatatggttagtgtgttggttagtaggcctagtatgaggagggttgtggagtggaagtgaaatcacatggctaggccggaggtcattaggagggctgagagggcccctgttaggggccatgggctgggttttactatatgataggcatgtgattggtgggtcattatgtgttgtcgtgcaggtagaggcttactagaagtgtaaaaacgtaggcttggattaaggcgacagcgatttctaggatagtcagtagaattagaattgtgaagatgataagtgtagagggaaggttaatagttgatattgctagtgtggcgcttccaattaggtgcatgagtaggtggcctgcagtaatgttagcggttaggcgtacggccagggctattggttgaatgagtaggctgatggtttcgataataactagtatagggataaggggtgtaggtgtgccttgtggtaagaagtgggctagggcatttttaatcttagagcgaaagcctataatcactgcgcccgctcataaggggatggccatggctaggtttatagatagttgggtggttggtgtaaatgagtgaggcaggagtccgaggaggttagttgtggcaataaaaatgattaaggatactagtataagagatcaggttcgtcccttagtgttgtgtatggctatcatttgttttgaggttagttggattagtcattgttgggtggtaattagtcggttgttgatgagatatttggaggtggggatcaatagagggggaaatagaatgatcagtactgcggcgggtaggcctaggattgtgggggcaatgaatgaagtgaacagattttcgttcattttggttctcagggtttgttatagttttttatttttatgggctttggtgagggaggtaggtggtaatttgtatttaatatttttagttgggtgatgaggaatagtgtaaggagtatgggggtaattatggtgggtcatacggtagtatttagttggggcatttcactgtaaagaggtgttggttctcttaatctttaacttaaaaggttaatgctaagttagctttacagtgggctctagagggggtagagggggtgctatagggtaaatacgggccctatttcaaagatttttaggggaattaattctaggacgatgggcataaaactggtttgctccacagatttcagagcattggccgtagtatacccctggtcgtgtagcagtgaaagtggtttggtttagacgtccgggaattgcatctgtttttaagcctaatgtggggacagctcatgagtgtaagacgtcttgtgatgtaattattatacgaatgggggcttcaaccgggagtactactcgattgtcaacgtcaaggagtcgcaggtcgcctggttctaggaataatgggggaagtatgtaggagttgaagattagtccgccgtagtcggtgtattcgtaggttcagtaccattgatggccaattgatttgatggtaaaggagggatcgttgacctcgtctgttatgtaaaggatgcgtagggatgggagggcgataaggactaggatgatggcgggcaggatagttcagacggtttctatttcctgagcgtctgagatgttagtattagttagttttgttgtgagtgttaggaaaagggcgtacaggactaggaagcagataaggaaaatgattatgagggcgtgatcatgaaagatgataagctcttctatgataggggaagtagcgtcttgtagacctacttgcgctgcatgtgccattaagatatataggatttagcctataatttaactttgacaaagttatgaaatggtttttctaatatctttttgaaaaagtcatggaggccatggggttggcttgaaaccagctttggggggttcgattccttccttttttgtctagattttatgtatacgggttcttcgaatgtgtggtagggtggggggcatccatatagtcactccaggtttatggagggttcttctactattaggacttttcgcttcgaagcgaaggcttctcaaattatga

SEQ ID NO: 27 - DNA, 2300 bp, Homo sapien
tttataatagatactatgtatagcaatctatggttagttttggtcttaaccaggaaaaatcactcttttgagttttgctgtttttactagattatttttactggatgattgctcatattatttgattattattgcaatttgtctttctggaataggaagcaagaggcctgaattctggttcctattctatcaattgtgtgaattctggaaactcagtttacttttctgggcctcatggttttcatctgaatgatgaccaacttggataaaatggtctttatataatttcgtaggcatttcccttcccaagggcttgagtctttttcaacaattatagagttttccggtccctcttcccagtgcctcagcaccttgctattcatgttcatctgatcagttgtttgcatgctgacttacattaccctgatgggcagtacctgtggctgtttctgctccctcacccagtccataggcttctggttgtaaaaagtgtgcatcttgagactgtggacagttagctccagaggtgacagtataatcacttcacgtagaagaggatagagagagactcatgccagtggtggtgagcaagtattagagatatgatgtgtgcctctgtgagttttggggtctaagataaattatggcactaggaagatggtcctttgtgtcagaagaactggagttgttggtgcaaaaaagtatgatgtcagcatagcagttttatttgtacctcagcaacttctaaaataatctctattaagtgttttcaggaactactttctactataggaaaatgattgaggtgagtatccatctggacacagagaaatataacactgttttctgctcaccctccacttcacatataaatacaatatgtgttaaaggactaaatttctagtgtcacagtttgtactttatagtttgaagtcaataagaaagctcatataccttcctaaaagtcacttgttaatgtttgatattaatctaattttatcataaattaaaagtataaaactacaaatttcttaaagataaaatatccgaatggattcagtcaaattaagcatgataatatcaaatatcagaataggttaccatgcaggaggtactgagtacttaaaagggtggggaatgcaatgaacataaaagctggtaccaaggggaggaggagacagtgatgaattaaaacattatcttaactaatccaagtgctggtcttcaatactttcatgtgtatagacaaagagaaactgcagagatttctcacaacctctgtggccattttatgcatgtatcttagcagaaacactggtgaaatccctccaaaacatatttattaggcatggaaaaagccttacatgacaggtggcataggctccttatgaaatcattgcaggatgggaagccatttagggcttcgtaattgtgaaagattgtatagaaactgaggcacttaaatagcagtaagcatgagaaaatgtggtagataatggtggtgattctatttcttgtgaaagtccacttactctagtctgctacagttgtgggctttccgatttcacataccccagtctctatattctctcaatccacagcctacctcaactaagtctgtcccaggcacctcttactgcagtgataatccatctgttaatcatgttttcctcttatgtctactttctgtcagagaattgtgggtgcaaactgggaagggaaggaaattataagaatatgtataagtacaaatggaatatgttggaaatgaggaatagttaatatcacaggtcatttaaacacctgatgaatttcatggatagtcaggaatcttgttcttacctaatctgttaattttagatcagacattacactgaaagtattgatgatgggtttaaatcaggttgcagctcacatgttgtgataatattatgttgattttttgtttttaatatgtgaggaacagaataactgtatactatttattcatagtgacattgcaatattgattttagtacatattattatcttcataatcacaatttcctccccattttcttagttctcataattttagccacagcccagttggctggaccaatggatggagagaatcactcagtggtatctgagtttttgtttctgggactcactcattcatgggagatccagctcctcctcctagtgttttcctctgtgctctatgtggcaagcattactggaaacatcctcattgtgttttctgtgaccactgaccctcacttacactcccccatgtactttctactggccagtctctc

SEQ ID NO: 28 - DNA, 2300 bp, Homo sapien
gtgcttattctaaaacaagtaaatgtttgcctatggtctgagattctaatccacggagttcattctaatccacattcaacactatcatgtaccagtgggcctcataacccacctagccctgtgatttttcaggttcacttttctaaacttgtgaattaaatatttattttcttagttcagaagaggaaaaaaactcttgtaattgttgcccatttcaggagaaatcttgcatatgaaaacaagagataaatatacacaactgagggctgtggtttaaacaaaatcttgagaatgttttttgaccttacacatttgtgctttagtataacaaaatgatatagacaaaggtaacttttaatagaaccagtcactaaattaaaaaaatgacaaattcttctgcttagctaagcaacagagaaggtaaaatactaattcaattcatcaatttaagcaatactcattaagagccaagtatgtgctcactgaataagctgctaaggtttggtggttacagagtgtgcggtgaaatgatgtctacatcacagtccaacattcacagagtttaaaagcctaccaagaatcaagacagacacaaatacctaacatagacatttgtatatgataagagagccagagtacaatttaggagaagaaattgtatggaaggaaggttcatttccattagaccagaaaagacagcacatttgaaggcctgaataagaaatattctggataagatattgtggctgctaccagaatggctcttgatgatctctacctcttggtatttatacccttatataatctctttcctatagtgtaagctggtcccaggtacttgtttctattgaatagaatagaacaaaagaaatgagatgccacttctgagattagattataagatactgtgaatttcttcttgtgccctctccctctctctctttctcttgccctctcatttgaatgaagccaactggcatgctgtcagtggcccagtgtaagtcctgttacaagaaattgatgattacctgtagccaaccctaagtgaagaactgaggtcctcagtcctacaaatggagagaaactgaatctagctaagaaccatgtgagtgagctgggaagaagatccaccctcagttgaaatttaagatgacatattgagcagacatactgagacacactgaaagtaagagagcaggaggaaacaaaaccagggtcatacaaagaacacaactgattttgagattctcacataagtattacaccttcagtgagcacgtgtactagaaatttaaaaaataaataaaataaaccttcaaagtgagctagcaaataaatttccctatggtctcagctctgagtggagagagaaaatgttccctgtggagtttatagccagaatccagctctcaaacaggtttcagcctgaactcacacaatctgtgtggcttccaaatttgcaagctgagaatttaattcaaagtggtctcaggttgatagcagtccaaaatgctaggtaggaaaaaaaatcctctctggacaaataaatcatcaaagcaagctcataagagcaggtttcaaaggtcatgagcttctaacacacacacaaaaatcacacacacaaaatgggggtagcagcaacatgggtagcgtattcaaacttgaaaagactttaaatatttgtattattagatgtagattatgaaacacatattttaatgtggttaatttttttaaggaatcaaaactatgagtaaagaccaagaaaattgtgctggatggccacttccaccatggctcccctcctatttaagtctgggtactgtgtcacccgaagtcttcaggcacattgttccaggtctgggtttgcctatgaaagaaactcatgagagctggaaatgaggagtgaagaggaggtcttcaaataaagcaggcttaaggattagacatagcaggtttgacagatgtgatggcttgcagaatcctttatgagctcccactgtccatctggataagatttacagacctttcagaaattcctataagcttgggttctgtgcccacactctagactgtcaggctaagatctctgatataaaacagacctcttctgattttgtctagctgcttttctaatatctattcaccaagctcttccaataatagcataaggccctaattaatattaaacttttatcattataatacataggatgtcttctgttttcctgatcaaattctgactactattaaaatataaagaattgtccagaaatatataaaaaaagaatcacacattg

SEQ ID NO: 29 - DNA, 2300 bp, Homo sapien
gaggcaggagaatcgcttgaactcaggaggtggaggttgcagtgagccgagattacgcgactacactccagcctggagacaaagtaagactccatctcaggaaaaaaaaattttaaattaaaaagttctagtatctaaaatgagcaaaatcgccaggcgcggtgggtcacacttgtaatcccagcactttgggatgcagaagtgggtggaccatccgaagtcagaggttgagaccagcctgcagtgagccgagattgcaccactgcactccagcctgggagacagagtgagactccatttcaaaaaaagaattagccaagcgtggtagcatgcacctgtagtcctagctaccggggaggctgacggggaaggattccttgagcccgaaggtcaaggctgcagtgagccttgtttgcaccacctcactccaacctgggcaagaccccatctcaaaaaagaaaaaaaacccacaaaaacaaaaaacaaaacagaacagaacagcatcacttccttatcattagtttgaaggaagtgaattgcctgtaaaagtttccattttcaaaaaaagtgttaaaatatagtgtaaagccaggcacgatggctcattcctgtaatctcagcactttgggaggctgaaatggattgcccctggaggtcgaggctgcagctgagcgattctcccgcctaagcccggcaagttgcggagactacaagcgcgtgccaccatgtccagctaattttttgtatttttgtagagaaagggttccaccatgttgcccaaactagtctggaattcctgagctcaagtgatccacccacttccgcctccgcctcccaaaatgctgggattaaaggcgtgagccaccgggcctggcccaattactttcttcagtctgagcatgagtgctggaagaaaagctctcacttgcatataattttttagagacagagtctccctctgttacacaggctggagtgcaatggcgcaatctcagcgcattgtaacatcaacctccagtgctcgatcgcttatataatctcagctcactgtaatctcaacctcccgggctcgatcgcatatatatacacacatatatttgtttgtttagacggagtcttggtctgttgcccaggctggagtgcagtggcgcgatctccgctcactgcaacctccgcatcccgggttcaaacaattctctgcctcagcctcccgagtagctgggattacaggcacctgccaccacgcccgactaatttttgtgtttttagtagagacggggtttcagtgaaaccatgctggccaggctggtcttgaactcctgtcctcgtgatccacccgcctcgacctcccaaagtgctgggattacaggtgtgggccacctcgcccagccgactgcttatatttttaaaaagatgttttcttcatttcctagccccttctaccccgctacaagtttcaaagacttaatgctattacaaaggaccgtcagaggtcaagctcaggggtgcaactccctcatgccgggcagcctcagggggccgaccctacccaggatgagcggcgccaggtagccggggacgctcccggggatccccgggccctggctgggggaggcgttgtggagcgcacgtacccaggctcagatgaggcgagtgggcggccggggctgcagctggcgctggccattgaggagcttctgcgcgacagtgcgatcggttgcaccttctgcgacaggtgccggccggttggcgcgcagcgcctgctagcgcagagtctggcccttgctgcgcccggcgccgaagaccgggaagtcgtaaagctcctcctcgtggcttatgtgcggcggcggccgggcagaagcctagcgacacagaactgccagctcagcagccggttacatcccgcccggccaccagtaggcagcgtccgctcatgcgcgctcctggaagaaccagcagcccccaccgcgagttctgattggctctgcgtgagtggtagtcccctgtgacgtcacaagggtgcgccttccgtgacgtcacaagggcgggtcttcgccgacaccatagaggtgggccgttggcgacgttagaggcgcgggtgttcggctacatcactggggcgccatggtgcctggagctgggcagttttctcatcagagtggggactggtaagagtgacctccccgccaggttctgtgtgttgccggctgaagaagggtagctgaaaaattcagacccagcacagtgtttatgttggtcaaaaatagaaaactatgtctggcgcggccgaggcgggagga

SEQ ID NO: 30 - DNA, 2300 bp, Homo sapien
tagctatttctccatgtagctctctgatagttcagaccatactgagttgctttatagtagcaattcttgaccatctgtctacataaaaggatttaattcctggtgtgagtgagagagtaggatggagcacaggaggaagtcattggctcctggtggtttctgtgctgggtgccctgctctctcatctttggtcactgactctggagaaggtgcgagtattctgtgctttgtcagagggggaatccatagaccaggaccagcattttatcagtttcagtcatttggacgactgcataattttttttttgtctgtgtaccacatactactataatttgctgggtagcttttcttcaaatttacttttttaaacagaaatacctactttagcctcatcctaaacactaatacctgtgaaatggtaaattttctgtcggtcgtttgtctagtacatataaaataaatgcataactataaaaattaaaatgtgctgtgcactcatgtaccaactaaacttaccttgcagccctcttgagaagggctgtgtttctccaaaccacctctcagaggtggagcgagggaactggtgagctcaggaagcaaaagggctgcattgttgcatggctgtcccggcaccctcacaggtctgtgcatctctgttgattgctgccttccaagcagggccttgcttggcttatctgtgctcctgctctgtgggaatcccaccttccctctcctgcagtcgctctggaccttgcacaccattcttcacaagttcagcaaagttacctctaaaaagtaatttgctcatgcttaccttctgctaaaaacaaaaacaagaagcagcctttgtgactgtggtaaagcctgaacctgtgtcttgccttggattgggctcctccatgtccccatcccaattcttgccctccctggcccatgcccagtgccctcttctgttggctttctttcagtgtgtgctatttttttttttactttatcatatgcatttatcatacatactgtgcaggtatttggtatttttttgctgttttaaatgtttatagcaacacttactacaacaactgagaggattgtcttgcagttctactaaataatttgattttccataatttaggctaagttgtccgtaatgtcacgcagtattattagaatacctataaataagaaatgtagaagcatttttaaaaaatgcttgataaaaggtttcctttttttctaatggcatttagtaatatctgcccttaagaatttgtgtgaaaaacttaatgtgtatcttttttttttttagatggagtctcactctgttgcccagggtggagtgcagtggcacgatctctgctcactgcaccctctgcttcctgggttccagtgattctcctacctcagcctcctgagtagctgggattgcaggcatgcaccacgatgcctggctaattcttttttgtatttttagtagagatggggtttcgccattttggccaggctggtcttgaactcctgacctcaagtgatccacctgcctcggcctcccaaagtgttgggattacaggtgtgagccaccatgcccagcctgtatctttcaactaatgttttatgtaaaatcattttttccatctaaacagcaactttaaacggagactaatcaataattactacacagtcttaggataaaagttagtaatagaatttagtgttcaattacagattgttccagttgccaaaataaagataagtagtttggaatggaagtttcgtttttactctaatctttgaagttgagtttgagccagatgtcttgttggaggcataaaatggccccaccttttgttcactgtccaggggcagatgctcttcactcaaggcaggaggagcccatcagtgctggcgtcgctgagcacctcctgtgtgcagatcaatgtaccttgtcttttctaactagtgctttcaagaaactttgaaatccagttctagtcacactcccaccatgaaatcttgtttgccagtgatcacaaggttgtagcaataccaactcaagcctacctggctgggaccttggcctcgccacccccatcatgtcagcagcattccctggcccttaggtacgccagtggtcacgtgtttaagttgtctgcgtccccatcccagttgagccccaggagcaggggcttggtttgttcactgctgttcacccactgctgaaaataacaccccctttgtcaaagtggagtgtgtcccaactgcagtgaggagctgcacttccatgaactcggaggtgcccagc

SEQ ID NO: 31 - DNA, 2300 bp, Homo sapien
agtacacacaaacacaggaagtacggtgaccaggagctgagggatgacccactaaagaataagctccggaaaccaaaatgactagaggcagatgcaaaggtgagctgcaggtggtctgtatttatctgtggagctgctggcacatgacggtgataaaagtgcagcatgccatggttaccagcttggacaatgcagacaaagaacaaccaccagagaagtggtaggggcgggcagaagatgtgcaggggccaactgggactggggtgtccatcagctaactgcagtatcaggtactatggggagccaaccaaagaaactaagtgtttgctataaaggcattaggataaaagtggaaaaaaaagaggaagaaagccctcttaaataccaaaagggtaaaagcaaataaaatagaacaaggtggttccctgttatctgtgatgtaaaaaatggacttggctcacctattaaatggaaaacagtcttggattggctcacaaagcaaaatcaaacaccatactgcatataagatatacagctataaaaggctgggaaaatatatagagaatttataggactcagaaaaaaagtaactgtcacaggaaactttatagcattaaatacctatatcaatacaaatttaaataataaaaataaattatttaaacatataactgaaaaagccagaaaaagaataagtgaaccaaaagaaaggggtgaattattacaaataaaagcagatattattaagtagaaaaagaatagaactaagaagtaaatccaaaagctggctctcaagagaaaataatcaaccaaaacaaaccactaggtatctgattagaaaaaaaaaaaaataagaaagttacaagtgctaacagaagaaaatttaaacattgtaaaagataaggaaaagaaagagatagagagaaaaacgtgtagattaaaagagactttaaaaacatatcaaattttaagaataaaacaacactaaactatagtgtctagggatatacacttggtgataaaactataaagattagggaaatgattaccataagagtttgggaagtggttatttttggggagaggaagtaggttataatagaaatgggacatgtggtgggcgcttctgggatgattgataaagttctattccttgacctgggtgtggttacaaggatgtttcctttataaaaatgaagaaaaacattaaaaaatcattacaggcaactttataaaactctttgcagtaagttagaagtagatgaaacattttttaaaaatattaaatttaatgctattccaatacaaaatcaagtttttttcttagagctaaacaagttaattataaaatgcatttaagaacaagaagaaactatcctaaaattcatatggaatgaaaagagagcccaaatagccaaagcaatcctaagcaaaaagaacaaagccagaggcatcacactactcaacttcaaactatactatacagccccagtaaccaaaacagcttctgtactggtacaaaaacagactcatagaccaatgaacagaacagaaaactcagaaataaagccacacacctacaaccatccaatctttgacaaggccagcaaaagcagcagtggaaaaagaccatactattcaatatatggtgttggaataactggctagccacatacagaagactgaagccagacccctacctttcaccatatacaaaaattaactcaaaatatattaaagatttcaatgtaagacctcaaactgtaagatcctggaagataacctaggaaatactcttcttgacgttggccttggcaaagaatttttggctaagttcccaaaaacgattgcaacaaaacaaaattggcaagtagaatttaactaaatgaaagagcttctgcacagcaagagaaacgtttgacagagaatacagacaacctactgaatgagagaaactatttgcaaactatgcatctgacaaaggcctaatatccagaatctacagggaacttatgcaaaaaacgttcactttctgtctgtgttcacgtcaccaagagaatagaaaggaaaagggaagaatgcaaaagtcaaagacacgtcaccctccttgagacagccctccagtccaggccaaatctcagcctgcccttggtccgctgtggttgggcctgcacccaagccatgagcacacgcagcaattgtggcagcagaagcttcctctgggctcagactcaggctgatgctgcgtcaggacctgccgcggtctcggctgggcttcctgggactcggtggttgtgggc

SEQ ID NO: 32 - DNA, 2300 bp, Homo sapien
cctccaggaattcaggacaataaacgtctacatggagaccaacaggtgagtttttctgccccttctttcataacaccgttcttccctagtgaagtccacacacatccttacatggcagctgtgggtatatcaactggtctgaccccttttagtcacagagcctgaagtctctgctagtacctgctgagcacagggtcatgggtgagaatgggcaagtctttttctttctctggttcctgaacttcccaggctctctcacttctggatcctgaatacccaaaaaccaagcttccttcccagaaccaacacctcctcctcattagaaagatacctttgttctgtgcttactttataaagtcttgctctttccctatccactgccttgtgtcagtatgtgtgtgtcttggggccggtggaaaggtgaacagaagccagtagagagtaaccagcaccagcttcacaggaatggcatgaccttgatacgatagcggcagttttcccttaacatccctgccccctaaagacttcagatcatatgtcacactcttaagtaacagcgatttgtctttcacggttttaatcatattgattaaaagcatttgtcttctccagaacatcacattaagtcatcaaaaaatataaaccttaaaaagatgtaattattggaactgaaaaacataaaaggtgagctttggaaatatctttgagcaatttattcgttatgaacacatgtaatctgttggaacaaagttctaggacaatccaggtcatccttcaatatttgcagaaaacatcacaaagaaaacttgatacttatacttagttggaaactttatgccacagccattaaatacagagatcatacaaaggaatagaggaagctgttgaatactaaactaactcaaatcatcaatatccttacggagtgcacactgaattaatgtaaaaagcatttagtaaacaaaaagtattttcaatatacaattaagactgaaaagtattgaggcctcataagctgaacctgacacaataaatttaaaagggaaactaatttggaaatcagaaaaccactaaggaatttgggaattaggcttctgctgccctctctgctactgacggtcaaggcctcctcattgtattctgtcctccatatctctgctgattcccattttgtctatttccatttaccccactactgcttgctcaggtcactctccttcactgtcggtgtttgttcaaattcctcagacccatccacttcccatctaaacttccctccccttttctcgctcgttggctctacctccctcctctctgttttctcctcactctcctgccccacctcgacatccacagcgaggcaatgaagaagcccctgccaaggaggagcccgcttctcagtgggacaccgggaaggtagacacccaacagtcaccgctagtgggaggcgattgtgcagaagcacgagggttgttacaggatcgggcaggtcccctaccccagtctcggactcagggtcctgtctgaggcggccaccccgaagcgtggggtttgcggagacgtagggcctggcggagggaaggacggggaagcatctcagggaggactggcgtctgccgaatcccagggctgccctgaggggccaagaggggcgagggtggggacgatggaagacaagccacatgccgaatggggacctgaggccgcgcgcgataggatgggcggacggtgaagagaactagggtggaagggccggacaggggcgacctcagtgacggaaccggacacagacgcagatctggcagctgagcgacaggcttcggagcatttccgggcgtcgcgggactccccgccgacaggagggcggttgccgagcctgtgacatccgcggagaccagcagaccccgggtgtggaggacgccgcagggaggggactgcgtggctgggtttggccacaaaaagcggagggcactcacccgagcggaccttggctccggataatccgtttccgggtcaacaaaaaacgtcgcgcgaggggcggggcgcgtacgtgcagggaggggaggcagagaaaaaggcggggccgggccgggccggggcggggtctcgggcaggggcggggagcttaccgacctcccgcccccgctgcgcgcgtttctggccctgccagtgtctccgccggttgaaagcgcgtgtctgcgtcgggttctgttggagtgcgttcggtgcgccgtgggtccgcgctgcttccacccaacttcctgttaggtaagaggcgcgtgaggctcctgtgccggggg

SEQ ID NO: 33 - DNA, 2300 bp, Homo sapien
atgctgcacacctgtactgcatgcccatataatacacctacacagcacacctgcacaatatacctgcataccacccctatacagcacacctgtacaatacacctgcatggcacacctacataatatacccccacaatacactttcacagcacacatgcataatacacctgcatagaacaccagcacagtacacccacacagcacaccactcagcattcttagtttaaaaataagttttactttaaaggtaatagtacacacataaattgatgttaaaatcgacagtaacaaagagaagtaacaatactaatagcctgtcacaaactgattcttaataacctatataaacaaacattaagcccgggcgccgggtggctcatgcctgttatcccagcactttgggaagccgaggcaggcagatcacttgaggccaggagttccagaccagcctgaccaacatggtgaagcccagtctctaccaaaaatacaaaaaattagccgggtatattggcacgcacctgtaatcccagctacttgggaggctgaggcaggagaatccttgaacccaggaagcagaggtcgcagtgagccgagatcatgccattgtgacaggagagaaactgtttcaaaaaaaaattatatgtttacaacaggtgcattcctcctcttgctttctgaggacgccctgctatgtagctgagtagttgctaataaactatcttaacttcactatactctgtgacttgccaaaaggtctttcccatgtgaaatccaaaaacctgttcttggggtctaggacaagacccattttataatgacaaaactatacaaattctagaggaaaacatggaaagaaagctatgtgaccttgggtttggccatgagttttaacacgacactatcagaggcatttgaacccctcctctatatgaactccagggtggtttatgttccactggctaagagaaagttttcttcaaaaatgtgacatgatttgaggtcaaacattaatatcaagtaaactcaaaagattgagaagctagcattagttctgggaaaaccagaagtgtgcctttttttggaaataatcattggtagcacaaacttaagaatctccaaaggaaataaaaatgagttattaacttacagttttcaccaattaagatataaatgaagctaatgaaatccggaaatacaatttcactgtttttaatgttcatttaaaaaaaaaaatccttatcaaatagccccagtaagtcaccaattaagtctttactacttaaaagcaaaatccacctatgtcctgaacactatccactttacaagcctcattatatgtactggagacaaaattcagaaataaataaatatatatgtacatatatacaaatatatttcaaattaaaaaatacttttagagagtggtatgtattacatttagaaattaataacgaagtaaattatgggatgtcatccacgcctgtcccaaaggtaccgaatttataaatcatctcaggtgcggagcaggacaggttgaaaataggaatgacatgaacccgcgcggaacagctgccggcgcggtgtccagggcggcaccccgcccggtcccggcccctccagccctgggcccgacccctactacgcctctgcctcgacgcgaacgcggagcccgagcgcgcgtcacgccgtgtggggccgaagaggctgctacccagaggcggagtgcgggctcgcgagggtccccacccgactctcgctcccgccagcacctacggactcgcgtccccgccgcgcgccgactcgggagcagcaccgcccccggcacaggagcctcacgcgcctcttacctaacaggaagttgggtggaagcagcgcggacccacggcgcaccgaacgcactccaacagaacccgacgcagacacgcgctttcaaccggcggagacactggcagggccagaaacgcgcgcagcgggggcgggaggtcggtaagctccccgcccctgcccgagaccccgccccggcccggcccggccccgcctttttctctgcctcccctccctgcacgtacgcgccccgcccctcgcgcgacgttttttgttgacccggaaacggattatccggagccaaggtccgctcgggtgagtgccctccgctttttgtggccaaacccagccacgcagtcccctccctgcggcgtcctccacacccggggtctgctggtctccgcggatgtcacaggctcggcaaccgccctcctgtcggcggggagtcccgcgacgcccggaaatgctccgaagcc

SEQ ID NO: 34 - DNA, 2300 bp, Homo sapien
taggtgtgccatgcaggtgtattgtacaggtgtgctgtataggggtggtatgcaggtatattgtgcaggtgtgctgtgtaggtgtattatatgggcatgcagtacaggtgtgcagcatctgagctccgtcttcaccttaatcccgaacactcttttcacctctcacctgcactgcagtgctgtttcctggatcacacttttttgtttgtttgtttaattcctccaggagaatgagtgtataggaaataaggatttctcttcacattttacttgactaacagtttctctggttatagaatatattttggatttaaagctctctctgaattttgaaaacactgtttcattttccgcttgcctcctatgttgttctagagaagctcaatcgcaatctcgtcccccatcctcaagcgatacacttcttttttctttattatcttgaagcattcagggtcttttcttcatttttggctttctgaaattgcaggacaatatgatgtaggttcgtttttatctctgtgctagctcttttcatttggaaacctgtgttgcgttctgaatgctgtggtctgaaagtgtaccttcaaattcatatgttcacacttaatggccaaggtgatagtattgagaggtggggcctgaaggacgtggctaagtcacaagggcagagccttcacagtgggatcagtgcccttaaggaagggctgagggcctgggtttgcctttttaccttttcacctcctgccgcgtgagggcccagccacaaggtaccatctgggaagcagagtcccaacccttgccagacactgagcccactggtgctttatcttggactcccagcctccagaactgtgagagataaatttctgttttttataaagtactcagtctcctgtattttgttggagcagtacaaatggagtaaaacactaagacattttctggaattctttgattgataattttttcttctcagtcttttatcttgtctcttccttgaacacattatttctggtgttgaacattccagaccacttctccaattttcttatacttttttctcctatttttcaccttttagatctctttttgttgttgatttactttctgtgaggtttaccaactttatctagtacaagttttatggaatttaaaaattgtttcagagtttaagttcccagatcctctttttttaactgttcatttttcatgacttccagttctttagtggtgacgtatcttttctctctgaagacagtatttacagttactggaattccttcctgctctccacctgtctttggtctgttttccttttcccgttttgatctctgtccttcatggtgcatcctcctgttgactcctgaccatctgttcacatggggctgctgtggggtgaccgggccacgcagtctcccttggcagctctcagctgtctgtatccgtcagcattttctcttggtctggtcaggttttcccagaggggacagtccgttctccagcctgggacagaggtcagggacacatgtgctccctccctgggttggctctttatatggtgagtggcaactggttttggacctctctcttgcaggctgggtctgtgggatgtaattagaaagcaactttatttctattcacttacatttattcattggaggaggagtttctctttcctagggtacacgtggacatgcctatgacttttctgctttgtcttatgtttaaaaatgtccttcagtcattgcaggtcacaagcaggctatcagctcagtaattaaaataattcggttcttcatagtgaatgtaattctaaattagattttaagttgtaactccctgcttcagcaatggtgatggggcctagaaaccagagcacctgagctccatcctacagggggccataccgggatctttccattttcagaggcttctctctgacagtgaagtgtgatgacagacttgggggcagggcaatggctagcttctgaaagccgctggcactttagtgataaatttaaattaagtgacgggtagtgaggtgtttgtcaaggaaagtgccgtccaaatgctaaatactgattatttctgcagcagtgactgcaatacctcactcaatctctgtctttcttgaagaagtcataaataaacacgatgaatctatgtagaagcggtaagtcagaaaaatctgtgtgtttcattacataaacaacggtttatcattaattgacaggcttggattgggagttgttaatgaaactgatgagatgttggacagatgagctccctcttatttcgaa

SEQ ID NO: 35 - DNA, 2300 bp, Homo sapien
ggctttggctacagaatgtggaaataagttgtgttactacatgtgtgtaatcctagggtgcaggacaccggccgggaggttccatagagtgatgggttctgcaggtaactcatcctctagtcctctgtaagctcctagaaggaagaaattatgtcctttagactaataaaattcctccaaaccaaatacagcacctactgtgaagacacaaagatacttttagaatagtaaaaactttatccattgagaaattccttaatgaaacagtatccaagaagtcatttgccagcagatttcttagaggtgcgataaagaagaggacattgccagtcgtcacagcagctgcaatagctcctctctattgttaaacagtgggatatcttgtgcaggttttcagttgacaatcaattttaaagattagtttcggtccccatcaatcaattatttattaacccatcaataaaaatttaaatgctctgtgaggtacaatagctattaaaagagacagaggcactttctgtgtccagaggggcttttagtctgctctggaaagcaagatgcgtgcagatgagtgacgcagtgcatcgtgtggatgcaaagggagggactcacatgggaaccagaggagctacgaagggaggcagtggggactggtgggtcgagacctggaaataacacatgaataggcaacaaaggtttcctttcctcttccatgcacttcagtccttgaaaaacgtcttaccacggaattccacagcgtaccaagcgattccacagcttgatggcacactctcctttctcagcattcttgaaaatggcgtgtgagccaagccatcttactgagaaattaccttaaaccatttgatgaaccaaaaatattttgtaatacccatctccgacattaggtaggcaaatcacacagaaacaccgaggtcttctgagtcatatttatctgaaaaatcacagcttgggtgcatgtgaagccagaggagcactcctggggcctgcggtgccatcactcagctcccctgggcttcacatggccatggagcacccagcaagtgtaggctctgagccttcagggaggggcggcatcagccagcaccatcgtctcctgggtcttgtgcctcttccttggttgcggtgttgtcagggccagaattgggcaattccgggtgacatccaggtgtggctgctgacacggagcacaggtgaggttcactgaggtaagtgggccatggccttgggcttctagttcagagcacaccatccactcagcatgtgaacccagctccaaagcgtatgtgtgcatgtgtgtacctgtgcacattgcgcatgtctctgtgtatgcatgtgctttgatgcatgttgatgtacgggtgtatctgtgtattgtgtatgcacacacgagcatatgtgtacatgaatttgtattgcacatgtgtttaatgcgaacacgtgtcatgtgtatgtgttcacatgcatgtgtgtctgtgtactgtgtgcaacagtgtgtgcaagtgtgtatatgtgggtttatgtttgtacagtgtgtgtagtgtgtgtacacatatacacctgtgtgcatgtgtacatggtatttaagcatgtttgcacgtgtgtttgtgcttgcatgtgctgcgtgtttgtgttggtgggatgtggggaggctgctgtggagacaaaagctggagagaacttggtagagtaacccaggtcaggaaatggcacctgcaaaggaaggctggagtgcctgggattcacgttgaaatggccaatccgtcagctgggctggacacagccatcacgctgggcagctgtgaggttaaaacagaaagtctgggctgtggggaggctgagaattgagatgcatgtatgagatgagtcacgagggccaagtggtgtgtgtgagaaagcaggcacagcaccactaaacactaaggagatttcaggggagttacgggtggagggaggacatcagatctaccctggaagttaaacgtgtttcgagtgcattaaatactatgggccacagacgccttgtctccatatctactcttttataaatgaagtaaagttcttgggaaatacttttctcactctaaagctcacaatctatcttgcaaaaaatattttaaattccatctcaaataagccagggtgaaaagggagcctgtgcaccagacactgccagccttgcctggctctcgccttcttgctcttccttccccacctgctggggattttcttaacgatggagatgggtttgggtttgtcctgctgtgctctgctccccattc

SEQ ID NO: 36 - DNA, 2300 bp, Homo sapien
tataaacaaacacccacacaagaaaagtagatactgacttcacaaatctccttacaagtcccacagcaggggctgtctgggaaagcagaggtggaaaaagtcacataaacttgaggtcagtgtgagacctcccatcccctactctggaatcagatggaggaaggcaggtatgcaggctgagctggagagatgagctggggtgggcagaactgtcctcccatgagcctagaccttaactgctcccacatgctcccaggcatgtatcaaaccaagaaagcggctaggagggtaacacagctacctgtatacagggagccatgaaatatctgagctgcgcaggtgatgcacaaggagacagaagcagtatgacctttacacagtgacctgactcaaataatttcaggctgtcattaaccaggcgagctccgctttctctctgaggtaggtaaacttgagggggtaaagagggagttggggaaaatggaaaagaaagcctggtagtatttcttctaactctgtcataaataaaaagtaaaacatagatgccgtttctcagggcccaaatgttaggtgaaaaaatgtcatctcagtcatgtgatgtggacttcagccgagcaggacacacatggtcatttaccctttccctctgcatgtcgtgtgctttttcagtttataatgtacctgatccacttgtctcatcacactagctgcaaacaaggccactgaatgtcacagcaggtggctggcatgtctgtgaagggcagaaactggggcagccaaacagctggcagaggccagctaggaagtacctgatgcccactccatagaggactccacacttaaaagacaagataagaaagtgtcaggctgcctcactagttatccccccaaataaaaaaataaaagtaacccctccagggaatgtgtgtgtacacacaaaagtacatgcacacagctacatgcaaacgggaaaggctgggaaggaaccaaatccacctctgaacaccagttacttgtggggaaggggcaggtgaagccaactgccagcattactcaccttttcaacggatgagcttgcatcagttttggcaatttctcataaaaaggcaattttcactccttgggtgatcacccaggccctgcaaaactgagccaccaacaaccacctgcaccacttcccatgaggccaaataatggcttccctcaaagctcagccctcccacacacctcccagtcctgtcccatgcagggggctgctggcctcctggggtacatgggtccaggccaaacccaacccacagatggttggtgaaaccagcatgtatccaagggcctttccccaacctgggtcaagtgccaactgccaactgcatagataggcctgtgcttgctcccctaggacagagactcccttttcttccattggaatgagggatggggagatttgatgtcctgtacaggttggatgttaatctgatgtggtgctgttggagaagcttgcctgagttaggcgccttctcagcatgtggtgtgtgctgccccttcaagctgcaggagtcccagaaggtaagtgctgctgcaacccccatttacaggtgagcagaggtcaggtgatctgcaggcggccaagcaagtgctaagtggccaacaggctggatctgcatctcacttgcagaggccctgcctggcagctggggctgccccgagactccctcctcctcctcttccctccacagctctcccggcttctatccacagctgtgctccaggtggggaacacctatggatgcaccagagtgcaactactcagaccccagtgtgcagaagggccctggctccatgccgtttccatatccaagcccaagctcatctagagcttcagcaaatccaagcctccctgaattccctgcaagaccaaactgagccctacaactcccactacactggttagctgccagccccagcctctgctccttcctgggcccctgtcggcacagttctgaagtcctacaagaatgttgagatcctaagccgactctcacccaagaggtaaacaaccaggggcctccaggggtagagaacatacccagacaggttctgctgcctgtaggcttcatgtccttcccctacaacacgccatgcttgccaggctggaagaggggctccagaaacttggaaacctgggcctgtagctggcatatggaaaagaggcctggaaaagcaccactcctgtccatgaagcccccagatggaaccaggtaattgggaaatacatgggcactaagcctgatcccccctca

SEQ ID NO: 37 - DNA, 2300 bp, Homo sapien
cgggcgcaccgttgctggtatatgcgggggtcggggtcaggcccccgggcgcaccgttgctggtatatgcggtggtcggggtcaggcccccgggcgcatctttgctggtatatgcggtggtcggggtcaggccccccgggcgcactgttgctggtatatgcggtggtcggggtcaggcccccgggcgcacctttgctggtatatgcgggggtcggggtcaggcccccgggcgcaccgttgctggtatatgcgggggtcggggtcaggcccccgggcgttgctggtatatgcggtggtcggggtcaggcccccgggcgcaccgttgctggtatatgcgggggtcggggtcaggcccccgggcgcaccgttgctggtatatgcggtggtcggggtcaggcccccgggcgcaccgttgctggtatatgcgggggtcggggtcaggcccccgggcgttgctggtatatgcgggggtcggggtcaggcccccgggcgcaccgttgctggtatatgcgggggttggggtcaggccccccgggcgcaccgttgctggtatatgcgggggtcgtttgtggtgtcatcactgctatcttccaggccgggaggaaggaccgagggtgggcccggcgcgggtgggggtcctgggcaggggcggcggcgcggccgggctggtcctggcgctgggacccgcagctgcgccctctgcctgagcagagaccggggcccccacgctccgcgccagcacccggccgcgccgcggagagggaagggttacggcggggatgggggtgggggggttggcgggggcgcgactgacgggctcgggattggctcggcgcgcgcgggacccgggggcagctgcgggcccagacttcccggacgccctggcgcctctgctgcccacggcggccccgaggccgcgcccgcggagaggggggcccccatctcctgtcagccgcagtgactgcgggtgcctgacggcgccgccagcccggggggcccctcccggccccagcggggtctcccggggctgcctctgtcggtcccgacctgcctggtccctggagctggggtgggagtcgtgctttgatcagtcaccgggggcggggagactggtcgaccacccctgagggcccgggacttgtttgccacacctggggagtttcgcggcggcatctggaggggtcctggttgagcagctaggggggtgtctggtaaccagccgggcccctcaggctccctcccggcaggccctgaacagacagccagggatggaactcgccccctgggcaccctgtgcctgccctcagcctccccactgaggcccaggactttagaggtgggcgtgcccgccaggctgccaggccgtccctccgtgggcagctgagcaggccacagtgtggaagaggctccagaaaacccagccctgccgctgcacacgtgcgtggccagcagataaagtcttccttgttattgtgggcagcgtagctgcacctgcggtgaggccggcactgctgaagagatgtcaattcacagagcttgactatgacccaaaggtgaggtcaggactccgggagaggatggcagcggtcttcaggggaaactctccttttcttctgtctggacactggagccacacactcgcctgtccccatcctcccacagcatagggctcctgggacctcggccctgggcaggatttgggggatggccacgtctctctgagtgggctctgctcatggtcctcacaaggcccgggacatggatgagaccaggcttgcgtcctctgcctccccgccccactgtggctgtgccagcctccctgacaggggctcttccgtccacgtgcccctcctgggccactatcccgttataaacaggcaggagtcttccttccagcctccctctggggcgggcaggcagcacggcgatcacctgcccccactccctcatctatcaccctgaactgtgttcacggtaaaattactcatcctcagccagtgataaatggcatcagtctagagccagcccgcggcagggggtggggctccctgctcagggttcccaggcctgggccagataaacctggtgagctgcgcctttgtgctcacacgcagctggcaatggcaagtcagtggatttgtacgtgtctgatgtgtgcccttggtaaaagcacacgtgtgcacgattctgtgtgcatgtgcttgcgggggctgggggctgagggaggccatctgggatgtggggtctggatgtggtggccagggtgggcgctaggcaggcagcagagtggagaaggtatg

SEQ ID NO: 38 - DNA, 2300 bp, Homo sapien
ctggtgagcttcccatcaccccccacctccctgcgtgcccagatcggcattgcatctggagcgttccgaagagaaacacaacctgggggcgttggtaacagcaggtgagacagccttgtcctgcgctgctgtgcggtgttgcatccactagaaaggggcctcctgttctgaccctggcccctgcccttgagatgcagctggcatgtccctgtgggcatctcccagagcaggtccaggggtgagtgggccacaggcctgtttgcacaggtgccttcttcgagggagggaacagcccaccaccacctcctgccagaccagcttccttgagcataaacctgaccctgggtgaccacgctgggctccttcaccttatctcaccagaggcttctgctggtcccacagccaacccgcggagtgaggtctgggccaggagtgctctgctcaggcaaggaacatgcccagaagcctcccccgctatcctggccctgttctgtgggggctcgttggtctgttggggtctggggggccaggtaggagtgtgggtgtgagtgtcggtgacccttccttatgtggccacccttggccctatcaacctgtctgcatccaggacaccagcacatccctgaccccagctgtggctgccagtgagttcctgtgccttcctctcctgaagtctgtgtcttctcccaggtctgataccatgtggaaagtctgctcctggggccagctggaggccatgtggactggccctgagtgcccactgtctggatgcagccctgaccctactgcccgtgtgtgggctactaggttcacctgcacctgaccctccttctaggttcgcctgcacctgactccctgatgttcacacagtgatttggagagggaggctggggaggcgcaggtctgcatggcagtgcctctcagggtctgaggcccttgggccaggcctctcctctgacctgggccagcagaggggcctcctttcccttccaagagccctcccctgttcaccagcatctcatcatgctcaggcccacagtgtggttaaggaggggcatggggctggccctgggtttctggctgggtgtgggggcctacccggggcccatggtgtcttccagaaaagaccctgactgggtccaaagctggaggcacccctctatcctcactgtccactccctgatgttctggaggtccctccaggggctgggtgaggaggccttccccaccacctccttgtcttcctgggaagcaggcacccgttcagaggccacgttcccacaggaccaggctcctcacccccagcatcacccttttccacggggttgtgccccttccttggtcctgtccactcacacacacccgtgtccgtgtccatgttcacacctgttctgtgtccactcccacacacctgtgtccactcccacacctgtgtctcgtgtccactcgctcacacctgtactgtccgtgcccactcacacgtgtcccgtgtccactcgctcacacccgtgtctcatgcccgctggcttacaccagtcccgtgttcactggcgcacctgtgtcccatgtcttgtgtctgctcgcacatctgtgtgatgtgttcacttgctcacacgtgtcctccactaccacacctgtgtcccatgtccactcacacacctgtcttggtctgggacacctgggccccactctcccctgcactcctcaggctggcggcagaggccagaggaacggagttctggcgctggaatcatcctgagcgaggcagggacctggcggtgtggactccaccgcccctcctccggcccaccgagccccgcctgcctgggccttggtgcctctgtcgctgctccgggtccccctgctggggcccctccgccgctgggctgaggctggagcctgcctcccgccgccagagggaggaggtcataaataaccctggggctgccatggagcagacggtgaccccagacgtcctgggggagtgtgggggcgccaggggccgctgccccagcccgcatgccgcctccgccatccgggagtgcctgcccaggctccccagcatttctcttagagcccttctcatccatcccctcatcaatcaatcaaccatttattgagcccagatgtggtacagccccagccggagatgacccagaggtggggtggggaggagagagatggggaagctgagtccggggccacaggtgcagccaggaggtgcaggtgagcagcgctcagaccagcctgtcagcctcagtcctgagcttacttctggtgatggagggagatatacagaa

SEQ ID NO: 39 - DNA, 2300 bp, Homo sapien
gtcactgcgcaggactgctccgttacaggtgggcaggggaggcggctgcgttacaggtgggcaggggaggcggctgcgttacaggtgggcaggggaggcggctgcgttacaggtgggcaggggaggcggctgcgttacaggtgggcaggggaggcggctccgttacaggtgggcaggggaggcggctgcgttacaggtgggcaggggaggcggctgcgttacaggtgggcaggggaggcggctgcgttacaggtgggcaggggaggcggctccgttacaggtgggcaggggaggcggctccgttacaggtgggcaggggaggcggctgcgttacaggtgggcaggggaggcggctgcgttacaggtgggcgggggaggcggctgcgttacaggtgggcgggggaggcggctgcgttacaggtgggcaggggaggcggctgcgttacaggtgggcgggggaggcggctgcgttacaggtgggcgggggaggcggctcctttacaggtgggcgggggaggcggctgcgttacaggtgggcgggggaggcggctccgttacaggtgggcgggggaggcggctgcgttacaggtgggcgggggaggcggctgcgttacaggtgggcgggggaggcggctgcgttacaggtgggcgggggaggcggctgcgttacaggtgggcgggggaggctgctccgttacaggtgggcggggggggcggctgcgttacaggtgggcggggggggcggctgcgttacaggtgggcgggggaggcggctgcgttacaggtgggcgggggaggcggctccgttacaggtgggcgggggaggcggctgcgttacaggtgggcgggggaggcggctgcgttacaggtgggcgggggaggcggctgcgttacaggtgggcaggggaggcggctgcgttacaggtgggcaggggaggcggctccgttacaggtgggcaggggaggcggctccgttacaggtgggcaggggaggcggctgcgttacaggtgggcaggggaggcggctgcgttacaggtgggcgggggaggcggctgcgttacaggtgggcgggggaggcggctgcgttacaggtgggcaggggaggcggctgcgttacaggtgggcgggggaggcggctgcgttacaggtgggcgggggaggcggctccgttacaggtgggcgggggaggcggctgcgttacaggtgggcgggggaggcggctgcgttacaggtgggcgggggaggcggctgcgttacaggtgggcggggggggcggctgcgttacaggtgggcgggcggtgctgcaggaggactgctcagggagtggcgcctggaccctgagccccttctctgctgactggggagaggctcacggaaccgggaaggggtggagggccgtgctccacacagttcgtctcattgctctctgggactctgtggatgtgggattgggctgaattagcaagaagaggagaaatgagggaagaaaagagttaaatgcatgttgattccaagcccccgcctgccggggggacagcgggaggttggagcacgcagccctggtgcctggtgcgagctgcacgtgtctgccggtgccgtgtgtgcgtggggcgcgtctcatcagctgcaggactgtggtctgggcctcagtttcctcgtgtgcagaaatcgggggtcaggggatggttcacatgtggcacattctctcctggggcctgtcctgcaggactgcccctgagcagatcggcctcttcccgggcgcccggtgggcccctcgaccccctttgaggcagggagtgagataactgtgattccctgtggagggcgtgaaggcagagccggctggctgctccacatagaccctccctggagcagccgtggggtcccaggtcccagtgccaggttctgtgtcgctttgactcgggtgctgcgtgggtgtgcacacagtggcgtcacgggccacatgccgaggcgtgggcacagcaacgtggcactcagaggtcatccccacgctcacacacagagctaggcactccctgtgcccaggctgggctccagcctcgcagctgcccacggggtcagcttttcccggtctcgttctgcagccaggacggcaaccttcccaccctcatatccagcgtccaccgcagccgccacctcgttatgcccgagcatcagagccgctgtgaattccagagaggcagcctggagattggcctgcgacccgccggtgaggagcacagggggcctgagggcggggtcggggctgtggggccagaggacggtggcgtctccactc

SEQ ID NO: 40 - DNA, 2300 bp, Homo sapien
ggcgttcacctcttctcccttcctgtgaccccaggaaccacacatccatcctgttcccagcccgggccctcccgctaagccgcacctccctgggccctgggctgtgagggactcagagcaggtcctgcatctgcctctgtgagacccgctggggtccatgagtgaggagtgagcatggcctcatcggccttcctgcggtctcattgcaggcccccttccacctgcccccccccccacccagtcacctcccccaggctaggaggaggccttagccccccacagaacggagagggtagtttccactgtgtacaatggaaaagtgattgccaggaggtgagaggccttgctaaccctgagggcatgtgcatggtgggccaggtggcaggtgtggaaaagagccaggttcccccagccttggcccaccccctcccagcccaccgagctctggcacgggaggctgtgggggagacgatggcttctcaggggcctgagcagtggtgcctggatccgtgtgtggccaggtgccccccgccgcccgccgggcccagccacccgatctgtcaccgaggtggggaccctggaccagaccgtgggactgaccctctctctggggccgggcctgacagcagccgggccaggatcaataagttattagcaccactctgtcagctgtaatgtgggattgatcggtgtggccgccgcacttccccagcctgataaaaatgacagattaagggaataagaaaaaggaattaggcctggagctgacggcagggcttgtggggggacgggcttgggagccccactgcctaggcctcatggaggtcttgggtcacaggggagtggcccctcactccacccagctagagccctcatgaggatgaggaagggccagagtcggaggcactggctggcctgggagacccccagggcgtggagtcaggggcttcggaggagctcggggtgggtcggagatgggtacatggatggtgtggtctggaatgggtgcggtcggcaggacccaagggaggacctcaggagagtgagctgggcctggcctgggcctcccctctgccacctgctgggctgtgtttggggctgaagctggacctggcctgggcctcccctctgccacctgctgggctgtgtttggggctagggctgggctggcctcgtggctgaggaggtgggtgaagctactgggaggtgcaccccagaagcccagagcctggctgggctggtggacaagggcatgacagccacgccagggtgctagctcaggcaggactgggccagagaggaggacgtgggccttctgggggcagggatgggtatgaccaagtaggaggcctgggagtggaggcgcctcgaggcggcctggggggcccacagcccagtgactcacagagcagcaagaggtcaggtgtgaggtccttcccggcttgtctcaccccacgctggcatgtgaccctgcacagcccgccctcactcctgtccaggaggggaaggtggtgcctggtcaaaccaaaagctttttattctcctctagggggatgagaggggggctcgttaacttgcacaagaggctagatggcgggtggggcagctgggtgcctgctgtggatctcttctgcacacacgcaccagggccagtgtcagagctcccctgtgcccctgtcccgccacagccaggcgtgatgtcctctgcgctgaaggctggggctgccagggctgggcaaggcctgtactcaccaggaccaagggccccctgagagatggtgggtgcggtccaggctgagctggagcaggggctgggttccccttccattccttgagatgcaggtgggcactcactaccctcccgcaggtgacctgttgggcaagaggctgggccgctccccccgtatcagcagcgactgcttttcagagaagagggcacgaagcgaatcgcctcaaggtaagagcgtggctgggacgagagacaggtcaccaggggagggggcagtccctgagggtcccctggacctcgagcaggcactctagaggggcgtggtcctcggcagtgcctggagaaacctctcaccccgggtcctccccagcagaggcgctgctgctgccgcgggagctggggcccagcatggccccggaggaccattaccgccggcttgtgtcagcactgagcgaggccagcacctttgaggaccctcagcgcctctaccacctgggcctccccagccacggtgaggacccaccctggcatgatccccctcatcacctccccagccacggtgaggacccac

SEQ ID NO: 41 - DNA, 2300 bp, Homo sapien
ggcatgtcctacggaggtgcatggcctgtggcttctgtggagggtgtgggaggggccccccaggcctcccgtgacctccatctgtcccgtcctgtgtctggcactctttgctgttgctgctgcgtcttctggttgctcgggacggagccccatgtggcattgctgtgctgagggccaggatgggcctcagtgccatgttgtcaggaatgggggctgtcctggtactctgtgtggcagggacctctaggtctccagacgtgggtccttagtgcttcccaggattttgggagagggcccgtgttcctgatccttccctgctgatcagagccccactcggggacacgccaggctgtgtggggccatggggctgggaccgtgcctagctgcttatctcttgtttcgggttgggtctcctcgtgctgaagcctgaggaccagggtgaccagggtgcagccaggtgcagggccaaagggaccagggggaccagggtgcagccagggtgaagccagggtgaccaggcatggggccgagagagcctgacacggcccttggggcagatgttccagcaggtcgacttcaacaggaagccagggcgcatgagctccaagcccatcaacttctccgtgatcctgaagctgtccaatgtcaacctgcaggagaaggcgtaccgggtgaggctggcctcctggggaggggcctgggcagttcccagggtggggttgggggtgctgaggtggatgggagggggctggcatcctccaagttcaagcatggaccttcatggtctcccagggctggggcccaggagccccttccttgcagtccgtgccctggagatggcgctgccctgacagcctgaggggaaggggcctgagtgcccagccccagcctctccctgatgcactcggccctctctcctgctcttcaggacggcctggtggagcagctgtacgacctcaccctggagtacctgcacagccaggcacactgcatcggcttcccggagctggtgctgcctgtggtcctgcaggtgtgtgtcctgcccacaccggctcgtggccgactcagactgtcttataacgggcttggctgccccaggctggtaggaggtgcccttgtcccgggtacctgggactggggtggaacctgactgctggcaacgcgccccgtgaggcccccttggaggggctgatgaggggttctaagccattcaggaggtttgggggcaggcctgggcagtgggctgaggaccctgggagcacaacagcctcctccccaggtgggaaccacaaggctgatctttgcttcggggttgggactgagcatgccgaccctggctcaggctggtacgctgatcgcacacttccccaggccatcccgggtgtggggagtgggtggagtggcttctcaggtggcaggaaggcctggcctgccccgccaaataccccacatcagcctcataggaaggcccagcctgccccgctaaataccccacgtcagcctcatcttaggcaggagtggggtggaggagggggttctccttatcctcagaaggtccttctgggcccccacgggaggtctgtttgctctcagccgtgatgtttccagcctcagggaggcctgtgcctagtggaaggggtgggggccctgctgtctggccctggtggctggaatcagatgtgccgactataggtctgtgcagtgtggggaggagggatctgctcacatgagccacaattggtcagaggcttatccagatagaggtgtgtgcatgtgtgtgtactcacacacggccacacatgtcacatgcacagagccgggaccccctttctggggggcactcacagcaggggccacagcctctgttcctcccatgtcctcttgggtggtgatacctggcattggggcatctctgcttctggactcaagggcccagggtcggggtctggggtaggggtcagaaaatgtttttggtgaggggccaaatggtaaacgtggcttcctacggatgttcagctgcacaggcaactgcagaaccatgcaatgcacacgtgtggctgcacgtcagcgagactgtattttattagtagtagtagtattgtttgagatggagtctcgctgtgttgcccaggctggagtgcaatggtgcgatctcggctcactgcaatctccatctcctgggctcaagcgattctccagcctcagcctcccaaggagctgggtttacaggcgcccaccaccacacccagctaattttggtattttagtagagacggggttttgccacgttggccaggctg

SEQ ID NO: 42 - DNA, 2300 bp, Homo sapien
gtacaggcgttccgagcagctgtggccaccacccgaggggaccaggaaagtgctgaggccaacaaattccaggtcacggacagtgctggtgagcttggggggagcctggcatccaggctgtctgttgcgttctctgtcccgtgagtacatccaggccttttcgttgcagcattcaatgctctggttaccttctgcatcagagacctcattggctgtctccagaagctgctgtttggaaaggtggcaaaggatagcagcaggtaagaggggagggggtgaaggggggtagggtggaaggtgggtcgggaccacacacaggagaagccagaggccttgtggctaggacagagacatggcaacagagccagcgtcttcttggggaccctgagaaggcagcggggcacgagggaccgttgggagaggctgggcacttggggccagttggagcggccccaccttctttccttcctgaaaagggaagttgtctgctcagagtctcagaaggtgtggcgtgtgcagctgcctttgctctcagattttcccaggttagggttcttgctctatttccctttgtaagaacttgtaagtcctgtccatactccttgatctctgcactatgactggcctgtttcctggagctgtgtgtgtctgtagacaggggcctcatcaatgctgagaacctgagggcctcaacttcccctttagagaaagattgggcagagaaggccgtggaaggttttcagagaagagagacgcacggccaagcatttggtagagcatggagcacgttggggttccggggctgtgcagccatgtgaccttgaggcagtggaggcctagagttggaactgccccaggacaccttcaaaggaagaaaggagacccacaggagaggtctcgccgacagcggctcaggagacaggggcactgttgctggtggtagtggtcggggctggacggatagaacagagccatgtccacatggaggcagtgctgtccgaaggggacaaggaagctggcagatgggggtggagggacaggcagcgattgggaggcagcacgcactgcagcctgagccaccaggtcagggacccctgtcgaggcagcagctgtaccggagggagtcaggccgtggggagcagagctgcctcctgggtctgggtgggcagctgcaggtgcccagcagccagtgtcagcacaggtgtgaggagggtcgaggacggggggcctttctggggccctgccctttgtccttcccatgcttcagcagattttagtgagcgcctactgcgtgggctctggtaaatgttttgttttgttttgttttgtttgtttggtttttggtttttttttttccttacgagataggatcttgctctgtcgcccaggctggaatgcagtgatcatagctcactgcgacacgtaccttctggattcaagtgattctctcaccttagcctcccaagtaactgggactccgccaccaggcctggataatattttgtatatttttgtagagacggggtctcactgtgttgttcaggctggtctcaaactcctgggcttggagtttgatcctcctgccttggcctcccaaagtgcagtgagtactggcatgagtctccacacctgccctctgattttcttttctttgtgcagcaaatgtgggccaaaggaaaccagtctgcggcagttggtggtgcctgggcgaccccagaggtgctgagtaccagctgctgggcttagggacctcgtgtggtctcacggtggggatgtgatcaaggggacctagaaaaggtttatgtctgagagggagttggaggctgggacttccggggactcttagggcggtggccaaccctgggcagggcagacaggagttcaaggccactgaaggaggagctaatgcacttgagagggtcctcctaagcccctgtgtctgtccagctgtaaggggccctgagcttttttgagtggagagacggggggtctctgcagagtcgtagaggctatgctggccagggcacgcgccaacatgctgagcagcctcgcgtccgagccgtggggcctcccagccaggggtgggtggtctctctgcaggatgctgcagccgtccagcagcccgctctgggggaagcttcgtgtggacatcaaggcttacctgggctcggccatacaggtgctattctggtggggagggcacgggggcctggctgtatctggtggtcggtccttttttgtatcccagaatacatgggtttggggcttcactgtcccctcctgcccccagctggtgtcct

SEQ ID NO: 43 - DNA, 2300 bp, Homo sapien
taatctgcccgcctcggcctcccaaagtgctggcattacaggcgtgagccaccgagcacagcctccgctccttctaacagagcaactcggctcccctgcaactctctcttcagcccctctgtccttcctttccctccccagcacttatctctcttctaccgaactgcaggcggtgatttcacccaagaacgtgagagttctcctagatcgggaagagatttttgcacaactcaccaacatacgctccctgcctaggacagagtttggcacggaacaggagctcagtaaacatcggatgaaagagtaagttaagctgaaaggactggggggcagaggtcggcgatccttaggccttggccctgagaccccaggcgaggtcagcaacccaaccggggtgggacaggacgagcaagaggttctgctcacgcatgtccccactaacctggccgaggggctcccgcccggcttatccggactccgggcagcctcgcgtgcttcccgtgtctccgcttgtggagaattttcggactcggattcggactcggagtcaaagcccgaagctaggaactcgtccaccgtcagctccgccaggcgcctgcgggtcacgcaggagtcacagctgcccgcacgcccagctcgccccagccccgctgagaggagcaagaaaagcccccttggatacagacacccaccgggaggccaaatcggccctcggacccgcggcttacctcttgcggctccccgcagctgccatgacaccaacccgaagcgtgcaccccacttccggccccagaatgccgcgcggctgcgcacttccgccgcccaggccccgcccctttccccgccccgccgcgccacgcccagccgagtggctctatggttctccgaccgcaacgccggcggcctcagggcgggagggcgcgttcgcgtgctcggtgcgggcagccccggtggggcccagatgcgcctcccgctcggcgcccggctccgtaggacgcggtgacgccggtgtccgccccggggaagaccgggagtcccgccgcgcccgcagcccacccggcgctccgaaggcacgcgcctgcgaggacgccagactgcaacggcggggctcctatgcaaagagctcccacaaatcaacaataaaaagcagggagtccagtggaaaacgcgaggggcagtgggaaccgcactgatgtcgccagctcgacaaaagacgggcgacccgagggccaggctggcttcgcctccgatccgcggagaccgggccagcgccacgaacaccacgcagggcgctccccgtccatggccctctgggtgccgaccgcggctcttcccggggacgccgcacgggacgaagacggtggggaggccggcgccttccttcccgctaccagcctgacacccgggcccccgggcctggacagccagaccccgcgacaagggcgccgcggggcgcaggcacggctcccccagccctggcgctgagggggcgcgtgaggcgaacacgggcggattggcctcggggtcccattcgacttcttggtgccgcggggccccggggctccccggaggagagcaagttagggggtcgggggagcggggatggcttccgggggaggaggagggcgaggcctggggggctcctcggaggaggaagagggcgaggcttaggggggctccttggaggaggaggagggcgaggcttaggagggctcttcggagaaacaggagggcgaggcctgtggggggcttcccggggaagaaggaaggcgagacctaggggggcttcccggaggaggaggaggaggagggctaggccgggggcttcccagaggaggaggatggcggggcctggggggcttctcggagaaggaagatggcgaggcctaggggggcttctcggaggaggaggagggcgaggcctggtggggggcttcccggaggaggaggatggcggggtctgggggtgcttctcggaggaggaggcggacccggggcgcagcgctggaagaatccgcgtccaacgtctagtccccgaagcctctcgggaggcggggcgggcggcgccgagaaacagcggctgcgggcgggagcggcgggagtgagcgacacagagcgggccgccaccgccgagcagccctccggcagtctccgcgtccgttaagcccgcgggtcctccgcgaatcggcggtgggtccggcagccgaatgcagccccgcagcgagcgcccggccggcaggacgcagagcccggagcacggcagcccggggcccgggcccgaggcgccgccgcctccaccg

SEQ ID NO: 44 - DNA, 2300 bp, Homo sapien
cgcggctcagcagctgcacggctccctccatgggggctgcgggccgagcctgccggggccgcgtgcgctctgcctcggggctgcaggaggcgggcgggtcaggcttcgccccgctggagccgcccgcccgccctggagccgctggggggcccgggcagcccgcggggacccagcccctggtgcgacgggggcgccggcagccctcgcctgacctccgccaaggacccccgccccggagcgcgccgtgtccaggcctccgctgcgcccctgctcccctggggcgtagtcagagccgcgaacagagccccgcgtccggccccgcttcccggcgcccccacgagctcagctcctccgcgtccctagccgccctctcgggaccgcagcgggagtcgcgtcctgggcgcgcggggcgcgggtggggaacctactccgggccgaccccgctccgcacctgagtcccgacctcccccggccctcggaagcggcccccgccccttctgcgagcggacgcgagggcgggggccgcgcaggtcccgaggccgccccccgcgccccgacccccgcccactcacgccggcggctgcggcggtggaggcggcggcgcctcgggcccgggccccgggctgccgtgctccgggctctgcgtcctgccggccgggcgctcgctgcggggctgcattcggctgccggacccaccgccgattcgcggaggacccgcgggcttaacggacgcggagactgccggagggctgctcggcggtggcggcccgctctgtgtcgctcactcccgccgctcccgcccgcagccgctgtttctcggcgccgcccgccccgcctcccgagaggcttcggggactagacgttggacgcggattcttccagcgctgcgccccgggtccgcctcctcctccgagaagcacccccagaccccgccatcctcctcctccgggaagccccccaccaggcctcgccctcctcctcctccgagaagcccccctaggcctcgccatcttccttctccgagaagccccccaggccccgccatcctcctcctctgggaagcccccggcctagccctcctcctcctcctcctccgggaagcccccctaggtctcgccttccttcttccccgggaagccccccacaggcctcgccctcctgtttctccgaagagccctcctaagcctcgccctcctcctcctccaaggagcccccctaagcctcgccctcttcctcctccgaggagccccccaggcctcgccctcctcctcccccggaagccatccccgctcccccgaccccctaacttgctctcctccggggagccccggggccccgcggcaccaagaagtcgaatgggaccccgaggccaatccgcccgtgttcgcctcacgcgccccctcagcgccagggctgggggagccgtgcctgcgccccgcggcgcccttgtcgcggggtctggctgtccaggcccgggggcccgggtgtcaggctggtagcgggaaggaaggcgccggcctccccaccgtcttcgtcccgtgcggcgtccccgggaagagccgcggtcggcacccagagggccatggacggggagcgccctgcgtggtgttcgtggcgctggcccggtctccgcggatcggaggcgaagccagcctggccctcgggtcgcccgtcttttgtcgagctggcgacatcagtgcggttcccactgcccctcgcgttttccactggactccctgctttttattgttgatttgtgggagctctttgcataggagccccgccgttgcagtctggcgtcctcgcaggcgcgtgccttcggagcgccgggtgggctgcgggcgcggcgggactcccggtcttccccggggcggacaccggcgtcaccgcgtcctacggagccgggcgccgagcgggaggcgcatctgggccccaccggggctgcccgcaccgagcacgcgaacgcgccctcccgccctgaggccgccggcgttgcggtcggagaaccatagagccactcggctgggcgtggcgcggcggggcggggaaaggggcggggcctgggcggcggaagtgcgcagccgcgcggcattctggggccggaagtggggtgcacgcttcgggttggtgtcatggcagctgcggggagccgcaagaggtaagccgcgggtccgagggccgatttggcctcccggtgggtgtctgtatccaagggggcttttcttgctcctctcagcggggctggggcgagctgggcgtgcgggcagctgtgactcctgcgtgacccgcaggcgcctggc

SEQ ID NO: 45 - DNA, 2300 bp, Homo sapien
agccgagtggctctatggttctccgaccgcaacgccggcggcctcagggcgggagggcgcgttcgcgtgctcggtgcgggcagccccggtggggcccagatgcgcctcccgctcggcgcccggctccgtaggacgcggtgacgccggtgtccgccccggggaagaccgggagtcccgccgcgcccgcagcccacccggcgctccgaaggcacgcgcctgcgaggacgccagactgcaacggcggggctcctatgcaaagagctcccacaaatcaacaataaaaagcagggagtccagtggaaaacgcgaggggcagtgggaaccgcactgatgtcgccagctcgacaaaagacgggcgacccgagggccaggctggcttcgcctccgatccgcggagaccgggccagcgccacgaacaccacgcagggcgctccccgtccatggccctctgggtgccgaccgcggctcttcccggggacgccgcacgggacgaagacggtggggaggccggcgccttccttcccgctaccagcctgacacccgggcccccgggcctggacagccagaccccgcgacaagggcgccgcggggcgcaggcacggctcccccagccctggcgctgagggggcgcgtgaggcgaacacgggcggattggcctcggggtcccattcgacttcttggtgccgcggggccccggggctccccggaggagagcaagttagggggtcgggggagcggggatggcttccgggggaggaggagggcgaggcctggggggctcctcggaggaggaagagggcgaggcttaggggggctccttggaggaggaggagggcgaggcttaggagggctcttcggagaaacaggagggcgaggcctgtggggggcttcccggggaagaaggaaggcgagacctaggggggcttcccggaggaggaggaggaggagggctaggccgggggcttcccagaggaggaggatggcggggcctggggggcttctcggagaaggaagatggcgaggcctaggggggcttctcggaggaggaggagggcgaggcctggtggggggcttcccggaggaggaggatggcggggtctgggggtgcttctcggaggaggaggcggacccggggcgcagcgctggaagaatccgcgtccaacgtctagtccccgaagcctctcgggaggcggggcgggcggcgccgagaaacagcggctgcgggcgggagcggcgggagtgagcgacacagagcgggccgccaccgccgagcagccctccggcagtctccgcgtccgttaagcccgcgggtcctccgcgaatcggcggtgggtccggcagccgaatgcagccccgcagcgagcgcccggccggcaggacgcagagcccggagcacggcagcccggggcccgggcccgaggcgccgccgcctccaccgccgcagccgccggcgtgagtgggcgggggtcggggcgcggggggcggcctcgggacctgcgcggcccccgccctcgcgtccgctcgcagaaggggcgggggccgcttccgagggccgggggaggtcgggactcaggtgcggagcggggtcggcccggagtaggttccccacccgcgccccgcgcgcccaggacgcgactcccgctgcggtcccgagagggcggctagggacgcggaggagctgagctcgtgggggcgccgggaagcggggccggacgcggggctctgttcgcggctctgactacgccccaggggagcaggggcgcagcggaggcctggacacggcgcgctccggggcgggggtccttggcggaggtcaggcgagggctgccggcgcccccgtcgcaccaggggctgggtccccgcgggctgcccgggccccccagcggctccagggcgggcgggcggctccagcggggcgaagcctgacccgcccgcctcctgcagccccgaggcagagcgcacgcggccccggcaggctcggcccgcagcccccatggagggagccgtgcagctgctgagccgcgagggccacagcgtggcccacaactccaagcggcactaccacgatgccttcgtggccatgagccgcatgcgccagcgcggcctcctgtgcgacatcgtcctgcacgtggctgccaaggagatccgtgcgcacaaagtggtgctggcctcctgcagcccctacttccacgccatgttcacaagcaagtacccgcctgggcggcgctgggggctccgtgggtccctcgggtcagctcgtgtaacccgctgtccccgcagatgagatgagcgagagccgc

SEQ ID NO: 46 - DNA, 2300 bp, Homo sapien
ggcgggcgggcggctccagcggggcgaagcctgacccgcccgcctcctgcagccccgaggcagagcgcacgcggccccggcaggctcggcccgcagcccccatggagggagccgtgcagctgctgagccgcgagggccacagcgtggcccacaactccaagcggcactaccacgatgccttcgtggccatgagccgcatgcgccagcgcggcctcctgtgcgacatcgtcctgcacgtggctgccaaggagatccgtgcgcacaaagtggtgctggcctcctgcagcccctacttccacgccatgttcacaagcaagtacccgcctgggcggcgctgggggctccgtgggtccctcgggtcagctcgtgtaacccgctgtccccgcagatgagatgagcgagagccgccagacccacgtgacgctgcacgacatcgaccctcaggccttggaccagctggtgcagtttgcctacacggctgagattgtggtgggcgagggcaatgtgcaggtgagggctccctcacccggatcccggtgtcccccgaccctgtgcctccctcacctgcctctcggtgccccgtagactctgctcccagccgccagtctcctgcagctgaatggcgtccgagacgcttgctgcaagtttctactgagtcagctcgacccctccaactgcctgggtatccggggctttgccgatgcgcactcctgcagcgacctgctcaaggccgcccacaggtacgtgctgcagcacttcgtggacgtggccaagaccgaggagtttatgctgctgcccctgaaacaggtaacagctggcgggcccagccctcgccccccaccccaccccaccccagtctttgtctttgactcccgaccccgttttgttcctgacacagccctgcccacaatccttagtgcctgctgtgtgtccccgagacctttctggatctgggccccccaggagcctcgtctgtggctcctgactctgctcggcccctcccagtatgaacactcagcccccacctgctaaccctccctcctaggcatcttcagggctccctgggtccacaggaccctccccagatctcaggtctgaggacccccactcccaggttctggaactggtctctagcgacagcctgaacgtgccttcagaggaggaggtctaccgagccgtcctgagctgggtgaaacacgacgtggacgcccgcaggcagcatgtcccacgggtgaggcgcggccgcggggggctcccacagcatccaggagggcatgcaggtggctgagggcctggtgcaccctgaccttccccgagttcagggactccgtgggggtggtgcccccacctgtctgaagaagaatccatcacacaggtggtacgggcatctggggggttgtctcagccctgacgcccagtgtgcccgagggtcccgcctgaccttggcgttccctgcaccccagctcatgaagtgtgtgcggctgcccttgctgagccgcgacttcctgctgggccacgtggatgccgagagcctggtgaggcaccaccctgactgcaaggacctcctcatcgaggccctgaagttccacctgctgcctgagcagaggggcgtcctaggcaccagccgcacacgtccccggcgctgcgagggggccgggcctgtgctttttgctgtgggtatggccccccgcccgtttccctcttgccctgtgccttctactccccaccagcacaagcccaccccacctgtgccggtcaggtcctgacctgcccctccgcccctccattcaggggcctctccaggagcctggggtgtggcccagcagtgggatccactcacgagtcccgtctccacctgccctccccaggcggcgggagcctgtttgccatccacggagactgtgaggcctacgacacgcgcaccgaccgctggcacgtggtggcctccatgtccacgcgccgggcccgggtgggagtggctgcggtggggaaccggctctatgctgtgggcgggtaagcctggaggctggacttgggtcgggtctggcacgtgcccgccaggccagtcttgacctgcagtggcttaattccgctagctatgatgggacctcagacctggctaccgtggagtcctacgaccccgtgactaacacgtggcagccggaggtgtccatgggcacaaggcgaagctgcctgggtgtggccgccttgcatggactcctgtactcggccggcggctatgacggggcctcctgcctgaacaggtagttggggttggggccccagtggctttgtacagt

SEQ ID NO: 47 - DNA, 2300 bp, Homo sapien
tgcgtccagcccacgccctcgcccccaggtgaacgtgtggtcgcccgtggcgtccatgctgagccgacgcagctcagcgggcgtggccgtgctggagggtgccctgtacgtggcagggggcaacgacggcaccagctgcctcaactcggtagagagatacagtccaaaggctggagcctgggaaagcgtggcgcccatgaatatccgcaggtccgcagtggggctgcggggaggggggcgcgggtccgcagtggggctgtgggaggggtccgcgcgtccgcagtggggatgtgctgcggggaggggggcgcgggtccgcagtggggatgtgctgccgggaggggggcgcgggtccgcagtggggatgtgctgccgggaggggggcgcgggtccgcagtggggatgtgctgccgggaggggggcgcgggtccgcagtggggatgtgctgtgagaagggagttctcccaacctcagcgagcatgtcccgccaccacccctttttgtggtgcagcccctccccccgcatcccttcctgcagccaggggctcaccccgccttccccccaggagcacgcatgacctggtggccatggacggatggttgtacgccgtggggggtaacgacggtagctccagcctcaactccatcgagaagtacaacccgaggaccaacaagtgggtggccgcatcctgcatgttcacccggcgcagcagtgtgggtgtggcggtgctggagctgctcaatttcccgccgccatcctccccgacgctgtccgtgtcctccaccagcctctgacccacctaccaccagaggcctgcagcctcccacatgccttaaggggaccgtggcccccaccagggacgtcctgcgccatccgttcacgtctctgcatccattccttcatgtctttatttagttgtttatttatttagttatttatcttatttattgaggggtgaggagtgccacggctgcccgtttacacctttagcgtctggtcctcctgcgtgtcctcccctccactgcctgcatggggggcgcggggagtgaccaggcgggggcctcaccgccccagggccgttgcctgctcagaccttgcaggctgtggagcaagaggccctgggtctctccaagcagctgcagaccccagctcgaattttgcacatggcggggtcccgggaagggtggggagcagttgtccttcctgtcgtcgtctgccgtgtgccatctttcctggatcttgtagtgggtgcacacgcgtgcactgggaccccacacagcaatacgagtccaacttaataaacacatttctggggttcctcaggctgagcatctctctctggcatgtggggcagctgcgcaactttgggtcctgtctggggtccagggtgaggggtgtgggggggtgccctgagatgcgcaggcatctgggagctgcaaggcagagctgtgcgtccagggagggtgggggccgtgcagttcctgtggaccagcgtcccagtgtgggtggcgtttgcctgggctgggtactgaggccgaggtccccgccacatcgtgggctctggggttagggctggggaggacagccttgcccccgagtgcgctgactgtcttggccgtctagggggcatgtggcctccctgagtccccttaagccttggggaccctgactcgggtctgtggcgagggggcccaggcaggaggggaggctgcggtggctttggccgccgtctcctgtgctggaactcctgcctcagccctccctgcagtcaccggtgactcgggccggccagagtttagatggaaacaggatgtgtgggcacgttgtcccggggggcctggaaggtcgccccgggttcaccaagccggagcacaagcaggtggggtacctctgcacactggaggcctcgtctgggccagaggggtgcttgccccaaggctggcctctcgagtggagggcccagggcagagacctgcacggctcaggtaggggccaggcctcttccagaaaggctccaccctcgcccaggccctggtgccgggcgggacgtcccggagccccgcctgcccgcgggaggcgggggcaggaggctgtggacagggacccagacttgccgacctgtacgactctggccatggggaacagccactgtgtccctcaggcccccaggaggctccgggcctccttctccagaaagccctcgctgaagggaaacaggtgagcggggcgtgggtgcggccacctgggcgcagggctcccccacccgctccggggccaagccacgagaccccttgccttg

SEQ ID NO: 48 - DNA, 2300 bp, Homo sapien
cagtcatcccagcacacagtccagatggggcggcccagtccaagcacccgggttgttcagggggttggctctgcgccgccgttgccctgtgttcgggcccatgtgacggcggcgtccctcccccagcctctggcagggttcccgcccaggcctggctaccttcagggtcaggcactctacgaggcccatctcacactgatgtcctctgggagatgctttacagaccagaacacggggcctccactggcagttcccccaaactggcccaactcaaccaggtcacccaaatctcaggcagaagaagcacgggggcgatgtgactccgacagacgcgtccagggcgggcggttcccggggcaggcggttcccggggcaaccagttctcaggaagacgtgtccatgacagaggggtttcgggaagacgtgtccagggtagacgtgtccagcacaaatgtatcttaggacagacatgtcccatgatggatgtatctggggcaggcggttcccggggcgggcgtgtgcggggcaggcagttcccaggccaagagtgtgcagggttagggtggggcaggcggttcctggggttggagggggaggcaggcggttcccggggcggccgtgtgcggggcaggtggttcccggggttgcgggggaagcggctcccggggcaggcagttcctggggttggggggggttgggaggcggttcctggggttggggggggttgggaggcggttcctggggttggggggattgggaggcggttcccggggttggtcggtgggggcaggcggttcccggggttgcggggtggtgggaggcggttcccggggttgcggggggagtgggaggcggttcccggggttgggggtggtgggaggcagttcccggggttggggggattgggaggcggttcccggggttggtgggggtgggaggcagttcccggggttggggggattgggaggcggttcccggggttggtgggggtgggaggcggttcccggggttggtcggtgggggcaggcggttcccggggttgcggggggagcgggaggcggttcccggggttggtggggggagcgggaggcggttcccggggttggtggggggagcgggaggcggttcccggggttggtggggggagcgggaggcggttcccggggttggtggggggagcgggaggcggttcccggggttggtggggggagcgggaggcggttcccggggttggtggggggagcgggaggcggttcccggggttggtggggggagcgggaggcggttcccggggttggtggggggagcgggaggcggttcccggggttggtggggggagcgggaggcggttcccggggttggtggggggagcgggaggcggttcccggggttggtggggggagcgggaggcggttcccggggttgcggggggagtgggaggcggttcccggggttggtcggtgggggcaggcggttcccggggttggcggggtggtgggaggcggttcccggggttggtggggggagcgggaggcggttcccggggttggtggggggagcgggaggcggttcccggggttggtggggggagcgggaggcggttcccggggttggtggggggagcgggaggcggttcccggggttgcggggggagcgggaggcggttcccggggttggtggggggagcgggaggcggttcccggggttggtggggggagcgggaggcggttcccggggttgcggggggagtgggaggcggttcccggggttgcggggggagtgggaggcggttcccggggttggcggggggagtgggaggcggttcccggggttggcggggggagtgggaggcggttcccggggttggcggggggagtgggaggcggttcccggggttggcggggggagtgggaggcggttcccggggttggcggggggagtgggaggcggttcccggggttggcggggggagtgggaggcggttcccggggttggcggggggagtgggaggcggttcccggggttggtgggggtgggggcaggcggttcccggggcgggcgtgtgcggggccatctctgagtgcagccgtggggctgaaggtgagcttctgtcctaggggagctccgggggcctgtcccatcatttgccttcagccagaatgacatgtgcctggtgtttgtagcttttgccacctgggctgtgaggacgtcagatccgcataccccagacgcctggaaaacaggtttgggtgcctgggggcagagggagctgcgcctagaagccagaccgaggggcgctg

SEQ ID NO: 49 - DNA, 2300 bp, Homo sapien
ccctggactgaggggtgctgctgcctgaagtgcaggggggccctgactattcctcatcctacagccaccctcccaccaggaagggtcatgactgggctggatacagggaagggcttcccctgaagcctcaggccaactccagtgacagctcgtcatgaaaaggcctcagggtagggcccctccctccgccaccctagacctcctcgcacagctccctggccacagccttgccgtcggcctccctgcctctcctgtcccaagccccaaagccttctcatctcgtgatggtccacgtggggcccggatgccacgtgcatgccacccaggatgtgctgctgggtcagctgagcgtccacgtgaagacaggagtcccgtgccccccacctcccacctctcacagaagtcaatgccaagtgtgtggcagagccgagcgtgaaaggcgacacagtgaagtttttttttaaatgaaggaataggccgggcgcggtggctcacacctgaggtcaggagtttgagagcagcctgggaaacatggagaaacctggtccctactaaaaatacaaaattagccgggcatggtggcgcctgcctgtaatcccagctactcaggaggctgaggcaggagaatctcttcaacctgggaggcggaggttgcagtgagctgagattttgccattgcacatcagcctgggcgacaagagtgaaactccgtctcaaacaaacaaacaagcaaagaaaggtaccgttatgagggtggaaagaggaggcagagagggagaagattccccagtacaagagttcaatgaagagctcgtccagaatacgtaaggactcctacagacccacagggaggaggcacagggaggcggccgcagccgagagacgccacacagaagcagatgcgcagctcctgggaaactccagcctggagcacggccacgcagccacctggggaacggggcggcaccttctgacgctgaccccaagcgtcctggaaatgtgagaggttcgccgaaaggaatgttcccagatattcacagccgcaccgtgtgtggtagctgcaaactggaaacgacccacatcgccacccacgggaaacggcacagccgcgtggcacgttcacacaggacagcctcacccgcccgggcagtcgcccgcggccctcatggcagctgtctccagagcacggcgtgggcccgaggacacagatgcagaaagggatgcagggtgcgattccacttgtgaaagctcaagtcaggccggccctgcgtggcgggacgccttgtcctgtggtctcgtggcagctactttctggaaaagcatcgtatggcaccaggcatgcactttctgcacgcccagctctcactgccacccctcacggcgcacaccccagtctcctagtatcgtgccctgaactctcaggagcttctcggtccaagcctcctccttagagaggtctccggcccctccagccacgcctctccctacttctttctcaggacgtgctgccatcggagctgagctcacctgcctgtttgatcggatgtttattgttggatccctcgccctgtcctcttgtcccctctggctcggaacctgcctgggaatgggcaccgtgaaccccaaggtcaggacggcctggagggtgcagctgagcggagccaggcgtgggggctctgacgctgacgctccctggcgtcactcaccctcacatgagccccagaggtcaggaccgggaggcacaagccctggccgggacacagaggccatctcagaagcaggccaggaacattccaggggcggcagggagggcaggtctgaggtttcaccgcgggtggcggaggcacgggaactgagcggtgctgcctgctggtcagcgtcctccggcccgtgtctgaccccacctcagcccggccccgtgccaggaagtcgtcctcatgtactgtagctggagggccctcaaatgccatctatttgtggcctggaccctgatggctggcacgagtctcatgtggccacagggacgtggtatttttggcacagggggaggagcctgtgcagccacagcctagcaccatgccgacccaggacgggcagctcagacgcccagctcggccgccgggacccaggtaggacatggtcagctgctggctcctgacccaaggggccccaatggtaacaacccccacagaggcttctcaagagaccagagaggagggcgaaggtcagtgggtgggaagccaccatgccctggcctccgtctcaggaccgtccccaccaaagtgacttcccacccctgg

SEQ ID NO: 50 - DNA, 2300 bp, Homo sapien
aataaaaacgatcctcaggctcctccttccatcccgaactccctgcctgtctagggactgggggaggcccagagcccccccaaatttcttcccaagccggggcccaggggctggggagattcaggccggcagctcccctgggatgacccccagcaggaggcggcggcgactgcggccactgggggcgctcgcgggctttcccgcccgggcccagcgctcaggccggggagggacgcgggacggggacaccatccacaccacctcctgggctacggggccggtccgagcctctccagcgccgaggcgcgcgcagagaggtcggggcaggagagccggggcttaagtgctcgcggggccacctccgagacgcccgcccagcccccgcggctttccccagtcggcgaggggcgcggacagcctctcggcggagagggcgccacccccgctccggcctcgcagccccccgcgcccctgtgcaagcggcggggtgtggggggcgcctcaggggcaccgcggagggccggggtcagcgccgcgaagagggcgccttcccgcgtgggccgcaggactttgcttggggccagattagacgtggggtccgaggggaggggaagcttccgcacagaaaccctgggtccaggtgcccgggcaggggcgaacctgccaatcagccgactccctggctcagaaaagctccccaaaaagttccccgactccctccccgaccagaagctcccggttctcgctggcccagctccccctccccacctccctcgtccctgcgcccccttcgcaccctgggaatgccacgccctcccttgaggcttcccccctgaggaccccccaccccgcagaagcctttgggaccacccggcgtcaagaaggcttttgtccacccaggccacccacctaattcggttctcttacgtgactgctgagtctgccatctgcctcctgcccggattgaaagcccgggagggtctccacacccgggcccaggccaggctctccagggggctcaggaagcctccgctgcacggacgcgtgaggccgccggggaccccgagtgcggaaaggaccaacgtgccccgcagcggcattcgaaataaaaacagcaaacacgaaaataaccacagccctgttttacgcaacctgcccctttgcagttatattaacagtggcccctcatttttctgtgagccccactttgctgctgctgagttcgccagcgggtcacctggaagcacgtggcgacacgggccacatgacgtcatcccagcaggcttgcgtcatcgccccgggtgcctggtgacgtcaccagcccgctcgcgtcacgcgcacgttctgctcctcgtggtccggcccggcccgcgccatcaccggccctgctctgcggggccacccgtgcgccccttcgccgtccgctgactccgccctcccgcctgccgacccggccgccgaccttcccccggctctgtcgctcccaaggctttctgcagccctccgtgctccaggccgcacacctgagggtgggacccccggaggccgagccggtgtcggatcaaactcggagaccgagcagggcccaaaccgggaccggagtggggacgggcggaggaagccaagaggctcgagaccgaggctcgcccacccctcggcgccgccggaccctgcgccactgggggaatttccttcccgacttcccgcgcggccacagccccagctccgtccagccccggctcccggccccctgggcgggagagtgagccccgagactccgcccagccccgggggtcccgggccccgttcgcccccagcggcccctcccggcgcgttgctcggccccggctgcatcggggagcgcgggatcacccggccctgtccccagcggtgtcggaggggggcgcgggcgggggccccgcatgccattgtcgcccgcggaggccgcgcccggagccgaggcgtgactgacagcgagcgggggaggagcgcggccgtcgattggctggggcgagtgtgggaaagaatgcggagccgggttcacacaccccgcggcggcgaggccttaaatagggaaacggcctgaggcgcgcgcgggcctggagccgggatccgccctaggggctcggatcgccgcgcgctcgccgctcgcccgccagcccgcccgtggtccgtggcggcgcgctccacccggcacggggaggcgcggggcgcaccatggccgcagacacgccggggaaaccgagcgcctcgccgatggcaggagcgccggccagcgccagccggaccccagacaagcc

SEQ ID NO: 51 - DNA, 2300 bp, Homo sapien
gccttttcacctttgctttttattgatgtgaaattcatataacataaaactaaccattttaaagaatgaaatccagtggcgtttagttatttaccacgttgtccaaccatcacctctgtggagttctgaaacattgtcacccccaaaggggcttgtggctctgaagcaatcaccccccactccccctccctggcccccggtaacggggtcggcttcctgtgctgcggctctaccagttccggtcgtttcccctgcggtgaatggaaccaacactctgcggccttcgtgtctggctctttccacttagcataacgttttcaaggttctttcacatgaatcagtgcctcagtccttttcatggctgcataatattccgttgtgtggacattccacactttgtgtgtccatccatcactgatggacatgtgctccgttcctgctacttgtttattgtaaactgtgctgccatggacatttgtatgcaagtatttgaacacctattttcaattcttttggacacatgcctagaagtggaactgctgggttcccaataattctgttgaacgttttgagcatcgcggcggccgcactgttttacattctcaacagcaatgcatgtaccaggattccagttcctctatgtattccccagtgcttgttactgcctttatgtttattttatattattttttgagactgtcttgctctgctgcccaggctggagtgcattggtgcaatcttggctcaccacaatctctgcctcctgggttcaagggattctcccgcctcagcctcccaagtagctgggattacaggcgtgcaccaccacgcccagctaatttttgtatttttagtagagatggggtttctactaaaaatgttggccaggctggtctcaaactcctgaccttaggtgatccgcccgcctcagcctcccaaagtgttgggattgcaggcgtgagccaccgcacccggcctggcctttatttttattattacagtcataccagcaggaaatagcatctcactggggttttgatttgcatttccccaattaataatgatgttgaacatcactttacagccgtttctatgtcattggagaaatgtctattgaagtcttttggccatttgaaaattgagttgccttttttttttatttttattttttattgagttgtaagagttctctatatgtcctggatgctatgccctcatcagatagataatttgcaaatatttcttcccattctatggattgtcttttcactttctcaatagtgtcccagagttcatttttgtagaaaataaaagataggtctcttttattaaaaaacaatctgaggctccgggtgcagtggctcacgcctgtaatcccagcagtttcagaggccgaggcaggtggatcacttgagcccaggagttcgagatcagcctgggcgacatggcgagacccccatctctactaaaaatacaaaaaattagccgggcctggtggtgcacccctgtggtcccagctacgtgggaggctgaggtgagaggatcgctttagcctggcaggcggaggttgcaatgagatgagatcgtgcctctgcactccagcctgggcgacagagtgagagaccctgtctcaaaaacacaaaaacaacaacaaaaaaacaccaatctgagcaaatactgccctaaaccgagtgttgttatctctgggtagtttggagttcttgtttctcaattaaccatggggatgttttccaagtttactaattttgcaagttggtaaatggaaaatgaaaccattagtccatgtgatgacagctttagtgcatcctgtgaaggatctggaatgcgcgatatttaggtgtttccagggtgttgggtgggggtggggatgccgtccgctgtccggagtccccgccacttttgcttttccctgtctttcggtcattcggttttgtttcttccgctcactctggggcatgcctcgggaaagggaaaccgaaactgaagccaaatttggccaccagcgcaggctcggcggcacgccccctgacgtgtgtgcctcaggcttataatagggccggtgctgcctgccgaagccggcggctgagaggcagcgaactcatctttgccagtacaggagcttgtgccgtggcccacagcccacagcccacagccatggtaaggcagatgtcacaggtggggggaggtgggctctgtgccagccaattttcgtctccctcccccagccaaggtctcccaggggtgcagggagagcggagctgctcagagcttggccaggt

SEQ ID NO: 52 - DNA, 2300 bp, Homo sapien
aaaccttgagctagatacagagtgccgattggtgtatttacaatccctgagctagacataaaggttctccaaggccccaccagagtagctagatacagagtgtctgtctattggtgcattcacagactctgagctagacacagggtgctgattggtgtatttacaatccctgagctagacataaaggttctccacgtctccaccactcaggagcccagctggcttcacccagtggatcccgcactggggctgcaagtggagctgcctgccagtcctgcgctgtgcacccgcactcctcagcccttgggtggtcatgggactaggcacggtggagcagggggcagcgctcatcggggaggcttgggccgcacaggagcccacggagggggtgggaggctcaggcatggtgggctgcaggtccccagctctgccccgccggaaggcagctaaggcctggcgagtaatcgagtgcagcgccagtgggctggcactgctgggggacccactacaccctccgcagccgctggcccgggtgctaagcccctcattgctccgggccggcagggccggccggctgctccaagtgcggggcccaccaagcccacgcccactcggaactccagctggcccgcaagagccgcgcgcagccccggttcccgctcatgcctctccctccacacctccctgcaagctgagggagccggctcccgccttggccagcccagaaaggggctcccacagtgcagcggtgggctgaagggctcctcaagtgccaccaaagtgggagcccaggcagaggaggcgtgaagaccgagagagggctgtgaggactgccagcacgctgtcacctctcagcaccatctcagctcactgcaacctccgcctcctgggttcaagcgattctcctgcctcagcctcccaagtagctaggactacaggcgcctgccaccacaccggccaatttttgtatttttagtagagacggggtttcaccatgttggccaggctggtctcgaactcctgacctcccgtgatccacctgcctcagcctcccaaagtgctgggattacaggcgtgagccactgcgcccggcccatccagctaatttttaatttttttgagagatggggtcttgctattttgcccaggctagtctcgaacacccggtgtcaagagatcttgctgcctccgcctcccagagtgctgggatgacaggcgtgagtcaccacgcccagcctagacacagttctgaagggacaaagggggcctccgctccctcctttcaatcttcagctaggccaggctcccacttgggtcctccagccctcagtttccccctgcacccagccaggccaagctgcagaggcgcccggcccagagctgggaaggggcgtggcgggacccgcgcttgcagccgcgggacggaagggggcgcgaacctccccgcggcggggcctgggggggcggggccgggaggggcggggccgcgccccgtgctggccaatcagcgcccgccccggcaccgggacccgcctccgcgccgcagctcccggggggtccggcccggccgagcctcggtgtccggccccgcgggggaggggcgcggcctgcggagcgggatcggggccgggtctggggcccctcccggcggccttcgagccctgccgcccggctccgcgccgcccggagcccctcggcagtcccgtcacgtctcctccagattaggcattaactcgggtgcagccgcacttccggggggccgcggcgggggaggggcgcctgcgggatccagacccgccccccactctcctctccccgccccctcccgggccgcccctttcccgccccacggccgcgccgggcgctgcgtcccggggctttgttcgcggcggcgcgggtcgccggcctccgggcgggccgggggagggaggagggagggggcgggagggggaaggaaggaggagggggaggaggagggcgcggggagggggtaggggggcggggaggagagagggggaggggcgccgccctggccccgcccccccccgcccgcccgcccgcgctccgccgcctccggagctgcgtcccgtcctgtccagtcccgtccccggcgcggcccgcgcgctcctccgccgcctctcgcctgcgccatggccggccggtcccacccgggcccgctgcggccgctgctgccgctccttgtggtggccgcgtgcgtcctgcccggagccggcgggacatgcccggagcgcgcgctggagcggcgcgaggaggaggcgaacgtggtgctcaccgggacg

SEQ ID NO: 53 - DNA, 2300 bp, Homo sapien
ccgcgggtggggggctggccagggagaataggagatagtagaggcggaggccaggaatttgcacttctccagggaagctggggaagagttggggagagggaggcaagaagattccccacccatcttaggcgcagggagcggtcagggaggcgccagaggtgggccagagctgtgacctggcctcacaccccgtcccggtggggctctcaggcccctgagggccagacgcgggacctgggtgcgacccgggcgggaggcggcagggctcagctgtgctggacgctgcagcagcgcgggaaggggctcccccggctccatggggtgaatcggtgaggggctccggtgccgatgtggaaggagctcctgagcagaactggggcctggactgcttgtgcccgagttggtttcgaggcgtctctgcttttcgctggaggcccacgaggtgggtgggaagtgggtgctcgcccgtcgcagaaacagagtcgggtgccgcctgcggcagacgcccctctccgcgcctgcaggtgcggggtgggggagaaaggtcatccctggagaggcccggggctggcgggaatcctcggcgggcggggtctgcgaggggcagggccggtcctgtgagcgcacgcacgcgtgtccgtgtccgtggtggacccccgatgcggcgcgggggcgggtgaatgcgcgggctgcgagcacggcaaggtctctcaggcttgtggacgtgggtacgggcgtctcggcaccctgagctttctcccctacccgccccagcgtgccggggaatgctgtgcggcttcggcgccgtgtgcgagcccaacgcggaggggccgggccgggcgtcctgcgtctgcaagaagagcccgtgccccagcgtggtggcgcctgtgtgtgggtcggacgcctccacctacagcaacgaatgcgagctgcagcgggcgcagtgcagccagcagcgccgcatccgcctgctcagccgcgggccgtgcggtgagcggggcggggccggtgcctggggcggggaggggcggggcctatgagatggagcgaggctgggaggggcttcggggccagtggggcgggggcaggggcggggcccggcggggaggagcggggctgggaggggcctggggggcggagcgggggagggggcggcccgtctgaccggcaaagccccgcccgcaggctcgcgggacccctgctccaacgtgacctgcagcttcggcagcacctgtgcgcgctcggccgacgggctgacggcctcgtgcctgtgccccgcgacctgccgtggcgcccccgaggggaccgtctgcggcagcgacggcgccgactaccccggcgagtgccagctcctgcgccgcgcctgcgcccgccaggagaatgtcttcaagaagttcgacggcccttgtggtgagcgcggcggcgggcgcacggctcgagctctgtgggcgcgcggcgacagcgtcctgactcctgccctcgacccccagacccctgtcagggcgccctccctgacccgagccgcagctgccgtgtgaacccgcgcacgcggcgccctgagatgctcctacggcccgagagctgccctgcccggcaggcgccagtgtgtggggacgacggagtcacctacgaaaacgactgtgtcatgggccgatcgggggccgcccggggtctcctcctgcagaaagtgcgctccggccagtgccagggtcgaggtgagcggctcccccgggggagggctccggccagtgccagggtcgaggtgggcggctcccccgggggagggctgcggccagtgccagggtcgaggtgggcggctcccctctgggagggccgcctgctcccctgctccctgcacatcccagggcagggatggagggtgctccagcctctccgtgactccctcacccctgcgtcctagaccagtgcccggagccctgccggttcaatgccgtgtgcctgtcccgccgtggccgtccccgctgctcctgcgaccgcgtcacctgtgacggggcctacaggcccgtgtgtgcccaggacgggcgcacgtatgacagtgattgctggcggcagcaggctgagtgccggcagcagcgtgccatccccagcaagcaccagggcccgtgtggtgagcgccccggggtggaggccaggcggggtgggctgctcctgcgtcagtccctgcctggacatcacatgccatcttcatccatcatgttcctcttggggtcctgggagtgggccggtccctctgggaaggctctggggagggtggagcctgtgtgcggagggtacctgga

SEQ ID NO: 54 - DNA, 2300 bp, Homo sapien
gccccgcgacctgccgtggcgcccccgaggggaccgtctgcggcagcgacggcgccgactaccccggcgagtgccagctcctgcgccgcgcctgcgcccgccaggagaatgtcttcaagaagttcgacggcccttgtggtgagcgcggcggcgggcgcacggctcgagctctgtgggcgcgcggcgacagcgtcctgactcctgccctcgacccccagacccctgtcagggcgccctccctgacccgagccgcagctgccgtgtgaacccgcgcacgcggcgccctgagatgctcctacggcccgagagctgccctgcccggcaggcgccagtgtgtggggacgacggagtcacctacgaaaacgactgtgtcatgggccgatcgggggccgcccggggtctcctcctgcagaaagtgcgctccggccagtgccagggtcgaggtgagcggctcccccgggggagggctccggccagtgccagggtcgaggtgggcggctcccccgggggagggctgcggccagtgccagggtcgaggtgggcggctcccctctgggagggccgcctgctcccctgctccctgcacatcccagggcagggatggagggtgctccagcctctccgtgactccctcacccctgcgtcctagaccagtgcccggagccctgccggttcaatgccgtgtgcctgtcccgccgtggccgtccccgctgctcctgcgaccgcgtcacctgtgacggggcctacaggcccgtgtgtgcccaggacgggcgcacgtatgacagtgattgctggcggcagcaggctgagtgccggcagcagcgtgccatccccagcaagcaccagggcccgtgtggtgagcgccccggggtggaggccaggcggggtgggctgctcctgcgtcagtccctgcctggacatcacatgccatcttcatccatcatgttcctcttggggtcctgggagtgggccggtccctctgggaaggctctggggagggtggagcctgtgtgcggagggtacctggatacctgggggctggtgaggcagaggcggggccttgtccaggctccctggtccctgacctcagccacgccctccctgggagtcctctggcctgtccgcatgtctccacgctgtaagcacaggctgttggggtgggcaggctggacacaacaccagggtcctcactcttgggacatgggcagccgtcggccgttttggaggcagtgtcaggacttgaagggccagggggaggcagtggccgtcgtgtcccgtcgtgttcgtcttggtcagttcgcccatcttctggtctttctctctgcgtctgtctcttctctttggtctcttcttccctgtcggctccgcctcttgtgtcttccagcctgacctgctggcaggatgaggtgccgtgcctgccctccaggagcccgcagcccgaggtctgcccctggtgcggcagggggggtggcttgctgctgcctggccttgtggtcctcagagcaagtggacagacacctcctcccccgtgcagccctgggtgtgactctgggggtgcaggctcctcccacccacagagagcccccccacatgcatgggtgtcctggggatgctggtggtcaggggtcagtggcctgggcaggctggggaagcctggccctcccatagcctgctgtggacaatcaggaagccccaagcttgggggcagcctcgcccgcagccaccggggactcctgggtgtgtgttccgctcgcctctgccgcgtgtctgtccctttctctgccgtgtctgctgtgcatctggcccttctcctgtgttctctcttcctccaccatcccctccctggaagagggactgctgcgtggggctgggggctttgcctgcagcggagggggggcttgtgggaccactgagcccctgtgtccttcccagaccaggccccgtccccatgcctcggggtgcagtgtgcatttggggcgacgtgtgctgtgaagaacgggcaggcagcgtgtgaatgcctgcaggcgtgctcgagcctctacgatcctgtgtgcggcagcgacggcgtcacatacggcagcgcgtgcgagctggaggccacggcctgtaccctcgggcgggagatccaggtggcgcgcaaaggaccctgtggtcagtggcgggtgaggggtctggtgggggtcggggagagagaggttcctggtcgcctggtgatggaagctcctccccagaccgctgcgggcagtgccgctttggagccctgtgcgaggccgagaccgggcgctgcgtgtgcccctctg

SEQ ID NO: 55 - DNA, 2300 bp, Homo sapien
tccgcttgcgggacctggggcccggcaaatccgtccgcgccattgtggatgtgcactttgaccccagtgagacctgcaccctggacccttcctgggaggcaatgggtgggggatgcctggggctctgccatgctcagagctccctcctccccagccacagccttcagggcacccgacgtggcccgggccctgctccggcagatccaggtgtccaggcgccggtccttgggggtgaggcggccgctgcaggagcacgtgcgatttatggactttggtgagcgccaggccacgagccacagcttacctgccccctcctctgcccatgcccctgcccctcaccccttcctggccctgctcccaggaaaccctaacagctccctgtgccggcagactggtttcctgcgtttatcacgggggccacgtcaggagccattgctgcgggagccacggccagagccaccactgcatcgcgcctgccgtcctctgctgtgacccctcgggccccgcaccccagtcacacaagccagcccgttgccaagaccacggcagcccccaccacacgtcggccccccaccactgcccccagccgtgtgcccggacgtcggcccccggccccccagcagcctccaaagccctgtgactcacagccctgcttccacggggggacctgccaggactgggcattgggcgggggcttcacctgcagctgcccggcaggcaggggaggcgccgtctgtgagaagggtaaggatgtccactgcagaggagggcggggaggcagcagggtgggggcaaggattgggggtggggctaagccaccatcaggctttgagttgggggcaggagcccggattaaggcggggtttcggccagatgcggtggctcacgcctgtaatcccagcactttgggaggccgaggcaggcggatcacctgaggtcgggagttcgagaccagcctgaccaacatggagacactctgtctctactaaaaatacaaaattagccgggcgtggtggtgggcgcctgtaatcccacctcgtgaggctgaggcaggagaatcgcttgaacctggcaggcggaggttgcggtgagccaggatcgcgccactgcactccagccggggcaaaaagagcaaaactccgtctcaaaaaaaaaaaaaaaaaaaaaagcagggggcggtttcagggataaaagtggggaatcctcggagcttttccagccggccctcccggtcgccctttgcagtgcttggcgcccctgtgccggccttcgagggccgctccttcctggccttccccactctccgcgcctaccacacgctgcgcctggcactggaattccgggcgctggagcctcaggggctgctgctgtacaatggcaacgcccggggcaaggacttcctggcattggcgctgctagatggccgcgtgcagctcaggtgggcggggaggggacggggccggggcagctcaggtgggcggggaggggacgggcgggggagggggggccggggcagctcaggtgggtggggtggggacgggggcggggcagctcaggtaggcggggtggggacggggccgggcgatggtcctgagcacctgctcctgccctcaggtttgacacaggttcggggccggcggtgctgaccagtgccgtgccggtagagccgggccagtggcaccgcctggagctgtcccggcactggcgccggggcaccctctcggtggatggtgagacccctgttctgggcgagagtcccagtggcaccgacggcctcaacctggacacagacctctttgtgggcggcgtacccgaggaccaggctgccgtgtgagtcccttggagggtggtgtggccccgaccccggccctttggggtcccggtgtacgaggtggctttgcctgtggcccctgagccctgacccggtgtccctcctggtggcagggcgctggagcggaccttcgtgggcgccggcctgagggggtgcatccgtttgctggacgtcaacaaccagcgcctggagcttggcattgggccgggggctgccacccgaggctctggcgtgggcgagtgcggggaccacccctgcctgcccaacccctgccatggcggggccccatgccagaacctggaggctggaaggttccattgccagtgcccgcccggccgcgtcggtgagggtggggccggggcgggtgggagtgggaccccggggcctgtgggcggtacccaaccgacgcctcctgggacctcggtcccggtcccgtcttcctccatccaggaccaacctgtgccgatga

SEQ ID NO: 56 - DNA, 2300 bp, Homo sapien
ccgggggctgccacccgaggctctggcgtgggcgagtgcggggaccacccctgcctgcccaacccctgccatggcggggccccatgccagaacctggaggctggaaggttccattgccagtgcccgcccggccgcgtcggtgagggtggggccggggcgggtgggagtgggaccccggggcctgtgggcggtacccaaccgacgcctcctgggacctcggtcccggtcccgtcttcctccatccaggaccaacctgtgccgatgagaagagcccctgccagcccaacccctgccatggggcggcgccctgccgtgtgctgcccgagggtggtgctcagtgcgagtgccccctggggcgtgagggcaccttctgccagacaggtcgggggcgtggggctctcggggcagggggggggggggggttgaacgtttgggcgggtacaggttccaggtagcattgcagttaggatgcggctcagtctagtctgggttttgagttaggatccacacacggctggcatggggtgcaggaggccccgggggtcaggactgaggccttggtgactctccctacagcctcggggcaggacggctctgggcccttcctggctgacttcaacggcttctcccacctggagctgagaggcctgcacacctttgcacgggacctggggtcggtggggcaggagcagggggaagggccggcccccacctccgtctctcctgtggggaggggacagcaaagacaccccgactccccatgaccccagggagaagatggcgctggaggtcgtgttcctggcacgaggccccagcggcctcctgctctacaacgggcagaagacggacggcaagggggacttcgtgtcgctggcactgcgggaccgccgcctggagttccgctacgacctgggcaagggggcagcggtcatcaggtgggccggcaagggtggctctgggaggcctggggcactggcccggggccggggcaccagcaggtcgctcaggccctgggtggtcgcgtggccggtggtggacagagcccactcacgctgcccctcctcaccaggagcagggagccagtcaccctgggagcctggaccagggtctcactggagcgaaacggccgcaagggtgccctgcgtgtgggcgacggcccccgtgtgttgggggagtccccggtgagtgctctgggccgcgaggggactcccgctgctgcctgctcttcctcctcgggcggcagccccgcccctgccggcgctcacggagctgtttttctgtcctgttctcttggccgcctgccctgtcctctgcctcctctgcctccctgctctctgctctcgctctgcaaccccacccgctcttcggaggccagaaatcccgcaaggtactgtcggcctctcatccgctcaccgtctctggcgcctcaacccctagggtagctcctcccccactaaggaccctgccatttctgtgtgattaacgctgccccctagataggcaatgggcgggtggggcgggtgcgtgcaggtgcctgggccctgggtctgcaccgtgggtgggctctgcacagccacttacctggcgtccccgcaggttccgcacaccgtcctcaacctgaaggagccgctctacgtagggggcgctcccgacttcagcaagctggcccgtgctgctgccgtgtcctctggcttcgacggtgccatccagctggtatgtgggggcggggcgtcccagcagggcctccggggcgggcggggtggcaggcgggacaaggccctcaccctgccctgcaggtctccctcggaggccgccagctgctgaccccggagcacgtgctgcggcaggtggacgtcacgtcctttgcaggtcacccctgcacccgggcctcaggccacccctgcctcaatggggcctcctgcgtcccgagggaggctgcctatgtgtgcctgtgtcccgggggattctcaggaccgcactgcgagaagggtgagcctggcacagggcagggggcggaggccggatgggcccggagcccacgaggccccaccctcacctgcctatctcacagggctggtggagaagtcagcgggggacgtggataccttggcctttgacgggcggacctttgtcgagtacctcaacgctgtgaccgagaggtaacgtgccatcctctgctggctgtcggttccatctgtgccctcggggcgggacaccggacccccacaccaggagggcccaggaggggacggcccggtgctgccacctctgtcctcccgcctctctctcacctcccggtc

SEQ ID NO: 57 - DNA, 2300 bp, Homo sapien
tggcccggggccggggcaccagcaggtcgctcaggccctgggtggtcgcgtggccggtggtggacagagcccactcacgctgcccctcctcaccaggagcagggagccagtcaccctgggagcctggaccagggtctcactggagcgaaacggccgcaagggtgccctgcgtgtgggcgacggcccccgtgtgttgggggagtccccggtgagtgctctgggccgcgaggggactcccgctgctgcctgctcttcctcctcgggcggcagccccgcccctgccggcgctcacggagctgtttttctgtcctgttctcttggccgcctgccctgtcctctgcctcctctgcctccctgctctctgctctcgctctgcaaccccacccgctcttcggaggccagaaatcccgcaaggtactgtcggcctctcatccgctcaccgtctctggcgcctcaacccctagggtagctcctcccccactaaggaccctgccatttctgtgtgattaacgctgccccctagataggcaatgggcgggtggggcgggtgcgtgcaggtgcctgggccctgggtctgcaccgtgggtgggctctgcacagccacttacctggcgtccccgcaggttccgcacaccgtcctcaacctgaaggagccgctctacgtagggggcgctcccgacttcagcaagctggcccgtgctgctgccgtgtcctctggcttcgacggtgccatccagctggtatgtgggggcggggcgtcccagcagggcctccggggcgggcggggtggcaggcgggacaaggccctcaccctgccctgcaggtctccctcggaggccgccagctgctgaccccggagcacgtgctgcggcaggtggacgtcacgtcctttgcaggtcacccctgcacccgggcctcaggccacccctgcctcaatggggcctcctgcgtcccgagggaggctgcctatgtgtgcctgtgtcccgggggattctcaggaccgcactgcgagaagggtgagcctggcacagggcagggggcggaggccggatgggcccggagcccacgaggccccaccctcacctgcctatctcacagggctggtggagaagtcagcgggggacgtggataccttggcctttgacgggcggacctttgtcgagtacctcaacgctgtgaccgagaggtaacgtgccatcctctgctggctgtcggttccatctgtgccctcggggcgggacaccggacccccacaccaggagggcccaggaggggacggcccggtgctgccacctctgtcctcccgcctctctctcacctcccggtcctcccgcctctcactgtctgtctctttgtttccaagcgaactggccaatgagatccccgtgtgagtagagctcggcgccccccgctccctctcactcccactcctccatccttcctggtggggagcagagtccggagcccccggggaactttccatcccttgtggcggaggatgggggtccggcgctatttggctgcaagaggccgtttcctgcctcagaagtgcagtcgcccctcccagggcacaggccgagggtcgccccacagccaacccccaccactgaggctgtacacacctgtgcgcatatgcatgcatgtctgtgtccgtgtgcacttccgcgtgtgtgaacatgcagctgtgtctgtgcgtgtctatgtatatggagtggatgtgcaagtgtgtgtgaatatccagctgtgtgtgtgcatgggtccatgtatatgtgtgtgtgtatatgtgggggggacatgtagatatgcgtgtgtgactatgcggccgtgtgtgtgcatggctccatgtatgtgtgtgtatatgagggagacatgcaggtatgtgtccgtgtgtgtgtgtgtgcatatgggtccatgtatgtgtgtgtatatgagggagacacgcaggtgtgtgtctgagtgtgtgcgcacatgggtccatgtatgtgtgtgtataggtgagggagacatgcatgtgtgtgtccgtgtgtgtgcatgggtccatgtgtgtatagtgtgtacacatgggtccatgtatgtgtgtgtatatgagggagacacgcaggtgtgtgtccgagtgtgtgtgcatgggtccatgtgtgtatagtgtgtgcacatgggtccatgtatgtgtgtgtatatgagggagacacgcaggtgtgtgtccgagtgtgtgtccatgggtccatgtatgtgtgtgtatatgtgggggagacaggtgtgtgtccgagtgtgtgcatgggtccgtgtatatgcgtgtatat

SEQ ID NO: 58 - DNA, 2300 bp, Homo sapien
cgagtacctcaacgctgtgaccgagaggtaacgtgccatcctctgctggctgtcggttccatctgtgccctcggggcgggacaccggacccccacaccaggagggcccaggaggggacggcccggtgctgccacctctgtcctcccgcctctctctcacctcccggtcctcccgcctctcactgtctgtctctttgtttccaagcgaactggccaatgagatccccgtgtgagtagagctcggcgccccccgctccctctcactcccactcctccatccttcctggtggggagcagagtccggagcccccggggaactttccatcccttgtggcggaggatgggggtccggcgctatttggctgcaagaggccgtttcctgcctcagaagtgcagtcgcccctcccagggcacaggccgagggtcgccccacagccaacccccaccactgaggctgtacacacctgtgcgcatatgcatgcatgtctgtgtccgtgtgcacttccgcgtgtgtgaacatgcagctgtgtctgtgcgtgtctatgtatatggagtggatgtgcaagtgtgtgtgaatatccagctgtgtgtgtgcatgggtccatgtatatgtgtgtgtgtatatgtgggggggacatgtagatatgcgtgtgtgactatgcggccgtgtgtgtgcatggctccatgtatgtgtgtgtatatgagggagacatgcaggtatgtgtccgtgtgtgtgtgtgtgcatatgggtccatgtatgtgtgtgtatatgagggagacacgcaggtgtgtgtctgagtgtgtgcgcacatgggtccatgtatgtgtgtgtataggtgagggagacatgcatgtgtgtgtccgtgtgtgtgcatgggtccatgtgtgtatagtgtgtacacatgggtccatgtatgtgtgtgtatatgagggagacacgcaggtgtgtgtccgagtgtgtgtgcatgggtccatgtgtgtatagtgtgtgcacatgggtccatgtatgtgtgtgtatatgagggagacacgcaggtgtgtgtccgagtgtgtgtccatgggtccatgtatgtgtgtgtatatgtgggggagacaggtgtgtgtccgagtgtgtgcatgggtccgtgtatatgcgtgtatatatggggggatatgtagatgtgtgtgtgtatgaacaggtgtaagtggggagcactcaggtgtgtctgtgtgtgttcgtgtacacgtgtgtatgtgtgtgaacatggaggggtgtgtgtgtccgtgtgtaggtttgcgtgcatgcacacatgcatgtgtgtactggggcatccaagcccctggtctccactccataccaccctacgcctacctccttgatctctgcgcccagccttggctgtgctcccctgctgtctgcacgtgggtgtctgcacgtgggtgtctgcatgtgggtgtctgtgccctcaagtgtctcgtgtctgcacgtgggtgtctgcaccctcacgtgtctcgtgtccgcacaagcatgtgtaggtgtccctgctgggctctttggtgggcggccagtgatcctcgaggtcacgcatgtcttctgtgggtgcctgctccttgcaccccacagtgttgagatgggtttgcattggccccgcctgtcccctgctcacccgcctccctctcttcctgcttctaagccccgaaactctggattccggggcccttcacaggtgagcacgtggcagcagtgcctgcagacccctggctggcccatctgtcctcccgcccgtctctctgatctctctctgccaggctgcccctgtctccatccctcttctccctcccactgtcggtgtctgcccaccagccacccctgggtcccgtcacagcccttgtggcctccgcagctggggcccttgtcctcccgcctcccccaccctgtcctgttgccaccttcctagaggccctgacctgccctctgccctccagcgagaaggcactgcagagcaaccactttgaactgagcctgcgcactgaggccacgcaggggctggtgctctggagtggcaaggccacggagcgggcagactatgtggcactggccattgtggacgggcacctgcaactgagctacaacctgggctcccagcccgtggtgctgcgttccaccgtgcccgtcaacaccaaccgctggttgcgggtcgtggcacataggtgagtagggaacccagcgtgccgagaatagtggcgagggctgcccagacttgcccagctgggctgtgtccagtcacttgtgaccaggggtcagggaggacacgccttgct

SEQ ID NO: 59 - DNA, 2300 bp, Homo sapien
ccagctactccggaggctgagacgggagaattgcttgaacccaggagacggtggttgcagtgagccgagatcacgccattgcactccagcctcagtggctgaaggagactccgtctcaaaaaaaaaaagaaaaaagaaaaccacaaaaacatcgaaataaaataacaccaatggctgggcacattggctcatgcctataatcccagcactttgggaggctgaggcaggcggatcacctgaggtcaggagttcaacaccagactggccaacatggtgaaaccctgtatctactaaaaacacaaacatctgggcgtggtggcaggtatctgtaatcccagttactcgggaggctgaggcacgagaatcgcttgaacccgggaggcggaggttgcagtgagccgcgattgcaccactgcactccagcgtgggcgacagagcgcgactccgtttcaaaaaaaaaatgaaaagataatacccacaagctccacacccaggaggtcccatgcgtctgagtgtttgctttctgggcttttcatcacctggtcctctggggatatgctgaccgaccctgtgtgcctggcaggtgtcaggcactgggggtcggggaggagagagtccaggagcggtggccacacacaggtcgctgacggtggggggccagggtgggggcagactaactttggttttcaggaaaggtccagagaaaacacgcccaaacccagacccgaagcatgagcagggggagggcaggtgaggaggccagaggcggggcatgtggtgtgggtccattggacggtgtgcagggccctgtggcttgacaaagggatctttcagcaggaagcggaggcgtaggagcggccagaggccagcgtgcaggacagaggccacaggtcagagcagcagaggctggacagagatgggcagggcaggtccagtggggctgcgtgggcctggggaagagagctgggggtgctgcctgaggagctgtgggaggctcctggagggctccaagcaggaggccaccagatttcatgaagacgcccctggctaggacagggtgctaggctgcagggggagcagagggagggatttgggggagaatgggcgggtcgaggggggtgagaagaggcgctcagggacgtggagatggagctggaggcaccggagctttgggtggattcgccctgatgcgtctggagggatggctgggctggggaagctggggttccctgagtggggtccagggggccgaggggtgccaggcagggagaggctgggctgaagcctgaggcaggtgctcctgctgggtgttgcctaggagaggagaaaaagccccgacgccagaaatggaggagggaggaggacctcggaggggaggaggagggtgcgcagaaccaggagaggcagtttggggagcaaccgctgcggagcgcgcaggacccagaggactcaaaggggacctggagggtgacgaggccttccgtggccgggggtgaggaggagggaagccgcgcgggcggagaggcgctggtgggtcccaggttggaggctgtgggtctgagaggcgaagcccaggggagcccggggccaccgctgaaaaggatggcagctgagcgcaggcgagggagaggcgcgcgtgtccgggacagaccgcggtgggagctcgactccggaaaccggcgggcctggggctgggacctacagggaggcggacgcggcacagccagggaggtcggtcccgcgggccccgccccgccccccagcctggagcgcccccctccggccccggtccgcagtggaggcggccccggaaaagccagagggtcttggaatggagggcgggacggagccgcctgcaacgcccgcgacccgcgacccggctgcccgcgggacccccggctctgaagcggggacggccggagcttccgcctgcagcccaaactcccaggcgcccggcaagagtggcgggcgcggaccctttaagaaggccggggggcgtggcctcggggcgtggcccggggcgtggcatcggggcgaggcttcgggggcggagcccaggcagcgccttcgcggagttgccggagggtgcggccgcccagagcgcaccccgagcgccggcgagcggcgcggtgagaccctcgtgcaggtgagcccggcgcacggcggcccagaatcctggaccccaggagaagcgtctacggccccgacaggtgggcgtggcgaaatgccacccgggccctcctcgcgctcccagctgggtcacgcctcagacccggggtcctggacgcctgcccccctcc

SEQ ID NO: 60 - DNA, 2300 bp, Homo sapien
gccaccgtcctgcccgtctgctcagcggtgtctgtttgcaggggctccgcgcgtggccgcctccctcttcctgggcacgttcttcattagctccggcctcatcctctccgtagctgggttcttctacctcaagcgctccagtaaactccccagggcctgctacagaagaaacaaaggtatctcccggaccagcacctgccccacgggagggcacagggcaggcggcatccagccgtggagatgggcctgagactggagtgtcccaggccagagcaggctggcagaggccgggagggagcagggcctgtcctgtggcttttgggtcccggtgtgagaaggcccgtcacttcccggaaacagccgtgtgtggatttgaagggtcgaagcaccaaggggccttcctcggggcccagaacctctgctggagccctcttccggcagaggcgtctccccggggccctcagggcatcacgaggggcgagtggagcggggctgggtggctctcggcagttggacttgcctgggctcctccagcagccatggtcccccctcccctctcctggggtcagggctggccaggctggtgcagggcccacaccccagcctacgccacgccgtacacacggtcaccccgggcctgggcactgaccccttcccactggagagacggccttgtgactgtggtgccttcaggcgggggcgggttctgagcagggtccgtggtgcctgccctcgttgtccagggccggcccccgcagggtccctgccaggcagatggtccagccagcagttcggaccccaaggtgagcacttggccagactgtgatagccgagctggggcctcctcccaggtctctgggcagccccacctggctgctgtgagacccctgtccatccccctcaacctctctcggggtctcagggcccagcctccagtcgggagcccgctgccagggtctcctgcacagccaggcaccgagagacccggcctgctcagcatctctgcctatgggcacccttggagcagagcagggctcagggcttggtcagccctggtggccacgggacgagaagccaggttggccacgatgccacggcacccccatcgcgggggcaccatggaggcagaagcccacggccgtggggctcaaagccacctcgtgcctgaggctcctcccgggagggtgggagggcagcccttcccctgggaccctggagcctggggagacgcttctcatgaggggggcttgtcccctctgctgaggcgggaaggtgggtccagggagcggggactcacctggggtgctagggaggcccccgcacctgtgagtgccccggaggaatgtggcaggaccgagggccaggctgatgcaccgcagggagaggttgggggagaccctgcagccccggggcctctgctgctccgaggacgccgcactgggctgaggctgaggcagctcctcgctctgctgtcccggacgctgcactgggctgaggttgaggcagctcctgggctccagggtgactctccgctttctcccccacagctccggccctgcagcctggcgaagccgtaagtaacccacatcatccgggctgagcgtccctggccgcgtgtgcctgtgccaggccatcccgagtcctcactctgcctttctctccttttcaaggctgcaatgatccccccgccacagtcctcaggtaacagcagctgtcgcatccccctgtggggtttcccatctctgggccagtcccagggtgctctgtgggtttgtccccaaacgggtttgcctggctctggatctcggccacccctgcccgggtccccaggagacccacccacaaggcagggccagggccggatttggctggtgccccctgctctggatctcagctggatttggccggcgccccctgcccgcccccctttaatccccgtgacttccatgctctttcctgttcccgagacgtggggtctgcaggaaaggaggacccaccacgacagggcagacccccaatacctgctcctccttgaagtccagctccacccgaggacagacgcagccggcctccgccaggccctcctgagcagccatcgcttcagtggtgctgggtcaggcggacccaagagtcagcccggttaggacccattttatgtgcggggccacagacacaggctgagtgaccggcgcacagccacacagctccaaggccatgagcagggctcacccggcctccgtccccctgtgcagaagtctgtcatgggggcaggtgaccgtgcctttaggggacagaccgtt

SEQ ID NO: 61 - DNA, 2300 bp, Homo sapien
cggcccttggtgaacttggggctgagatgccccagctgtacctccaagggccttggcactcccatcctgggggtccagccctcccatgatggaagaacccagaagggctgctcctggggactcaggggcctcgtgaggagggcgtggtcaagacggcggctgtggcagccagtgaggctgggcgcgggggtccgaggctgggcgtgggggttggggagcccacaggaaggcagtgatgacatctgaggcacacgcagggtaggaggaggagggcaccgctctgagggagaacagaggggctgggaggaagctgagcaccttggggtcctcatcgtctgatgctgaagccctggtggctgggtgagaaccactcccctggcaccccatggcagcaagagtgctggggccgtggcgtctcctgtgagggattgtgtaccccaggcactctgtgggtgcaggcagctgtgcagcagtcacggtgcccatggaggggccaggccagcgggtcgtgaagtccaagggccgaggtggccccatgcacaggcgcagggtggggaccgtctggcgcgcgtggggaggggccgggcctgcggtgttggatacgcttccccctgcgtgcggccccaagccaggtcacgtctccgctcggggaggcagcgggcacttctggggacagtgctgcgctggtgtttggctccctgccgtggactccgttcttcggcctccggggcagagactctcagacagagcctcgctgaagtcgcccgagccctgtgccaggagatgccgggagacagaggctgcccccagtgctgggagagcgcagctccaccctggtaggactgagcgggtggacttccattcttccaagaggtgtgtctgcagagtgacccctgtcacaaccgtgccggggtctcaggcccactctccaccgcggggtccccgtgtcgccgcggcccgtttgtattcagatcagtctgtgaggaagggtcgaggcgtgtggtccacccgtggcccgcaccagcagccgcaccgcagtcggcatcaagagtgtgtctactcagctctgggctgagtgttggagatatttagaaagtcaaggagtaaaagtcaattcctgtccttaaaggcgccctggccggtgggcggaaatgaggcttcaggcgcagcgtcggcctggcggggggatgaggcttggttctgcaggatcccccgagagagacccgggggagggtgccagggtgtggaggtgacagatggaccaagggtcgggatcagcttggggcaggaggctgtgctgctggcgggtgggcctatcctgcttgggcggcatgagggaacacggggtgcgaggcagccgctccaggcactgcagatgggggtcttgggggaggcgtggggggtcctgggggaggccgtgggggggtcctggggaggcgtgggagggtcccagggaggcgtggggaggtcccggggaggcgtgggggaccctgggggaggcatgcgggggtcctgtgggaggccatggggggggggtcctgggggaggccgttgggggatcctaggagaggcgtggggggggtcttgggggaggcctggggcaggcgttgcagtgggggttcttggggagtctgtggggtgaaggctgggtggtggaagccgggcccagcctgcagtcctgcagagcacgagtccctccaacaggcctgttcattctggatgctgccgcctaccactctctgaagtacgcagtgtggagtactcagggtcggggtgctcagggccggggtgctcggcgtggagtgcagcgtggagtactcggggctggggtgctcggcgtggagagtgcagcgtggagtactcggggccggggtgctcggcgtggagagtgcagcgtggagtacttggggtcggagtactcagggtcagggtgcgcagtgtggagtactcagcgtggggtgctcacggccccgccatgctccctgggggtgtccttgtctgccgcccacctaccctccagagcatgttagtatctggaatgaaagttatctcaccaactcaaatagagaatcattcccaggagacccagctggtgtggattttgctttggctgacatgcccgtcctctgccccacgcaggctgttacaggcgctggaacgcggacgggagcgccagctgcgtccgctgtgggaacggaaccctcccagcctacaacggctccgagtgtagaagctgtaggtctgcccggctccccccggctcccttctcacagctccagctgtgggagacactgtgggag

SEQ ID NO: 62 - DNA, 2300 bp, Homo sapien
cttaagccccggaggtcaacatggcagcatgcacctgtagtctcagctactcgggaggctgatgtaggagtatcgcgtaagccctggaggtcaaggctgcagtgagccacgatcccactactgcactccagcctgggcaacagagtgaaaccctatgccccccacccctgccaaaaaaaaaaaggtatatgttgcaactccacccaattaaacaaaatgggcagaagatgtgagtaggcacttcagaaagaagatatataagtggctaataaacacatggaaagatgccatcattagtcttcagggaaatgcagattgtaacgacacagagatactcctgcacatgcacggacaccctgcgtgcacccacatcgccagtgggagggtatacagcacagccactgtggaagacggctgcagttccttagaaagttaaacgtgcacctccctgtgagccagccactctgctcccaagagaaatgaagacagatgtccacatgatgacatgtgccaggaccttggccgcagctccatccagtcaccaggaactgggagcagcccaggcacccactggcaggtgatgggcaaaggcggtgacgtttggccaacacagtggaaaatcctccgactgtggaaaggaagaaagtgcggataaaacaacatggaaggatctaaaggtcagtgtgtgcaacccctttgtgtaagaccctagaagatacagctgcagtctggtcagctcctggctgccgggagcccgggcttgtgggggccgcagcgagtgctggcagctgtgtgggaccgggcaccgtcctggctgtggtggcagcttcaagggggtggtcacactcacccgcttgtgtactttacacggatgtggtttattgtatgtaaagtagatctccatgaagttgactaaatagcagatgaaagtgttgattgaaatcttggacttctggttcctgaatcaaaatgatgttttgtgacttaatgtggccctcaggatgccctttaaccagagagggagcagaagggtctgtgatgtctggagttttccactgagcaggggaagacggtctctgctgggcaaatgttaaagggacaaaaggacaaactaagacttgattgcactctgtgggtggggcgagcagcatgtctgtgacttcaacacgttccatctgaaaggatttcacatcagagaggaggagctgaatcagaggagagcatgctttttttttttgagacggagttccccttgcacaggctggagtgcagtctccgttcactgcagcctccaccttctgggctcaggtgatcatcccacctcagcctcctgagtagctgggacctcaggctcccaccaccaggctcgactaattttaaactttttgtaaagacgggctgtgttgcccaggtgggtctccaactcctgagctcaagcattccgaccacccccaccttccagagtcctccggcaggctcacacctgggcagcctggtcagtttgtgaggccatgacctgaatccagcatggaatgggtgacagagtggaccgtccctgtgcggagagtggaccgtccctgtgcagagactggagctgtgtcctccagggcctccgtctccctgctgctcacagcccttgtcccaggaccccggcctaggcccatcaagaggagccccacaggcctggctgggcctcagcccccctcggggtaacttgccagggaggcccctgagccagtgcagtgacaccacttgaggatttgtgcgcctggcaggcgtttcctcccttaggaaggcagggccatggtaacaggtcctgtggctggaagtgcaggggggagagagggggtttgtgcgggaggaccggtgtccaccaagtgcagcctgggccactgagctccgtacctggtccctgagcaaaggccgggccgagggcccgtatcccagcgagggcctgtatcccaggcactctcacccgcaggaggccaggaggccagctcgggggaaacactcgtggagacagcccctccaggacgccctgctcgacagccaggggccggcaagggtgtggacagagggcccggaccggacccagaccccgcaccgtaggccacggcccacctgggttgccctcgcgtgaccacggcctcacctgctgtcttcatctgcaggactgggccggggtctgcagggctcagctgagcccatgagctcccagagctaacccctgaacacccaggcgggcaaagggctgatgtcggtagtccccatcctggaggggcaggtaaggccctgcctac

SEQ ID NO: 63 - DNA, 2300 bp, Homo sapien
cggagggatgaagagagacagcatgtccgtgatgaaaagactcaatcctgttaaaacatcggctctgccagtcaaaatcgcagcaggcttttttgtaggaattgacacaatgagtctaaaatggaaacacatgtgacctggaattgccaaagcaattaatcaaagtggagctgatacgtgccctgatttcaaagtttctattctacttacagcttcagtaatccagtcagccgcagtgtccctgaagaatagacacacaggtgagtggaacagaatagaaagactggaaatagaccccacctctatagtccattgattttcaatgaagatgtcaacgtaattccacatggaaagaaaagtctttttagcaactgtttatacataaggaaagaaatgacgcttgacctgcatttcaccatacacaaaggtgactcagaatgcaaaagctaaaactgtaacacttctggaagaaagcagtaaatcttagtgaccatgaggtcaaggcagagatttcttaggacataaaaaacaagaaccacaaaaggaaaaatggatgcattcaattttattaaaaatttcattaaaattaaaaacatttgctcttcaaaagatgtccataaaaaaatgataagacgggggccgggcaaggtggctcatgcctgtaatcctagcactttgggaggccaaggcaggcggatcacaaagtcaggagatcgagaccatcctggccaacatggtgcaaccccgtctctactaaaaatacaaaaaattagccgggcgtggtggcgggcacctgtagtcccagctactcaggaggctgaggcaggagaatggtgtgaacccagaaggcggggcttgcagtgaactgagatcacgccactgcactccagcctgggcgacagagactccaattcaaaaaaaaaaagatgataagacaaaccacaggatggaagaaaatatttgcaatacataagtctgatgaagaatatgtgttttagctgagcgtggtggtgacgcacacctctagtctcagctactcgagaggctgaggtaggaggatcacttaagccccggaggtcaacatggcagcatgcacctgtagtctcagctactcgggaggctgatgtaggagtatcgcgtaagccctggaggtcaaggctgcagtgagccacgatcccactactgcactccagcctgggcaacagagtgaaaccctatgccccccacccctgccaaaaaaaaaaaggtatatgttgcaactccacccaattaaacaaaatgggcagaagatgtgagtaggcacttcagaaagaagatatataagtggctaataaacacatggaaagatgccatcattagtcttcagggaaatgcagattgtaacgacacagagatactcctgcacatgcacggacaccctgcgtgcacccacatcgccagtgggagggtatacagcacagccactgtggaagacggctgcagttccttagaaagttaaacgtgcacctccctgtgagccagccactctgctcccaagagaaatgaagacagatgtccacatgatgacatgtgccaggaccttggccgcagctccatccagtcaccaggaactgggagcagcccaggcacccactggcaggtgatgggcaaaggcggtgacgtttggccaacacagtggaaaatcctccgactgtggaaaggaagaaagtgcggataaaacaacatggaaggatctaaaggtcagtgtgtgcaacccctttgtgtaagaccctagaagatacagctgcagtctggtcagctcctggctgccgggagcccgggcttgtgggggccgcagcgagtgctggcagctgtgtgggaccgggcaccgtcctggctgtggtggcagcttcaagggggtggtcacactcacccgcttgtgtactttacacggatgtggtttattgtatgtaaagtagatctccatgaagttgactaaatagcagatgaaagtgttgattgaaatcttggacttctggttcctgaatcaaaatgatgttttgtgacttaatgtggccctcaggatgccctttaaccagagagggagcagaagggtctgtgatgtctggagttttccactgagcaggggaagacggtctctgctgggcaaatgttaaagggacaaaaggacaaactaagacttgattgcactctgtgggtggggcgagcagcatgtctgtgacttcaacacgttccatctgaaaggatttcacatcagagaggaggagctgaatcagaggagagcatgctttttttttttg

SEQ ID NO: 64 - DNA, 2300 bp, Homo sapien
atggtggctgtggtgaacggtgctgctgagacatggtggctgtggtgaacggtgctgagacatggtggctgtggtggacggtgctgctgagacatggtggctgtggtgaacagtgctgagacatggggctgtggtgaatggtgctgccgagacatggtggctgtggtgaatggtgctgctaatgtgtctagaattggtggattcttggtctcactgacttcaagaatgaagccgcagaccctcgcagtgagtgttacagttcttaaagatggtgtgtccggagtttgttccttctgatgttcagatgtgtttggagtttcttccttctggtgggttcgtggtctcactggcttcaggagtgaagctgcagacctttgcagtgagtgttacagctcataaaggcagtgcagacccaaagagtgagcagcagcaagatttattgcaaagagcgaaagaacaaagcttccatagtgtggaaggggacccgagtgggttgctgctgctggctccggcagcctgcttttattcccttatctgaccccacccacatcctgttgattggcccattttacagacagctgattggtccattttatagagagctgattggtctgttttgacagggtgctgattagtgcgtttacgatccctgagctagacacagaatgatatttacagtcctctagctagacgtaaaagttctccaagtccccactagattaactagacacagagcagcgattggtgcatttacaaaccttgagctagacacaaggtgctgattggtgcgtttacaaaccttgagctagacacagagtgctgattggtgtatttacaatcctgtagctagacataaaggttctccaagtccccaccggattagctagatacagagagtgctgattggtgcatccacaaaccctgagctagacacggagtgctgattggtgcatttacaatcctccagctagacataaaagttctccaagtcctcacccgactcaggagcccagctggctttgcctaatggacccagcgcctggccgcaggcagagctgcccaccagtccagtgccgtgcgctacactcctcagcccttgggtggttgatgggatcgggtgccgcggagcagggggtggtgcccgttggggaggctcgggctgtgtgggagcccacgggcgggggtgcggggggcctcgggcatggcaggctgccgagccctgccccgcgtggaggcagctgaggcccggcaagaattcgaacctggtgcaggggggctggcagtgctgggggaccctccacagctgctggcccaggtgctaaacccctcactgcccagggccgggggtgccggcaggtgctctgagtgcggggcccgccgagcctgcacccacccagaactcacgctgcatgcagccccggttcccgcctgcagctctccctccacacctccctgcaagcagagggagccggctccggcctcggccagcccagagaggggctcccacagtgcagcggtgggctggagggctcctcaagtgtggccagcgtggatgctgaggcccaggaggtgctgagagtgagtgagggctgctagcatgttgtcacctttcactaagacatggtggttgtggtgaacaatgctgctaagatatggttgtacaaatgtctcttggagtcctggttttcagttcttcagggtgtagaaccacaagtaaagttgcggggtcatagagtaattctgtgtttaattttgtgtgtgtgtttagttttttgagaaactgacatactgtttttcacaccattttatattctcagcagcatgcacaagggttccattctctccacatgcgtttgccaacatttatttctgtttttttggtaatagccattctaatgggtgtggagtatttcattttgattttgatttgcatttccctaatagtgacattaatcgatagtttttaattgaagtatttaatttaaccatttgtatttaatgtaggtgttagagtgtttgggttggagtctaccatctttatgttcgatttctgtttttccacctgcttttccctgctcctcctttgcttccttttttgtaggtagagggatcaagttgtcttcaattttatctcctctgctgactttttagttctgcctctttgtgttgttttttaagtggttcctctggagattaaatgtacttcacagaacctcagcgagcggactccagttatattccgtgctcttgtcggcacgcatttcacttctaggtatgctagaaaattctacaacacactt

SEQ ID NO: 65 - DNA, 2300 bp, Homo sapien
gagccaccgcaccccaccgactaaggcaagttttagagcaggagtgaaagttgttgaagaagctttagagcaggaaggaaaggaagtacccttggaggagggccagacgggcgatgtgagagatcaggtgtgcggtttcaccttttgacttggggttttatagcctggcaggcttctggggtcttgcaccccttctcccctgatccttcttcagggtgggctgtccacccatgcagcatcttgctagtacttgggcgggagcatgcgccatgtgttccctggagggagggagcatgcccggtgtgttcactggagggagggagcatgccccgtgtattcactggggggagggagcatgcgctgtgtgttcactggagggagggagcgtgcgcgttgtgttcactggagggagggagcatgtgccgtgtgttcactggagggaggtagcatgtgccgtgtgttcactggaaggagggagcatgcgctgtgtgttcactggagggagggagcgtgtgcgttgtgttcactggagggagggaccgtgcgccgtgtgttcactggagtagtgcccatgctcacctgaggcgttcttccgttacctgtcaaacgtccctagaaggtcatagaacggttacacgccgccattttgcctctcagtgcacacgcttgagccaactcgcccagttcctgagatcgtatcgggaagctgcccatcaccggatttcatgtgttttctagctattgggagcctgtctttccctggcgctgggtgcaaccagttcttttagacagttaacagccacctgaccatcacctgatggtggcctgacattcccggtggggggatgggcccgatcctgccctgctcacgtctgctgagccacctacggcaaccgcccgactccggtgtgctgagcccacgggtaggtgggcagcgactaccatgcatgtcaacaaagggggatgtctcctttacaccccatcaaggggtttgcggtatttgttttctatcaaagcacgagagggatctttaggtagagaggccccagacagttcttattgggcccttaaagctacgtttcacgttggcttcctttgcttgctacgaagatgaccagcattagctacacggatgcagtggaagctccagccagccctcggggctgtgtttaccgaggttcagcagcgtgagaaacccgccagtggaccctcccgcctccccttttcagttactgctgcctgggcggctggagttacggtgagcgtgggtgtggtctacccactgccccagccggtggttgcttttacagggttgttttgcaagatgttacttatttaaaatcacagtgacctgaggcatcatttttttcttgaaaccagttctttgttgttgttgttgagacggggtctggctctgtcgcccaggtagagtgcagtggtgcgatcatggctcactgtagccttgacctcccaggctcaagagattctttcacttcagcctcccaaatagctgggaccacaagtatacgtcaccaagcccagctatttttttttttttttttttttggtagagatgagatctcactctgttgtccgggctggttttgaactcctgggctcaagcgatcctcccaccttggcctcccaaaatgatgggattgcaggcctgagcctccacacctgccctgaaaccagttcttctaagggaaaataagagtggtcaaagagtgtatagcacaatttaaattctcactaaatttttcattgccttgtagaaattttcatcccattatttagctttttggctccaatgagattttcaaaatagaaaatgcatgtgtttagttactaaggcataatttacatgcagtgaaacacacagagcttgtgtccagttcaattgttttgacaaaggattcaccagactcctgtcgtgatgtagaatctgcctgtgatccatggagattgcctcgcaggctgctccagcgcccgcctgccgcgccagacaggagcgctgctgtgattttaccgacactctgagtgttaggagtcacacgtgcgggcggttttgcgtctgccacggctcacgcagagaactgttgttgagcttcctctgaggtgctgcacaaggagtgggtgtgggatgcgctgttgcgtgctcgtcgtctctgagggcgcccgggtgggtttccgctgtctgaagagttgggcctatttttgtgcacgtgtttggcgggcgtgtgttgtttctcttgggaacgtgcccggggggaaggctgcatcccaggtgtggaagtccc

SEQ ID NO: 66 - DNA, 2300 bp, Homo sapien
ggggacacttgtggaccaagctccagcataaggacacggtcacccagggccacagccccaggccaagccgaggggtagggacttgacactgacacaggcagcttccgcagctgtgaaaccacccgggaaacgctggtcttcaggaaatagtcaagaaagtggacgccaggcatggtggctcacgcctgtagtctcagcactttgggagggccaggcgggaggactgcttgagcccaggagtttgagaccagcctgggcaaaacagacccccgtctctacaaaaaaataaagaaatatgtgtcaaggcatggtggcacacacccgtggtcccagctactctggaggctgaggtggaggatcgcttgagcctaggaggtccaggctgcagtgagccacgatcatgccactgcatccagcctgggtgacagcgtgaaatcctctcaaacacaaaaaaacaaaaaggaagtggaaacactggctcagctccacaatgagttgccgcagacggcaagagcctgtggcacagactggactccgagaaggggaccgcgactgtgtcctccccgtggtcctcaaacgtcgcccaggccaggttcctcttaatgggaccgacacagaagctgcacgtccgcgggcgcatggccggaaaccctgcagctgtcagcgaacccctggtgctgggcgcccacgcccaggtgtcccacggccagacactggtggcatcaactcctccagaggccctgagggaaccctgggatggaccctcaggcgaacactgtccctctaaagagaagacacaaatgtgacttccccagctgtccccaatactgtttacaaaacatcctcacgctgttaagatgggggctttatttccattgaaatctctggcatttaaacttgggatggaacccggaggcggcgtccatcaaggaggaacaaccccaaggcgcatgcaggacgggcctgggagctcccgggagcaagggagctggggggtctgggggcctgggaggttggggggtctggggggttggggggtctgaggggttgggggtatatggggggttgggggatctgggggttttggggggtctgaggggttggaagggtctgcggaggttggggggggccgcgacacctgcagcgcccccccaccctgcgcgctggcccagctaggagagggcccggggacaccgacaggattgaagcctttgatgagcggacggacgtccccagttccttcggggagctcctttaaacatgtttgccgaaagctgcgggcgccgcgggacgcacagagctgtcttttctccgagggtggctcagaggcagagccccggaaaaacccacgcgcccggcctgtggggcagcgacgccgcccagaccccggggccgccgagactcacgggggagcgtcctgagaccgcagagccctgacccgtccgagaggcgaagccccgggagccctctgggtccgagccgtcccagtcccgcacccaaggcagggtctctcccgccgcgctccgacaccggccgccgaggtcccagcactggcgccggccgcggacctggggcgcatttggcggcggctcgcgaggcgctcggggcgctccgtgggtctggagggcgctggccccgcgcgcccgcggccaaacctggtgcagccgcgccgccttctccgatgaagccgaagccgccccggccgcccccaaacgctccgcctccgcctccgcctaaaccggcggaacgctaaggacgccgacgcttgtgcggtcgcccgggagaccccgacgacgccccgccccgtctcccggcaacgccaagcagccggcgcgcgaggaatccgggggaatgtagtccctccgtgtcagggacccgagacatgcgctggttcttctaggactacatttcccagggcgcttcgcgccccgccccggcgccccacccacggccgcgcgcgatggtaccaccaggcgagggcggctctcgcgcgggccgccgggagttgtagttttctttgggagctgcggggcctggcgccggggccggggcggaagaaagactacaagtcccagggggcgcggcgccaccgcctgagggcggggtgtacgaaagagaaacccggagggcgccggggtgagtgaggggctgggggcaggcgtgagggtagcgggttggggcgctggggtccgtctgggcggccgggtcggcgcagggagtgcgagaggcagacaaaggtcggcggccctggcccggcccgagggacgttccctgcgcgtcccccattgtgcggcgcgcgg

SEQ ID NO: 67 - DNA, 2300 bp, Homo sapien
cccatggggtcctggctgactttgcctgcggcgtcaaagggcttgaatctccgtgtagccaccgaggcctccactcctggagaccccacccgtgatcccacctcccccaggcagatatcttggctgcagccattgtccatcccccggggtcaccgtcccctccccgccccgatgctctgaccacccgggggctcctcccgtatcctttgggccttcgggagaccccactccaccacgggggcctggatacagggtcttgccacctccctccccagggaggggcctgggagagtctggaatgggatggtcgcaggcagtgggggccctcagggtaggggcctgatctgtgcatttgggcacaaattccctgggcgtaaatgtcaccggaaagggatcccaaagagggctcttggacctcgagcaagaaacagtttgggggagtccactgataaactgaaagcaagtttaataggaaagtaaaggaataagagaagggctgccccataggctgagcagcggcctgggctactccactgagaatacttattgttgtttcttgatatgtactaaacatggtgtggattattccggacttttctgggaaaggggcaggcaattcccagaagtgagggttcctccctcttttagaccatctagggtaacgtcctggcgttgccgtggcaactaaactgtcctggtgctggtgggcgtgtctctcatgctaatgtattataatcagcgcataatgagcagtgaggactggctgtcttggttttggtgatttggggccggcttcttcacagcatcttgttttatcagcggggtctttgtgaccagtcttgtgccaacctcctatctcatcctgtaactaaggatgcctgacctcatgggaacgtggcccagccgggctcagcctcattttacccaggccctgtgcaagatggagttgctctggttcaaaggtctctgacataaagacctcaaccaggctggtctcacgctgccaggacagctggtgagtgcaggtgggcaggggccactgccccagctcccgtgggcaaggctgagggtgaggggttccggagcgttccacattctccttgcaatgctggaagcacgggtgtctcccatcccgacacgcctcattctgtctgcagctcacagggcccggcttctgcagctcacagggtccggcttctggaaattctgcttttgcattttgtactctgtccaggggccaaaacccaggtctggaattggtgtggtccctggtggcacaaaccagtcctggctaagaggccggcccctctcactccactgaagagacagggggctgcatgctgagagggccaaggccaaaaggagcctgctgctgttcacagccccctgtgtgcctggggcccactgttcacagccctctgggtgcctgggggctgggctgggggctactgcaacccttggcctatggtgtggtcgagggaaggggaagggacagggctttgagaaacacggtgatgggggtgagggtggggactggggacggtgggcgtggaggtggaggccctgtgggtgctgggcagggcagaggagctaggccagatgctgtgtttgtgtggggtgctgagtggccagcctaaaaccttctgagaaagtaggatccagcacagggagcttcagcttctctgatgggaggcaggagggggtcaggtgggagctgcagggcgtgtcgagccggccctgccctgggtccctgcgggccgcctggcacacaggagggcggttcctttcctgttggacccggtctcacttcatttgcccacgttaattggggcgcaggtgcagctctcgggcaaacaaaggtgcggtcgccaggtggacttaaccctttccctggcactggcggggcctggggggaggcagcaggaggggcggccgggtggtcagtttgaggacctggccccacgtgcctttgtgggatggtggggaccccacacccccgctggctgggctgggatggtcgggccctgggcggggcaggggctgcacctgggcctctgggccacctgcctggctcggtcgcgccccttctttggtttccagctaacgacgcggcgcccaccgagagctgggggagcccagggcggggagggcgcggccggagcgagcgccgcccgggaaacccgagccccgccaggtgcgcggggacaaaggcggtgccgggagggcgggtcctgggggtccccctgccccctctgcggtgcgttgggagctcccgtcctcctgcgcacactcagggaaag

SEQ ID NO: 68 - DNA, 2300 bp, Homo sapien
aaccaggaggacggtgggagacgccccccaccgccccgcttccgagagctctctcttccttccagggactccccagggacagccggggccccttcttcccccacagctcaggccccagggacacagagcggggaacccccaggctgccgccccggcgtgggtcggggaggcggctccggagcgggcaccacactctcgaaagggtggcttctcctcccggctgctgaaaaaccacacaggcaggcacaacaacagacgcttacgcccgcatctggaggccagaactccaaagccacagggcaggcagggctgcacccctctgggggctccaggagaggaccctgtctgcctccccagcccctgccagctcaggcatcagtggctgtggccgtgtcacccatctctgccccccagtcccacggcgtctcccccacgtctgcgtctcctctctccacctccctctcaggggggcagaggccattgattcagggcctgccctgggtgatgtcactagagatcctgacgtaaccccacctgcaaagccccttcttctaaataaggtcacattcgaggtttcagggctatgatgtggttgtcttttgggggcaccaccagccccctgcaaggggaccctaagcacagaggccctcgtgacccacgcaaagctctgaaggacacggatgggtaggggacacgtggctggaggctcagagtttgaggcagaggggatcagaccgtgccatgggtcatgccaggagcccaggactcccagacctcgtatcattaggtgttttaaagagaaggcgagggcaggccaggcgcagtgactcacgcctgtaatcccagcactttgggaggccgaggcgggcggatcacctgaggtcaggagttcaagagcagcctggccaacatgatgaaaccctctaaaattaataataaattaataataaaataattataataatatagaaaataatatataaaataataaatatataaaatataaaacaaaataaaaataaaaaataaaattaatattaaaaatacaaaaattagctgggcactgtggtgggcacctgtaatcccagctactcgggaggctgaggcaggagaattgcttgatcctgggaggcggaggttgcagtgagccgagaccgtaccattgcactccagcctgggcaaaagagtgagactccgtattttgaaaaaaaaaaaagagagaatgtgagggttaaacaaagacacacagagatggagaaagggcagccttacatcaacacgggtacattgcaaacacctgcagaggtgggggaccagctggatgccagagcccactgccgcctacgggctggggtgcctataggtatgggtgggagcggcccgggccacacggcttcaggatgaggccgtttgtttggcccttgttcccgcagaaggtaatcgtgatgttcctcggtgtttttccccgcagagtgttcaagtcaggtgtcgggcaggctgttcctcacggcccaaacccctgcggaatgcttcactttggccgaggtctgtgacacagcgaggggcttacagaaaggtgcagtttggaccgatagatgtgagtccccctctggggggcactcactttgtggagcccccggttcctgtttgcagaggggggcacagtggcacctcgtccgctgtggagtgagaacagggacccgaccacgtgaagcacagagaatgctcagggatcggcagccgtgtatccagccaacatcaccagggtgcacgcagagcctggcccgggccaggtcctggggtgctgagcatgggtggggcctgagagacggctcagggaccatcctgggagggccgggcggaggggcagcaactggggctcaggctcaggcagtcccagcagtgactgggaggcagctgtgcccatgaagctgtgcccttctccagcctcagccctcagcccggcttcccgggctggccccgccactcagcagcccctccccatcctccgaaaacccaagctcacctctgggttccggctgggtgggggttgccaggagacggttgccaggtcaccactgttgtttcctggcccaggctcccaggaccttgtgggctgggcaggtaagaagcgccggcggccaccagctggggtccagtgggctcggccccgccctcctacgccctgcctgcgggtcccctcgggaggctgctcaggagaggaggaggctggggaggggactggacagggatcgggtagggtggggccaggctgagcctgctctgcgggtcccggaccc

SEQ ID NO: 69 - DNA, 2300 bp, Homo sapien
ctccgcgcccggctgtccttgtgtcactcttcttcacacttgggagtccctctgatgatgcctgttgggcctgggcagcccctttggctgagagtcagtactttagaggatccccttccccagcaggaatcctgggtgctgagggcccatgagaaggagctgaggtctcccatttaatgcagagtcttgcacgcacacacctgctccgtgcctgcgcagggtccagcctcttccaaaagtcctcctgttctgggtggggaggggtctcagggctcctgacttcttccattcttgcccagcccaccctaggaagagggcgtgaggctctcccagacacaggtggggggcccagcctgtgttccgctcctccctgaggacgggtcccagtggccccacccgactgggtcatcgtgcagacggctgcctcagtttccccaccttcccctgcccgtgggcttcctcgttgtctccttccctcctgtcactcaggcggggcagggaggggcagacacaaaggcttcctgcgggtgagattggtgccgagctctgtgcccagcctggagcctcaggcctaccccagccttctccagcctcagagcccccacagcctctgcccaacactgccgtgtgctcccctgtctcctgggcgagttccttcaaacccttgaaagccctcacctaagccgggcacagtggctcacacctgttatcccagcactttcagaggccgaggcaggcggatcacctgaggtcgggagtttgagaccagcctgaccaacatggagaaaacccatctctactaaaaatacaaaaagttagctgggcatggtggtgggtgcctgtagtcccagctacctgggaggctgaggcaggagaatcgcttgaacctgggaggcagaggttgcagtgagcctagatcgccccattgcactccagcctgggccacaagaatgaagctccgtctcaaaaaaaaaaaaaaagttctcacctcccaagcagccccaagatgggtttgtttgctggagacagaggtagaaagatctgtcgaggaactggctgaaaattcctaagttgcaacatgggaaggtgttgctggagacagtgtcctgggggtcgggcctggcacccaggggcggccgcagaggaaccctgatggcaggtaccaggcggctgcacacagcccacagctgggctccggggtcagcagcggagacagagaagacccctgctcaggccaaggagccctcccaccctccattcttcaggcaggcgccccacccagcaggcctgacgctgcccctccttccagccggcacccaggccgagctcagccacacctgaagagccgctccggccagggaggacatgcccggcagagacagggtgcagagacagcctcgcccccacacggcgccaggccccacagctgccacagagacgggagccagccgcacgcagaggctcaagcccacggccctgggaggcgccctttcctgggcagggtgggcctgactgcctgctccatccaagcactggggcctcgggccgcgcggaggtcccacaggagggtcagagcggcatcttcccttcagggccctcgcccgggcaccccccggccaatggaccacagctgcacccggttcatccaccgccggggaccacccactcggacccgagccggcttcaagaggggcaagaggccaaggatccagcagaggcctcgggctcgagtctcaggtgaatagagcagccctgggtggcctcctacctctccaaggccaaggcctccctgggacgggtgccccatacccaaggaagtcagtcggcctcatggggcaggggcaggatccacacatggccatgccccgctgctccgagagaggggccagctgtgggcgccgggctctgcaggcacagaggggagctgtcgcgctccgcggcccagggttccgcctggctggcaccacccctggaagggcagcccctcgtctcccggcctgacaatggccccttgggtcacccatgacatcatcatggacattgtgacccctgccctccagggaccatccctgcgtcacgtctgcacccagcaccggcctcacagcccggcccctgccctgcaccaggccactgccctgttggtgaggagggtcggaggggcgacctccctgccccctgctccaagctccccacccccacctggaacctgccggcaggaagcctggccctggagggtggtcacggcccctccccagatgtaagcagtccccaggccgcctggtggggccagagctcgggct

SEQ ID NO: 70 - DNA, 2300 bp, Homo sapien
tggtgagtgggcggactgtgagttgtggtggaaggaggtggctgggtggacggcggtgcctgggggaaacagctgtgttgctctaggctggaagtggacgctggacatggtgtaaagctggtgtcacaggcaaccaggggcggggggtgcagatggaggcagctgcggttggctgggcgggtgcttggtgcaaaaatgtctgggccaaatgaagtgaggagggataggtgggtccatagaagggcagtgggcagggctgggagcaggaggacgaagtcgctaggatggatggcccagacttgggtgagcgatggacggcctcactcagggcacccacaggtgacggtgggcacggtgtgggattgtggatggattggatggatgtttggggtgaaggcagattgacaggtgggttgtacctgggtgggtctgtgagatggacaggtgggtgggtgtcaggcccagtgggttggggacgtgtgggatcttccccgttcagccacgaggaagagggtgggtttatgggacaggggtttggccctttaaaggacaggtggaaggtggaggcaggtgctgacgggtgggggctggggccagcctgggagcccaggtggccaggggcaggggcaagggcaggggcaggggctggagccagcctgggagcctgggtggccaggggcaggggcaagggcaggggcgggcgcaggggcaggggtggggcgggtgcaggggcaggggcaggggcaggcgtaggggcgggcgcagggacgggggcaggggcaggggcagactcacctggcctggaccccccccggcaccttgctggccttgctcatggcccgtgcccgtccccgaagggtgctgagcagcccgatcttggtggtgaggagcttgttgttgggaagctggtacagcagctgctctcctggaggtcagaggccagggctcgtgtggagggagcgcaggacctcggtccccacccctccaacctgccctgtgctccggcccaggaggcccctgcaggctgcccgcctctggtgccggctcccgctaccttcccggaagctgccgtagctgtctcggctcttgacctcacaccacttcagcgtgtagtcgtcccggcggctgtcatggatgcgctgccagcccttgcttttgcagtaggagctgatgctgcgaggggtgggggcgggggtgacctgggggccgaggcaaggggttggggatggcgggcggccagcggaggccgggctgggccccgggagcaggcggtgggtattcagtgggaccacgggcgcccagggccgctactcacattgtggccccgttgctgcctccaatgtagaagaagggccccggccgggtgctgtggggcgatggcttcccaccccccagcaggagcccctccaggagggcagctgagggcccggcggcgttagtgtcatccgagtctgcaggccggtggctgttcaggagcccagggggtccgggtgtggcagaggctctttctgccccctccaggtccggcccacagtgtccatctgcgtcgtggtctggctggcttggctgacaccggagtccctcctcctggctgctccccattggcctctcgtgggccgggcctgtgaacggggtggggtcccaccggggtggctacgggagctgcccactcagcccggacatggctcagccagtttgctcccagcccatttctccaataccctggacaatccccctggcccgtctggggctcaagttcagcccgagctctggccccaccaggcggcctggggactgcttacatctggggaggggccgtgaccaccctccagggccaggcttcctgccggcaggttccaggtgggggtggggagcttggagcagggggcagggaggtcgcccctccgaccctcctcaccaacagggcagtggcctggtgcagggcaggggccgggctgtgaggccggtgctgggtgcagacgtgacgcagggatggtccctggagggcaggggtcacaatgtccatgatgatgtcatgggtgacccaaggggccattgtcaggccgggagacgaggggctgcccttccaggggtggtgccagccaggcggaaccctgggccgcggagcgcgacagctcccctctgtgcctgcagagcccggcgcccacagctggcccctctctcggagcagcggggcatggccatgtgtggatcctgcccctgccccatgaggccgactgacttccttgggtatggggcacccgtcccagggaggccttggccttggagaggtaggaggc

SEQ ID NO: 71 - DNA, 2300 bp, Homo sapien
aggggcctcctccccaaacctggcgcccatacccatcgcttcctgtctcctcccctctgggcacagcaccccccaggccccgtgggacttattccccagcaggaccccttgccgcacccccagatggacacggggccacctcctcttggtctccatgctcaccctccccgccccctcgcctgacgccatctctgctggcaactcctgtgccatctgtgccgaaggccctgcctgaactctggctcagtgcccatctgcaccctccccgtggggcctcacagctgcccttctggacgtacgcaagggctgtccctcgcccggcccgtgggctgctctgctgtgtgaatgccccgtcatttgtgtcaccggtgagctgctcaataagatgaacaagtcacctccagcctcgcagcccaaggataggagtcacggggagccggggaggggccttctgcggcgagagggatgggagggtggacgtcacacccctgcagcccctccggggaccaccctgtgtggcaagctgctctccggctgttcaaagtgtcagctgcgccacggggcgggggggaggggctcctctgcccgctggccgcctcccacttggccccataaactgctcgctcctctaactctgtccctgcctctagatggatgactcacaccgtgtggtctgatgagcattctttattttttgtgatggagtctcgctctgtcacccaggctggagtgcaatggtgccatcttggttcgccgcaacctctgcctcccaggttcaagcaattctcctgcctcagcctcccgagtagctgggattacaggcgtgcgccaccacgcctggctaattttttttgtatttttagtagagacgggctttctccatgtgggtcaggctggtctcgaacccctgacctcaggtgatccgaggcccacctcggcctcccaaaatgctgggattacgggcgtgagccactgatggcgcctctttctatccaggggcccagaccccctcccagcctcggggctgaagatctccaggcctctcaaaggcccccaggcccagctggccccacccctttccttccgagcgtcggggcggcctggagctgcagagaccccttccttctctgcagtgtctgagggctgcctctccaaggcaggctcctacatcttggatttgagaactccggggtgtcacaaacagctaattcctgtcatttaccttggaaaaggaggaaccgccttacggggtgaggcggtggctgcaggtctcaaaagggtgttgaaccacatccacgctcacgttcccgagagcccccacccccagcattcatgggggtctccacctgtgctggacggcgcagaagcagggctgggcaatccagggaggcttcctggtggaggcagggtcccagaacccctcggtgcccacaggggaaactgaggctcagaaagacataggacagtctcccaagagctctgcgaggggctcctcctcaactccctccgggacctggatctgtctggtgtgacggatgaaggtggctctgagagaccgggccctgggtgcccgcgggggcggctgacactgtcccgaggaggcgccagcaccctctcgtctccccaccagctcctcctggtgcccctcccaagccccggggaacttcccaggttggcctgaggggggtcctggagagctgcaagcaagggggaggggagcccacaggcctgcagcccatggtgagtttcacacctgaagccagccaggtggggtgtgctgagccgaggggtccctgtccccattctgtggggttccccagcacggggctccatggttgaggctctctgggggtggccagaatttgtggagacctctcggggactcgcagataccacccggaggcagtgggatggaggagtgattggctgacccccgccctccaaggggcccccatgggacaaggtgctataaacgccgccccctgcactggggacaccaatgtggccgcagactttgcatagaaaacctttctgatccccgccagcctggtttccccgcccctgccggcgacctgcgggggaccgggctgtgtccgcagtgtctacaccccctcctcacacgcacttcacctgggtcgggattctcaggtcatgaacggtcccagccacctccgggcagggcgggtgaggacggggacggggcgtgtccaactggctgtgggctcttgaaacccgagcatggcacagcacggggcgatgggcgcgtttcgggccctgtgcggcctggcgctgctgtgcgc

SEQ ID NO: 72 - DNA, 2300 bp, Homo sapien
ttccccatccgtggccccaggccacagccagggaccatcatagctgcagcagcattcgacgccctgtgctgagggccgtgcacccagaggtgggaggtgtgagctgaggccatgctgtgctggacatgaaggcggggggacagctgggtatgtggtggcacctggcccttcagaggccccagccagctccagtctggtactggaggagcagtggccactcatgggctgccctgtgccgcccgcgacactactgtgtggagcggggagcccagctcctggggatgtggttcgagctgcaggctgccttacagaccttgggggtcctgagctctgggtcagtgtccagcctcctgtggccacgccacacccggttccatggacacagcagggctttcttggacctgtgaccttaagcccaggacaaggagacctgagcttcctgggcagcttcaagcaggaggggccgtgccccatcctggggccattgcagttgccagcaatatgctgggggtgccctctccatggtgcacgggccccactcactgcacctgtgggcagatgtggccacttaggccccaggagagcagtgttgcccaccaagacccccagttcacctgaacctccaaggaaccaattgcaaatgtaagctttttctcactgtcagtgggaaacccttgtgaacgctgggtggaaccttccacaaaatgccagaactttcctcctctgcccacctgggttggggtgtgcacatgcaggtacacacactgtctgggatgctctgagcccttccagggtcctctctacttgtggggacgtggggagggtgaccaacttagggaccctcagtccgagggcgggtggcctctccctccactccctccctctccagggccagcgggctccacggctgggaatttccccacgggtgggccgaggacaggcagctgtttcctgtgctcctgggaggaggggatttccagccccttccctgctgctctgttcctagaggcccctctccacttgcaacttcaaaaatgaacttttggataatcacaggctggtcacagttatttgaaaggtgcagaaagggcccagggagcccccagccccgcacctgctccccagctctccgggcagttcgcatcctctgggcaaacctggaacctgagaactgtttgcatagaaggtggaaacctgcctgcgtgcccgtgtgcgccaggccatccaggacccaccctcaccacctcctcagaggcctgtctccaaacactgccacatgggggttagggcttccacgcaggaatttaaggggcacagttcagccatagacacctgccgtgctcaggcacactcagcgtgggctgtggtcacgggtgtctttttttttttttttgagatgagtctcgccctgtcgcccaggctggagtgcagtggcgccacctctgctttgcaacttctgtctcctgggttcgagtgattctgctacctcagcctcctgactagctgggattaccggcgcccgccaccacgcccgaataatttttgtagttttagtagagacgggatttcgccatgttagccagactggtcttgaactcctgacctcaggtgatccacccgccttggcctcccaaagtgctgggattacaggcgggagccaccgtgcctggccatgggtgtctgtcttaccatggctgtggtcactgctgctcagagctagtcttgggcatacaagggggaccatgcttcagcagtgccacagccctgaaggtccagactgaggagttgcctctcctgactcagtgctgcctcagtttacccacgtgctccatggacctttttgctgagggtcgagccgcaggccaggccctactgtgccctggggtctgaacacggtggtcttgggcagaagaggtcagaaggcagaataagccaatgctgggggtgcccagaccccgcctttgtgcccagcccacagccagggtccccggcctgccaccttcctcctcccgcctcctctgccctcctcccctctcccctcccctcctccacagtccttatagccacaccccgcaaggaaaacccagactctggcgacagcagagacgaggatgtgcgtgggggctcggcggctgggccgcgggccgtgtgcggctctgctcctcctgggcctggggctgagcaccgtgacggggctccactgtgtcggggacacctaccccagcaacgaccggtgctgccacgagtgcaggccaggtgaggcctcaggaggggtcgccacgcacgggcactccagggac

SEQ ID NO: 73 - DNA, 2300 bp, Homo sapien
ggtggggccgggtggggcccggcacccgggctaaggccaggtgaggggagagccgggccaccctgcacggggccaggtctgggagagccgtccaggcagaagcccctgctggcccagttgtgaggcacagctgagcgggtaccgtggcgttgctgccaccctggggctccgtgtgcccttcccggtcatgcccgtggtctggtttggggctttgaggagaacgtgcagagtcgcctgctccgtcgctgcccggcatcctggggtgggttctctgctgccctgcagggcgcccgtgtcgcccacgggactggtcacgtgatacggggctgctcctggcaggctgggtgtatcttacacctttattttttgtgcctgcttaacttatcagtaacacacatttcctcaccagagtctcaaggcaaaccacctcttctttcttttttcatgagacggtctcactctgctacccagcctgcagtgcagtggtgcagtctcggctccctgcagctgtaccttccagggctcaggcgatcctcctacctcagaagctgggaccacaggcaccatcaccgcgcctggctaatttttgtattttttgtacggatagattctgccgtgttggccgggttggtctcaaactcttggacttaagtcatccgcctactgcagtctcccaaagtgctgggattataggcgtgagccactgcgcctagtcttagcctctttctttttttaatttttaatttttaattgtttaagagtgagggcctcactgttgcccaggctggagtgcagtggtgcgatctcagctcacctgtagcctccacatcctgggctcaatctatcctccttggaggacagaaaaataaaggtgtaagatacgttcctgccaggaacggcccatatcatgtgaccagcccccatgggggcggcctcctgagtgactgggaccaccagtgtgtgccaccatgcccagctgattcaaaaacatatattttgtagacacaaggtctccccatgttgcctaggtaggtctcaaactcttggatttcagagggttcaagtgacccgctcggcctccccccgtcctggggttgcaggcgcgagtgacccgcctgccttggcctctccccatcctggggttgcaggcatgagcccctgtgcctggccttgaccttctagaatgacgcggagacttttgagcctgttggctctgcctgctcttttcccagttcacgtactcttatctggagtttggtcctgtccgttctaaatcctgcaaattggacattaaaaaaactaaaagtaagaggatctccctgtgttgcccaggctggtctcaaagtcctgggctaaagggatctgcctgccgcagcctcccagcatgccgggattacaggcacaagccccagtgcccggccaaattggacgttattacttcctttccaaaagagtggtttacattttcctccccacacacggttcgtgcctccaccccggtcccgcgttccctgctgtcctgactgcgtctttaagcttcatcccgttggtccggcctgttggcgatgtgcttggggcaggaggccttgcccgtgcccgccccccaactctgattgtgtctgtctttccttggtgccactttatttgggtcttttctgcccaggacatggcccacctggacctagagctctgtgacatttctgtgaagcctccgtctacctttgggactcagcagaggtgtgtttagaattcactctgcgttttgggggtccccatgcatgctgaggtgctgttccctgcccacccgtgtccgatccgtcttggcctccccgacctcagggtgcctaggaccccccgacctctttgggtatttggtttctggctcaggaagagcagctgccgggtcctggaggaggggcctgggaagcgctggcaggcgtcactcctgcgacctcccacccctccctgcatggctcctgcgagggtcaccgcgtgagtccgggggctgctgtcctcgcgcctcagacctgattctggggaccgcggtgaaggcgtggcaggcgggcatcactcccttcccccgcctccatcgctgcctctctctgggtctgcgtcctcttctcacagggacagcagtcgttgactctccctgatccaggagggtctctccagatccttccctaacagcagaggcccggctcgtggggagggactgggactcaaggcttcttcaccagcctgaggttggtgctggggctcggcggcggctgtgagaatcctgtgctggagaaagcgtctct

SEQ ID NO: 74 - DNA, 2300 bp, Homo sapien
tccagcctgggcagcagagcaagaccccatctcagttgagaaggaagttcagctcagtatcagaggccctgacaggtgtgatctgctcttccaggtcacgtgtcttgggacgagtataaggtgaagtttttggcgagtaaaggccatagcgagaaggaggttgccgacgccatcaggctcaacgaggaactcaaagtggatgaggaaagtgagtgctcagccaggctcccgccaccggtctcaggcatcctgtgtgtgcgcgcgtgtgttgtgtgtacatgagtgtgccgtgtgtgtcgtgtatgagtgtgccgtgcgtgtgctcgtgagtacgtgtgtgcgtgccgtgtgtacgagtgtgctgtgcgcgtgctcgtgagtacgtgtgtgcatgttgtgtgtacgtgtgctgtgtgtgtgctcgtgagtacatgtgtatgcgtgtcgtgtgtacgagtgcactgtgcatgtgcttgtacgtgtgtgcgtgtcgtgtgtacgagtgcgctgtgcgtgtgcttgtgagtacatccaggtagctgttcatgtaggctcgtgagtacatgcaggtgagtgcgccctcacacccgctgtgtgcacacgtgttcgtcttaacagcatggcccaacctggttggtggtggctgtcaggagggaagtgggtgaagccgttgctgacctaggcgccgcccaggagtccggtggggagcgtgtgagctgtgcctgggcagctttcagctctgctggtcacggcaccttcacggccgttactcagttaggtcctgcagagaatctgaggctgtgagtctgggttggggcctgccccgtactctgaaggccacgtgaggcagagtttcctggggagagggcacagcctgtgcctgagggcctggccctgaggcctgggtctgctggagacatctgtgtggccgtcaggtggtcaccagagagcggtcaggtcccagggagaggctcttccttgggtctggggtgtggccgttggccagcagggcagcctcagccctgggcgggtccaagctggtgcctctgcgtgaagagggtggggccgggtggggcccggcacccgggctaaggccaggtgaggggagagccgggccaccctgcacggggccaggtctgggagagccgtccaggcagaagcccctgctggcccagttgtgaggcacagctgagcgggtaccgtggcgttgctgccaccctggggctccgtgtgcccttcccggtcatgcccgtggtctggtttggggctttgaggagaacgtgcagagtcgcctgctccgtcgctgcccggcatcctggggtgggttctctgctgccctgcagggcgcccgtgtcgcccacgggactggtcacgtgatacggggctgctcctggcaggctgggtgtatcttacacctttattttttgtgcctgcttaacttatcagtaacacacatttcctcaccagagtctcaaggcaaaccacctcttctttcttttttcatgagacggtctcactctgctacccagcctgcagtgcagtggtgcagtctcggctccctgcagctgtaccttccagggctcaggcgatcctcctacctcagaagctgggaccacaggcaccatcaccgcgcctggctaatttttgtattttttgtacggatagattctgccgtgttggccgggttggtctcaaactcttggacttaagtcatccgcctactgcagtctcccaaagtgctgggattataggcgtgagccactgcgcctagtcttagcctctttctttttttaatttttaatttttaattgtttaagagtgagggcctcactgttgcccaggctggagtgcagtggtgcgatctcagctcacctgtagcctccacatcctgggctcaatctatcctccttggaggacagaaaaataaaggtgtaagatacgttcctgccaggaacggcccatatcatgtgaccagcccccatgggggcggcctcctgagtgactgggaccaccagtgtgtgccaccatgcccagctgattcaaaaacatatattttgtagacacaaggtctccccatgttgcctaggtaggtctcaaactcttggatttcagagggttcaagtgacccgctcggcctccccccgtcctggggttgcaggcgcgagtgacccgcctgccttggcctctccccatcctggggttgcaggcatgagcccctgtgcctggccttgaccttctagaatgacgcggagacttttgagcctgttggctctgcctgctcttttcccagttcacgtact

SEQ ID NO: 75 - DNA, 2300 bp, Homo sapien
aacttgataacatgcgtgtgtgcaccagcccagtcacatctgtgttctgccagccctgttcacgtgtgtgtgctgtgtacacgtgggtaccggcctgtgcacttgcgtgtgtgcgtgccagctccatgtacgtgcaccgccctgcagccgtgtcttcaggcacctgagtttggatgagtgactccttgccgacatcttgactggaatcctgcgccatgtggtttctttccacctttttgctttttgctctgcctcgtgtgtgtctgtgtctgtggagtgtgtagagcgtgtggagtgtgtggcccgtgtctgtggcatgtggagtgtgtggcccgtgtctgtggcgtgtggagcgtgtggcctgtgtctgtggcgcgtgtggagcgtgaccggagcattcgaggatgcacgtgtccacgtgagacccaccaggtgccccacctgccacatggccacccgggtggccccgtccccagccggtgtgttttggggactgtggagctgagggtgcctcccaggcccgtccacctctgggctgctgcggctgctgagggaggggcgcgtgtgagcggcagcctggccttcttccatgaggatctctgcccagtgcttctgagccgtgcctgcggtgtgtgcaccctcgaagcttgcctggcccaggtcccagaggccacacctgcctgacgagggcctgcttgccacctcataacgtggccgcggctgcccctgagcggagcatagaggcaaggggccagggcaccctactctcggggatgcctccggcaaacgcaccagccggggtctcaagacctcgcacctctggaagccctgcctcccagtgctgttgccctgggggttaagtttccaacaggtgagctcaggacacgggcggctgcagcaggggtaggagcctgtggcttccacaaagacataatggtgaagccgagctctgaagctgggacgggagtgacctgtcctggggcctgtggcctcctgacctggcctgcgctggccccgtgtccccagtctgtgtccctatcccccaagtctgtggtctcttccatccttgcacacaatgttaagtccccacacggtcttcttcctaaatctcacaacttaaatttatatgaaggattttgttttgtcttgttttgagtcagggtctcggtatgccgcccaggctggagtgcagtggtgtgatcacagttcactgcaaccttcgcattccaggttcgggaggcctcccacctcagcctcttgagtagctgaaaccacaggtgcacgccaccgcgcctggcgaattttcgtaattgtttttgtagaggtggggtctccctatgttgcccaagctggtcttgaacttctgggcttaagtgatccacctgtcttagcctcccaaagggctgggattataggtgtggccactgcgtcctgcctatatgaaggtttttgtgtagccatacctgaagcatcgaaaataaaacatgggccgggcccagtggccacacctgtaatcctagcacgttgggaggctgaggtgggtggatcatttgaggtcaggagtttgagactagcctgcccaacatggtgaaaccgtatttctgttaaaaatacaaaaattagccaggcgtggtggtgcacccctgtaatcccagctactcgggaggctgaggcagtagaatcgcttgaacccgggaggcggaggttgcagtgagcaaagattgcgccaccacactccagcctgggtgacagagtgagactccatctcaaaaaataaaataaaacgtgaagagtgtgacttttggaagctgtggttggagagtggggtctggtggtgattctgtgtgacagagggggagggtccatgtgtttccccggggaggggaccgtggcatccaccttccccagtgtctctggcgtggcccggcaccccacaagccccacgtcccggacgcttttcgcgttgcctggtggagcctgtcgctgttggtggcaggttcacgcagccatggagtcctgggccggcggcatccgtctggctgttcggggtcctgggggcccagtctgacggccacctgcccatttgctgtcttgcagggtggatgtgaacactgaccggaagatcagtgccaaggagatgcagcgctggatcatggagaagacggccgagcacttccaggaggccatggaggagagcaagacacacttccgcgccgtggaccctgacggggacggtactgtggctgggccggggtgggtggggcggtgggcggggcgggcagggccatgggccttgcctg

SEQ ID NO: 76 - DNA, 2300 bp, Homo sapien
aatcaagaactagctttattttctctaggaacaaagtacagtctctttgcacacagcgtgtgttttacgactgtagttagtggagtcagcaccaggaggaggtgtcttggttcttatccaggactctcccctggtcaggcgatctgggacgacaggaatagaattatgccaccactagggaagggaaaagccctcagccatgttcagaaaatcaggccgggtgcatggctcacgcctatagtcccagcactttgggaggccgaggcaggaggatcacttcaggtcaggagttagagaccagcctggccaacatggcaaaaccccatctctactaaaaatacagattagtggagagtggaggtgggtgcctgtaatcccagctaactgggaggccgaggcaggagaatcacttgaacctgggaggtggaggttgcagtgagccgagactgcaccactgcactccagcctgggcgacagagtgagactctgtctcagaaaaaaaaaaaaaatcagacatgagcccctcacccagggtttccttccttgggggaactcaggcttgtacccctcttggtttgtggcagactgcactgacttcaggaccactttcatggcggccccactggtgtttctcgatacctggaggcagcattttttcgtttaatattacccagggtagcattcgttgagcgcctactgtgtgcaggcagagtggcaggtgccagaacagtgaagctgaataagacggccacagaacaggagtctcagtccatgtgtgttgagggaacagctgtgacatggcggggcctcagcggcacccgaaaggacccgcaggtgtttgccggaggggcagactgtgaaaggagtaggctcgtgggtgagaaggaccccgagttccctttgggatacatgaggcatgaggccctgtgagcccctgcttcccaccaggactggccacgcctcggacggcaggacagacttctgggctcctcggccttggcgttcgctcgcgagtgtgggcaagggcacatgtgtgtaatacgtgcatgcgtgagtgtggatgtgtgtgtgcacatctgtgtgtgggggttgtgtgtttgtttgctgggaccaggccctgacgccctctgcacttagggttggctgtcttcgcaaagcctggtcagtcggggggagagggggagcctcctgtttcttagtgagaagctgaggccggggaggccacatgacttagctaaggtcatagatctcaagaatgttcaagtcagggtctggagagtgaccctaaccccatgggtcagtggcatgatgccaggagggacagagccgggccccacaggaaagctgtgctgcaggtgttgggcgatggggacaggttagcccctggaggtgctgacagctcgagagagagatggaaagacggagagacagggctgaaaactcagtgtctgtaaaaaaaagaccgggcacagtggctcacgcctgtaatcccagcacgttgggagactgaggcaagaggatcgcttgaagccaggagtttgagaccagcctgagcaatacagcgagacccgtctctacaaagagtaaaataaaaataaattactgggcgtgggggtgcacgcctgtggtcgcagctgctccggtggctgaggcgagagcatcacctgagcccagagcatcacctgagcccaggagttcgtggtcacggtgagctgtggtcaccgctgtactccagcctgggtgacagagcaagaccctgtttctaaaaataaagaaaaaaacaccacgtgtggtccggagaaaacaaatgccacgtgtggtccagagaaaacaaatgccacgtgtggcccggagaaaacaatgccacgtgtggtctggagaaggcagtgccacgtgtggtctggagaaggcgatgccacatgtctggatcctgtgaatcgaggatatgtttcatgttgcaggatagacgtgcttggggaagtctttgctgagtcttgctaatgatgtgtctgtgtctctctgcagactgtgagctgcttgtccccatcctgcggccgtcctggggacacagagccctccgtggtgcccggggattggattggagccaggacctcacttcctcctctgcccctgcccctgcccctcccagcacctggcccacaccctgcagcccgccccatggtctggccctgggtggcgatggcgtccaggtggggtcccctcattggcctggctccgtgctgcctctggctcctgggggcagtccttctgatggacgcgtctgcacggcctgccaacca

SEQ ID NO: 77 - DNA, 2300 bp, Homo sapien
ccgcagtgttcgcttttctcattaaacgaggggctttcaaggatgtgttaaagtacgtgagagacgggcctggtgccggctggtcctgttttcttaaggcggaagttggggaaccgcgtcagcactccggggttcggattcctggaacctggggcagagtctgaaataaagcagcaccggccctgtgtggcgcggacccatgggaagccttgaaaggaaagtctcttcagaaagaaacaatgggttcagtgacttgtacactgaaaagatagatggccagttttaaagttctcctgcgtttaaacacgggcagcagcggggttgacggtacaggcaccaagttctgacataaaagtctttccttaaatcatgtaaaaaaaccgagacgtgcgcactgccaacttacactcatcgacacaaacttacaatatttataaataagtcgcaagcaaacactgagttacatttaccacgaagtcactggacagagaccaaaatcccatgaaagcggattgatgtgaaaccacgttagatctgagacgcagacgtgagaaacgccactgataagagacacggaagatcggagcccagccccgtgagccggtcggggacagcacgggggtcagcgtgcggccgggcccggctcaggctcgctgaggtccaggaacgggcacctccacctggacacggcgcgctgccccggcaacccccaggggtctcccaaacgcagaccgggacgcagcgaccacaagcgtggctgcgggacgggggccttggggcccgggcgtagtgcgcccgctcggcacctgccccaaggcgccgccgggtgaagcaggtgtcccggagggccgggccgcggcggctcaggggatgccctcccttctctggcagcactgcgagggcggcgcggaccagtcgtacacgtaggacaggcgcagctgcacctcgcgcttgcacaggcggccctcgcgcgccagcgtcgcgtgcttctccagcatgtcctccaggctctgcttgtgcgtcaccaggtactggttgctgcagccgcgggaccggtattcggtgtcgaagcgcgggtcgtgctcccgctggacgtccaccggcgccagccaggcgcccagagacacgtcctcgctgtgccaggcgcgcaggtagtcgcggctgaggcgcaggtagtgcaccaggtcggccgagagcacgtagccgccgcccagcgcgtagggcaggtagtagtcgcagagttgccaggcggcctcgcgccagcgcccccccggcttgacgcggccgcggcccgagaagaagccccagtagaggcggcggcggcgcgcgggctcgcgggcgcgcagctcggccagcagcgcgtccagccgcgcgaaggagtcgtcgtccgccttgagcacgaactcgaaggccacgtgctcgtccagccaggccagcatggccagcaccttggccgtgaggttttcgtaggcgtcgcgcagcgcgggcagcagcagcaggtccccgtgccgcgcctgctcccgctccagggcgcgccgctcctcggcgcccaggccggccgtgcccacggcaaagcgcgcccacacgtcgcccggggccccgcgccgcgcaagccacgtgctgcggatcacgctgcggcgctcggcggcgcggggcgcgctggccaccagcactgccaggaaggcggcggcgcgcgcgggcgcggggggaggcgggctgcggcccgacatcgccctggggtccccgggctcggccgcgcagcgcgccaggtagagcagcgccgccccgcacagcgccagcgtgcccaggcctagcgccgcccgccgccgccacgcccgccgcagcagcttcatggcgcccgcgccgggccggcggcccaggccggactcgcgagtgcgcaggcgccgccggctcggggcggtgcgcgtgcgcacggcgctcctgggagcgcgccggggccttccgcagacgccgagccccggggcgctcggaggccggcggccaatcggcggccgtcacgtggcctcgggcacccttgtcattggtcaacctcggagcggccccgcgaccgcttccgcccggaggagagatggtggcgccggcgtcccctccgtgaggtcgcgcccgttcgcaccgcccccgcccgcaagaaagatggcagtggcctgatccgggcccgttggcggcgtcactgacgcttcgctccggtcctcggatcccgagcgcggggaggcagaccggtgagtgaggggcccgggacggccgctgcaggccgcggggccaagtgtacgccggccgga

SEQ ID NO: 78 - DNA, 2300 bp, Homo sapien
tgcccgttttcctgcctgtagggcagagtgggaggcccagcctccctcggtctagcctcccagggctgcccgtgtcccggcctgtagggcggagtgggaggcccagcctcccttgctccagcctcccagggctgcctgtgtcccggcctgtagggcagagtgggaggcccagcctccctcggtccagcctcccagggctgcctgttttcctgcctgtagggtagattgggaagtccagcctcccttggtccagcctcccagggctgcccgttttcctgcctgtagggcagagtgggaggcccagcctccctcggtctagcctcccagggctgcctgtgtcccggcctatagggcagagtgggaggcccagcctccctcggtccagcctcccagggctgcctgttttcctgcctgtagggtagagtgggaagtccagcctcccttggtccagcctcccagggctgcccgttttcctgcctgtagggcagagggggaggcccagcctccctcggtacagcctcccagggctgcctgtgtcccggcctgtagggtagatgggaggcccagcctccctcggtctagcctcccagggctgcccgtgtcctggcctgtagggtggagtgggaggcccagcctccctcggtccagcctcccagggctgcccattttcctgcgtgtaggcctgagtgggaagtccagcctccctcagtccagcctcccagggctgcccactttcctgcctgtaggtcagagttggagatccagcctgttctgtctagagtcacaggggagctcattgccagtgggtgacagagaaaatttggatgccctgcctgtgaggaggggtctggtagccctgggcggggggtctccttggccagggcacctgcccacccctccctttgccccaagcctggattgaggggtgttggggctgcctttcccgacccatgctagatgcaggccacatccagggctcacctgcgggggtccagcagggctggtactgtgtgggcgctgtgccgtgtccccagggtcctccaccaccttcacgagcggacacggggccgggaggcttccacagtgctctctggagatgccagtcagtgcctgagagcccggagggcgagggggcagccggggtccctggtgggttcccaagcgtcatccccatcccagcctggtctcccgtggctctgcctgtggatgtggcctggggctggggttgacgctggggtctcggcgtggctaccttcgtgtctggcaagaggggagggtctggagtgttccgagctgtccatcagggccggcatgttgaccttgggccactgttagcctcggccaggaccagcggctggagggtcttccagccccacctggccaccccattcctccagccactgagcccaaggggcctgtcgccatgatctggcctcacctttcccccgagtggggccccagcgaggccggccagcacccccaggaccctgggccggggccgtgagtcagggcggggcacccgggggagcctgggtgaggaggtcgtgggaaggggctggggctttggctggctggtagctgccctccggtggctggctgcagaggctgctgtgaggggagccaggttgagttcagctggcagggagggcgaggaggtaggctgctgtcttcacggttcccagaatgaggtggacctttggggaagcaatgggggcagggtggggtctggggacgggaggcaagaagcagcggccggggtcagtgggggtctccgccccgtctccgtccctggccgtcggggcgcccgggcggctggctgatcgtccgagtgtgagcccccaccctggagcctgcgaggtctggggaggaggaggcgaggggaggatttactgggcggcggagtgaggaggccagagaggacgggggctgggagcgggggctggagcgggaccccggggggacctgagcgccgtcgcgccgccgttccgggcaggtccgcgcagacatgcagcggcggaggccgggcgcgcccctgggcctcgcccccgcgcgggggctctgagcgccggccgtccccatgactgcgccctggcgccgagactcgccgcgctgagccgcctcgggacggagccatgcggcgctgggcctgggccgcggtcgtggtcctcctcgggccgcagctcgtgctcctcgggggcgtcggggcccggcgggaggcacagaggacgcagcagcctggccagcgcgcagatccccccaacgccaccgccagcgcgtcctcccgcgaggggctgcccgag

SEQ ID NO: 79 - DNA, 2300 bp, Homo sapien
ggtggcgcgcgcctatagtcccaactactcaggaggctgaggcagaataatcacttgaacctgggaggcagaggttgcagtgagccaggatcgagccactgcactccagcctgggcgacagagcaagattctgtctcaaaaaaaaaacaaaacaaaacaaaaaaaagtgggaacgtgtgggtgaccctgaggtcgatcttcaggtcaggtttggtagagcagggagaaagcctggtcaggtggatttgagagcttgggaggggaggacgtgtgaagagccatgaatgaggcccgaatccaggggatcaggtcagggcagggggcatttggcagaacttggaggggtgtgtggtggagagtggtgtgtttgaggtgcgttttgctggcctttgggtgcagttgggtcggggaagcaaacggtgctggagagtcgctgggtctggacctgagtcctgagaggggcggcctcagctgggcctggagctcctgctgtgctgggggtgttgcaaggaggccctgcatgcctcttccgacccctctgctcctggtgggggtgtgtgtggacactccagggagaggggtgtgcagtagctgtggttgtctcgagctcccggggcagtgggggtctgggtccagtcgggtggtgggtacaggtggggtggggaggggcattgggtctgggtggtcatgacagtgggtggtagtggagagcaaggtcagtgggggactgagcctgggagccggctggggacggagagtgcaatgaggactcgggagccgagctgagggggggggggggggtggcgtggggggatggggacgaggtctccaggagcccctgctgtggcggacgacaaggccctttctgttttgtttccatgtaggtggctattatcatggaaaactaatttttcccagagaatttcctttcaaacctcccagtatctatatgatcactcccaacgggaggtttaagtgcaacaccaggtaaggtgcctggaggggccgcggaggctttctggctgcggtggggagtgtgcactgacggggcccccgttttgcaggctgtgtctttctatcacggatttccacccggacacgtggaacccggcctggtctgtctccaccatcctgactgggctcctgagcttcatggtggagaagggccccaccctgggcagtatagagacgtcggacttcacggtaagttttagagcctctccctggtgggccgtcagccttgtgtctggggggctgttctctgttcctgagttgcagctgcctttttttttttttttttttttttcttgagacggagtctcgctgtgtctccaggctggagtgcagtggcgcaatctcggctcactgcaagctccgccccccggggttcacgccattctcctgtctcagcctcccaagtagctgggactacaggcgcccgccaccacgcccggctaatttttttttttgtatttttagtagagacggggtttcaccgtgttaaccaggatgtcttgatttcctgacctcgtgatccgcccgcctgggcctcccaaagtgctgggattacaggcgtgagccaccgcgcccggccgcagctgcctttcttctcagtaggcggggctgggtggagttcccaccttgtcccaggcactgtcgtggagactgctttgctctgtggcctcgtgttccccgctgcctctcggtcttgcttttatccacatccagcctcatccacacccgccaggggctcctccttgggatcttggggtgggccaaggcggtaccagttgcacagacggcccgggccttgtcagcggggagcccggtgctttggtggcttgtttttccctgtctttaataggaatcaagtgtgatatcatgaattgatggggggaagattaagaaggctttgtaagactataagttagtttgctgtgaagagtgtgcttattaaatgctttctgcaacacgaagactgcagcccttgactttgaaatcatctgtttttagaatcttgaaagaattgaaattagttttctggctgattcccttcccttccttcctagaaaagacaactggcagtgcagagtttagcatttaatttgaaagataaagtcttttgtgaattatttcctgaagtcgtggaggtaagaaagacggaagtgggtttcgccttcccctgcgttaaaacacttgagtttcacctctttccaaagagtaaaatctgtgtcctgaagctgcagacctccccaggggatggctcctctcccccaggagccccgaggcaggggaggcag

SEQ ID NO: 80 - DNA, 2300 bp, Homo sapien
ttattaagatgagcttcgtgcatgttatattgtcgaaacaaaggtactttatggtaaacttataaagtatagtctctaagatcctgttacaagagactaaaagcacccacggtagaagagacgggggttttgaagccgtgtggctgtgtgacatttcaccttcatttgttcactgcctgaatgtgaatgtaattttggctgggttctataaaccccaggcttggaatgattcagattttggagaatttgctgtcctcaaatcccaagtaattttcttctctcccttaggcactatgtcgtccgaggcccagagatgaccccttatgaaggtaaggattctgtgcttaggagaagaacaccaggcggtttttatattctcagtcagccttgcctgttcaacatcttttatttgcaaacagcagcctttctactttggatgtgtgctagttaaattggcttagttggaactcctcctcgtctgcttctccacacgctggaagtgtttgctctgctgatgtgtctcagcctgcagggccgcctgtagcgtctgtgttcaccagcctctgacaccatagggccatagctgagaaaaccagaccggggtaaacactgaagctggcctgttctactatttcttaagacccagtgcatatcatcaaaggaaaggcacatatattcagttattcagtgtgccttctgtgctgggcgcccccagggtttcgcaatccccaggacggtctctgagctaagtggaagtacccctgtgtggtggcacctggggcttcggtaggctgcaggacctgtccagcacctcagcccttcatcgactaccaaggctgatccagcagcctgacccctccaggtcagcagacaccacctagagacctagtgtcatttatagagaagatgctggagctgtcagtaagtttctggggcctttggcggaggctggcgccagcctcgatctggaccaggtcagtagtcagtgtgcccgtgaatactgtcccgccggcaagcacaaggcagagcagggccaggtcagcagttgctgtccagccacagggccccggcttcaggtggctggagcagcaggctctgtttgcctgtgtgtggaggctttggatgagatttcactagaagagagtgctgctgctagaagaaggtttgcaacccctgctttggactgtcgggagggttgtgggtgggtaagaatgaaaaaggctctcctgaaggcattttggccgagttaacacagccacacctgtggactctcctttggcccaggaatcccagttctggatcatctgcaactagggcagccagagtgcgggagtacatctgtagggtgggccctccatcatcgtgtcattgcccatgaccagcgttggggatgccagcaggccgtggtgagataaggcccgggagcaggtgtccagggcgtgttaaagtacttgttacgatgcgtgtgtgtgccttcagctgatctgaagaatatataccaccgagtgagtagtggtcggccgggcgcggtggctcacgcctgtaattccagcactttgggaggctgaggtgggcggatcatctgaggtcaggagttcgagaccagcctgaccaacacggagaaaccccatctctactaaaaatacaaaattagccgggtgtggtagtgcatgcctataatcccagctactcgggaggctgaggcaggagaatcacttgaacccgggaggcggaggttgcagtgagccgaggtcgtgccgttgtattccagcctgggtgacaagagtgaaactcgtcaggagatccagaccatccttgctaatacggtgaaaccttgtctctactaaaaaaatacaaaaaattagctgggcgtggtggtggggccctgtagtcccagctactcaggaggctgaggcaggagaatcgcttgaacccaggaggcggagcttgcagtgagccgagatcgctgcactccaccctgggtgacaagatcaaaactccatctcaaaaaaaaaaaaaaaaaccaaaatgggtggtggtctttgacaagcaaaattatgccagctttacattttttttgtttgttttgtggttttagttttttaaaaataaatagtgaatattaattctgtatccacacccagtctccctcaacttcaccagctaggtcagttgctggtggagatgagctactcccccaacagggctggacacagttgggagaagagggggcagcccctgggtgtggtgcggccgttgccagccccaaccctgtcacttgtgcttttatcttggtcccc

SEQ ID NO: 81 - DNA, 2300 bp, Homo sapien
tgctcccatgatccagtcacctcccacaaggtccctccctcaacatgggggattatggggattacaagtcaatataagatttgggtggggacatagccaaagcatatcagcaaggaaactgggtagagtagacttccggtttgtgggaactgggaggtcaggatggagatcactggtcactgtccgttatcgatggccactgatgtccacagacgttattaaatcgtgtggccatggctgggcgcggggactcacgcctgtaatcccagcactttgggaggccgaggtgggcagattacctgaggtcaggagttcgagaccagcctgaccaacatggtgaaaccccgtctctactaaaaatacaaaaaaaatttgcttggcatggtggcaggcacctgtaatcccagctacttgagtggctgaggcaggagaatcacttgaacccaggaggcagaggttgcagtgagcggagatcacaccactgcactccaacctgggcaacgaacagtgagattctatctcaaaaaaaaaaaaaaaataaggtttgagttggagctagtctgatgcagcagggagccctgttttcatcaccacccctctccccagtctcaggtgtggctgaggggccttggggtccctgatccagcctcctctcttgcatgatgatcaccacccctctccccagtctcgggtgtggctgaggggctttggggtccctgatccagcctcctctcttgcatgatgatcaccacccctctccccagtctcgggtgtggctgaggggccttggggtccctgatccagcctcctctcttgcatgatgatcaccacccctctccccagtctcgggtgtggctgaggggccttggggtccctgatccagcctcctctcttgcatggtgcctcgcgccccatgctcggccttcagtgctgtcttgaacgtcccaatggagccaccagagtgactttcctaacagaagatatgatctgccttgaggcttggaccccaaacccctgtggggcccgggttaccgtggctcctgcctgtgattccagcacttccggaggctgaggcctgagaatcagttgaggccaggagtttgagaccaccttgggcaacatagtgagatcccagctctacaaaaaaaaaaaaattagctaggcgtggtggcatgcgtctgtagtctcagctactcaggaggctgaggtgggaggattgcttgagccgaggtggtcaaggccacagtgactccagcctgggcgacagagcaagaccctgtctcacgaaaaataagtaaataaactcttatgccctggccctgcctccctggccagtcttatccctgccctcactgtgcttgggcccttgcacactgcactttctcaggtgtggcctgttcacctgtggccccttctaccaggaagacagctgctctgcccagtgagtgccttggagtctccagagtcctcgtccctccagccgcagaggctcccccgttctgcggctcgttttgcttgtggctagtggtaaatgctgggcagcgggcttccgggtgcggtgaaggggccggcggtggtgcctgcccacttctatggtgtggattctccatcagtgcggggtccttgagctgagttggaaggtgcgagtagctgccctcaggagctggtctgaggctgtggcccgaataccccctcaagccctgtaaatgtatccctgcgtgagtttttggaggacaggaacgaggctttgggtttctcctcgtctttgtacctgagctgtacgtcgtgtcaatgaaggtggtggcgggacagacgggaagagagaagccgcagggcctctgggtgtctgggcgggtggcaagcgagggtgacctgtgagctgtgactctgggtgaccgggccctgaatgaatggcgggctgcagaggcgggagtggggctgcgccaggggagagagctgtggccggcgctgcttctcgtcgtcagtgtagacgttgcttttaacagatgagcagcaccagcagtaagagggctccgaccacggcaacccagaggctgaagcaggactaccttcgcattaagaaagacccggtgccttacatctgtgccgagcccctcccttcgaatattctcgagtggtaaggctccgcgccactgatcgccctgcgctgactgtcgctgccacgcaggcctctgccggcccctgctgggcgagcctggtgccccagtcatggcattggcaaggtgctcctgcaccctcccccggggtgagtggggtgcccaggggcctgtggacactct

SEQ ID NO: 82 - DNA, 2300 bp, Homo sapien
tctattgataataactctttcaaccactgtcggtcaggatcattttgaatctgcctataacatagaggtctccccacaccaccccaatttatcctgctctttcagattgaacccgtgtaaataaatcatgtctccctaaaatgtataaaagcgagctgtgccacatgcaccttgggcacctcccgagatgtcatgggtgtgtccttaaccttggcaaaacaaactttctaaagggactgagaccttcctcagtttgcaccctccaggctgggttctctgtccctcaagcatcccctggccagacaatccctgctgttcagaggcagccaaggctttctggtccaaccctgggggctggaggaggtgggggcaggaggtggtaactgggttgggggatgttttcttggttgccaaagcagagggtgccccccgctgctcaagatgctgagggtggtccctgttgtcctattcctgaagctgccagaggaagtccctccggagggctggcccacagcagaagggctgctcctgccctcagagggcaatctcagggttgagaaggttacagccaccatctgccaccaacctagctgcttgtgccgatcccactggccaaggccatcggctctatggctagaggcctgggcagcctgtgtcctgcttaccagaaggccacagatgcgggtgggtggggtggtggggtcttggcaagacgtgctggccacacctgtccggggcaccttctccctggggtgtgactcagccatgctcctgagcaggggcctctgagttgagcctcgctgcagtcttcccagctgcagggcccccacaggtgtgctgtcatcgcacactactgagggacagacaaggcagagcgggcctccatctgccgcgggccacagccgtgagtgtgcatgcgagtggatgtgctggtgcctgtatctgcggccggtgtggcttccctcacataactttccatgctgtgaaaacagtttggcctgccctgcatgggaacggcagaggcctgagaggaggcagaggaaggaggctggatgctgagatgttctccgaaggtggagccggtgacggcagtaatggaggcaggctggattcccacgggctgaggctgcgtggacactcctcctggcttctgccccacggcctgcagcaacgtctcagacccaccaaggtgtcccagagggccagagtcagggctgagcatggacacagcctgccctctgcccgtagccacagcgggactgaccctcaatattcagccaccttgctgacctgtggttgttcctgagaggcagtcagggttggggcaaaggagagggccacaggcagccaggtggcgaggtccacctcctgatcccccaccaggggaccaccctcagctccccgctgtcctcagcggcctctcagggaggcggtgggctgcgcgcctgcccccagcgtcccaccccagcgccccgccacctaccgctctctcccaatgtgtctggggtcagagagaggtggagaggacgcagcgccccgcgctttctgcagtctgtccaaggggaggtcaggggcatcccggggctgggcaggcacctgcaggggagggtgctgcggcgcggacgtgggttgcaaagagatgccacgcgtgtcactctcgggtccctgaacgagagagctctgagctccctggagcccaaccctccactgagcctccaggggcccgggacgctccatgcccgggccgcgccgcgcctcccctaagggccgggtggggcgtgggagcggaggacaaggcgggagccgggaggcgggagggtcggggttctttctccaccggggtcgccctcagccgggcctgccgccctgggccgtggcacatggggagggaagcgcgcggcttcggggtctggggctctcgcgcccactaacggtgcccggagccgcccgccagtgcgcaagcgccgccccgccccccgccccatcccccaccccggggtcgacggcgacagagagtcgtgggcgcggtccgccagtctgcctagagcggccagccctccccctccctcctcaccgccccggaccgcgcaccggaagcagaagctaggctggttccgccccgcgagcggccatcttggaggctgaggcggcggcggcggcgctgcggcgggttcggtgggcccaatcccggggcggtgcggctgtttcgggcgcgggccccgcttttccgcaccctgctccggcctcgactacggcgagcctgagcgcggcggcggcccacgcgcagcgacagggagagg

SEQ ID NO: 83 - DNA, 2300 bp, Homo sapien
ttaacaaaaagacctctttatatctataactttccttggtctctcttatttccttgttctttttaactcattttatacataaactttaaataagctttgaattagacaaaattatttaccttataataagaatttttgtagaaagaacgttttcctataatttttttttttttagatggagtctcactctgtcgcccaggctggagtgcgatggtgcaatctcggctcactgcaacctccccctcccaggtccaagtgattctccggcctcagcttcccaagtagctgggattacaggcatgtgctaccacacctggctaatttttgtatttttcagtagagacggggttttgccatgttggccaggctggtctccaattcctgatctcaggtgatctacctgcctcggcctcccaaagttctgggattacaggtgtgagtccccatgcctggccttcagctgggtttagagttttacaatgcttatgccaagttttgaccccttataaatcaataaatgcaaacaaaaatgtatgctgacagtttttaagacactccttatattactttaccaatacttttggccgggcacggtggctcacgcctgtaatcccagcactttgggaggccgaggcaggtacatcacgaggtcaggagatggagaccgtcctggctaacatggtgaaaccccgtctctactaaaatatacaaaaaattagccgggcgtggtagcgggcgcctgtagtcccagctactcgggaggctgaggcaggagaatggcctgaacccagaaggcagagcttgcagtgagcccagatcgcaccaccgcactccagcctgggggacagagcgagactccgtctcaaaaaaaaaaaaattttttacttaagtcacatgaaatttgttattatgtactaaatgtatgcatactccttaagccactttgataccttgtggccacaaaacatgtatcagaatccacgcacgtacacataaacacatctaaacacacatatacactcatccaaaaaccctacagcttttgctttacacctctaaccatgacatatcaacacaaagtcactagttagaaaaacaataacagaaagaaacatctagatgcaaactgtggatgtcatctcagtagaaaagtaacagctggtcaggcacggtggctcacaactgtaatcccagcactttgggaggccaaggtgagtggattgcctcaggccaggagttcaagaccagcctggccaacatggtgaaaccacgtctctactaaatttacaaaaactagccaggcgtggtggcgcacacctgtaatcctggctacttggaaggctgaggcaggagaatcgtttgaacccaggaggcagagtttgcagtgcgccgagatcgcacccctgcactctagcctgggcaacacagtgagactctacctaaaaaaaacaaaaagtgtaacagcagctttaaggcaggcagcaaaggaaacagagagatagagaacttaggaactctatagttcttttttttttttttttttgaaacagagttttgttcttgcagccctggctggggtgcaatggcacgatctcagctcactgcaacctccgccttctagattcaagctattctcctgcctaagcctcccaagtagctgggattacaggtgcatgccaccacgctcggctcatttttgtatttttagtagtgatggggtttcactctgtcggtcaggctggtctcgaactcctgacctcaggtgatccgcccgccttggcctccaaaagtgctgggattacaggcgtgagccactgcgcctggccaggaactctatggttctgtagttgcaggctgacctttgggctctgaatttttcctggatggaatttgcccatcagtttaaaatgtgccccaaaagaccataatatggaaccagctggggcactaggaaacccagcatgcccgcgacatgttcagttttataccaacacttgcaggtagaggcgcctgaaaccagcggggtgcctggaaggaggtcgccctcttgtctttgctgaggcttacattatttatttcccacttttttttttcttgaaaggaaccgagctgtggcctggggttccatggagcaggtggggcgcggaggaactgagctgtggcctggggttccgtggagcaggttgagtatggaggaactggggttccgtggagcaggtggggcgcagaggaaccgagctgtggaatggggttccgtggagcaggttgagtgtgccggtcgtggacgggtcgtgggcggg

SEQ ID NO: 84 - DNA, 2300 bp, Homo sapien
gcactctagcctgggcaacacagtgagactctacctaaaaaaaacaaaaagtgtaacagcagctttaaggcaggcagcaaaggaaacagagagatagagaacttaggaactctatagttcttttttttttttttttttgaaacagagttttgttcttgcagccctggctggggtgcaatggcacgatctcagctcactgcaacctccgccttctagattcaagctattctcctgcctaagcctcccaagtagctgggattacaggtgcatgccaccacgctcggctcatttttgtatttttagtagtgatggggtttcactctgtcggtcaggctggtctcgaactcctgacctcaggtgatccgcccgccttggcctccaaaagtgctgggattacaggcgtgagccactgcgcctggccaggaactctatggttctgtagttgcaggctgacctttgggctctgaatttttcctggatggaatttgcccatcagtttaaaatgtgccccaaaagaccataatatggaaccagctggggcactaggaaacccagcatgcccgcgacatgttcagttttataccaacacttgcaggtagaggcgcctgaaaccagcggggtgcctggaaggaggtcgccctcttgtctttgctgaggcttacattatttatttcccacttttttttttcttgaaaggaaccgagctgtggcctggggttccatggagcaggtggggcgcggaggaactgagctgtggcctggggttccgtggagcaggttgagtatggaggaactggggttccgtggagcaggtggggcgcagaggaaccgagctgtggaatggggttccgtggagcaggttgagtgtgccggtcgtggacgggtcgtgggcgggactccccagtgtgtcaccactgaggcatcttcgccctcttacgtgtctctgtttctctctctagaagtccaacacctccgagaggactcaaaacacagagtgaccagctcctatgtgcatttcctggacaaaccttttttttttttttttttttgagacggagtctcgctctgtcgcccaggctggagtgcagtggcacgatctcggctcactgcaagctctgcctcccgggttcacgccattctcccgcctcagcctcccaagtagctgggactacaggctcccgccacaatgcccggctaattttttgtgtttttagcagagacgaggtttcaccgtgttagccaggatggtctcgatcacctgacctcgtgatccacccgcctcggcctcccaaagtgctgggattacaggcgtgagccactgcacccagcagacaaacctttttaaactaattgtgttggggggttccctgtggggctgctgcacgtcgtgggggatcagcccacgagatactcccacttggctcacagtcacccaggggcgcctttcagctgggaggagcaaaatgcctttctttctggagctgagaaaactcagtctctcatttatctatgcaaagaacaattcagttcctcatgcaaatgcacgcacaagccagttgggcttaattttgggagaaaaagcaacagagaagacccttaggaacgcacgtccgagctagaaaccaaatggggtacccaaaagggagtcgttctccttgtcttaagaaaaaggtggccgggcgcagtggttcacacccgtaatctcagcactttgggaggccgaggcaggcggatcaccaggtcaagagatcaagaccagcctggccaatatggtgaaaccccatctctactaaaaaaatatacaaaaattaggctgggcgcagtggcttatgcctgtaatcccagcactttgggaggccgaggtgggcggatcacgaggtcaggagatcgagaccatcctggctaacacggtgaaaccccgtctctactaaaaatacagaaaattagccagacgtggtggcgggcgcctgtagtcccaggtactcaggaggctgaggcaggagaatggcgtgaacccggggggcggagcctgcagtgagccgagatcgcgccactgccctccagcctgggcgacagcgagactccatctcaataaataaaaaaaaaaaagagttgttatcagtagaagggaatgtctggttacagtatggcgttgtgcagatgaaggtcttatcgcagatgaagccaccaggtcacaagcctcagagagaatcaactataaatgcttctcatcagactcaaggcctgaggtgatgctgatgctgtgcctgaattccagcagggaggaggcatgaggtgcg

SEQ ID NO: 85 - DNA, 2300 bp, Homo sapien
gaggagcaaaatgcctttctttctggagctgagaaaactcagtctctcatttatctatgcaaagaacaattcagttcctcatgcaaatgcacgcacaagccagttgggcttaattttgggagaaaaagcaacagagaagacccttaggaacgcacgtccgagctagaaaccaaatggggtacccaaaagggagtcgttctccttgtcttaagaaaaaggtggccgggcgcagtggttcacacccgtaatctcagcactttgggaggccgaggcaggcggatcaccaggtcaagagatcaagaccagcctggccaatatggtgaaaccccatctctactaaaaaaatatacaaaaattaggctgggcgcagtggcttatgcctgtaatcccagcactttgggaggccgaggtgggcggatcacgaggtcaggagatcgagaccatcctggctaacacggtgaaaccccgtctctactaaaaatacagaaaattagccagacgtggtggcgggcgcctgtagtcccaggtactcaggaggctgaggcaggagaatggcgtgaacccggggggcggagcctgcagtgagccgagatcgcgccactgccctccagcctgggcgacagcgagactccatctcaataaataaaaaaaaaaaagagttgttatcagtagaagggaatgtctggttacagtatggcgttgtgcagatgaaggtcttatcgcagatgaagccaccaggtcacaagcctcagagagaatcaactataaatgcttctcatcagactcaaggcctgaggtgatgctgatgctgtgcctgaattccagcagggaggaggcatgaggtgcgtccgactcccttcccatcacagctgagctagtttttcaggttaactttggaatgcccatggctaagaccaggggtccatccagacagttcagggcttataattttatttttggtttatgagggaacctagaaggcagcccacacgcaccttactcctcccagcaggggacaccggccagaccccaagctccacactcccaccctcagcacccacccaggccagcagccgggggcaccttggtgccaccttagtgcctgttctgcggaggctccactggacagtgcagttgatgcccggggccgagggggctctgcctgggaggctgttcacctgcctgggtgcaggaccccagagggaccccaggccacccctggcctgcccatgcccacgggaatcccgaccttgggctgcctgtctattgcaccagaaccgtcccagggctgactcagagtgaccctgagtgggggacgctcaccccaggggaggaaacggggctctgggataggaggtcctggctggggtcccacagatgccaggcgcctgccatctccagggcagtgctgtcacagaagacaacaccgctccctcgttacctgtggcccggccacctcagcggcccaaggaggtgagctcacagccatgctcggtcaatggggcctggccgtctttcctgggagagagcagaggcatgggcccaaagggagccagggatgcctgcccgtcccttctctcattcaggctcacctggtcatggtgcagtgaccacaggacccccacatgccgggagctgggttcgccccaccccaccccctgcaccgggccagcgaggggatggcccagaagagggggaggaccatgtggattcaccagtgctggacatgtgctctgtggctaccccctctgcctactctctggcccgatacaggggtgtgggacaggtgactgaacctcagcccttagaggccttgcccgggaggaggggaggggggtggagccgggagctgcgtgatccagccgagatgtgctctgactgaggccctgcagggcatacgggtcatggaaggggtgctctgcccccggccagggctccccctcctacaggaagccgggggccttgctcctgcaagctgccctttggctggaccgggccccactggccggacctgggctctttctctctctgcaccctgcaccaaggctgggctgtctgccaggccactcccggggacacagggaggcacaggctgcttccagccacaatctctggcaagcacctaggaccttgtccccgcctgccaagtagccgcccgggccatgtgtgccctgtctcctcggcaggtgcggcccacgcacaaagctgcccagatgtggtgggggagaagccccaggcctgtgctgtgtccgggggccctgccgctgacctgtggggtctctgtgacatcagcaagcccc

SEQ ID NO: 86 - DNA, 2300 bp, Homo sapien
cagccagtgcggcgactgcggccagccggacccccgctgggccagcatcaacctgggcgtgctgctctgcattgagtgctccggcatccacaggtgggcccctgagggccaggctgggggtgggggttgggctggagcatccacaggtgggcccctgagggccaggccgggggtgggggttgggccggagctgggggccttgcctcccccagactcatccctacctctgctctccaggagcctgggtgtccactgctccaaggtgcggtccctgacgctggactcgtgggagcctgagctgctaaaggtgcgtgtggggctcctggaggccacgggaccccgtttgtgggggcgggagctggggtctgcaggttcgcactgatgcctgctcgccctgtctcccgctagctgatgtgtgagcttggaaacagcgctgtgaatcagatctatgaggcccagtgtgagggtgcaggcagcaggaaacccacagccagcagctcccggtgaggtggggtacagtctggatcagtcagggagccccagcctgggggcacagcctcatgttcccccctggtccaggcaggacaaggaggcctggatcaaggacaaatacgtggaaaagaagtttctgcggaaggcgcccatggcaccagccctggaggccccaagacgctggagggtgcagaagtgcctgcggccccacagctctccccgcgctcccactgcccgccgcaaggtccggcttgagcccgttctgccctgtgtggccgctctgtcctcaggtgggaggccatgccccggcagggctgggaggggcttgccttggtcggggatggactccgtcaaggggctggtggcagggctctgggggcacctcaggctccgcagactcccggcgtgacctggggttccctgccccaccccgggcctgttccacactctgaacacgcactgcccctgcagtgggcaccctggatcgtaagttccgccgagactccctcttctgtcccgacgagctggactcgctcttctcctacttcgacgcaggggccgcaggggctggccctcgcagtaagtgtggggtgggcccagccaggtggcagggcagggccaaggaggctggcctgaagggtgcctgagtgtggatggcccttgccagggaatggagcagcatctgaaggggcggggggcctcctggccacacagctggaggccaaggccctgactgtcaggggtgagctgtgcaaatgtgtgtgtgggctgtgtgcacctgggtgtgtgcacacagcgggtggcccggggtgctggggaagcagagggcgctgccagccggccctcagcctagggcccttctggagccatgctgcccgttggttgggtggagacatttcagcctgggccagccacagacggggctggggggcccactgcggggggtgccgggtaaggcggcgagcgggagggaagggcttcccaaaaggcctgggctttagggggctacccctggcacctttgagctgttatttggttttctctcctttgctcctagcctgcagctggctccccccggccctgggtgggagctggtcctgtccctaggggtggcccctggagggtgggtggagttccagccttgccccagggctctggacggagtctgggcctcccaccctcaggacccccttccctgcggacctgcaggtctgagtagcgacagtggccttgggggcagctcggatggcagctcggacgtcctggctttcggctcgggctctgtggtggacagcgtcactgaggagggtgggtggcgtcttgccctcgcccgaggcccctgcccagcccctgggcagccccgggggttgctttccctgaccgccccctccccacagagggtgcagagtcggaggagtccagcggtgaggcagacggggacactgaggccgaggcctggggcctggcggacgtgcgcgagctgcacccggggctcttggcgcaccgcgcagcgcgtgcccgcgaccttcctgcgctggcggcggcgctggcccacggggccgaggtcaactgggcggacgcggaggatgagggcaagacgccgctggtgcaggccgtgctaggggtgagcgagccacgggggctgcgcgcaggacacaggtgcacagtcgcgtttgcatcttctgtggcgcccacacaagggtcgcctgtccgcggtggggaccacgttcggtcccggctgggggcgcccaaggccggggtcagggtgcagaggcgcggagaggggccggtgccgtggctccgtctga

SEQ ID NO: 87 - DNA, 2300 bp, Homo sapien
gcccagcccagggtggggcggggggcgtacctgcccaccggagctgacgcccgcccctccactgcctgcaggagctgcatgctgcaggctgactccgagaagctgcggcaagcctgggtccaggctgtgcaggccagcatcgcctccgcctaccgcgagagccctgacagttgctatagcgaggtgtggcccttggtgcccctgccccaagcccgtgcacacacacgtgccaccggggatggcccctgccccgcgcctgtgcacacacacacgtgccaccggggatggcccctgccccgtgcccgtgcacacgtgccaccggggatggcccctgccccgcgcctgtgcacacacacacgtgccactggggatggcccctgccccgtgcctgtgcacacacacacgtgccaccggggatggcccctgccccaagcccgtgcacacacacacgtgccaccggggatggcccctgccccgcgcctgtgcacacacacacgtgccaccggggatggcccctgccccaagcccgtgcacacatgtgccaccggggatggcccctgccccgcgcctgtgcacacacacacgtgccactggggatggcccctgccccgtgcctgtgcacacacacacgtgccaccggggatggcccctgccccaagcccgtgcacacacacacgtgccaccggggatggcccctgccccgcgcctgtgcacacacacacgtgccaccggggatggcccctgccccaagcccgtgcacacatgtgccaccggggatggcccctgccccgcgcctgtgcacacacacacgtgccactggggatggcccctgccccgcgcctgtgcacacacacacgtgccactggggatggcccctgccccgtgccggtgcacacacctacgtgccactggggatggcccctgccccacacacgtgcacacgcctgtgtgtggctcctgcaagctgggtgtgtgctggtgtgcactggcatgctggcttgtgcagtgtggatgtgcatgtgtgtgcaggtaccatctgcccatgtgagggtgtgcacgtatacacgcgcgtgtgggagtgtgctcggcaccatctgcccacgtgagggtgtgcacacgtacgtgcgtgtgcgggcgtgtgctcggcgccacctgtccacgtgagggtgtgcgcgtgtgtgcgtgtgcgggcgtgtgctcgaggggggggccatctgcccacgtgagggtgtgcgcgtgtacgtgcgtgtgcgggcgtgtgctcgaggggccctggcctgcattggctcttctggctggggaggagggggcctgctggggaaaccatgctggagcccctgcgggaccgagcagctccaccccatcctccagaggctggaccgcacagcatccccgtccacgagcagcatcgactccgccaccgacactcgggagcgtggcgtgaagggcgagagtgtgctgcagcgtgtgcagagtgtggccggcaacagccagtgcggcgactgcggccagccggacccccgctgggccagcatcaacctgggcgtgctgctctgcattgagtgctccggcatccacaggtgggcccctgagggccaggctgggggtgggggttgggctggagcatccacaggtgggcccctgagggccaggccgggggtgggggttgggccggagctgggggccttgcctcccccagactcatccctacctctgctctccaggagcctgggtgtccactgctccaaggtgcggtccctgacgctggactcgtgggagcctgagctgctaaaggtgcgtgtggggctcctggaggccacgggaccccgtttgtgggggcgggagctggggtctgcaggttcgcactgatgcctgctcgccctgtctcccgctagctgatgtgtgagcttggaaacagcgctgtgaatcagatctatgaggcccagtgtgagggtgcaggcagcaggaaacccacagccagcagctcccggtgaggtggggtacagtctggatcagtcagggagccccagcctgggggcacagcctcatgttcccccctggtccaggcaggacaaggaggcctggatcaaggacaaatacgtggaaaagaagtttctgcggaaggcgcccatggcaccagccctggaggccccaagacgctggagggtgcagaagtgcctgcggccccacagctctccccgcgctcccactgcccgccgcaaggtccggcttgagcccgttctgccctgtgtggccgctctgtcctcaggtgggaggccatgccccggcagggctgggag

SEQ ID NO: 88 - DNA, 2300 bp, Homo sapien
gggtccttaggcgggggtggggtcctcaggcgggggtggggtcctcaggtgggggcaggggtcacagcagccctgggatgggccccgcctgactccccacatccccccacccacctaggcgctggttctccattcagaacagccagctggtctaccagaagaagctcaaggtgtgccctgggcctggggctggggccctgatggctggacgccccacctgggccacagggcagactggtcagttggggttagcacagggccggggcactagtggacgccggagccggaacagtcagggagcagagagctggacacggggcttggggctcaggcagtcggcctccgggtctccaaggtgaagcaggaagtgggtggtcggggccgggtggtggctgagggcaggggccacagcggtgccgcccacaggatgccctcaccgtggtggtggatgacctccgcctgtgctctgtgaagccgtgtgaggacatcgagcggaggttctgcttcgaggtgctgtcacccaccaagtgaggaggcccagcccagggtggggcggggggcgtacctgcccaccggagctgacgcccgcccctccactgcctgcaggagctgcatgctgcaggctgactccgagaagctgcggcaagcctgggtccaggctgtgcaggccagcatcgcctccgcctaccgcgagagccctgacagttgctatagcgaggtgtggcccttggtgcccctgccccaagcccgtgcacacacacgtgccaccggggatggcccctgccccgcgcctgtgcacacacacacgtgccaccggggatggcccctgccccgtgcccgtgcacacgtgccaccggggatggcccctgccccgcgcctgtgcacacacacacgtgccactggggatggcccctgccccgtgcctgtgcacacacacacgtgccaccggggatggcccctgccccaagcccgtgcacacacacacgtgccaccggggatggcccctgccccgcgcctgtgcacacacacacgtgccaccggggatggcccctgccccaagcccgtgcacacatgtgccaccggggatggcccctgccccgcgcctgtgcacacacacacgtgccactggggatggcccctgccccgtgcctgtgcacacacacacgtgccaccggggatggcccctgccccaagcccgtgcacacacacacgtgccaccggggatggcccctgccccgcgcctgtgcacacacacacgtgccaccggggatggcccctgccccaagcccgtgcacacatgtgccaccggggatggcccctgccccgcgcctgtgcacacacacacgtgccactggggatggcccctgccccgcgcctgtgcacacacacacgtgccactggggatggcccctgccccgtgccggtgcacacacctacgtgccactggggatggcccctgccccacacacgtgcacacgcctgtgtgtggctcctgcaagctgggtgtgtgctggtgtgcactggcatgctggcttgtgcagtgtggatgtgcatgtgtgtgcaggtaccatctgcccatgtgagggtgtgcacgtatacacgcgcgtgtgggagtgtgctcggcaccatctgcccacgtgagggtgtgcacacgtacgtgcgtgtgcgggcgtgtgctcggcgccacctgtccacgtgagggtgtgcgcgtgtgtgcgtgtgcgggcgtgtgctcgaggggggggccatctgcccacgtgagggtgtgcgcgtgtacgtgcgtgtgcgggcgtgtgctcgaggggccctggcctgcattggctcttctggctggggaggagggggcctgctggggaaaccatgctggagcccctgcgggaccgagcagctccaccccatcctccagaggctggaccgcacagcatccccgtccacgagcagcatcgactccgccaccgacactcgggagcgtggcgtgaagggcgagagtgtgctgcagcgtgtgcagagtgtggccggcaacagccagtgcggcgactgcggccagccggacccccgctgggccagcatcaacctgggcgtgctgctctgcattgagtgctccggcatccacaggtgggcccctgagggccaggctgggggtgggggttgggctggagcatccacaggtgggcccctgagggccaggccgggggtgggggttgggccggagctgggggccttgcctcccccagactcatccctacctctgctctccaggagcctgggtgtccactgctccaaggtgcggtccctgacgc

SEQ ID NO: 89 - DNA, 2300 bp, Homo sapien
gtggctcacgcctgtaatcccagcacgttgggagaccgaggtgggtgaatcacctgaggtcgggagttcaagaccagcctgaccaacctggagaaaccccatctctactaaaaatacaaaattaggcctggtggcgcatgcctgtaatcccagctgctagggaagctgaggcaggagaatcacttgaactcgcgaggcagagattgcggtgagccgagacagcaccattgcactccagcctgggtgacaagagcgaaactccgtctcaaaaaacaaaaaacacacaaacaacgatgtgggagactccaggatccagcaggtgccctccctgatctctcaccccacctggcacttggcctccagggatgtgcggaagttcaaggagacaaagaagcagtttgacaaggtgcgggaggacctggagctgtccctggtgaggaacgcccaggccccgaggcaccggccccacgaggtggaggaagccaccggggccctcaccctcaccaggaagtgcttccgccacctggcactggactatgtgctccaggtcagccccagaaatgggctggggggcggggaccagctgtagcgaatggaggcctcaacggccttgtacagaactggagggattttgagcaggagtgacgattcttgctttgcccatgggtgggaactccagacatggggaagcagtccaggaccatgggaggatgaggctggcccagagctgggagctgaagacgacctgggggtctcagggaaccacaagcagctcaggtggactctatggcaggtgcagggcttggggctgcctcagcctccggggctcacctgtgggctccccctctggcagatcaatgttctgcaggccaagaagaagtttgagatcctggactctgtgagtgcgtgggggctgcccctgagcacaggctgcatgttgggggctggaccgggtgtgcttgggcctcacctgtgctgcccccgcagatgctgtccttcatgcacgcccagtccagcttcttccagcagggctacagcctcctgcaccagctggacccctacatgaagaagctggcagccgaggtgagcctttgggaggggtggggctgggccaggcctccgtgaccttccctaatgccacccccaacagctggaccagctggtgatcgactctgcggtggaaaagcgtgagatggagcgaaagcacgccgccatccagcagcgggtgaggccgcgcagccggctccctgcacaccaggcgcctgggaggcccctgcgtcctcaccccatgcccggcacaccctccccgccccttcctcctgcctgtctcccacctgccctgcccacaccctctctaggggaccaaggctgctccctttgatgtgtgcagtggaggggcacgtgtgggtggggccgctgctgggatctccttttgaggcggtggtcacctctgtggcctcagtcactggctccttgcggggcctttgcttgcctgtgggacagcagccccggccaccatcccgggcagaggttggctgcaggcaggagtggctattttgggataggggagagccccccaggagttggggacgggtccaccagtcaccaggagttggggacgggtccaccagtcaccaggagttggcagccgtcactcactggctttctccccctaccccctcctgctccggccctccagacgctgctgcaggtaagtgagcacgggccctgggcgggctgtgggtcgggggagaccagatggggcggtgcctttccctcctctaccccaagggcacttcagcaccaaggacacctcccaccagtctcggctcctgctgctgatgcggctgtgaggggctggctccggccagacctccacattccccgtggggttggcggcagctgtcccttcccatcccatgtggcctggggagcaggtggccgcccctcccctctgcttccctggcctgccagatggcgggacacacagggccctcagtgactcccaggcctcctgaatggggctctgtccgcccagctggccacatgaatggggcactcaggatgcggagggtgggggcgcagcttccttcctgatcgcagcctgctggtccctgcagggctggggtggggccggcactctcgggcccccagctgtgaacgtgaggggtctgccccacgggttgcagggctgggggccttgctcaggtcaagaagtggctgtggtgaacagagggtctctcgtctgagcgtgtggtccgtgggccgtgtggcagcctcagacaaggacctcaccccca

SEQ ID NO: 90 - DNA, 2300 bp, Homo sapien
agctgaggtagaggtcagggtccaggggctgcaggctgggcactggcggtcagcggacaccacagcgagattccctccatcgccccctgcttcgggattcagagtcctcttagccccttgggaacaagagagggctgctcagagaggacctagtgtccttctggggtggctgggacccttcaaggtccctggctggggcagcctggtgcctgcagctccagctcctaattgaggacacgccccatgtaaaccacaggcccctcccccgaggcctgggacaccggtcagggtagcaaggtacgagggactgtaggccctgatggcctctgctcctggacccctgccctagacctggagtcctggccccagcccgggccctgtggtgcccaatccccaggaggccagatggcccggacagccagtgagccgattgtgtggagggctgccgggatcctggccctgtttccctgttgcctgctcccggagggggtggtcacgtgcccgatccatctgcctcctgtcttccggggattctcccgccgaggcttctctggtgatgtcatgccttaactcttctctccccaggcagccccactgtcaggctgtcctggtgggagtgggctctgaggaggatggcctacccgtctttccagcggaccatgccgcttgcagctgtgaggttgggggagccgggggcgtctctccccagctggtctgggtcctcctggtgctgccaggaccgagagcagctgccctactgcccccaccctgtcccacagtgcatgggtgccagacctggatgggctgcagtagtgcagtggggtgaggggaggtgccgcagggttgaggggctccagatgggtccagggttgactctgaactcctagaggagaggcgggtgaggctggctcagcccttggtgggcactgtccctgagggactcccagcggccggctgtcctgggagaggctggtccagccttcttccccgagggcacagcagcggctgcctctgcctgcctggggttgggggggcggggggaagtgcactgaacctggtcccagtcctgcccccgtagcaggcaggcgtctgtctcccagcctgtttcctgaaagccccttcccatggtggagcccctcagggaggtgcggggggaggtgaagccccgagggggctgaggctgcaggtgaccccagccagccccgttcttgctttagggcgaccattgacgaggtggagacggacgtggtggagattgaggccaaactggacaaggtgaagggcgggcctggagcgccctgtgcccggccaagcttgggatggccacatggccagactcgccctccaggccttactaagccacttacaccccccatatgtggagcatgcgtgtggtgctccaggtcctggtccctgtgtcttagcatgtgtgttccagggtgcacatgtcacatgcacacatgtggctggccctgagtctcgtcccatctgggaggggctgggctgtggtgagtccccgacccacggtggctgcccgtcccctctgctgggctggtgacacggggacagctgctgtgtgggctgagccttggtgtggctggggctggggctgagaaaggggagggggcaacaggccgtggaggggggagccgtgtccatgagccccacatgggctgagaaagagggggcaacaggccgtggagaggggagccgtgtccatgagccccacatgggctgagaaagaggagggggcaacaggccgtggagctgggagtgggcagccttatccatgagccccacatgggctggttctgctggtcctgctggccctgggtcccctgcctggctcctggtccctcccagccgagccgtggcggccccaccctcccctcccagacgggcctccaagccccaggcaggcccaggcgtgaggaagctgcaccggggcactgagtcctgagtgccaacgccctgagtggaacctaccctgggagctcttcctgcctctgagtggccgtgtgtggtggcgagtgcaggcgccagtgcccactgtgctcaccacgccccgctggcccacagctggtgaagctgtgcagtggcatggtggaagccggtaaggcctacgtcagcaccagcaggcttttcgtgagcggcgtccgcgacctgtcccagcagtgccagggcgacaccgtcatctcggtgaggggccgactgacctctgacctcaaggtggggttgggggagaggccgagggaggcagccccttgagggcgtccaggccagaagcaggccggtgtctg

SEQ ID NO: 91 - DNA, 2300 bp, Homo sapien
gccccagttcctctgcccagggctggcggccactctcctggctggccctgagcctcccactccaaggctcctgagcctcctggtgagggctccagggatacagaggctccccgtgcctccacacacatgctgacttgccagcagatcccaagagacccagcgcgcgcgtgcacacccacacatacacaatcaagcacacatgtgcaaacatgttcatgcacaaacatgcctgcacacactggtaccacacatacatgtgtgttcaaggagacactgcacagacacgcatcaacatgtgtacctagtgatggaacacgcgtgtacaaggtgatgtgtctattgctgacatggctaacacagtacgtgaacccacacagacaggtggtgtgtgcacacgcttgcgtgcactcatcggcaggctacatgcagaagcaagcacagccccgtggcacagctcatccacacgtcctgtgcaaggcctggtgtccggagggaggcacgcagaggggcaaagttcacaagagcgcaccccgcacgagctcgtgcagaggagggggcctcacgcaggtgcgcacttggggatgcagagaggtttctttgcctccattgtcgtttgccaaatgtccaccaagcaaagccgatgcacacttgtgcacacgtctgtgaacatgtagttcacgcaggtgtacacgcctgcacgccacgaatgatggaaaacatgcagactcggtgtgcacacaacccctaccccctacctgaccttccccgccgctcttctcggccgccacccctccaagcccctgggtcattcaaaccacttcacgtttccaagcaccctaccccaggccttaaacgcggctccagctgcctgttccccacgcgctgctctggacacaggatcaagtcagagaccaggggccgacgcccccacggacccagacgaccctggccagagctggactgcagggcccgggaggggctcagcccagtggaggtgcagacacagagcgggggcggacggtcccgaggtgcccacggctgcccacgcgcacgccctccacccggggcggccgcacagggcaggagcgtcttttgttccaacccccggggcatggcggggcggggccgccgctttgtccgaggccggtcctccagcccctccccggcggccgcggcccggcccggcgctgacctccccaccccgccgccgggcacaaaggcgacagcgacgcccccggcctgcgcccaccccggcggccccgggcggcgcacctgaagcgcggggagtccttgacgcactcctcgaactccacggtcatggctgcggcggccgcggcgctcactggcacgaggaccgcggcgccgagcggcagccgcgccggcccggaccgctcgtcccgcccgcgccgcctcggcgcccgcccgccccggaatgaggccgccgcgccgcgccccgccccgcctgtcaccgccggggagcgtcgccaaagtcagccgcccgcgcgcaccgcccgctgtcactgccggggagcgtcgccaaggtccgccgcccgcgcgcgccgcccgctgtcaccgccggggagcgtcgccaaacgcctctcgcagcgtccagggaccaccccggtccggaagtgaggcggggcctgccacggccgtctccggggacagtcggtggaaatgtggggcgcggggagggcgcggggagggcgcgggcccgcccgctccaaccatcccggccgttgcgcaactcagggcgtttgcaaaaaccacgtctgggaggacttggccgcaacgcggcgaacgggcgcgctcggggagtgtgggcggcggcgaatgaatgagcgagtgaacgaatgcacgcccgcgagagcgcggggtgaccgcgtggttggtgcgcgcctcccggggcgccgcgatagaggtagagcgcctgcgctcggcggcgggccggcactttgcagccgctccctaagcccggccccgcctccgctccccgactctggccgccgtggcgcggtgccaccgcgcaggcgcaagagcggccggggccgggggggagggggggggggcgtgaccaggccgcgtccgcgcgcgcgcaggattcctgcgctggaggccgcctctgacgccaccggctgggctccgccatgagttcggcgccggcctcaggctccgtgcgcgcgcgctatcttgtgtacttccagtacgtgggcaccgactttaagtaggtttcccaggcgcagcggcgggcgccacgtgggcccgggcggaggcgggaaggagggcgcgggcgggcaggc

SEQ ID NO: 92 - DNA, 2300 bp, Homo sapien
ccgcgtccagagacatccgcctgcccgcccgcgccctccttcccgcctccgcccgggcccacgtggcgcccgccgctgcgcctgggaaacctacttaaagtcggtgcccacgtactggaagtacacaagatagcgcgcgcgcacggagcctgaggccggcgccgaactcatggcggagcccagccggtggcgtcagaggcggcctccagcgcaggaatcctgcgcgcgcgcggacgcggcctggtcacgccccccccccctcccccccggccccggccgctcttgcgcctgcgcggtggcaccgcgccacggcggccagagtcggggagcggaggcggggccgggcttagggagcggctgcaaagtgccggcccgccgccgagcgcaggcgctctacctctatcgcggcgccccgggaggcgcgcaccaaccacgcggtcaccccgcgctctcgcgggcgtgcattcgttcactcgctcattcattcgccgccgcccacactccccgagcgcgcccgttcgccgcgttgcggccaagtcctcccagacgtggtttttgcaaacgccctgagttgcgcaacggccgggatggttggagcgggcgggcccgcgccctccccgcgccctccccgcgccccacatttccaccgactgtccccggagacggccgtggcaggccccgcctcacttccggaccggggtggtccctggacgctgcgagaggcgtttggcgacgctccccggcggtgacagcgggcggcgcgcgcgggcggcggaccttggcgacgctccccggcagtgacagcgggcggtgcgcgcgggcggctgactttggcgacgctccccggcggtgacaggcggggcggggcgcggcgcggcggcctcattccggggcgggcgggcgccgaggcggcgcgggcgggacgagcggtccgggccggcgcggctgccgctcggcgccgcggtcctcgtgccagtgagcgccgcggccgccgcagccatgaccgtggagttcgaggagtgcgtcaaggactccccgcgcttcaggtgcgccgcccggggccgccggggtgggcgcaggccgggggcgtcgctgtcgcctttgtgcccggcggcggggtggggaggtcagcgccgggccgggccgcggccgccggggaggggctggaggaccggcctcggacaaagcggcggccccgccccgccatgccccgggggttggaacaaaagacgctcctgccctgtgcggccgccccgggtggagggcgtgcgcgtgggcagccgtgggcacctcgggaccgtccgcccccgctctgtgtctgcacctccactgggctgagcccctcccgggccctgcagtccagctctggccagggtcgtctgggtccgtgggggcgtcggcccctggtctctgacttgatcctgtgtccagagcagcgcgtggggaacaggcagctggagccgcgtttaaggcctggggtagggtgcttggaaacgtgaagtggtttgaatgacccaggggcttggaggggtggcggccgagaagagcggcggggaaggtcaggtagggggtaggggttgtgtgcacaccgagtctgcatgttttccatcattcgtggcgtgcaggcgtgtacacctgcgtgaactacatgttcacagacgtgtgcacaagtgtgcatcggctttgcttggtggacatttggcaaacgacaatggaggcaaagaaacctctctgcatccccaagtgcgcacctgcgtgaggccccctcctctgcacgagctcgtgcggggtgcgctcttgtgaactttgcccctctgcgtgcctccctccggacaccaggccttgcacaggacgtgtggatgagctgtgccacggggctgtgcttgcttctgcatgtagcctgccgatgagtgcacgcaagcgtgtgcacacaccacctgtctgtgtgggttcacgtactgtgttagccatgtcagcaatagacacatcaccttgtacacgcgtgttccatcactaggtacacatgttgatgcgtgtctgtgcagtgtctccttgaacacacatgtatgtgtggtaccagtgtgtgcaggcatgtttgtgcatgaacatgtttgcacatgtgtgcttgattgtgtatgtgtgggtgtgcacgcgcgcgctgggtctcttgggatctgctggcaagtcagcatgtgtgtggaggcacggggagcctctgtatccctggagccctcaccaggaggctcaggagccttggagtgggaggctcagggccagccaggagagtggccgccagccct

SEQ ID NO: 93 - DNA, 2300 bp, Homo sapien
cgatgcacacttgtgcacacgtctgtgaacatgtagttcacgcaggtgtacacgcctgcacgccacgaatgatggaaaacatgcagactcggtgtgcacacaacccctaccccctacctgaccttccccgccgctcttctcggccgccacccctccaagcccctgggtcattcaaaccacttcacgtttccaagcaccctaccccaggccttaaacgcggctccagctgcctgttccccacgcgctgctctggacacaggatcaagtcagagaccaggggccgacgcccccacggacccagacgaccctggccagagctggactgcagggcccgggaggggctcagcccagtggaggtgcagacacagagcgggggcggacggtcccgaggtgcccacggctgcccacgcgcacgccctccacccggggcggccgcacagggcaggagcgtcttttgttccaacccccggggcatggcggggcggggccgccgctttgtccgaggccggtcctccagcccctccccggcggccgcggcccggcccggcgctgacctccccaccccgccgccgggcacaaaggcgacagcgacgcccccggcctgcgcccaccccggcggccccgggcggcgcacctgaagcgcggggagtccttgacgcactcctcgaactccacggtcatggctgcggcggccgcggcgctcactggcacgaggaccgcggcgccgagcggcagccgcgccggcccggaccgctcgtcccgcccgcgccgcctcggcgcccgcccgccccggaatgaggccgccgcgccgcgccccgccccgcctgtcaccgccggggagcgtcgccaaagtcagccgcccgcgcgcaccgcccgctgtcactgccggggagcgtcgccaaggtccgccgcccgcgcgcgccgcccgctgtcaccgccggggagcgtcgccaaacgcctctcgcagcgtccagggaccaccccggtccggaagtgaggcggggcctgccacggccgtctccggggacagtcggtggaaatgtggggcgcggggagggcgcggggagggcgcgggcccgcccgctccaaccatcccggccgttgcgcaactcagggcgtttgcaaaaaccacgtctgggaggacttggccgcaacgcggcgaacgggcgcgctcggggagtgtgggcggcggcgaatgaatgagcgagtgaacgaatgcacgcccgcgagagcgcggggtgaccgcgtggttggtgcgcgcctcccggggcgccgcgatagaggtagagcgcctgcgctcggcggcgggccggcactttgcagccgctccctaagcccggccccgcctccgctccccgactctggccgccgtggcgcggtgccaccgcgcaggcgcaagagcggccggggccgggggggagggggggggggcgtgaccaggccgcgtccgcgcgcgcgcaggattcctgcgctggaggccgcctctgacgccaccggctgggctccgccatgagttcggcgccggcctcaggctccgtgcgcgcgcgctatcttgtgtacttccagtacgtgggcaccgactttaagtaggtttcccaggcgcagcggcgggcgccacgtgggcccgggcggaggcgggaaggagggcgcgggcgggcaggcggatgtctctggacgcgggttccaaacgttcggggaaggaagcggccctggcctcagacggcggcggagaccccagggcagggcgcccccggtaacctccgcccgcttctgcccgcagcggggtcgcggccgtcaggggcactcagcgcgccgtcggggtccagaactacctggaggtgcgctcagccggtcacgggacgcccggtgaggggtaagggggaggctcccgcccgcgcgtccccggggtccggcctcgctcacccgcccgccccgcggctcggtcctgcaggaggccgccgagcggctgaattccgtggagccggtcaggttcaccatctccagccgcacggacgccggggtccacgccctgagcaacgcggcgcacctggacgtccagcgccgctcaggccggccgcccttcccgcccgaggtcctggccgaggccctcaacacacacctgcggcacccggccatcaggtgagcccgcgacctaagcagccctggggctgtgccttcccgactccatctgtcgcgggcggaggctggagatctggacagacttccttgtctggtcggagctcgagggggaaggagagccaatgtgacaccgcgggcgggcggggtcgttcctccggtga

SEQ ID NO: 94 - DNA, 2300 bp, Homo sapien
ccctccagctgtccaggtcctgaggactcccggctgcctgcctcccgcctcaccttgccttaaaactgggggaggtgctggagctaaaatcagcacgtgacttgagggcagggccacagcccaggggcccttcctcacctgctctcctcgggggtgaccaaggggctggcttggcctggggaaacggagacccggcgcagcgttcgcacggggctcggcaccgggctgccagcggactggaaggcgctgaagtcgtgtgtgccgaggaggtgctgggcggcttcctgcatggcgaccatatccaggcagcttcagggaccagggtgaccgtcaggagggtggggccggcctgcccgccccctccccgctgtcagggccacactcactctgccgggagagtccagcataggttgcgttcaaacaccggcagctcatcacgccggtgacagccagtggccaggcggtacaggtaggtccgggacgtggctgcgtgacgagcgtggaagtcgctgggcactcggaaggcccgcaggaccctatggcggcaggtaaagctcaccggaggaacgaccccgcccgcccgcggtgtcacattggctctccttccccctcgagctccgaccagacaaggaagtctgtccagatctccagcctccgcccgcgacagatggagtcgggaaggcacagccccagggctgcttaggtcgcgggctcacctgatggccgggtgccgcaggtgtgtgttgagggcctcggccaggacctcgggcgggaagggcggccggcctgagcggcgctggacgtccaggtgcgccgcgttgctcagggcgtggaccccggcgtccgtgcggctggagatggtgaacctgaccggctccacggaattcagccgctcggcggcctcctgcaggaccgagccgcggggcgggcgggtgagcgaggccggaccccggggacgcgcgggcgggagcctcccccttacccctcaccgggcgtcccgtgaccggctgagcgcacctccaggtagttctggaccccgacggcgcgctgagtgcccctgacggccgcgaccccgctgcgggcagaagcgggcggaggttaccgggggcgccctgccctggggtctccgccgccgtctgaggccagggccgcttccttccccgaacgtttggaacccgcgtccagagacatccgcctgcccgcccgcgccctccttcccgcctccgcccgggcccacgtggcgcccgccgctgcgcctgggaaacctacttaaagtcggtgcccacgtactggaagtacacaagatagcgcgcgcgcacggagcctgaggccggcgccgaactcatggcggagcccagccggtggcgtcagaggcggcctccagcgcaggaatcctgcgcgcgcgcggacgcggcctggtcacgccccccccccctcccccccggccccggccgctcttgcgcctgcgcggtggcaccgcgccacggcggccagagtcggggagcggaggcggggccgggcttagggagcggctgcaaagtgccggcccgccgccgagcgcaggcgctctacctctatcgcggcgccccgggaggcgcgcaccaaccacgcggtcaccccgcgctctcgcgggcgtgcattcgttcactcgctcattcattcgccgccgcccacactccccgagcgcgcccgttcgccgcgttgcggccaagtcctcccagacgtggtttttgcaaacgccctgagttgcgcaacggccgggatggttggagcgggcgggcccgcgccctccccgcgccctccccgcgccccacatttccaccgactgtccccggagacggccgtggcaggccccgcctcacttccggaccggggtggtccctggacgctgcgagaggcgtttggcgacgctccccggcggtgacagcgggcggcgcgcgcgggcggcggaccttggcgacgctccccggcagtgacagcgggcggtgcgcgcgggcggctgactttggcgacgctccccggcggtgacaggcggggcggggcgcggcgcggcggcctcattccggggcgggcgggcgccgaggcggcgcgggcgggacgagcggtccgggccggcgcggctgccgctcggcgccgcggtcctcgtgccagtgagcgccgcggccgccgcagccatgaccgtggagttcgaggagtgcgtcaaggactccccgcgcttcaggtgcgccgcccggggccgccggggtgggcgcaggccgggggcgtcgctgtcgcctttgtgcccggcggcggggtgggga

SEQ ID NO: 95 - DNA, 2300 bp, Homo sapien
cagctgtttgcagctgaagaaacaaactggtctccaggctgtcttgcctttattcctggttagggcaggtggtcctagacagcagtttccagtaaaagctgaacaaaagactacttggtactctcttcttggtgtacatggctgtgtcctgcactgtgccccatcccgcctgggacagagacgggcatccagggtgctgggacccgggcagggaggctactgtggagaccaggcagcagtgctgtgggccccaagcagctgtgactgccctggcttgaccagcacagggttgggcctggtgtggcctaactttggcttgagtgtccagggtcatccgtggctcccgaactgtggcccctgcagggtgcaggaggcagcacctgtggacggaccagaccctgcgtcagcctggggcaagaccggcccagcaccctccccaccgctgagaccactcccatgaccagggagtgggccagcccaggacgggctacgggctggcctgagggactgcagccctgggcggggggctgcttcacccccagttgctgccgtcagtggcccctggccccccaccccatgcctcggccacagtagtcactgggcacatgacaggagcttctcgtgcctgtttttcttaccgaggttcccgtacagcactgacttgaggaataagccgtgggctggggctacacgtgtctggtgcttgcccaggggatcttggctctccagaatcgtcttcacctgggcaggtgccaaagcccccagccccacggccaccagcacagccgtcatcctccgtacctgtgacccagagccacctgtgacccagagccgcccgtgacccaccagcacagccgtcatcctccgtacctgtgacccagagccgcccgtgacccaccagcacagccgtcatcctccgtacctgtgacccagagccgcccacgacccagagccaagactgcacaggggcctgcccaccctcagccccaccccctggggacggccccagaacagagcctacctgtctatacaggaaagactggctctcaaactccaggttccagaaccgcagcttcctggaaaaatacgtacctgtaggtgtctgtggggcagtgtttgccatcctcagcctactatgtggccttggacgggagagtgacagggtgggcctaaagacgagcctggttcccactagcttggccaccaggggccctggctgatctcctgcccccagtgaggcccattggaggggcttaaaaccagagaaacaatgcttgggcaaggaggcagcaggaccctggaggctgggcaggtagcctggccatcccagaggggcttgccctgggccctcacctagggtcctggtgcagggtctgggaacgtggctggtgcgggtgccagagacccccagtcctgtacctgctgctctgccacagaagtctggggctggcagaagttcttccccccttcagggctcaccccaataggggaggttctggtcagaagctgccacctggtgggtggccctcgggacagtgctgggggcagcagaaaccaccccaccagaaccactggcaccagtgagacctttccagtagctgccaacattcttccatcaggcatggcaggggtttttcagagacaagcagccttccctgttctccgctccccagcctggggggagggcacagctggaggctggggggcgtccgggcgaatcccctccagctgtccaggtcctgaggactcccggctgcctgcctcccgcctcaccttgccttaaaactgggggaggtgctggagctaaaatcagcacgtgacttgagggcagggccacagcccaggggcccttcctcacctgctctcctcgggggtgaccaaggggctggcttggcctggggaaacggagacccggcgcagcgttcgcacggggctcggcaccgggctgccagcggactggaaggcgctgaagtcgtgtgtgccgaggaggtgctgggcggcttcctgcatggcgaccatatccaggcagcttcagggaccagggtgaccgtcaggagggtggggccggcctgcccgccccctccccgctgtcagggccacactcactctgccgggagagtccagcataggttgcgttcaaacaccggcagctcatcacgccggtgacagccagtggccaggcggtacaggtaggtccgggacgtggctgcgtgacgagcgtggaagtcgctgggcactcggaaggcccgcaggaccctatggcggcaggtaaagctcaccggaggaacgaccccgcccgc

SEQ ID NO: 96 - DNA, 2300 bp, Homo sapien
tcatgtattcaaagtccacgctggaaactccaatttcaggtcccttcagttttttgtccgttgtctttcgttctttgtccacgttgcccgtcccttgtgaactggatgctgtgtgtgagcaacagggactgaaaagctcagtgcagtgccctcgctccccgccccgcctccctccctgcccccgcccccctcactccctgcccctgcctccctcgctgcccgcctccctccctccctccccgcccccacctccctcgctcccgcccccgccccctcgctccccttcccccacgctccccacccccgcctcccgcgcttcccgtcccccgcctccctcactccccgcccctctgctgtgaggacacagcctgagcgcagccctgtcctccacaggtagatgatgagctggagatcaaggcctactatgcaggccacgtgctgggggcagccatgttccagattaaagtgggctcagagtctgtggtctacacggtcagtggaagggcttgaggcttgggaggggctgctggggtgggaggcaccctcctcatggcatccttgatcgttcaccagggtgattataacatgaccccagaccgacacttagggtaagtaggctgaggtgtctttttgtcccgtgggcccccctggagctcaggacccttgcaggtgtcagggtgccagcccttgagtggccagcctggcagtgtctcccatgtcctgtgcggcctggagagcccccttcgttctgggcccaaatgcgcgaaggcacagggtccaggcaggggcctctgtccctccttctctctcttcccaagtctctgggtgggtgcctctgtctcgctcttccgaagtgtctgggtgggtgcctctgtctctcctctctcttcccaagtgtgctgcccacagcattttaccagctggctctttccagccagagtgacctaggaaggcggctgggcgtggtactggggtccagcttgtcacacccagccctgcaaccgtggggacagtgcatcgtggctcacacccccacccccgtgttccagagctgcctggattgacaagtgccgccccaacctgctcatcacagagtccacgtacgccacgaccatccgtgactccaagcgctgccgggagcgagacttcctgaagaaagtccacgagaccgtggagcgtggtgggaaggtagctgcagcaggggtggggacatgggccctcggccatgctgggctggtctttctggcaggcttggctgcccttggcatgggtcagggtctcagggtggggggtactgcattttcaggcagggagggaagaagatttgctcaacattgaggaggaaaactcagagaccctttcctagggagccccttttccctcctacctcaggtgcggacgaagccctggccaggctccttctgtctctcatgcagctcccttctgtctctcatgcggctccctcctgtctctcatacggctcccttctgtctctggagagcggctgggacgggactgggagcagatgagaggctaaggtccctatgaggccgcagctcttgggcacctggccgtgccctcactggacgctgcctgctgtgtcgaggggccatgtgcccagggctcctgccttgtgtccccctcaggtgctgatacctgtgttcgcgctgggccgcgcccaggagctctgcatcctcctggagaccttctggtaggtgccgccaggacggctctttaaggagcccctggcccggcctgaacacagtccagttggtgggcagccctgtccagcgtagcggtggcatcttggccctgcttgctgctgtcctggggggccgctcgtgtgctgtgtgaccccaggaagcctgtgacatcccgtcagcgccaccgtgtgcggctcttgtaggggttcctggttctccgctgagcccggctgctgcagggcttaatgggacaagtggtcgcgactggactcaacctggcccgtgcgtgggctgtgcagacacgggtgttgggggtgacccggccgagtcctgccctgcagcattctcccctgtggccactgtgctgactgggccggtggtccccagggagcgcatgaacctgaaggtgcccatctacttctccacggggctgaccgagaaggccaaccactactacaagctgttcatcccctggaccaaccagaagatccgcaagactttcgtgcagaggaacatgtttgagttcaagcacatcaaggccttcgaccgggcttttgctgacaacccaggaccgatggtgaggcccgcggcagggcc

SEQ ID NO: 97 - DNA, 2300 bp, Homo sapien
gatctgtggcttgaggccttcatcatgtttcttccagtgttgtttctgccccgttcctgctcctccagggaccccgagagcctgacgttcaacctcttgaaactccgtcatctgtttgtctttcctgtttcctgatggatattccctctggtgtctttcagttcatggattctcttctggttatgtgtcatatggtgttaaattcatctgttgaattctttttttttttcttttttttttgagatggagtttcgctctcattgcccaggctgtagtgcagtggtgcgatctcagctcaccttgaacctccgccttctgggttcaagcgattctcctgcctcagcctcccgagtagctgggattacaggcgtgtgccaccacacccagttaattttgtatttttttttagtagagacgggggtttcaccatgttggtcaggctggtcttgaactcctgatctcaggtgatccacccgccttggtctcccagagtgctgggattacaagagtgagccactgcgcctggccaaaattttgtttttaaattagcctggcgtggtgggtgcgtgcctatagtcccagctatttgggaggcggaggtggaggcgggaggacgcttgagcccaggagtttgagtgagccatgattgcgccactgcagcctgggtgacagccccaccctgtctctcaattttatttatttatttttttttgagacacagtctcgctctgtcgcccaggctggagtgcagtggcgcgatctcggcttactgcaacctccgcctcccgggttcaagcagttctcctgcctcagcctcccgagtagctgggattacaggcgcacaccaccacatccggctaattttgtatttttagtagagacgggctttttccgtgttggtcaggctggtcttgaattcccaacctcaggtgatccacccgcctcagcctcccaaagtgctgggattacaggcatgagccaccgcacccggcaagttttaaatgaataaattaaatttaaaagaagtctagttttttgccaatttttgtttttgacactctcgctcttgttgcccaggctggagtgcaatggcacaatctcagctcactgcaatctccgcctcccgggttcaagtaattctgccttagcctactgagtagctgggattacaagcacccaccaccatgcccagctaacttttgtatttttagtagagacagggtttcaccgtgtcggccaggatggtcttgaactcctgacttcagatgatctgcccaccttggtctccccaagtgctgggattaaaggtgtgagccactgtgcccagcccagtatttttttgtttgtttttaccgagatggagtcccgccccattgcccaggctagagtgcagtggcgtgatctcagtacactgcaacctccacttcccaggttcaagcgattctcctgcctcagcctcctgagcagttgggattacaggcacgcacttccacacctggcttacttttgtatttttagtagagacggggtttcaccatgttggccaggctggtctccaattcctgaccccaagggatccaccttaggcctggccgccaacattctgaaccttgtcttttctctgtcatgtattcaaagtccacgctggaaactccaatttcaggtcccttcagttttttgtccgttgtctttcgttctttgtccacgttgcccgtcccttgtgaactggatgctgtgtgtgagcaacagggactgaaaagctcagtgcagtgccctcgctccccgccccgcctccctccctgcccccgcccccctcactccctgcccctgcctccctcgctgcccgcctccctccctccctccccgcccccacctccctcgctcccgcccccgccccctcgctccccttcccccacgctccccacccccgcctcccgcgcttcccgtcccccgcctccctcactccccgcccctctgctgtgaggacacagcctgagcgcagccctgtcctccacaggtagatgatgagctggagatcaaggcctactatgcaggccacgtgctgggggcagccatgttccagattaaagtgggctcagagtctgtggtctacacggtcagtggaagggcttgaggcttgggaggggctgctggggtgggaggcaccctcctcatggcatccttgatcgttcaccagggtgattataacatgaccccagaccgacacttagggtaagtaggctgaggtgtctttttgtcccgtgggcccccctggagctcaggacccttgcaggtgtcag

SEQ ID NO: 98 - DNA, 2300 bp, Homo sapien
ggctgacctgtgctgcgtccccctagccacttccacctggaccactgcggggcactcccctacttcagcgagatggtgggctacgacgggcccatctacatgactcaccccacccaggccatctgccccatcttgctggaggactaccgcaagatcgccgtagacaagaagggcgaggccaacttcttcacctcccagatgatcaaagactgcatgaagaaggtggtggctgtccacctccaccagacggtccaggtcaggttcccagggccacagctggcacagtcactgcccacccccacaccaaccatgccctccgcccgttctacacagtttctggaaggctggggcctcagggtgagcccaccccacctcactcttgcgtccagcaccgtggggacaccaggaggcgtcagcgcgaggatgcgggtcccagaccagactgggcgccgacccgggagagcacgtgcagggtgggggtatgcaccggcttatgaacccaccaggctctgtccgagcggcattgaaatggccagagtgggacaggctggtgccctcagagcgcttggagcggccagagactcgctggagctcccggggtgttgccgggcagggaggcaggggctggaggggagatgggccagctctggagggtgcctggttctgggtgtgggtcagggaagaagtgaaggttaaatcagcgagtgacaggtgaaattccatttctgacaaagattatgggtttgtctgtgtctcactcgaatctctgggtattgcttttatatttcttgaaactatattaggtacctatgtattttggaacatttaattttctgattgaacttgtcaaaatgaagtatgtttatcttttttgttgtgaaactttaatttttttttttttttgacagtgtctcactttgttacccaggctggagtgtgatcttggctcactgcagcctcggcctcccgggttgaggtgatctcccacctcggcctcccaagtagctgggactacaagcatgtgcccatacgcccagctaatttattttggtattttttgtagagatgggtatgtgttgctaaggctctcgaactcctgggctgggctccagggatcctcccacctcagcctctcaaagtgctcggattacaggcatgagtcaccacacctggcaactccctcagtacattttaaacccagaaagacatcatttctaatgcctggtaacaccaacatttgcttagttttatttatatatttatcctttttgttgggcttcctgcattttttctactttttacttgggataatttgccttctgcctgaagaatatgagtgtgggtctgctggtgctgaattctgtcaatttttatttgccttggccaggcgcggtggctcacgcctgtaatcccagcactttgggaggccgagacaggcggatcacgaggtcaggagatcgagaccatcctggctaacacggtgaaaccctgtctctactaaacaaaatacaaaaaaattagctgggcgtggtgcgggcgcctgcagtcccagctactcgggaggctgaaaggcaggagaatggcgtgaacctgggaggcggagcttgcagtgagccaagatcccaccactgcactccagcctgggagacagagcgagacgcgagactccggctcaaaaaaaaaaaatttatttgcctgcaaatggatttactttatcctcgttcttaaaggactttttttcccttaggtgtgtaagattttaggttgacagtattttgtctctgcactttgcaaacaacgttctgtctctgggcatgggcagccgtagggtctgagcaggagccttggtttttggtgcttgtgctctgatgggctgacatgtatcctcagcctgtttagagtttgaggcctcttggatctgtggcttgaggccttcatcatgtttcttccagtgttgtttctgccccgttcctgctcctccagggaccccgagagcctgacgttcaacctcttgaaactccgtcatctgtttgtctttcctgtttcctgatggatattccctctggtgtctttcagttcatggattctcttctggttatgtgtcatatggtgttaaattcatctgttgaattctttttttttttcttttttttttgagatggagtttcgctctcattgcccaggctgtagtgcagtggtgcgatctcagctcaccttgaacctccgccttctgggttcaagcgattctcctgcctcagcctcccgagtagctgggattacaggcgtgtgccaccacaccc

SEQ ID NO: 99 - DNA, 2300 bp, Homo sapien
accgaggtgttggccccacagaccagccgttgtctctgttggaggctgagggccacagcacagtgcccactacttagccagcaggccgtggccaccttaagaggccaggggaagctggcgggggagggcgtgtgggctgccagcctccaccctggacatgatggtgtggggcatggtcccctgtgtcccccttcctgtgagtaggggtggccctgcttcttggcccatgtgtctgtccacacagcagacttggtccggtttcctcagtgcactggggtcctgcagagcttggggaggcagcacagggggcggggggcgcagcagtgactcatctgccctccctcgagtaggggccggccaggacgtgggccgaagctgcatcctggtctccattgcgggcaagaatgtcatgctggactgtggaatgcacatgggcttcaatgacgacgtgagtcccttgggcaggaggcccagaggctgggagagccggccatccacagctggaccctgggcctcagagccgggacagtggggtggtgggcagcagtggttgtgcttggatggctgcaccctgtggggagcagggatgggtgggcctggccgaggtgagcccctgcatggtggggtccccctgtgctggcgctgagccccagccccggggtcctgtaggctggactccgtgagaccctgggctcagcttccagctcacatctgtcagtgaggttgggggtaacctcggcccctccggatgctgtgagcagccaggggtcctggtgccacctgcgggatgggagtgcccagcctgagtctgcacatagaaccccccttcctgggggcccctccctggggcatgggtggccccagatgctgcctggagaccactgtgcaacctgaaacccccacatccttcctagcgacgcttccctgacttctcctacatcacccagaacggccgcctaacagacttcctggactgtgtgatcattaggtgggttcctgttgggggccttgagggtcccatgtctgtgcctgtggggcttgggccaccttgcttggtctcggcagcgtttggcaaggggcctgtgccatccttgatcctcagggggcttctaggccccaggatctgctccctgcctgccttactggtcacacacatggcctggtctctgtctgttcttccggccctgccctctgaaccctactttctgaacccggccctccaggcttcaccctctctgatgccttcactgtctcaggatctttaaaccccactgtcttgttggcgattccagagtcccgagtctgccctgaccccagcctttagggttcagcagctcatgacccgctggtctgggtggcctcgtctggacggccacagcactcctgctggccccctgcccttccctgccctgtcctccccagcagccaggcccgtgaagcctggagaagccccttctcctctccggaggcagtgtcctcagctgcccctgagcccctcgtggttgtggtttcttctcagacacggtggggtccccagtgccttcctggggcttgccaggcgctgcccttgccctcaggtctgtgccaccttcacctgcagctccactcagcctgtcctgactgcctgaaaagccagcggctcccctatgcgcggttccctcagcagctttgcattgtctcgcgagcatgtcgccgtcaccgacgtgttcaatttcccgtttgcttattgccttgctagactttgagactgaaagttccagggagacagttttgtgtttgctcattactgactcttcggtactcgggatgaggcctggcgcacagcaggcgaatgaaggggccagtgacccacaagcccagagcgggggtgaaggctggggcagggtgggcccaggctgacctgtgctgcgtccccctagccacttccacctggaccactgcggggcactcccctacttcagcgagatggtgggctacgacgggcccatctacatgactcaccccacccaggccatctgccccatcttgctggaggactaccgcaagatcgccgtagacaagaagggcgaggccaacttcttcacctcccagatgatcaaagactgcatgaagaaggtggtggctgtccacctccaccagacggtccaggtcaggttcccagggccacagctggcacagtcactgcccacccccacaccaaccatgccctccgcccgttctacacagtttctggaaggctggggcctcagggtgagcccaccccacctcactcttgcgtccagcaccgtggggacaccagg

SEQ ID NO: 100 - DNA, 2300 bp, Homo sapien
gcgtgggagtgaccccaaggacacagcagtggtccagtgagcgcggacacggagcccgaggcagtccctggtgcagggaagcggtgaaacaggacttcggctttgatgataccttggctgaggtgaccttgagaatatacccaggtacagattgcgggtaattgaagccacatgaaagatcagaaagatcagatgtccagagagtgggcagaacaggcagccaagaggccaaatgggaaaggggcaggctgggaggaccccacggaggacccagagagcaggggagggcagtggggcccatgcaaacagctgcaaaatgccatggggtgtgcacaggccaggggtgttcacagcacagtgtccacaccggggcggggggcaccctccgaggaagcgctcacgccatgggggaggacatggaatcccgtcctggtgtctgtgctggaaggtgccctcgaccccctgcccggtggaaggaccaggttccaggacagcacagggcaggcacctgtggaaaacgctaaggacatcaggatgactggccaccaacaccatgtccctccagctgtttctgagaccctggattttgactaattttttccttcttcacatcgttctatactgttacgactttgactttcttttgagacatggttttgctgtcacccaggctggagtgcagtggcacaatcatggctcactgcagcctcaacctcctgggctcaagcaatcctcacaactcagcctcccaagtagcttgaaccacaggcacacaccaccacgccctgccaattttagcattttttttttttggagtgatggggtcttgccatgttggctaggttggtcttgaactcctgggctcaagcgatcctcccacctctgccttccaaagtgctgtgattgcaggcgtgagccacagtgcccagactgtcaggacttttaggagtacatatttgcgttttttgctatttttttcagtgttgcagaaatcaggtagaacaagagctaaagtgagagttgattgtaactcgggcgtgagcacacagagtggtggacagaaagcaagacgtgaggaggcagaagcggggctggggggctgaggggcttgcggggttaaggggcttgggggctgggggactggggggctgaggggctggggggctgagggtctgggggtctgctgggctgaggggctgggggactgaggggctgggggactgagggtctgctgggctgagggtctgggggactggagcgctggggggctggggggctgagggactgaggggctgaggggctgggaggctgagaggctggggagctggggggctgagggtctgcggggctgaggggctggggggctggggggctgaggggctggggggctgaggggctgggaggctgagaggctggggagctggggggctgagggtctgcggggctgaggggctaagggactgaagggctggtagggctggaggcggcagcgcgcggcacggggaggtcaaggcaccgacgaaagcgcacagcgagcgcgaaggccccgcggccccatctgcgacgtcccctcacggccgcctgaacctcggggctcgcgttctcgcgtcactgccggaggcccggggtgcagggactaggccgcctctcggctcccaccagggcccgcgcggggaggagaccggaggacgcccgcggcgcgcacctggctccacgagaaacgggagggagcggggcgcccagcccgcccggagccgcatacggagcccaccccacagccctcccggcggctcccactcacccaagggcgtgactctgatctcaggcatcgtctccgccgcgctcccggacccgcgaggcccgcctgcggtgatgcactgcgcaggcgcaaccacctcgctgcaacttccggtgcgctagccggaaacgcgggtcggggcgccgggcctcctgattgggcagcatccaaccaatcagggcggcgggcgagggcggggcgagggcggggcggtgggcggggacggggcccgcacggcggctacggcctaggtgagcggctcggactcggcggccgcacctgcccaacccaacccgcacggtccggaagtcgccgaggggccgggagcgggaggggacgtcgtcctagagggccggagcgggcgggcggccgaggacccggctcccgcgcaggacggagccgtggctcaggtcggcccctccccaacaccaccccgggcctccgccccttcctgggcctctcggtggagcagggacccgaaccggtgcccatccagtccggt

SEQ ID NO: 101 - DNA, 2300 bp, Homo sapien
catggagcttcctcccaggagctgcctggctctgctcccagccaagccgcaggctctcaggcacaccaccctgacccacccttcatcaggattgcgcattcagggaccttggcacagcccctcctgtggatcaggccactgactccgtgtcagtccctgaccccgagagtggccccctctggctttatcagaccactaggccccgctgtctgcagcaggtgtctctgctggtgctttcttgtttttgtttctctctctagatgctgtatctgcttttaccagctggagaaatactaagcccctgccgagagccaagcaccatcctagccatctatctgggtgcatggggagtgcgagcagccatctggggtggggtcagatgacaacaaagacaggaagttctgaagtcctagacaagaaaacagacacagcagaaagcagagacaggtggggccgggggtggggggatgctgccgggcaggctgccccatcttcctcactgctacatccccaaaagcagaaaagaggctgtagggctggcacttgctggatggatggacacgtgttttcactcctgttgctgaaactccatgtcccacacagatgggttttaccactcagaagattgccacgaggctcttgtactagccctagggagccttccacgagtggcccaggccctgctttggattctgctggcattcacatagtcactccacagatccacagacatccaggcacccatgctttgtgtgagtgttgccaagcacccttgccctgtctccccgggtgccccacgggcccgcacctgctctggggaacctgagagtcagctgcattccacctcgaccaggaagagggcctgggggttcctaggccggttggtgctgggagccctgtcctggcctccctggctgcagggactccatcggtgggggagggggaagggcacccagccgtggtgagagctcctggccaggagcaggtgggcaggttgctcagcaccctaggactgggcccttcatcactagggatcatgggctgcaagccctgcccagcccgtggcccaggctgctggagcactggtgcctgcagggtgctgaagcctggcgttgcaggccccacaggttgggttgcatgcttggcaccaggcggaggccccagatgtgagctcaccgggcttcaggtgtgggggatggctgctcctgggcctcagaaagatgcagtcccatagacttccagcacgcccctcccctcctcgggccttaattttgtccactgagaagatggtctctgaggctctggggtttccttcttggtcaccagatattctgcgggccttgccttcctgcccagattcgagccagtggcaaacagaagctgccaggagcttctcagagctgtggctggtggctcggtaacaacaggaagggcagtggctgtgcaggaggcaggcagcttgccagcccaggaaggtgacccaggacacctccaggcctttcccagggcagcccaacggcccaaggtcagggccgggcgcgagggcggcctgagcacagagcacgggggctgacagcaggctggggggccagcaggagacggggccccacggcgccccaggccttgtgggtgggaccagaccctgtcgagcgagcgctacgagtctcacctgggaagggggcttcagatggcaccggactggatgggcaccggttcgggtccctgctccaccgagaggcccaggaaggggcggaggcccggggtggtgttggggaggggccgacctgagccacggctccgtcctgcgcgggagccgggtcctcggccgcccgcccgctccggccctctaggacgacgtcccctcccgctcccggcccctcggcgacttccggaccgtgcgggttgggttgggcaggtgcggccgccgagtccgagccgctcacctaggccgtagccgccgtgcgggccccgtccccgcccaccgccccgccctcgccccgccctcgcccgccgccctgattggttggatgctgcccaatcaggaggcccggcgccccgacccgcgtttccggctagcgcaccggaagttgcagcgaggtggttgcgcctgcgcagtgcatcaccgcaggcgggcctcgcgggtccgggagcgcggcggagacgatgcctgagatcagagtcacgcccttgggtgagtgggagccgccgggagggctgtggggtgggctccgtatgcggctccgggcgggctgggcgccccgctccctcccgtttctcgtggagccaggtgcgcgccgcgg

SEQ ID NO: 102 - DNA, 2300 bp, Homo sapien
tctcctctccacagcctgctgggcaactccaggaatcggggggtggcaaggggctcagccacaggcagggaacaaggccacggccagcaactgagcagagcctgcctgccggtcaacgctggccatagagcctggcagtggcctcaggcagagtctgacgcgcacaaactttcaggcccaggaagcgaggacaccactggggccccagggtgtggcaagtgaggatggcaagggttttgctaaacaaatcctctgcccgctccccgccccgggctcactccatgtgaggccccagtcggggcagccacctgccgtgcctgttggaagttgcctctgccatgctgggccctgctgtcctgggcctcagcctctgggctctcctgcaccctgggacgggggccccattgtgcctgtcacagcaacttaggatgaagggggactacgtgctgggggggctgttccccctgggcgaggccgaggaggctggcctccgcagccggacacggcccagcagccctgtgtgcaccaggtacagaggtgggacggcctgggtcggggtcagggtgaccaggtctggggtgctcctgagctggggccgaggtggccatctgcggttctgtgtggccccaggttctcctcaaacggcctgctctgggcactggccatgaaaatggccgtggaggagatcaacaacaagtcggatctgctgcccgggctgcgcctgggctacgacctctttgatacgtgctcggagcctgtggtggccatgaagcccagcctcatgttcctggccaaggcaggcagccgcgacatcgccgcctactgcaactacacgcagtaccagccccgtgtgctggctgtcatcgggccccactcgtcagagctcgccatggtcaccggcaagttcttcagcttcttcctcatgccccaggtgggcgccccccaccatcacccacccccacccagccctgcccgtgggagcccctgtgtcaggagatgcctcttggcccttgcaggtcagctacggtgctagcatggagctgctgagcgcccgggagaccttcccctccttcttccgcaccgtgcccagcgaccgtgtgcagctgacggccgccgcggagctgctgcaggagttcggctggaactgggtggccgccctgggcagcgacgacgagtacggccggcagggcctgagcatcttctcggccctggccgcggcacgcggcatctgcatcgcgcacgagggcctggtgccgctgccccgtgccgatgactcgcggctggggaaggtgcaggacgtcctgcaccaggtgaaccagagcagcgtgcaggtggtgctgctgttcgcctccgtgcacgccgcccacgccctcttcaactacagcatcagcagcaggctctcgcccaaggtgtgggtggccagcgaggcctggctgacctctgacctggtcatggggctgcccggcatggcccagatgggcacggtgcttggcttcctccagaggggtgcccagctgcacgagttcccccagtacgtgaagacgcacctggccctggccaccgacccggccttctgctctgccctgggcgagagggagcagggtctggaggaggacgtggtgggccagcgctgcccgcagtgtgactgcatcacgctgcagaacgtgagcgcagggctaaatcaccaccagacgttctctgtctacgcagctgtgtatagcgtggcccaggccctgcacaacactcttcagtgcaacgcctcaggctgccccgcgcaggaccccgtgaagccctggcaggtgagcccgggagatgggggtgtgctgtcctctgcatgtgcccaggccaccaggcacggccaccacgcctgagctggaggtggctggcggctcagccccgtcccccgcccgcagctcctggagaacatgtacaacctgaccttccacgtgggcgggctgccgctgcggttcgacagcagcggaaacgtggacatggagtacgacctgaagctgtgggtgtggcagggctcagtgcccaggctccacgacgtgggcaggttcaacggcagcctcaggacagagcgcctgaagatccgctggcacacgtctgacaaccaggtgaggtgagggtgggtgtgccaggcgtgcccgtggtagcccccgcggcagggcgcagcctgggggtgggggccgttccagtctcccgtgggcatgcccagccgagcagagccagaccccaggcctgtgcgcagaagcccgtgtcccggtgctcgcggcagtgccaggagggccaggtgcgcc

SEQ ID NO: 103 - DNA, 2300 bp, Homo sapien
cctgctggggctggggtcccacaggcgaggggaggctgggctgggcggcatctgaggggctggggccacggcctccccacccaccctgctcttgttgcacagcccaaatgtggccagcagccgtgacgggatggacaacgagacaggcacggagtccatggtcagtcaccggcgggagcgtgcccgacgccggaaccgcgaggagggtacagtggtcatgtctgcccagctgtggacccccagcctccctgggacccccatgagccatgttcctactacagcagttcctgtcccccagccagtggcggtgcttgggtggaggcacaggcccagcgagcctacagttgagctgccagctcccagacccacaggcatgcagcactgcccaggcagccccaaacccatgacctctgggagaccctgcagtcagttcccaacctgctgcccccacagccgcccggaccaatgggcacccaaggggagaccgacggcgggatgtggggctgcccccagacagcgcgtccaccgccctcagcagcgagcttgagtccagcagctttgtggactcggacgaggatggcagcacgagcaggtgtgtgggagtgtctgtgggcgtgtatgcctgtgtgcccacttgcaaatgtctgtacatgatgtgcatgtgtctgcatgaggtgttttcacattgcacgtgtgtgcgtgtgtgtgcatgtgtgtgcctgcaaatgtctgtgtacatgatgcacgtgtgcttgtgcacgtgttccacatgaggtgttttcactgtgcacgtgtgtgcgcgcctgtgtgtgtgcccgcgtgcaaacgtgtacatgatgcacgtgtctgcttgtgcatgtgtgtctgtgtgaggcgttttcacattgcggatgtgtctgtgcatgtacctgtgtgcaaacgtttatgtacatgatgcgcatgtctgtgtgtgcatgtatgtgtgtgtgaggtgcgttttcacagtgtgcacgtgagcgttttcacaatgcacgcgtgtgcgcaggtgtgtgcatgtgtgcgtgtgcgtgtgtgcaggtgtgcgtgtgcagatgtgcgtgtgtgcaggtgtgcttgtacaggtgtatgtgaaggtgtgcgtgcaggtgtgcatgtgcaggcgtgcgtgtgcaggtgtgtgcaggtgtgcctgtgtgcaggggtgcgtgtgtgcaggtgtgcatgtgtgtgcaggggtgcgtgtgtgcaggggtgcattgtgcaggggtgcgtgtgcaggtgagtatgcaggtgtgcatgtgtgcctgtgcaggtgtgtagtgtgcaggggtgcgtgtgtgcaggtgtgcatgcgtgtgcaggtgtgcgtgtgttcatgcgtgcgtgtgcaggggtgtgcatgtgtgcctgtgcgcaggggtgcatgtgtgcagggttgcgtgtgtgcaggtgtgtgtgcaggtgtgtgcatgtgtgccttgtgcaggggtgcgtgtgtgcaggtgtgcatgtgtgtgcaggtgtgcatgtgtgcaggtgtgtcagtagtggatctggctacatgtgtctgtgcccagtttgcctgtctctgggattttcgtgtgtgctcatatgcatatcacgtgtgcagggcctggggcgtggacgtcaggcactgagcctgctttggaacaagcctggcctagacccccgattcccactcagtattgggggagcgggttcccacccccctacccatgtctccagctcctctgagctctgacagtctgttcccaggctcagcagctccacggagcagagcacctcatccagactcatccggaagcacaaacgccggcggaggaagcagcgccttcggcaggcggaccgggtaggcagccgggtggagcagggcggggctggggaggcgaagtcagtgtcgggcagccccgtgccttttacacacgccccctctcctccataggcctcctccttcagcagcataaccgactccaccatgtccctcaacatcgtcactgtcacgctcaacatgggtgaggcctcggggcgagggttgggggcaggggcaggggcttggccgcggctcatggctcttcctgcagaaagacatcactttctgggcatcagcatcgtggggcagagcaacgaccgtggagacggcggcatctacattggctccatcatgaagggcggggctgtggccgctgacggccgcatcgagcccggcgacatgttgctgcaggtgtgtctgtgggggctgcggggtgacatgtagctgcgggtgggtccgtggggactttggggtgacgtgcggctgcggg

SEQ ID NO: 104 - DNA, 2300 bp, Homo sapien
tggcggcagctagtggtggcctcggtgtccgtggggcccgcctcaccctgggttgctccagcctttcaggtgtgacagcctctcactgtggcggcctcagcctggcatggggtcatggtcttacctgggaaggctcctgtgtgggggcagcagacgtggaggggtctgagaagtgaccttctctgctctttgggggcgtctacctcatggcctggccctgggtggcctggggaggcagctgcaggaccccagagggctaggtaggggtccctgctcccacctgggctggccctgcctgctgtccactctgccctgaggcttggggcctcttcccagcaagtgggtgggccagggcttgggtgagagtgtgggtttgccactttgccgggggcctcctgctacctactgcttcggagtctggctgagtcaaggtgccccggggtcaggggacctggagcggccagtcggggtggctctgtagctcgcagtgggactagcagccacaaggccgcttcctgccaggtgtgcggccaggccaagccccgtctccgggctcctatttctccactgggcccaagtcccgggcgtggaaaatgctgctgggcagggcagggtgccacgaggcggcgtccagatcctacccagcctgctgcctgggccctcagaggtcacagtgtgagtgtcgaccacagccctgcctgccttgctccttggcctggggacctgcccctgcccagccatcccctctgtgccgtgtgggttgccaccctgccctctgaactctgagctcgggtcacccggcctcctcctggttcgtgtcccctgaccctctgcggcctgcctgggtgccctctgccccgttcccaagcctatctgacctgggggtggactggtgaggcacctggccagcttgctctcctgggggccctgccggctccgcatcccctgctgcccctctaggtcctgaggtgcagggaggtttggtgagtggaggtctttgtctccctggctaggtggacaggacaggagggtggtgggcggcctctggggacctgtgggccctcccagcccacctacgtccgtccgtcgggtctgagagtccttgtaggtggactgtgagcctgactaggggtgcagggcaggggtcaggcaaagtcctgccctcacagagcctgaccctgggcaggcaggcacagggcctgggacctgaggctgctcctgagacgccaggagggtggagtagggccatagggcatggctggcatgatggagaggaggctgctgggggatttgggctcctggttgggaatgacaggtctgagtgcaggggtgggtgcaggtggcctgatgccctggctgttgaggggtgggcggctggtctggagctggctgggaggtggagcggtggacctgaggtctggggcaagggacagggaatagcctggggagccttggggcccggtaggtgcagctgctgctgctgaggaggctggggcctggccctgaggagtcccagtgtgggggaagccctggggggggggggctccaagccccaggaacagatgaggtgggggtggttggagacagcgtctggggccaccacatacatgaaccgagggcagctgggcacgggggctttcccaaggaggcctcaccctagctgtcctcctacctgggggctggggaccaacgctgcaggggactgagagcctttggctgagctgcccctgtgaggatgtccacagccactgtccccatgctgggggggtgggggcccaggatgtgacggagaggaaggacggttcccgagaggagagtgcgttagcaggggtgtccgcagagtgactggccccatgctgggggggtgggggcccaggatgtgacggagaggaaggacggttcccaagaggagaatgcgctagcaggggtgtccacagagtgacattgtgtgggcaggaggagcgcctgctctccaggcctcacctctagaaccgcagggttgggccccccaggtggggcctcacggcagcatatgcccacagggtggtgaaggaggagatctttgatgacaatgccaagcttccctgcttcaacggccgcgtggtctcctgggtgagcccctgtgtcttggccccgaaggctcgcctggggagcattccagggtggggctcttcctgggggaggcggtgggtgtggggaggccctggcaggctgggtgcggatagggcagcttgctggccccctgttccctgggtgccctgaggaggcgtcctgaaggcgggtgggctcccctgagcatg

SEQ ID NO: 105 - DNA, 2300 bp, Homo sapien
ggccccctcctcactccccccgtcgctcctgccccgtccaggccccctcctcactccccccgtcgctccagccccgtccaggccccctcctcactccccccgtcgctcctgccccgtccaggccccctcctcactccccccgtcgctcctgccccgtccaggccccctcctcactccccccgtcgctcctgcccggtccaggccccctcctcactccccccgtcgctcctgcccggtccaggccccctcctcactccccccgtcgctcctgccccgtccaggccccctcctcactccccccgtcgctcctgccccgtccaggccccctcctcactccccccgtcgctcctgccccgtccaggccccctcctcactccccccgtcgctcctgccccgtccaggccccctcctcactccccccgtcgctcctgcccggtccaggccccctcctcactccccccgtcgctcctgccccgtccaggccccctcctcactccccccgtcgctcctgccccgtccaggccccctcctcactccccccgtcgctcctgccccgtccaggccccctcctcactccccccgtcgctcctgccccgtccaggccccctcctcactccccccgtcgctcctgccccgtccaggccccctcctcactccccccgtcgctcctgccccgtccaggccccctcctcactccccccgtcgctcctgccccgtccaggccccctcctcactccccccgtcgctcctgccccgtccaggccccctcctcactccccccgtcgctcctgcccggtccaggccccctcctcactccccccgtcgctcctgcccggtccaggccccctcctcactccccccgtcgctccagccccgtccaggccccctcctcactccccccgtcgctcctgccccgtccaggccccctcctcactccccccgtcgctcctgccccgtccaggccccctcctcactccccccgtcgctcctgccccgtccaggccccctcctcactccccccgtcgctcctgccccgtccaggccccctcctcactccccccgtcgctcctgccccgtccaggccccctcctcactccccccgtcgctcctgccccgtccaggccccctcctcactccccccgtcgctcctgccccgtccaggccccctcctcactccccccgtcgctcctgccccgtccaggccccctcctcactccccccgtcgctcctgccccgtccaggccccctcctcactcctcccatcctgggccgccctctagtggcctccgcgcttcctgctggggtcgggtcgggaaggcctccagccccgcgagccccggaacagtaagcgcggacgccccgcggcctcaagggacgcctcggaagtctcccctgccctgcggagaaccccaggactaaatccctcccgccgccgggcgctccgacgcctccgtgcacgcccgcgcccccgcgcgccccgcatccgctcggcctgctgcctggaccccgtgggacccggcagagggcacgcgagtcgggagccttcgcggtggcgcagagcgaccgggcgccacctcagcgccgcgcacccggcgtccccggggtccctccgcccgacccgagcgccccggcgcccacgggcccacagccagcggcgcgcgtcgcatgcgccggatcataatggagcgcgggcccgcgcgcgggggcggggccggggcggggcggggcgagcgatgatcgcctgcgtctgcgcatcctcgccccgcccccgccgtgcgcccccgtgacgtcaacgccgcgcgctcgggcgcccccccgcggccacgctcaggaccccgggccgggcggtccctttaacggcgcggcccgaggggcgcaggcgggagggcggcggggctgagcgcgccctccgtgctgcgtccctcgcgccgctcccgggccgggggcggatgggcggccgcgggccgcggggcagcagtcgggacgcgcgcgggagccgggggcggcggccggggcctgggcggtcgggcgggggcgcccgggggcctcggagcgtcggggccgagagcggtgcgggccgggcggggcgcaggcgggcgggcgggtagcgccccgcgtccgagccccgggccgggccctgagcgcgcgggctccgcgccgccgccgcgccatggcggagaccaagattatctaccacatggacgaggaggagacgccgtacctggtcaagctgcccgtggcccccgagcgcgtcacgctggccgacttcaagaacgtgctcagcaaccggcccgtgcacg

SEQ ID NO: 106 - DNA, 2300 bp, Homo sapien
agggaccccaccgcactctcttccccatcgctccagccccgtccaggccccctcctcactccccccgtcgctcctgccccgtccaggccccctcctcactccccccgtcgctcctgccccgtccaggccccctcctcactccccccgtcgctcctgccccgtccaggccccctcctcactccccccgtcgctcctgcccggtccaggccccctcctcactccccccgtcgctcctgccccgtccaggccccctcctcactccccccgtcgctcctgccccgtccaggccccctcctcactccccccgtcgctccagccccgtccaggccccctcctcactccccccgtcgctcctgccccgtccaggccccctcctcactccccccgtcgctcctgccccgtccaggccccctcctcactccccccgtcgctcctgcccggtccaggccccctcctcactccccccgtcgctcctgcccggtccaggccccctcctcactccccccgtcgctcctgccccgtccaggccccctcctcactccccccgtcgctcctgccccgtccaggccccctcctcactccccccgtcgctcctgccccgtccaggccccctcctcactccccccgtcgctcctgccccgtccaggccccctcctcactccccccgtcgctcctgcccggtccaggccccctcctcactccccccgtcgctcctgccccgtccaggccccctcctcactccccccgtcgctcctgccccgtccaggccccctcctcactccccccgtcgctcctgccccgtccaggccccctcctcactccccccgtcgctcctgccccgtccaggccccctcctcactccccccgtcgctcctgccccgtccaggccccctcctcactccccccgtcgctcctgccccgtccaggccccctcctcactccccccgtcgctcctgccccgtccaggccccctcctcactccccccgtcgctcctgccccgtccaggccccctcctcactccccccgtcgctcctgcccggtccaggccccctcctcactccccccgtcgctcctgcccggtccaggccccctcctcactccccccgtcgctccagccccgtccaggccccctcctcactccccccgtcgctcctgccccgtccaggccccctcctcactccccccgtcgctcctgccccgtccaggccccctcctcactccccccgtcgctcctgccccgtccaggccccctcctcactccccccgtcgctcctgccccgtccaggccccctcctcactccccccgtcgctcctgccccgtccaggccccctcctcactccccccgtcgctcctgccccgtccaggccccctcctcactccccccgtcgctcctgccccgtccaggccccctcctcactccccccgtcgctcctgccccgtccaggccccctcctcactccccccgtcgctcctgccccgtccaggccccctcctcactcctcccatcctgggccgccctctagtggcctccgcgcttcctgctggggtcgggtcgggaaggcctccagccccgcgagccccggaacagtaagcgcggacgccccgcggcctcaagggacgcctcggaagtctcccctgccctgcggagaaccccaggactaaatccctcccgccgccgggcgctccgacgcctccgtgcacgcccgcgcccccgcgcgccccgcatccgctcggcctgctgcctggaccccgtgggacccggcagagggcacgcgagtcgggagccttcgcggtggcgcagagcgaccgggcgccacctcagcgccgcgcacccggcgtccccggggtccctccgcccgacccgagcgccccggcgcccacgggcccacagccagcggcgcgcgtcgcatgcgccggatcataatggagcgcgggcccgcgcgcgggggcggggccggggcggggcggggcgagcgatgatcgcctgcgtctgcgcatcctcgccccgcccccgccgtgcgcccccgtgacgtcaacgccgcgcgctcgggcgcccccccgcggccacgctcaggaccccgggccgggcggtccctttaacggcgcggcccgaggggcgcaggcgggagggcggcggggctgagcgcgccctccgtgctgcgtccctcgcgccgctcccgggccgggggcggatgggcggccgcgggccgcggggcagcagtcgggacgcgcgcgggagccgggggcggcggccggggcctgggcggtcgggcgggggcgcccgggggcctcggagcg

SEQ ID NO: 107 - DNA, 2300 bp, Homo sapien
gggcgctggtttggctgggggcttagccagagcacagtgatgccagtggctttgtcctggtttgtcctcttcccagagggagaaaaatgccaggccaggctgggaattaagtcacacacccacagctctgcagaccaccccccagcgagcagaggctccacagtcccagcccaggaaggtgcagaagaggcacaggtcactggccctgggaggagcaggtgacctggtcactaccaggcctgctcttctctgtggctgtttcccactgagggccggacagggagggtcagggaaggggcctgatggcctcatcagccttttgttccttgcccagggccccatgggggtcagctgcccccaggtggccctctcagaggtcagggccctctcagacgacagcctctggcctgcatctccgctggctgggtccccgaaagtgtggctggaggccactgcccggagagggacggccctgcagagtgaggcgagccctggcctgaggctgtcgtgcggaccaggcgcccctctcagccctgcacccagagccgggccctcccagacccgagggccaaccctgtccccccaccaaactgctgtccgtcctccctccatggggagagagggaacagggagagtgacggaaggagacagagactgcagaggccaaggccccagagtgtgcgacggagacagacatgggcgggcgggcagctgccagcactaatacaaaccagttggaaaaacaggaggagaggccagcagaggcctcgaggccagccaggtggggcttgtttttccagaatgaaaggcccagggagggagtgggggtggcgggatgtgttcagccctgaagccagtttggaaaggtcgccgcccgggccaggaccctgctgaggaaatgggtctgaccgggctggggtggggtggggtcttctgtccttacgccggtccgtgtcctgcccgttcctctcactggagcagccgcaggttcccctcccctcgccctgagaccaccactctgatctgcactgggcttcccactgtctgaggacttgggcaccagagcagggttcaggggtgagccccccacccagctggggccctcggggcctgtaaggagagctcactccaagtgggcgggcggaactatgcactgagggtttctagtggttgtggttgttcagattgttttttcttgaggtttgcttgattagaaggagttgggtttgctacacagtgcaggctgttatttcgcatttgtttatgtgactttgtaagttttcccacagtttcaaatttgtgccttccatggcaggggtcccactctcccctttctccaggaggcttgtaatccagcacctggtttcagggacaccaggctgcaccctaaaggcgggcagccccaggggacggggccagcagggagaggtctgctcaccccagcacccccaggcctcccagtgctcagggtcccctgtccctggctgactctccaggttgtaaaggggactagtgactggcagcgtccatcatcctggcccaagggagcccaccgtggcccccagaggagacgggtaccaaggtcatgcagggccaagggttggagctggaagggccatctggtctgaaggagagcaccagcgtgcaccgtgggtgggggcggtctcagcgctgggaggcctttctggggcctggagcagactgaggggaggaccctgccctgaggtggctcacgtggggggaggccagaggtggggcggaggggccactcacccaacagtcccaacccttcaccacaggcccgggaggctcctagacgtgagacacgatcacgtggtatcaggggcccatgtcctcggaccttcttgtccctccaagggtgcggtcaccacccctccccaggcctgaccggtgaggggctgggcctctgctcccacactgcccctccccagcaggccagcaacgatgggggaggccaaggggcccggcaggagccagagggggcggtccccagaccgtagacaggcccaggcctccgtgatgtcaccgcgggtgctaaggagggggagggggtagggctgtttttctggagagagacttagagccgagtgggacaaagcctggggctgggcgggggccatggcgctgccatcccgaatcctgctttggaaacttgtgcttctgcagagtgagtgtggggccctgggaggcgggtggggggtggcacgtggggctgtgcgagtccgtttcggacaaaaccgcccatctgagcttgggccaggaggagtgggaaggtccca

SEQ ID NO: 108 - DNA, 2300 bp, Homo sapien
taatcccagcactttgggaggctgaggcgggtggatcatgaggtcaggagatcaagaccgtcgtggctaacacggcgaaaccccgtctctactaaaaaaaatacaaaaaattagccagatgtggtggcgggcgcctgtagtcccagctactcgggaggctgaggcaggagaatggcatgaacccagaaggtggagcttgcagtgagcagagattgcgccactgctctccagcctgggcaacagatcgagactccatctcaaaaaaaaaaaaaaaaattagccaggcgtggtggcgggcacctgtaatcccagctactcgggaggctgaggcaggagaatagcttgaaactggaaggcagaggttgcggtgattctgagattgcaccactgctctccatcctgagcaaaagaacaaaactctgtctcaaaaaaaaaaaaagaaaaaactgatggatctcgcctgtaatcccattgctttgagaggccgaggatcgcttgaggccaggaatttgaggctgcagtgggccaagatgtttgcaccactgcccttcagcctgggtgacacagtgagaccctgtccttttgttttgtttttgagaccgagtctcactctgtcgcccaggctggagtgcaatggcacaatctcggctcactgcaacctttgcctcccaggttcaagcagttcttctgcctcagcccttggagtagctcggactacaggtgcacaccaccacacccggataatttttgtatttttagtagagatggggtttcactcctttctttttttttttttgagacggagtctcgccctatcaccaggctggagtgcagtggtgcaatctcggctgactgcaacctccatcccccaggttcaagtgattctcctgcctcagcctcccaagtagctggaactacaggcacctgccaccacgcctggctaattttttgtatttttagtagagacggggtttcaccatgttggccaggatggtctccatctcttgaccttgtgatccacccacctcggcctcccaaggtgctgggattaccgatgtgagccaccgcgcccaacccttttttttttttttttttttgagatggagtctcactctgtttcccaggctggaatgcaacggcacgatctcggctcactgcaacctccacctcccgggttcaagtaattctcttgcctcagcctcccaagtagctgggactacaggcacctgccaccacgcctggctaattttttgtatttttagtagagacagggtttcaccatgttggccaggatggtcttgaactcctgacctcaggtgatctgcccaccttggcctcccaaagtgctgggattacaggcgtgaaccatcttgcctggccgagactttgtggcttaaaaaaaaaaaattacagaaggtggccctggggcctaaggtcatgattccggggcgatgtgtgtgtaccaggcagcccgtctcactgcatttgcatgtttagaacaagccagatactactcgagaggaggcagatgatttgtgaaatgtttctgtattttcaaaccttcttgcctgtagttttgagtctcagtgcaacaattatgcttcaccccatctcagcagtgtcctgactctgttgtccaggaggaggagacagtggtggtggagggcagctctcctcttccgggccttccgacaaccgatctgggatccacagacagccctgcctcctcggggctgcaggaggagggaccaacacgaatgcaggccatggctgccggggacgctggtcaggatcagcaggaaaacagtcagccagggacatggccgggaacagtcgccacaagcggctataacggattaacacattttcttttgtttttgataaacaagtttacttgtaaatttagtcagcatacataactaaccaaaacttcaatatatcttgagacccccttggggggctgtctccataaaagtgactttcccaggagagtgactggatgtgattggccaacaccgtcttagcccgcaggggttcctggtgccgaagcctcacgtccctccccacagcgagttttcagaatccaaaggccgtaggagaaagaaggctggcggtgtttcctcttagaggggagaaactcagcctgggtaggagacccagccccacgcagggaaaactgtgctaacgcttccgatgtgcgtggcaggtgcggcggcggcgaatacggtttgtcctcgagcctaaccctgtctgtgttggtgtcagcagtggcccccctaccacacacacagggtccctgg

SEQ ID NO: 109 - DNA, 2300 bp, Homo sapien
ttatttttgagagggagttttgctcttgttgcccaggctgaatacaatggcacgatctcagctcatcgcaacctccgccccctgggttcaagtgattctcctgcctcagcctccagagtagctgggagttcaggtgcccaccaccatgcccggctaattttgtatttttagtagagctggggtttctccatgttggtcaggctggtcttgaactcccgacctcaggtcatctgcccacctcagcctcccaaagtggtaggattacaggcatgagccaccatgcccagccttatttttgttttttattttgtttttgagacagagtttcactcttgttccccaggctggagtgcaatgctgcaatcttggctcacctcaacctccatctcccaggttcaagcgattctcctgcctcagcctcccgagtagctgggattacaggcgtgcaccaccatacccggctaatttttgtatttttagatgggatttctccatgttggccaggctggtcttgaactctcgacctcaggtaatccgcccccactcagtgtcccaaagtgctgggattacaggggtgagccaccacgcctggcttttttttttttaatatagagtctcactctgtcacccaggctagagtgcagtggtgtgatcttggctcactgcaacctctgcctcctaggttcaagagattatcctgcctcagtctcttgaataggtgggattacaggcatatgccaccatccccagctaatttttgtatttttagtagagatgggggtttcaccatgttggccagactggtctcgaactcctgacctcaggtgatttgcctgccttggcctcccaaaatgctgggattataggggtgagcctggccttatttttttatttttgactgggtcttgctatattgtcccgcctggtctccataatcctgggcttaaacctcctgcctccacctcccaaagtgctgggattataggagtgagccaccgcacccagccgatttttctatcataattgcgtacatcaaatttgtaattataaccaaggtagaaatgttacatgtaacagccgacctcccttggtgaggagggagaagccaccacggaggatccaggatgtgcattccatgtggcagccgtggcctggccctcgcctgaggctggtgtgacagctgccctaagacgtgcccagccgggaagggaggcggatgcagagtcccagaggtggagtctgaccctgcaggtggagccaccgcaggtaactggcagcactcagtgttctttgttcccgattttaaaattgatcaggcatggtgtctcacacctctaatcccagaactttgggaggccgaggtgggtggctcacgaggtcagcagttcgagactagcctggccaacacattgaaaccccgtctgtactaaaaatacaaaaattcgccgggcgtggtggctcatgcctgtaatcccagcactttgggaggctgaggcaggtggatcacaaggtcaggagtttgagaccagcctgaccaacatggtgaaaccctgtctctactaaaaatacaaaaattagctgggtgtggtggtgcacacctgtaatcccagctactccagaggccgaggcaggagaactgcttgaacccgggaggcggaggttgcagtgagtcgagattgcgccactgcactccagcctgggcgacagaacgagacttcatctcaaaaaaagagaaaaaaagccgggtgcagtggctcacgcttgtaatcccagcactttgggaggctgaggcgggtggatcatgaggtcaggagatcaagaccgtcgtggctaacacggcgaaaccccgtctctactaaaaaaaatacaaaaaattagccagatgtggtggcgggcgcctgtagtcccagctactcgggaggctgaggcaggagaatggcatgaacccagaaggtggagcttgcagtgagcagagattgcgccactgctctccagcctgggcaacagatcgagactccatctcaaaaaaaaaaaaaaaaattagccaggcgtggtggcgggcacctgtaatcccagctactcgggaggctgaggcaggagaatagcttgaaactggaaggcagaggttgcggtgattctgagattgcaccactgctctccatcctgagcaaaagaacaaaactctgtctcaaaaaaaaaaaaagaaaaaactgatggatctcgcctgtaatcccattgctttgagaggccgaggatcgcttgaggccaggaatttgaggctgcagtgggccaagatgttt

SEQ ID NO: 110 - DNA, 2300 bp, Homo sapien
ggtattttggggaaaacaggtatgtgcagcaactgtgtacttcccttgagagactagagttcctttgtttaaaaattaggaatcataacccatgcaccctccccgattcttccactgcattttttcttcctcagatgtttgtaaaggattgatcttcctagtctagttccagctcatctagcttggcagctctgctcacacaagcatctggcgcttccaacaagtgttcctgccactcctgtgggcggcagccagtcaggtctggcccgggcattcatcggggtggccactgtctgcaagcctcccgggccggctccatgcagctcctgtagctgaatgataattccccagccttgtagcagctgggtcctgctctagctgggacctttcccttttggcctggagcctattgggtacagggaccccaacagagtggtcttcctcacttcacctccctgaaattacttcctgagagggggaaggacaccctggttcatcctgctcctcaagactttctcagactgaaatgtccacatcccgtttcttctaccagtccctaactcaggggaggtacttatatctgcacgtcaatgcctcagaagcctgaaggccaaggttgccagcccaggttatttctggttctctggttcttctcaacatgctcacctgttctctgatggattctttgcatctccctggaccccagccgggtgaagacaaacacaggggcaccaaggtgagggctgctctggaggcaccagtctgctcatttacggccaaatccactaggggaagctgtgcagcaggggtgaagggcgggcccgcaaataacgttcgtaaaccttcctgcttggagtcccaagtagcccctctgaggggtaacgtagagtcatctggggacctcagttgtagaggtgggcctggagcctgaactttatgtcctcacactggcctatcctacctgtcactcactgcttagccaggctgggcccggcagatgacctggcctttccacttcctgctaagcgtccctggaagaccctcctgcaaggcaagtctccgagcaggcccagcaggctctgctccacacccctctcccaccaggcgcccctgcaagtccatgctggggtctctatattagccaacctcacggaggtcaaaggggcctgtctggagtagaaaggtgaagctacacgttggcagcgcctactctggggagcatcattaggggctcagccaaacccaatccaccagagaggctgcttttagttctcagacaaaaagtgtgagtctgatttttattttatttatttatttatttttttgagacaggatctatgtcacccagactggagtgcagtggtgcgatctcggctcaccgcaacctctgcctcctgggcgcaagcgattctcttgcctcagcctcccgagtagctgggattacaggcgcctgccaccacgctaggctaatttttgtagttttagtagagacggggtttcaccatgttggccatgctggtctcgaactcctgacctcaggtgatccaccagcctcggcctcccaaagtgctgggattacaggcctgagccaccgcgcccagcctgcgtcttatttttttttttttaaccccaggaatgaggagtcggggaggcccggtaccgcaggctcagtgcttattccgggtccttggtctctagcaaaaacgggggaaatagctctagacgcttccgccttccacgtaactccacttccgttgccagatacgtcacttccgtagtcttgagcccgcacttccgtcggcccgttgggaatccggcccctgggtggtccggaaacgattctggacctgcgggtatatccagggcccgcaccccctgggattgtgggaaatgtagttttttgcctccgtaagggaccaggcggagctgaggaaccgcgcgaggactgggaccgtgattccactaaccggaaaccgtcgcctttcgggcccggcggggcctgagccaatgcagaatcgggggccgcgaggacgccagcgggcgctgtgcgtaggaaccgccgggtggccgctgccgatcggggccgacttggggacggaccggaagtgcccgagggcggccgcagaacggtcaatttgagccgcgtcgaggtcgggcttgggaagggtcagcgggaggcctgagggcgccgggcgctgcggcaggcgggcccggggtccagccgagagggtccgggcgccaggcaacgcgattcgcgcgggggtgaacccggggagggggccggcctccccgttctggga

SEQ ID NO: 111 - DNA, 2300 bp, Homo sapien
atgacaggtgtgagctcccacatctggtatgagagaatttctggctgtcacatctaaggtggggtactcctgtcatccagtgagtcgagaccagggatgttgctgaatcctgcagcacacaggagaatcccctacaactaaagattacccagccagatgcggtggctgaaatctgtaatcccagtgctttgggaggctaaggccagcaaatccttggagcccaggaatttgagaccagcctgggcaacacagcatgaccccatctttaccaaataaaaaataaaaattagctggcatggttggcgtgctcctatagtcccagctactcaggaggctgaggcaggagaaactcttgagcctaggaggttgaggctgtagtgagccatgatcataccaccgcactctgccctggacaacaggaaacctgtctcaggaggaaaaaaaagattatccagcctgaatgtcaatagtgctgagattaagattccctgctccagagcactcagaaacttgtgggacagaagcagcagcagggccgtgcactgacatgggtaaagcaggaagccagccccagcgcgacccgccacagcgcactgtcctcactggagcccctgcccttactaaaccgcatctactgatgcctctgagcaggctctgttggtggagcttgagactgcgctcatgaatatcccacaggtttagagcctcaggcctgtattgtgttatacaagccttactgtaacttaatcagaaataaagaaaataggcatctatgatagactagacagctctgactgactcactttttgtctctcagctgtcgaaggcggtgaaacacattgatgacgtcccgtatgcgtcttggggcctcttctatcttggaagccaggtggacacaggccattgacacatgctgaagcggaagcattgcaacacgcccatgtttgtccccagccacggcgtcctgacggccgccaaaggcttgagggctattcagaccaaaagggaggtgcacccaggggaaaaaaaaagtcaagaaacagaaccctccggcacagagctcagactggggggcaagtactcactcccttagtaaccgggcaaagtaacaaaccgttttaccctcaacatacttcgctgggaatgaagtgcaggaggaagccttacctccatggagtgcttcacgaaggacttggtataaaagaaccgctggaacaacacctgcccggtagccatggccacctagagtagaagaaagtttccgtattttcaaacgcaccattcaaagccttcgcggccgaaagtcatcgagtaacgtgggactccccacgcagaaccaaacactgaaacgcttcccacgtccacaaaggctcttcgcgtcccgccgtctcgggatccagcgcactggcgggcggggaggccccgggtcaggggcatgggctggctagggaatggcgccgaggctggggtcggggcaggggctggggtcggggtctaggcgggggcggtgcgggcccgactcgccgccaacaaaggcggctgccgccccagcggttacctgggccggaggctcgcggccgcgccctcacctgcggcaggcggagcaggataccggccgcctggatgagctcgcagcccaccacgcggaggtcggtctctgtgtcggtgtcgaggccgctcgacatggacggcgtgaaacggagcttgtcgtcaggcaggaggcagttctccaaggtgatgagcaccccggagtacagcctgtccccgatcagcaccccctgcgaccctgagggtgcgcccccagatcccggggcgccggccgctgccgcgggagctgccgaccctgcagcaccagccgccgccgccgccgccgccattttgtgccgccgactccccttcggcttcttccctcagggcggctcctcgcgaagctccacggccgccaccgccccgccccgtcgcgtgccattggttcggcccgcgaccagcgcgacgccgcctagccgcaattggctacataacctgcccgtcagcaacgcgcctaacgccgacgccggaacctggcgcgggtggggcgggctcgttacccaggggactccgcggtgccggccgacccggaagcatgtctgtccctagcggaggcgcgggtgccgtgctgagagcgcctgcctgtgcgccccgagcggggctgggactcttccaagatgcccacgttcgcacagagaccccggatcgcggaagctcgcgtctcgaaaggcctgtgggtcaaggggggccatctcggtgggatctggggcggg

SEQ ID NO: 112 - DNA, 2300 bp, Homo sapien
ctgcttgtcttgctgaccctgctgtaggagcgcctaaactgagtgcccgtctcccctccaaaggcagctggcttgaatcctgtgggaacgtgcccttcaccctttgccagcagttgctggggagtctttccggcccctttctcagactcaccacctacctccaacctgcgcagaacaatcagcgtcctgaccacttgctagagatggcttcaggccgaccactccatcctcactgcaggccttcattccttctggcttccatcactgcatggccccctaagaggtccccctcctggcccttgtcactgtgcctcatgacagccactacgccctaagcctttggaggccagggacaaagtctcgttcactgtcctttccgctgcatgagtgcagtgtctggccaggtgcacggggcactcagtgcctgtcagcccttggtaaacagtcctggacaacagggtcaaggacagagccctgggcggccacattcggtgcgtgctcctgtgttgtggcaaagctgccttttctgcgtttcatgtcagtgaaggaagacagggatgtggcagagccctgcgggttgctcccatcactcactcggtttgtgccatagtcctcctgttcccaggcggtcccagggcctgcccctgatgggctggaggcaccaccaacctcccactcctctggcagtcacagctcagggaatgggcaagcagcaccaatgagaaaccagctgtgtggtggggtttccagagaagaggaaattccttctttcctggagagcgtgcagctgtaactcacagacgagacatccctgagctaccagcctggggaaagaggacatgagtaaagctgtaaccataccgtgttacccataacaggcggtgaggagagtgggttttggttggcactgtttgagctgcagtatcaagtcatggcagagctagtggacagctgacctgggggtgggggtgaggagcaatggtggcttctgaatttgagcccgtctgagctgggcagttactggcagctcagtgtgtgaacctgcaaccactcaggcctctgctgcccttccctcttcctgcctcaccgttccctgccccacgcaggcttccccaccatcctcacccgtggtcctgtactagtcctggcaaaggttccggtaactgcagcaacagatacctcctgcccctcctgcacagctgtggtcgatcgcaggacagccgcaggtgatgaaaaaccgtgaacccaggacgggcagggcgtgagaccgcctgcgggaggatcagcgatgtcaagacgttacaaacgcacgaaccccctcgccgtctccctggcgtttgtgaggtcctgtccaagctccttcacacgtagatcaccgggcctcgctcccccgactccttccgtgggcctgaaccttgaggtacttaggcctccccacgctggaggggctctgtagggacgtcgaggccacgtttccagtcatccctccacccgtctctccccaggggctgagtgttgaaggcaagactttgcaggagtctggcgttaatacgcatccccaaagtctggagtcgataaggactgaagacacgacgccgacggcggccgggggacaccgggcatgcgcgtctcatccagggggaggccgagcggagcctctgaccctgccccgcgcccagggttcagcagtgggggtcgtcccgccccagatcccaccgagatggccccccttgacccacaggcctttcgagacgcgagcttccgcgatccggggtctctgtgcgaacgtgggcatcttggaagagtcccagccccgctcggggcgcacaggcaggcgctctcagcacggcacccgcgcctccgctagggacagacatgcttccgggtcggccggcaccgcggagtcccctgggtaacgagcccgccccacccgcgccaggttccggcgtcggcgttaggcgcgttgctgacgggcaggttatgtagccaattgcggctaggcggcgtcgcgctggtcgcgggccgaaccaatggcacgcgacggggcggggcggtggcggccgtggagcttcgcgaggagccgccctgagggaagaagccgaaggggagtcggcggcacaaaatggcggcggcggcggcggcggctggtgctgcagggtcggcagctcccgcggcagcggccggcgccccgggatctgggggcgcaccctcagggtcgcagggggtgctgatcggggacaggctgtactccggggtgctcatcaccttggagaactgcctcctgcctgacgacaagctcc

SEQ ID NO: 113 - DNA, 2300 bp, Homo sapien
atcttggctcactgcagccttggcctcccgggttcaagcaattctcccacctcagctgggattactggggcccgctaccacgcccggctactttttgcatttttagtagagatggggttccaccatgttggccaggctggtctcggatttctgacctcaggtgatccacctgcctcggcctcccaaagtgttgtgcagagccactgcacccggcctcctctttttttttaagatggagttttgctagtttccgaggctggagtgcaatgaatggcgggatctcggctcaccgcaaactctgcctcccgggttcaagcgattctcctgcctcagcctcctgagtagctgaccatgttggtcagcctggtcatttaaggtcgggagttcgagaccagcctggccaacattgtgaaatcccgtctctactaaaaatacaaaaattagctgggagtggcggtgtgcgcctgtaatcccagatactcgggaggctgaggcaggagaatcacttgaaccgggtaggcagaggttgcggtcagccgagatcgcacctttgtactccagactgggcgacggagcaaaactccgtctcaaaaacagaaaaaaacaaaacaaaacaagaaacacaacaacaaatgcagtgcgtcatcctagactgaatcctcaacagggaaaaaaaggtataaaagacatttgaagcgagttaaatctggagtgtgggctgggtccggattttgaccattctacggtgtggttcctaagagtaaatacacagcaaagtgtttaggtgtctccagcgtctcaaatggtttaggaaaaaaatccattatgtttatatttacagagagaatgattcaaaaatggagcaaaacgtaaatagtaggtgaatttggttcgagagtattaaacaaatggaacaaatgaaaacagctggcacattttggtagtgaacactggggagttttccttgtacttgtattccaactcttctatgatttaaaaaatatccaagtataataaactgttataaagaaactgcacacccccaatttttcgataatatagcagaaatataaaattacacataatataaaacttcttatttttttgggacagactctggctccgctgcccaggctgttgtgcggtggtgcaatctgagctcactgcagcctccacctccagagctcaggcgagcctcccgtctcagcctcctgagtagctgggacctcaggcgcgcgccaccaccgctcccggctaatttctttttgattttttgtagagatggggtctcactatgttgcccaggctggtattgaactcctggactcaagtgttcctcccccctcggcctccgaaagtgctgggattacaggcatcagcaccacagcgatcacatttaccatttcgaagctgagaatttccaggcatggcgcggtggctcaggcctgtaatcccagcagaagccagcagtccgagaacagcctggccaacgcgggaagacgccccctctacaaaaaacacaaaaaattagccgggcgtggcggcgcgcgcctgacgtcccagctactaggaaggcagaggccgcggcgagccgaggtcgggccgctgcaccccagccagggcgaccgggcgagaccccgtctcaaaatgagtaagtaaacaaagtgcaaggttcagaggcaacgggcactttcacaccgatgcgaccatctccacctcggttcctgaacatcctcgtggccccagggggcggcctgcccctccccgcccgcgccgcacccgagctccccggccgcggggcccccgacccgggtccgctgccctcacggtgccctcggagccacagctgcggccggggccgtgctccgggacggtccgcgtgcgctgctgtttatccatcgtccgcgaatagccacgggcgctgcggccccgttctcctttcagtccccgccgcggccccacatccgctccccaacacgcaccaccaccgcgagttcaggagcacaactgggcacccgcgggctgacgggagacgaccttcgccccggaagtatcgcaggggctgacccggaagcgctcgtgaccaccatttccgacccgggcaagatggcagcggcgctgcgcgtgcgttgttgagtgttcgggacgccggcctgcaggcgccatggtcttcctcaccgcgcagctctggctgcggaatcgcgtcaccgaccgctactttcggatccaggaggtgctgaagcacgccagggtgagtgccgcctgcccggcctgggcactgggcgcccggggtatcccgc

SEQ ID NO: 114 - DNA, 2300 bp, Homo sapien
gatcacaccactgcactccagcctgagtgacagagtgagactccgtctcaaaaatacaaataaaaagttttaaaaagttgcaaaacctctgctttctaagtgccccccaaccaggtctctcgcttattcattcaacaaacactgctgaactgctactaagtcccagggactgtcatcggaaaaggaggtcccgatccagaccccgagagagggttcttggaccccacacaaggaagaattcgggggagtccacggagtaaactgaaagcaagtttaataggaaagtaaaggaataagagaagggctgccccataggctgagcagcggcctgggctactccgacgagaacacttattgttgtttcttgatatgtactaaacatggtgtggattattccggacttttccgggaaaggggcaggcaattcccggaagtgagggttcttcccccttttagaccatctagggtaacttcccggcattgccatggcaactgtaaatggtcctggtgctggtgggcgtgtctcatgctaatgtattataatcagcacataatgagcagtgaggactggctgtcttggttttggtggtttggggccggcttcttcacggcatcctgttttatcagcggggtctttgtgatctgtatcttgtgctgatctcatcctgtgactaagaatgcctgacctccagggaatgcggcccagccggtctcggcctcattttacccagcccctgttcaagatggagtcgctctggttcgaacgtctctgcagaatcactccaggttctttggattcatggcaaaggggctgcggcctctgcccctccgtgccccactgtgtgtgggtcctacaagcattgcagaggcagctgtggctgcccccactgcggtggaacccgggagacgggagtcttgggaggggcctcctcgaggtccattctagccgctgtacccctgggaagctggcgtgaggtagtttctgtggcctccctggccctgatgagtacgggactttccacccagcccccagagctcctcgcttctttcccggtcagccttacggagctttccttctagaagaggaaggcagacatttaaataaacacatagatactttcctgtagtgataaatgctaagaacaaactaaaacagggttagagtcgcacgttgcctcagatccacctgtggtcaggatctgggaaggtgacggatgagtagcctgatgaggtttgtagggcagggtctgtgtggcttggggggtggtgggatggggcccctggtcccttgggcccttggagaggcagtcctctagggagtgggggaggccagaccagggccctcaggagaccctgtccttggggacctgggaggctgaagggggctggggtgggaatgggtagccctcattacctttcccgtgcagccgctggaggggccaggctgctgcagccaccccaaagagccatgctcccttctcctgcctggccccaggtactgggagacaggaagatgccctcagcaccagccccacccatcctgccccaggcccccaggatcccgctgccccaggccttgctggggcagagctgcttttccagatgcagacgcaccctagcagggattctccccactctcccgcctgccccccgacccccgcccccacctgcccaggcatctgtcccttccctggctccagacttgccccagccagtccccaaagggttttcgtccctcccatgccagcgccaccctcttttccaggccacctgcctggagtccttggtgaatcttttgtcctgtccagcatttacagaaaggaaggccagaacctcaccctgccctcctccccagcctggaatcgggaggaggggccggcacccacccctgggtgggcttagccagctgggacaggagtgggtgagggggctgcccgagggtgggccccatggagagccctgtgaggccttccaggggcacatcggggtacatccaaggctgcgcttcctgggggaggtggcgtctgagcaactttcgtccacaagcatgttcctgcttgtcctccccaaccgcctggcctttgttccccaggagggcagccgaactggggccctggcagccagcaggggagggagtatgttggacagggggctgtgcccgaaggcagggccttcctaagtggctgagtaaacagcgtcaggtggcctcagcctggcccaggggaccagctgtgttctcccaccccctgcaaggctgaagctgccaccattcagcttttcagcagcagacactccacccc

SEQ ID NO: 115 - DNA, 2300 bp, Homo sapien
gactggctgcaacgtggggcggggttaaaggtcttccagggcagccctggagagcaccactctgcattgagcaccgcccgggccacaggcctgcagtggcaggagcatgagtgagcaggggagggagacggaggaggaggaggggggaggtggtgcttccgacacagcgcccatgctgccccggggacctcccgaccaccaggcctcagccctgacgtgcccagggtggtcggggcccccgctgctgcccggccggctgctggccgggctcctgctgcacctcctgctgcccgccgcagccttcctgctggtgctcctgcccgcggccgccgtcgtctacctgggattcctgtgccactcgagggtgagcctgtgccccgtgggcgggggactagctggggtcctggggagtgggcgtgccctgggtctgaaggcactgtgcccccttccagaattgccccttgtcctcagagacacgtgtgcccctccctggcagccccttctcccaagcacccccaccagccacagccaaagaagagcttttgtttttcacccaagggacagctctgtcccttccctgaggcctcccagccttgtaccaggggccaccagggcctggacagctgggtgggggtggggagagaacggggttccaggaaaagaagatgaaaatgtcgttgaagtttcactaacccacagcccccagcccctccccaaacacacaaggcccctcccaggccctcctgccagcgtggggcttccccacctgcagagtgggctgtggcctgctctgggccccgggcccctttctgctggcacgggggctggcgccagctggtgatgagagggcgcaggagggcagaagcgggcagaacgcggcagtgggcgctttttctgagcctcccctcaagggaccctgctcagccctttacctgctgcgtcccggatctcctgttcacccctcagcactgcctggcccacagcggcccgccccctcccctctccccgccctgcctctccttcgcccaggccctaatccttcatccctccatctcccccctccctcttcccgccctgctcagcccgccacggcccctctaccgccccgccccgctctttcatctctatcgcccactcctctctcccgccctgcacccctccgtctccctttgccgtggccctgcatcctttcctccaccccgctctctctcccctccccgctccaccctgctcccgcccatccatccctcaccgtccggccctcaccgccccttcatcaccctgacccacccacaccctctcctccgcgcctccccttcccctccatcaccctgccctgccccttcccctccatcaccctgccctgctcccctcttctcccccttccctccatcatcccgcccgctcccctctccacccctccccttcccctccatcaccctgcccagccccctcccctccatcaccctgccctgcccccagccctccattaccccgccccgccccccactgacggcccgcccggcccccaggtccaccccgctccgggtccccggtgccgcgcgctgttctcagaccgcggctccgcggcgctcatcgtgttcgggcttctctcgctgccgccgctgctggtgctcgcctcggccgtccgcgcccgcctagcccggcgcctccgcccgctgctgcctccgcccgctgggacccccggaccccgccgccccccggggcgccccgacgaggacgagcaactctgcgcctgggtgtgacccggcggccgctgcgaaaccccgggaggcctccgagctcgcgcgcgaccccatcgcgtggcccggcccggaaaactgagggtcgcccccgctgccccttcctggctgggcgcgcagcgctcccggcttacgaccccggcctcccccgcccgcagccccgcccccgccacggagggcaggggaggggaagagaggggaggggaggggaagagaggggaggggagggggagagaggggaggggaggggaggggaagaggggaggggaggggaagagaggggaggggaggggaagagaggggaggggaggggaagagaggggaggggaggggaagaggggaggggaggggaggggaggcaaagagaggggaggtgagggaaagagaggagaggggaggggaagagaggggagggaagggcagggcagggcagagcccggcaggcagccctcagaggaggggcgcaggccccagcccaaggcctcccgcgcctgcccaggtcccggcctccatcgtccagggctctggggctcccag

SEQ ID NO: 116 - DNA, 2300 bp, Homo sapien
acagggactcccacagcccaggcccagaccgtgggggcggggtggccgcagccaaaccaggctgctccccaccccatggggccccaggccaccaggatcagacaggggctgtgcctgcaggaggcagagggctcggggccagcacccactgtgatctggcctgacccgtccttgcctctgcctcttaccccgggcccttctccctggagagtggagggttccggctgttatatttgtgcttcctccggtgtctgcctcaagtccggcccgggccctgacactgcacctctggctgaccccatgctctctgggaccctctgtccacgtccctcctccggggtggagacagcggggggagggcaggacacaagaatgagtcctgaagactgaggggcacggggagagctgatggggagggtctcctagctggagggactccaggcagagccgggagcaaggcaggtggctgagctcggcccaggctgggtggaggccaggcctcctgtgccttctcccgctgatggcgagctgaagggaggagggcggccgcttccttgagggcctgagtcacagccaagaagacccgctcactttttccagaagtgagggaaacttccccgtcagccctgcaaggctggctgaggtgtgactgtggcccgcctgctgggcgagggtgggggacaagcgggccactggctgtgagcctccccagggtgggggaccctcggcccagctccctgcctgactacctggacgtgcctccgcagggtctgcagccagcttccggtcagaccccaggtcctccagcggctgcggccttcagcgtcatctccacggcagcccctgtgtactgggggctggggggcctggcgaggcccctcgaagtggtacagcttgcactctggggacccaaagtccccccaccgggcccaggcggaagcaccaggcatttctggtcccagccgaggtctgaggtctgtggagcgcagccagcacctccactgccaagatccccggcagggggggtggggggcgccggcggggacacagctctcccttgttcctgccgccagctcctcagcctcagcctgctgcttccttttttaggcaaagtcgagtgctggccgtccgcacggccccgcggtgtctcacctgcctgaaagggaggaaggaagcctgtggagccccatccgttctcccgcggcgcatcctccaggagagggtggggaaggaggagacatcctggcagacacccccccacgtcccccacctcccagctctgagctgaggaggccctggaagagggccatggctactccgagggagggccggggtagggttctcctgtccaggggacactgctggcccagccccacccaagcaggggaaatctgccctgggagccactgtccctcaggacgccccctgcaaccagccacctctcgtctgggcctcaccaagaccccaagactcaagagctcctgtctcaccagtgggaccctccagtcctgctgggggtgtgtcctgggtcctggagtctgggcccctcactgggtagggtatatgggtaacaggcccagtgtggtcccactggacagggcctcaaccaaccatctcccactcccatgcctcttcctccaagaagcccaggtggcgtgggtgcttcgagtctctctcgaattcctgtcttctgtcccctttcaagccactgtgtccttgtaagttccaccccatggtccttcccatccctgctggtcagtccctgggatacatgtcctgttactccagacacctatccgcctccagcgcggaggccaaggcgaaaccacggtctggacgtgtttttttggtgccaccgccagcccctggggttctcttgggcctggctgctgggaccccagcacccagagtcacggcagtggtgggcatggggagggcctagcctggtacctccctgctcggctcccgcggctgggggtcggagaggggtggagagcgtgggccgcacagcctcggccgggagagggagactggagtgtgtgtgtgtgcgtgcctgcgcgtgcgtgcctcggtcgtatctcggctggtgctgcgtgtccctgcgtgtcggggtccgctcgtgcgcgcctctccggggtctgtgcgcgtggccctccgctcgcgccggagggcgtgggcgtggcctcggcgtgggtgtggccgctcggggaggggcctcccgggggcggggccggcctggtccgcgcggtgacgcgccctgcagccccgagcgagcgagcgagcgagcgagttgccgagcg

SEQ ID NO: 117 - DNA, 2300 bp, Homo sapien
caaggcgaaaccacggtctggacgtgtttttttggtgccaccgccagcccctggggttctcttgggcctggctgctgggaccccagcacccagagtcacggcagtggtgggcatggggagggcctagcctggtacctccctgctcggctcccgcggctgggggtcggagaggggtggagagcgtgggccgcacagcctcggccgggagagggagactggagtgtgtgtgtgtgcgtgcctgcgcgtgcgtgcctcggtcgtatctcggctggtgctgcgtgtccctgcgtgtcggggtccgctcgtgcgcgcctctccggggtctgtgcgcgtggccctccgctcgcgccggagggcgtgggcgtggcctcggcgtgggtgtggccgctcggggaggggcctcccgggggcggggccggcctggtccgcgcggtgacgcgccctgcagccccgagcgagcgagcgagcgagcgagttgccgagcgcgccccgtccctcgcgcgcgatgctcccctggacggcgctcggcctggccctgagcttgcggctggcgctggcgcggagcggcgcggagcgcggtgagtgcggcgggcggccgggccggggctggggcttctggtgaccgctctgcgccgctgcccgcgcaaggccgtcgctgtcccctgctccggacgggcgggcgggctgggaggctgcgggagccgggcgggggcgcgggcggagcgtcctgctcacctgaggctggcggcccaggtgctccaggcgacaccgtccgtgagcgccggggcataggggccgtcccggcccgcatctctgcgggatcgcgggcctggacaggaagagggagatgtctgtcaagggggcacccctgcctcagtttccctacccttgcgagggcccttagtggagggatggtagggaagttggagtcgccccaccgcactggggaaaaccgcaaggccgggactagaattgaggcacgctggtgccctggcttggtggggaggggcggtgtagggggcatcagcctccaccccggaggtgcccggaggaagggggaagcctgcgaggggctgttccggctttcaggctgctgggggttatatcttgttgtgtgagtccaggtgggctggaggatggaggccaggggaggggccaccatctagtaagcggggtctgggctccagccaggccatccggcgtggtcattgctgtgcctccgacaccttcccctgctgctgtgtgcatgcccagggtgcctcacctgcaggctgagctgcgtggctgaactccagcctcaggctgctcctctgaaagccatgcctggagggaacagccccacggctcaggcctgtcctgggggcctaggccaggactcttggctccacctgcttgcagggtctgtgaggaatgggaaggtgtgggggcttggagcggagagtcgccctctcacagatgggataacacaagcccagagagagccctagatcccatggccagtgtgcagtgaaacccccaaaagtacaggcctcttgcttagagttcctctttcccccaacctaggacctttgggagaaggcaagcatccacttaaggaaagctggggccctgggggaccctgccttgctgtggggctgtctggggggcccacacctgaggctgagcattcctcctttcccccaggtccaccagcatcagccccccgaggggacctgatgttcctgctggacagctcagccagcgtctctcactacgagttctcccgggttcgggagtttgtggggcagctggtggctccactgcccctgggcaccggggccctgcgtgccagtctggtgcacgtgggcagtcggccatacaccgagttccccttcggccagcacagctcgggtgaggctgcccaggatgcggtgcgtgcttctgcccagcgcatgggtgacacccacactggcctggcgctggtctatgccaaggaacagctgtttgctgaagcatcaggtgcccggccaggggtgcccaaagtgctggtgtgggtgacagatggcggctccagcgaccctgtgggcccccccatgcaggagctcaaggacctgggcgtcaccgtgttcattgtcagcaccggccgaggcaacttcctggagctgtcagccgctgcctcagcccctgccgagaagcacctgcactttgtggacgtggatgacctgcacatcattgtccaagagctgaggggctccattctcggtatgcgggaggaggcagggcccagggagccctagctgggagccgcagaaggagaggct

SEQ ID NO: 118 - DNA, 2300 bp, Homo sapien
tagagacggggtttcaccatgttgccaaggctgattgcaaactcctgagctcaggcaatccacccgcctcggcctcccaaagtgctgggattacaggcatgagccactgcacctggcctacgatgataacttatagcaaactttacttttgctgaaaaccttgcgagtttgggattttaattatcctttgctattaataagacttcattcagtctaatatatatattttttaatgtataagccacttcaggccgggcgcagtggctcatgcctgtaatcccagcactttgggaggccgaggcgagtggatcacgaggtcaggagatcgagaccatcctggctaacatggtgaaaccctgtctctactaaaaatacaaaaaattagccaggtgtggtggcaggcacctgtagtcccagctattcgggaggctgagacaggagaatggcgtgaacccgggaggcggagcttgcagtgagccgagatagcgccactgcactccagcctgggcgacagagtgagactctgtctcaaaaaaaaaaaaaaaaaaaagcccagttaaaaggcatacttagaattggtatagatggttccttcctggttctgtaagtactttgaggcttggctgagtgcaaacagctctcatgcttgagcagaccagttattaggaaactttcttaactctatttttttattttttattttttgacacggaggtcttactctgtcacccaggctggagtacaatggcgtgatctcggctcattgcagcctccacctcctgagtttaagcgattctcctgcctcagcatgctgagtagttgggattacaggtgcttgccactacggccagctaatttttgtatttttagtagagatggggtttcaccatgttggccaggctgctgtcgaactcctgacctcaggtgatcctgacctcaggtgatccactcgcctcagcctcccagagtgcagggattacaggtgtgagccacagagcccggcctcttaactctatttccacaagagtttttcctgttagttactgattacccattgtgtctttttcctcgaatcacctgggaggaactatctttaaataagtgtcgtcctgtaatgcactacggccgtctgtgggttaccacattaaggatagttgtcagtggcctccatgcctttcggtaagttgtttttttttttttttttgagacagagtctcattcgtcgtcgaggctggagtgcagtggcactgtgtcggctcactgcaacctctgtctttcctgggttcaagcaattctcctgcctcagcctcctgcatagctgggattgcaggcatccaccaccgcacccggctaattttttgtatttttagtagagacagggtttcaccatgttaaccaggatgatctcctgacctcctgaactgcccgcctcggcctcccaaagtgctgggattacaggcgtggtgagctgccacgccgggcgtactctggcttttaaaagaatggggcacattgctttttcttgactacttctatctctccttttctctctctctctaactctgtctctctctctctctggctctctctgtctctttgactctgtctctctctgtctgtctctgtctcactctctaactctgtctctctctctgactctgtctctgcctgtctctctctctctttgactctctctctctctctgacttcctctgttccctctgtcagtctttctctctctttgactctgtctctctgactctgtctctctctctctctgactctctctctctctctgactttctctgttccttctgtcagtctttctctttcctctaagatttttttccctttctcttagaatctcttctacaggcttatttttctagttctttcttttgtaatttgtggttaatatctggccaactgttagtgacaaattccttgcccaagaggatcctcgacacctcgaccagcatattttctcatttgttcttttaatctgtctaaaaattatgtcgcaggccctttatcttttccttgctgtatgttaaatattcgggtaagattctgggttccgggcatggattctttaatccccttcatgattaactccccaaggtcctgcatattttctcaatgggccaccgcgcccggccagaagatttttatggtaaaattttgtgatgggaaaactcatcccggaaaatgttgagacctgatgctgagtcctcagcagctcagagaatacgtacttctgtcccaggtcacccaaacattgacctgtgtcggttccccac

SEQ ID NO: 119 - DNA, 2300 bp, Homo sapien
ctgggcgtggtggggcaggcaggcgggtgaccatggctgtggctgcgttctccccatgtttcctgtgctcacaagctgccactttagattctcccagaaagtcttcctgagggggctgaggagcacctgttcccctggggacagctcggccggcagccccagcgtttccttccccatccccgccccgcagattcatgctgatcctggccagctgccaccccgagcagttcgactgggccatcaatgcctgcatcgacgtgatggtccacttcgacctgccagggcaggaggagcgggcgcgcctggtgagaatgtatcttaacgagtatgttcttaagccggccacagaaggaaagcggtaagtgtcccgccccaccagcccccgtccaggggccctcgctcagggtccacccctgctcctgttctccggacacacccagcaggccctgtctccaggatgggcaccacctccctgccctgcggtttcgtgcaggagccctgtgggccccaagggtcccagaggccgcatccagggaggtcctgccaccctttcctcatccccacctgagaacagcctggtggcgtgtcttctggtttggaggcacagtccactatcacttacaaacctttaacatttttttttttgaggcgaagtctcgctcttgtcccccaggctggagtgcagtggcacgatctcagctgactgcaacccctgcctcctggattcacgcgattctcctgcatcagcctcctgagtagctggcattataggtgcccacgaccacgtctggctacttttcgtattttttgtggagatgcggtttcaccatgttggccaggctggtcttgaacccctgacctcaggtgatccgcccgcttcagcctcccaaagtgcagggattacagatgtgagccactgtgcccggcctcttttacgttcctcttcactacgcggagagctgtgaggaaatcctgtacctggccacccccagaccctggcagtgaggggaggtgacgtggagtgttgctctgagacccccatgtcggaattcgaaggagagtctcctcatgagacccccatgtagggactggagggagaggctcctcatgagacccccatgtagggactggagggagaggctcctcatgagacccccatgtagggattggagggagaggctcctcatgagacccccatgtcgggactagagggagaggctcctcatggtccactgctggcttctggcctggcctccctgcagctgccacacccggccctggagcctcgtggtgtggggcgcggctcttgcttcctgctgcacatgtgccttgaggctgtcaggctccctgttgctggcggtgggtgcagcaggcacggtgggcagagccctccaggtgatgaggggccctggcgcctcacactggctgcctcgggaacactccagatgagcagaggctgctctacttcttggcgtccccagggccccggtttctgagtccttctgtgcacctgacccaaatccctgctgtcgccagtgacgacaaaagctgctctgttccaaagagagcctggttctcccctgccgacccctccactgccgcctgctccatgctagaccagctttccgggtctcagtttccctatgccctccccttccctgggctccccgacacccatggctgctcgtagctctggcaccatgacctggcttctgtggcctccaggcagaagcttttttgctagaactcagggctctgccactgccagtttaacggccatgcgccctgtgggtgctgagtggacagggctggtgttaggaaggggtgcggccatctccaggccccacagccgcccccttcctgctcagcccaggcctggcttgcgtcaggaagggggcggaacttggctgtcacaggtagagagtccctctcaagggggcatctggcatgggtgtccgcctggctgcctgtcttccggcctccacctcgtggtgtgggagctgctgccttggccggcccacttgggaactccttccccaggcgtctgaagctggcccagtttgactacgggaggaagtgcttagagatcgctcggctgacagagggcatgtcatgccggaagatcgcacagctggccgtgtcctggcaggtgagtcaggctcgggtgcacccacccagatggaagcccagctgctgtgcagatgcttggttgcgccaggcctgtcccagcaccggtgtcacgtgggagcttctgttgaggggttttcagtgcacagatgtgacacggggcccctgcccca

SEQ ID NO: 120 - DNA, 2300 bp, Homo sapien
ttttttttttttttttggcaatagagtcttgctcgcccagggtggagtgcagtggtgtgatctcggctcactgcaacctccaccttcagggtgtcaggcctctgggcccaagctaagccatcatatctcctgtgacctgcacttatacatccagatggcctgaagcaactgaagatccacaaaataagtgaaaagagccttaactgatgacattccaccattgtgatttgtttctgccccaccctagctgatcaatgtactttgcaatctcccccacccttaagaaggttctttgtcattctccccacccttgagaatgtactttgtgagatccatcccctgcccgcaaaacattgtccctaactccaccgcctatcccaaaacctgtaagaactagtgataatcccaccaccctttgctgactctctttttgaactcagcccgcctgcacccaggtgaaataaacagccttgttgctcacacaaagcctgtttggttgtctcttcacacagatgcacatgacacagggttcaagcaattttcatgcctaaacgtctggagtagctgggattacaggcgcatgccaccatgcccaggttaatttttgtatttttggcagagacgggggtttcaccatgttggccaggctggtctcaaactcctgttttcaggtgatctgcccacctcggcctcccaaagtgctgggattatgggtgtgagccattgtgcctggctggcattttctggcttttttttttttttttttttttgagacagagtctcactgtcgcccagactggagtgcagtgatgagatctctgcagctgtgttatatgtaaattttctgtgccaccaaagaagtagaactcgaatataaagttttctcagctagataatttacttctatagaagggggggtctcatagatggagcaatggcaagcgcttggacaagggaggggaaggggttcttattcctgacgcgggtagcccctactgctgtgtggttcccctattggctagggttagaccgcagtctaaagtaatgcccattggctttaaagagagcaggagtatgggccagagtggcggggtgagtggtttggcaggaaaaacagttatgggacgggtaactaaaggtgactcaggtcaaagcagatgaccaggggaacagatgtgaactgtcagtcctctgagcccaagcctgcacgtatacgtccagatggcctgaagcaagtgaagaatcacaaaataagtgaaaatggctggttcctgccttaggtgatggcattccaccattgtgatttgttcttgccccaccttaacttcctggctcagaagctcccccaactgagcaccttgtgacccccgcccctgcctgcaagagaaaaacgccctttgtcattttccattacccacccaaatcctagaaaacggccccacccctatctcccttcgtcgactcttgggactcagcccgcctgcacccaggtgaaataaacagccttactgctcacacaaaacctgtttggtggactctttacatggacgcacatgacatgaactactgattagaactggtggaaaaagttgtttattgcaactgcgaggaagttagactttaaaatgcagaacaaagactgaacatactgacataccggttctttgaagggaaatttagaattcattgtatataacattattcaggcttaaaatagtttccaatccagtgggacgagtcactccatataattctgtgaagtcaaccattcctatcaaggagagagtcggggccgccgcgagcgcgtgaaccgtgggctccggggtggtgccgacgcggctgcgggccgggactgacgttgcgccgggttcgagtactcccctccggagttttgtcccggtgcggctccggtacccagacgcttcaccacgccccccgccctccgcccgctcaccccggttcccgccgccccggagcacgctcctaaattgcggcgccgtcgctatggcgtcactgccctcgcggccaatccaagggctgcgcgcgtgtcccttacgcatttccgtcgccgggaggaaggggtgtgtgtttcgcctgcgcagtggtcctggccaccggctcgcggcgcgtggaggctgctcccagccgcgcccgagtcagactcgggtgggggtcccggcggcggtagcggcggcggcggtgcgagcatgtcgtggctcttcggcgttaacaagggccccaagggtgaaggcgcggggccgccgccgcctttgccgcccgcgcagcccggggccgagggc

SEQ ID NO: 121 - DNA, 2300 bp, Homo sapien
gcctttggggttcaagcgattctcctgcctcagcctcccgagtagctgggatcacaggcgcccgccagcacacctggctaatttttgtgtttttttactagagacggggtttcaccatgttgtttaggctggtcttgaattctggcctcaggtgattcgcccacctcggcctcccaaagcgctgggatgacaggcgtgagccgctgctcatggccttcctcggtaattttaacgatcaggttaggatgggaatcaagggctggacttcagggcacctcggaggacagcggatgttggtgactgactttcttgctgcaggcttatttggagggttcctttgtgtcctagttcctgggggttttcacccgctaacttcacttagagattgaaacttctcccacttccagaagctgaatcgtagtgatcagcctgcggccccctgcagtggtacaggcctggttgagcagcctcaggccgcctccccatagtgcagacctgtgcctctgagttgctccagtcctggcggccccggagctcctgacccgcagtccgctctgccggcgttgccagtgccttggtctgccctctctgtggtggagcggggcccggggcagggtctccaggtgcaccgtggggagccctccatcaggcttttgtttctgtggattgtgttccaggtgtgggctctttcattttgatcccttctctccttcctggcctcactgctggcgggtgagagaggtttctccggagttgactgccccctttccccgggtgccccctgccctgcccctctgcctggtagcccctctgcaagcccggcccctcccgacgctcctggcttcctccgtgcccctttcctggcagcggggtcgccgagattcgcccgttgctttgtccttgctgctctccaggcaaacgggcggctcctcctcaccgactgcctcctctgtcccttgaggctatagccccatgccgcctcgttcccagagtctgccctgacccctcctccggcctgtccttggaagtcacagcagtacattatcccagaactgtctgtgagcaccagcgctcgccctgcactccacagagggggtgcctggaggagagcctcgtgccctgtgggtgtgaattcacgcgctgggacgcacgtccctggcacagggtcacaccaaagtggtgaatgattgttctcattctaataaccgagaggccacacgggcacctgacctgctctttcccctctcctcctccccagagtcactgggggtaggaactgtcaatgagccattttcaggggagggagtggcctcagcttaatccagccaaaggtcccctcgggaggaaacaggcagagctcctcaccgtgacacccacgttcctgtcactgctctgtggcaggaccctgggggactgacacaccctcagtcccctcggggtcagagtgagagtggttgagagcccggggtcgcttcagcccttggcttcccgagtttagcagccaaacccgttgacctggcactgtcttccctgagaggcaggtcccggtctcatctgtgctctgttcactggggcccccgaggttagctaccaaggcgcttcctgaaatgtgacgctgatgcccgtcagcccagttcgtgcctaaccacaggcccaagcagacccaccccaacaccaaagtgtcgctgcctctgtctaaatgcaacgagtgctccccacggcacttccccctgcgtcagtcacctccaaaaattacacctgagctgagaacagacgctgggctctagttagtgacgtgtttgctgcagttgactctgaaggcttaaaaaagtgagacgggctgcgggaggaagagagacgggaacaacgcaccaacccaggagcatcgggggtccctgcctactttacacgtctttctgtgttagaataatttttttttttttgagacggactcttgctgtctcccccgctggagtgcattgcttcgatctctgctcactgcaagctctgcctcccaggttcacgccattctcctgcctcagcctcctgagtagctaggactacaagtgcccgccgccacgcccggctaattttttgtatttttagtagagacggggtttcactgtgttaaccaggatggtcttgatctcctgacctcatgatccacccgcctcagcctcccaaagtgctgggattacaggcgtgagccaccacgccctgctagaataatttttttttagagacggagttgcgctctgttgccccggctggagtgcggtggtgcgatctcggctcgctgc

SEQ ID NO: 122 - DNA, 2300 bp, Homo sapien
cccctcggggtcagagtgagagtggttgagagcccggggtcgcttcagcccttggcttcccgagtttagcagccaaacccgttgacctggcactgtcttccctgagaggcaggtcccggtctcatctgtgctctgttcactggggcccccgaggttagctaccaaggcgcttcctgaaatgtgacgctgatgcccgtcagcccagttcgtgcctaaccacaggcccaagcagacccaccccaacaccaaagtgtcgctgcctctgtctaaatgcaacgagtgctccccacggcacttccccctgcgtcagtcacctccaaaaattacacctgagctgagaacagacgctgggctctagttagtgacgtgtttgctgcagttgactctgaaggcttaaaaaagtgagacgggctgcgggaggaagagagacgggaacaacgcaccaacccaggagcatcgggggtccctgcctactttacacgtctttctgtgttagaataatttttttttttttgagacggactcttgctgtctcccccgctggagtgcattgcttcgatctctgctcactgcaagctctgcctcccaggttcacgccattctcctgcctcagcctcctgagtagctaggactacaagtgcccgccgccacgcccggctaattttttgtatttttagtagagacggggtttcactgtgttaaccaggatggtcttgatctcctgacctcatgatccacccgcctcagcctcccaaagtgctgggattacaggcgtgagccaccacgccctgctagaataatttttttttagagacggagttgcgctctgttgccccggctggagtgcggtggtgcgatctcggctcgctgcaagctctgcctcccaggttccagcaattctccagccttggcctccccagtagctgagatcacaggcgtgcaccaccacacccagcttttttttgtgtttttagtggagacaggatttcgccatgttggccaggttggagattttatttttcttaagtctcactctgtccagctggagtgcagcagtgtgatctgggtgactgtagcctctgcctccggggttcaagccatcctcccacctgagcctcagagttgctgggattacaggcgtgaaccaccgcttcccactaggtttttgtatttttagtagaggttgggtttcaccatgttggccaggctttggtatccgtgtatcctacacctgctctccgtgccacatgcgcccgcaggttacgccaaggaggccctgaatctggcgcagatgcaggagcagacgctgcagttggagcaacagtccaagctcaaagtgagtggggccggtgtgggcgaggaggccggggcgcacatggggttcaggcgtggagattggtggggctgctactggtgggtagggccaggggcgtgtacatgggcagcagtggggccagggccgagcttgggcgcctcatttcacagagggaaacaaggggaggtgagagacgctgccgcagagccgcccgagagggagggtcagtgttggtgagggcgtctggtcgtcctgagggagggccggtgttggtgagggcatctggtcgtcctgagggagggggtcttcttcacattctcacctcatttcttttcactcagcaggattttttattttattttattttattttattttattttattttatttattttgaaacggagtctcactcttgcctaggctggagtgcaatggcgcaatctcggctcactgcaacctccgcctcccgggttcaagcgattcatctgcctcagcctctggagtagctgggattacaggcacgcgccaccacgcctggctaatgttgtattttagtagagacggggtttctccatgttggtcaggctggtctctaactcccgacctcaggtgatccacccgcctcggcctctcaaactgctgggattacaggcacgcgccaccacgcctggcctattttattttattttgagacagagtgtcactctgtcccccagtctggcgtgcaatggtttgatctcggctcactgcaacctccacctcccgggttcaacctcctgcctcagccttccgagcagctgggactacaggagcctgccaccacatctggcgaatttttgtatttttagtagagaagggggttcagcatgttgtccaggttggtcttgaactcctgacctcaggtgatccagccactttggcctcacaaagtgctgggattataggcaagagcgatggcgcccggcccactcagcaggattccta

SEQ ID NO: 123 - DNA, 2300 bp, Homo sapien
ctcccccgctggagtgcattgcttcgatctctgctcactgcaagctctgcctcccaggttcacgccattctcctgcctcagcctcctgagtagctaggactacaagtgcccgccgccacgcccggctaattttttgtatttttagtagagacggggtttcactgtgttaaccaggatggtcttgatctcctgacctcatgatccacccgcctcagcctcccaaagtgctgggattacaggcgtgagccaccacgccctgctagaataatttttttttagagacggagttgcgctctgttgccccggctggagtgcggtggtgcgatctcggctcgctgcaagctctgcctcccaggttccagcaattctccagccttggcctccccagtagctgagatcacaggcgtgcaccaccacacccagcttttttttgtgtttttagtggagacaggatttcgccatgttggccaggttggagattttatttttcttaagtctcactctgtccagctggagtgcagcagtgtgatctgggtgactgtagcctctgcctccggggttcaagccatcctcccacctgagcctcagagttgctgggattacaggcgtgaaccaccgcttcccactaggtttttgtatttttagtagaggttgggtttcaccatgttggccaggctttggtatccgtgtatcctacacctgctctccgtgccacatgcgcccgcaggttacgccaaggaggccctgaatctggcgcagatgcaggagcagacgctgcagttggagcaacagtccaagctcaaagtgagtggggccggtgtgggcgaggaggccggggcgcacatggggttcaggcgtggagattggtggggctgctactggtgggtagggccaggggcgtgtacatgggcagcagtggggccagggccgagcttgggcgcctcatttcacagagggaaacaaggggaggtgagagacgctgccgcagagccgcccgagagggagggtcagtgttggtgagggcgtctggtcgtcctgagggagggccggtgttggtgagggcatctggtcgtcctgagggagggggtcttcttcacattctcacctcatttcttttcactcagcaggattttttattttattttattttattttattttattttattttatttattttgaaacggagtctcactcttgcctaggctggagtgcaatggcgcaatctcggctcactgcaacctccgcctcccgggttcaagcgattcatctgcctcagcctctggagtagctgggattacaggcacgcgccaccacgcctggctaatgttgtattttagtagagacggggtttctccatgttggtcaggctggtctctaactcccgacctcaggtgatccacccgcctcggcctctcaaactgctgggattacaggcacgcgccaccacgcctggcctattttattttattttgagacagagtgtcactctgtcccccagtctggcgtgcaatggtttgatctcggctcactgcaacctccacctcccgggttcaacctcctgcctcagccttccgagcagctgggactacaggagcctgccaccacatctggcgaatttttgtatttttagtagagaagggggttcagcatgttgtccaggttggtcttgaactcctgacctcaggtgatccagccactttggcctcacaaagtgctgggattataggcaagagcgatggcgcccggcccactcagcaggattcctagaatgggcacgagctctgccctcatcacagtccaaaagtgagcacctgcctggagctgcccagaaacagccttgtggggtggggttggtgtctgacctccctccccgggggccttcgcaggcttctctgctggtgcttctgtgcctgtgggtctggattcctccagggcctgatcctgggtgcagatgcagctggaagccctgaacctgctgcacacactagtctgggcacggagtctctgccgtgccggagctgtgcagacacaggagcggctgtcaggcagtgccagccctgagcaagtgccagctggtgagtgctgtgctctgcaggagtatgaggccgccgtggagcagctcaagagcgagcagatccgggcgcaggctgaggagaggaggaagaccctgagcgaggagacccggcagcaccaggccgtaagagcgcaagaggccgcgagggaggccgcccggctgcggggagcggcctggggcaggactgggagctgggtgtggtcccggggcactctggagtcagc

SEQ ID NO: 124 - DNA, 2300 bp, Homo sapien
ggctggtcttgaacttcttgatctcattatccgcctgccttggccttccacagtgctgggattacaggcgtgagcctctgcgttctgcctagaacatgggtctttactgtcctggtttcagtggggatcacaggtatttggtgccatgtggcatttgttggcgagtgctccaggcaaacgtctgtcaccactcttcaccgtgggtgggcttgtggcgaggtgtgtgcgtttaatgttcagtagccaggcacgtggcacgtcacgcgtgtctgagttctgacagctgtgtttctgtgtgaggggggcttccttcagaactccgcgttctggttttttgcttcaaagagctcgtcctgagaagttgcctaggcctctgggtcggatttctgccctaatccatgggcagggccggcctgtggcgctgtccctaccaaggtctgtgtgtgtctgtggcacgggcctgtccatggactgggcttgtccgtggagtgggtcggtccatggccttagcctgttggtggcgtgggccggtccacggcatgggcctgtctgtggcgtgggccggtccgtggtgcgggcctgtccgtggccttagcctgttggtggcgtgggccggtccgtggcatgggcctgtctgtggcgttggtctgtccgtggcgtgggccggtccgtggcgtgggccggtccacagtgtgggtggaggtggacgtgctgcactgcatggtgctgagctgccctgcctctctggggcagccaccgtggagcgggagatggagctgcggcacaagaatgagatgctgcgagtggagaccgaggcccgggcgcgcgccaaggccgagcgggagaatgcagacatcatccgcgagcagatccgcctgaaggcgtccgagcaccgtcagaccgtcttggagtccatcaggtgagcactgcccaggcccgggccggccacagatggagccccgcaggtgtgagtcgctggtcccagggcgctctccagctcttccaggcctggccgccataggctgactccttggtgggggcactgcccctctgtcctggcaaggccgtgccgccatgtcagggcctcaccctcaacctgctctcgctgcgtggtacggatcttcgtgtccttcctggtcacaccactgctttccccgcaggacggctggcaccttgtttggggaaggattccgtgcctttgtgacagaccgggacaaagtgacagccacggtaaacatattcataaaacagggctggcaggtggctgagaggcagcatgtgggggcctcctggagccccaggtcctgtccctgccggctctgcacagccctgtagctctcccagcacagagcaaacccacgttgtacctgctgggctcggctgctcctccctccttgagctgggagaaaaaaatgcagttgccagcctgggccacacggtgagaccccatctctacgaagaataaaacattagctgggtgtgatggtggcgcctgtggtcctgctactcgagaggctgaggtaggaggatcacttaagcccaggaggtttgggctgcagtgagccaacattgcaccactgcactccattcttggcgagagaataagaccttgtctcaagaaaaaaatggccaggcggtagtggctcaggcctgtaatcccagcattttcggaggcggaggtgggcggatcacgaggtccggagatcgagatcatcctggtaagagtgaaaccctgtctctactaaaaaaaagaaaaaaaaagaaaagaattagctgggtgtggtgacatgtgcctgtaatctcgggaggctgaggcaggagaatcacttgaacccgggtggtggaggttgcaatgagtcgagatcccgccactgcaccccaagaccagcatgaccaacatggtgaaaccccatctctgctaaaaatacaaaaattagcaggccaaggtggcgtgcgcctggaatcccagctgcttgggaggctgaggtaggaaaattggttgaacccaggaggcggaagttgcagtgagctgaaaccgcacaattgcactccaacctgtggaagaagagcgaaactctgtctcaaaaaaacaaacaaaataaataagccaggcctggtggctcactggtgtaatcccagcactttgggaggccaagacgggtggatcacttgaggtcagaagttcatgaccagcctggccaacatggtgaaaacccatctctactaaaaatacaaaaattggccgggcctcgtggcacaggtctgtattagctgagtgtggtgacctgagcctgtaatcc

SEQ ID NO: 125 - DNA, 2300 bp, Homo sapien
agcatgggcaacaagagtcaaactccctctaaaaaaaaaaaaaaaaaaaaaaagggccaggtggcacatgccggtggtcccagcttcttggcttggaggctgaggtaggaggatcgcctgagcatgggaggcagaggttgcagtgagctgagatcgcaccattgcactccagcctgggtgacagagtgagaccctctcaataaataaataaccaaaaccttgattacagccatggggtgggggtggggggacgtctggctattgctggggaagtcatttggtttttctcctcctctcctatttttttggtacagacggggtctctctttgttgcccaggctggtctccaactcctgggctcaagcaatcctcctgcctcggcctcccaaactggcggggttacaggcgtgagccaccgcgcctgccctgttttctttttcttttttttttcttttcttttttttttggcgatggagtcgtgctcgcccagggtggagtgcagtggcctgatctcggctcacttcaacctccacctccagggttcaagcagttttcccgcctaagcctccggagtagctgggattacaggcgcacgccaccatgcccaggttaatttttgtatttttgacaggggtttcaccatgttggcccggctggtctcaaactcctgttttcaggtgatctgcccacctcggcctcccaaagtgctgggattacgggtgtgagccaccgcgcctggccggcattttctggcttttttttttttttttgacagagtctgactcagtcgcccagactggagtgcagtgacgagatctcggcagctcactgtgttatatgtaaattttctgtgccgccaaagaagtagaactcgaatataaatttttctcagctagataatttacttctatagaaggggacatctcatagatggagcaatggcgagcgcttggacaagggaggggaaggggttcttattcctgacgcgggtagcccctactgctgtgtggttcccctattggctagggttagaatgcacagtctaaactagtgcccattggctattttaaagggagcaggagtatgggccagagtggcggggtgagtggtttggcgggaaaaatggttatgggacaggtaactaaaggtgactcaggtcaaagcaggagaccgggattagttaggacggagcaggtgaccagggcaacagatgtcaactactgactagaactggtggaaaaggttgtttactgaaactgcgaggaaggtagactttaaaatgcaggacaaagactgaacatactgatatactgattctttgaagggaagtttagaactcattgtatctaacattattcaggcttaaaacagtttccaatccagtgggaaaagtcactccatatattccgtgaagtcaaccagttccatcaaggagaaagtcagggccgctgggagcgcgtggaccgtgggctccggggcggcgcctgcccgggcaccccggccccgtccacgccccgcaagaggagctcgctggccccgccacgcgggaaggggtcgccccggggtcttgggcgggagggccgtgcgggctgcggagacaccgaggaggggaggcgcctctcctgagctcttggcgcagcgaccccagggcgccgactcatcgcggaagggctcggcttgcccgggcgccggtgccgcctcgggtgaggttcccgcgagactcttctctgcgtcctggactcaccgcagggcgccccgccgcacggatcgagaaccttggggctccctggaaacttgccacccgctgccgccaaggccggaactcctcggagcccctagcaacggagcccctagcaacggagcccacgcggatgcggcgcggggctgacgctgccttgggttcgcctacgtccctcgggaattttgtcccggcgtggctcccgtagccagatgcttcgccgctcccgccccgctggctcccaaagcctgttcggcagtcgcggcgccgtcgctatggcgtcactgtcctcggggccaatccaagggctgcgcgcgtgtcccttacgcgcttctatcgccgggaggaaggggtgtgtgtggcgcctgcgcagtggcggtgaccaccggctcgcggcgcgtggaggctgctcccagccgcgcgcgagtcagactcgggtgggggtcccggcggcggtagcggcggcggcggtgcgagcatgtcgtggctcttcggcattaacaagggccccaagggtgaaggcgcggggccgccgccgcctttgccgcccgcgcagcccggg

SEQ ID NO: 126 - DNA, 2300 bp, Homo sapien
tcggcctcccaaactggcggggttacaggcgtgagccaccgcgcctgccctgttttctttttcttttttttttcttttcttttttttttggcgatggagtcgtgctcgcccagggtggagtgcagtggcctgatctcggctcacttcaacctccacctccagggttcaagcagttttcccgcctaagcctccggagtagctgggattacaggcgcacgccaccatgcccaggttaatttttgtatttttgacaggggtttcaccatgttggcccggctggtctcaaactcctgttttcaggtgatctgcccacctcggcctcccaaagtgctgggattacgggtgtgagccaccgcgcctggccggcattttctggcttttttttttttttttgacagagtctgactcagtcgcccagactggagtgcagtgacgagatctcggcagctcactgtgttatatgtaaattttctgtgccgccaaagaagtagaactcgaatataaatttttctcagctagataatttacttctatagaaggggacatctcatagatggagcaatggcgagcgcttggacaagggaggggaaggggttcttattcctgacgcgggtagcccctactgctgtgtggttcccctattggctagggttagaatgcacagtctaaactagtgcccattggctattttaaagggagcaggagtatgggccagagtggcggggtgagtggtttggcgggaaaaatggttatgggacaggtaactaaaggtgactcaggtcaaagcaggagaccgggattagttaggacggagcaggtgaccagggcaacagatgtcaactactgactagaactggtggaaaaggttgtttactgaaactgcgaggaaggtagactttaaaatgcaggacaaagactgaacatactgatatactgattctttgaagggaagtttagaactcattgtatctaacattattcaggcttaaaacagtttccaatccagtgggaaaagtcactccatatattccgtgaagtcaaccagttccatcaaggagaaagtcagggccgctgggagcgcgtggaccgtgggctccggggcggcgcctgcccgggcaccccggccccgtccacgccccgcaagaggagctcgctggccccgccacgcgggaaggggtcgccccggggtcttgggcgggagggccgtgcgggctgcggagacaccgaggaggggaggcgcctctcctgagctcttggcgcagcgaccccagggcgccgactcatcgcggaagggctcggcttgcccgggcgccggtgccgcctcgggtgaggttcccgcgagactcttctctgcgtcctggactcaccgcagggcgccccgccgcacggatcgagaaccttggggctccctggaaacttgccacccgctgccgccaaggccggaactcctcggagcccctagcaacggagcccctagcaacggagcccacgcggatgcggcgcggggctgacgctgccttgggttcgcctacgtccctcgggaattttgtcccggcgtggctcccgtagccagatgcttcgccgctcccgccccgctggctcccaaagcctgttcggcagtcgcggcgccgtcgctatggcgtcactgtcctcggggccaatccaagggctgcgcgcgtgtcccttacgcgcttctatcgccgggaggaaggggtgtgtgtggcgcctgcgcagtggcggtgaccaccggctcgcggcgcgtggaggctgctcccagccgcgcgcgagtcagactcgggtgggggtcccggcggcggtagcggcggcggcggtgcgagcatgtcgtggctcttcggcattaacaagggccccaagggtgaaggcgcggggccgccgccgcctttgccgcccgcgcagcccggggccgagggcggcggggaccgcgggttgggagaccggccggcgcccaaggacaaatggagcaacttcgaccccaccggcctggagcgcgccgccaaggcggcgcgcgagctggagcactcgcgtgagtgcggcggggcggggcggcgcgggcgggcgggcgggacgggccggggaagcgggagccctggcccttgccgctcctcgccgctgtcggcagccacttcccgggcgagactgcgcccccggagcacccccggccggagccgtgtcgcgtgccgggaggatcggactctttccgtcacccgtttgcacctctgcagctgtcaggagcgggtcaggtgcggaaagcggtgcggaggtggcgctcataggttaca

SEQ ID NO: 127 - DNA, 2300 bp, Homo sapien
cttctcctcccttctcaagctgggagaagaaaacgcagttgccagcctgggccacacagtgagaccccatctctacaaaaaatcaaatattagctgggtgtggtggcagcccctgtggtcccactactcaagaggctgaggtaggaggatcacttaagcccagggaggttgcagctgcactgagctgagatcgcagcactgcactccatcctgggcgacaaagtccttgtctcaagaaaaaaattgtcgatagtcgtggctcacacctgtaatcccagcactttgggaggcagaggcagaggcgggcggatcacgatatcgggatcgagaccatcctggctaacacggtgaaaccccgtctctactaaaaaaatacaaaaaattagccgggcgcagtggcgggcgcctatagtcccagctactcaagaggctgaggcaggagaatcacctgaacccgggaggcggagcttgcagtgagtcgagatcacgctactgcactccagcctgggccacatagtgaggcttcttctcaaaaaaaaaaaaaaaaaaaaaaaaaaaaaaaccagaaggcaaccctgactccattttgcaaaaaccttctttattccttataaaaccctgagagtttgaagttcacagattcttctctcgtttaaagcctcactcttttgtgcccagcctccggcctgctgtggtggcgccccacgtcccacatggctgtgtcctccgtccccaccccgcccagcacacggtaggtgcccggcactgagtgggcacttgctctgccgtggtgccggcgcccagagctgtgactgcagcgcctgccggtggcctggtcagtgtgacggtgaatgttgcaggtggtgttgccaccatgttggtgagaccgtgtcacgtgaggacatgacggagctgcttaatgcgccgatgacttttgtttgtttgtttttagagacagggtcttgctctgtggtcagactggagtgcaatggtgccatctcggctcactgcaacctccacctccccagttcaagcagttctcctgcctcagcctcccaagtgactgggattacaggctcacgtcaccacactcagctaatataggcctgtgccaccaggcccggccaatttttgtatttttagtagagatgggttttcaccatgttggccaggctggtcacgaacttctgaccttaagtgatccagccgtcttggcctcccaaagtgctgggattacacgggtgagccaccgggcctggcctaattcattttttgtttgtttgttttttgagacagagttttgctcttgttgcataggctggagtgtagtggcgcgggtccagctcattgcaacctttgccttccgggttcaagagattctcctgcctcagcctcccaagtagatgggattacaggcatgtgccaccatggccagctaattttttgtatttttagtagagacggggtttctccatgtgggttaggctggtcttgaactcttgacctcaggtgatccacctgcctcagcctcccaaagtgctgggattacagacctgagctactgtgcccagccagcctaattgatttttaaaacgagttagagattttgggttagtcttgttttccaggaataaagtaccatttttagtggccaagaatgtaccagagggtgtggccctgtgacatccggctgggtctgtccagggccccgctcagcgaccgaggctttctaggatttatgctgccagttgcagagaaaatggccctgagtgagggcgctgtgactgccccacctgcctcctgtaaccgcgtggctgtgggattcggggccgggaattcgcgttcctgtggggccagtgcacggccctgtgcttctccctcgggcggagagagggtgggggcagccccgtgcgtctcctgctctaagagggagggacggtgggggccggtgcgccagtgcggtgtctctgctgcaggtggctgggctgacgctgctggctgttggggtctactcagccaagaatgccacgcttgtcgccggccgcttcatcgaggctcggctggggaagccgtccctagtgagggagacgtcccgcatcacggtgcttgaggcgctgcggcaccccatccaggtagcagcgcaggcctggccctccctgagtgcagttcctggctgagtcccttctgccccacgagcacagcccacgcacaccctcccgtcccttccctttccccggataacgggcacccgcacactgcttcacgggtgggttttcctgtctggcgctgtaccttagggg

SEQ ID NO: 128 - DNA, 2300 bp, Homo sapien
atccttgggagttttttttttttttttttttttgagacagagtcttgctcctgtcaccgaggccagagtgcagtggcatgatctcagctcagtgcagcctccgcctcctggcttcaagcaattctcctgcctcagcctccagagtagctgggactaaggcgcctgccacgacgcctggctaatttttgtaatttggtatagatgagtttcaccatattggccaggctggtctcaaactcctgaccttgtgatccgcctgtctcagcctcccaaagtgctgggattacaggtgtgagccaccgcgcccagctgggagtttatttcttagatgtgtgttaacttcagctgaggctcctgtgtgcctctgtttcatggccttcgggtgttggccgccctctactgaacgtggtccctgaggccgcagggactgtgcaaagccggatgtccaggccctgggagtccaatgggggcagtcgattctatggatggcacatcctctttgcctgccctgccctgggccctctcttggcccacttttctgggtacgtttcaggccctcatgcccagttggggccctagcatgggtcaggccctccgcctggtgtcgccttcttgcccgggctgagtctttggtttctttctttgtgggttcaatgtcgaacgctttgcgtcagtgggacttctgcaggacctgggcggcgcaggtgtccggaagatgggacaggtttctgttccgatggcgcctctctccccttcctcccgcccggcagtacttaggttcttccttcagaaaggatttccccatgacttgaagagcaggctctcgcacgcaggcccgaaacctgctcagcctccccgtggccctgagcctgtctattgaaggccccgcctcacccgccagcggctcctgtcctctcgccttgctctgagcctttgcctcgtggcactcactggcaccgtggttttgctgccggaattcaggtgggatcttgcgtccctgtgagctcatggcttggtctgtggtccctttggtcctcctcaggtcctcacagcctctggtggggcttgcaggtctagccctctgggcggggcctcacctcgcatctcctcgccaggagatccagaagggtggctgctcgctcatccttgtgtagctgaggaggctgctgctttgtccctgaagtagacatttctccttaactgaatgattcttaatttattgcctcatctacataaatagttgagaatgacgtaaaggaggaaaggacttagaactgtccaggcctcagggaagagctggccttgaacgtccatgagctctgccagccagtgacaccagtcccatccccaggagcccccacggcctcacccccggctgtgtcttgctcagggatgtgcagggagggtgatccctgtgcccaccatgaagctgccactggacccctgcaccctgaccccggttcctctccgtgagccggtccctgcacctgcccctctgcatgtggctgcacacaacaaggtcaggccgtcttgagctcttttttttcttttctttttgagacggtgtcttgctcttgttgcccaggctggagtgcagtgtcacgatctcagctcactgcaagctccgcctcccaggttcaagcttctcctgcctcagcctcccgagtagctgggattacaggtgtgagccaccgcgcccggccttttttttttttttttttttttttgttgttgttgttgttttccagaaggagttttactctgtcgcccaggccgaagtgccgtggtgtgatctcggctcactgcaacctccgccgcccgggttgaagcaactctcgtgcctcagcctcctgagtagctgtagctgagattacaggtgtgtgccgccccacctggctaacttttgtatttttagtagagacggggtttcaccatcttggccaggctggtctcaaacacctgacctcaggtgatccacccgcctcggcctctcgatgtgctgggatgacaggtgtgagtcgccacgcccggcctcctagaatgctgggatgacaggcgtgagccgccgcacccggcctcgagctcttctttccgcagactttgattctcagcggctgaaggactaagttccccagagatggacccgggtgtcatagctgcttccaggggcctcggggacacaggcgggactccaatgtgcaggaggagacacacgtcaggggtgggtgtgtgacttccacgctgctgacagtgacccaaggatgcagctcagggtcagatgccgttagatcaaccacttc

SEQ ID NO: 129 - DNA, 2300 bp, Homo sapien
ctttcctttaagcctaggttcatgggtcaaaaccaatatgcaaactgggatagtcatattattattgattttaccttgtattttccccttttaaacttattcattgccatattttgcaaaaggacaatttctttttttttatttttttgagatggaatctcactctgttgccagggtgaactgcataggcacaatctcagctcatagcaacctccgcctcctgggtttaggtgattctcctgcctcagcctcctgagtagctgggactacaagtgcgcaccactacatccggctaacttttgtatttgtagtggagacagggtttcaccatgtcggccaggatggtctcgatctcttgacctcgtgttccacccgcctcggcctcccaaagtgctgggattacggacgtgagccaccgcgcccggctacaagtacaatttctaacagaataatgctgacacagcactttgagatgatagaaagactacagaagtgacaaaagttgaagttaataatggactccaggttagacttagcctgagagccacacccttcaaacctcctttgatgctcaaatatggtaaaaaagggttttgacaatgactcccagcagccactctctccagtgtgggaccagaccagctatctgggacaagttcatcccagcacggggactatcaaaacctaattacaggatgactcattagtgatgcatttggagaaagatctcaatcaaaaggggaaaatacccaagttgtcaaataaaagtggactcacttatgtttaaaaaataccttgacaaagacagctgggaaaggccatggagaattctcatgaatcaataataagaaaaactatcacaagattctgcaaaaaccacaaccttgcactaaggcaatcttacacaaaaaatacttcagcaaggacagctgcccagcaactgcctgtccaaccctggaacgggagtacacttgtttttttttttttttagacggagtctggctctgtcgcccaggctggagggcagtggcgcgatctcggctcactacaagctccgcctcccgggttcacgccattctcctgcctcagcctcccgagtagctgggactacaggcgcccgccaccacgcccggctaattttttgtatttttagtagagacggggtttcaccgggttaggcaggacggtctggatctcccgacctcgtgatccgcccgcctcggcctcccaaagtgctgggattacaggcgtgagccaccgcgcccggccgggagtacacttgttactgttctttgtagccaaggttaattatttccaaaccattatcttcctcttcattttttctttaaaaaccattactttcctgaatgcgcaaatcgtttactatggcacgcatattcgccaacgccctattcccaaataaatatcattttcagttagcctgttattaggttgacaatcattatcactccctctcccgtccgtggcgctcccacggcaaaacatcagcccactgtccaccgcgaggctgcatccaggcagacaggcatagctggggaatgacacactcgcgttgactggatttactgtaactggacccaaatctcagaccagccggcggcctctccaaggaagcccgaggcgaggaagatcctagtcgacgtgcactcccaaccaggtctgtcacaggtcggccctcgcatttaaacgttaaatgttgaagggctttcataaaagagcgatgtgctcctgcttgtatgagccggggccggaggccggtaacagcggcacgggacgggagcgagcctcagaatgcgggaatgtctgtgggcctccgggacagtggagggagcgggtctagtgaagcgcgacgactctggggtggcagaagtgaggactatgggccccacggggaccgagggaacgcacaaaatcgtcccaagagacgaaacgccgggccgcggaagggccctcaatgctatctccggcaagcgcggcgtttcgcatcgctcccaaaggcggcggcgacaccttatgacgtcctgttgttccgcacgtcgtcgcgtcacactaggcgccggcgcggggtgctgatgtcaggacgccgccgcttggcgccgtgacgctcagccgggccttgtggagtgcgggtctctgctgcggacgccgggggccggcgcggcgttggccgcccccggcctcgccgagtgcagcgcgcccgaaggccagtgcctgcgctccgtccgcggcccggcgcccagggtgggcggggaggccgccgcgcagtcgccgcacgctac

SEQ ID NO: 130 - DNA, 2300 bp, Homo sapien
tcgaaaaggtttccatgccccagagcctgagcccggcagcccccgaggatgtcttggggcctctgtgctccccaaagccaagaaggttaggcttgacccacagcctcttccaggccggggaggcagaggcgctccaggtcggtagggcggggcccacagcccagggtttcacgtccccaaaacggggcagggtgctggaggggcaggtgtccacagggtggtcgttttggtctctcctggacttgcacgcgtgtagtgcagactggctgccggcaaagccctgagccacattcatctgggccttgttaggacaacagggacggtgcggggtgggggggttgcggggcgcaggaccacgtcagtggagggagggaggccgatatcggtgcccaggctgggcccaggggccagcgggtcctcacctggcttgtggctgcccctgttaggcagcccggatggaggggctcttccagccctgctggccccgggaatgcagggactcaactccccctggtctcagtggctcttccgggagcaacacagcctgcccgagtcgacaccacccctcgggtttgagtcccttctgtctacccctacccccgccagggcactgcccccttgcccggaagaggcagcggcacccccagccccttggggaggatgccctgccggccccacactcggtggatgggcattttggggctaggatttaatgggggtgaccctgcccgacccctctatgttggttccacggcgtcagaagaaagctgttattaacccagcttattttctacaagtcttgtttattgaaaggatctgaaaagcgtaataaggctttcaatgacatttaatacattttcaagaaattaatatgaaacattaaaatttacttcaaaaatccaaagttttctagatcattcccatctcacgctgctttagaggtcagttcacaccttctgtgttcagatgagcggctggaattctgaacactgccgtcttccagccctaacgctgggcgctggtccctctctcctaagcccacggctgggcttcccctgtgcccagggtcatggcggacttcaagccaggccggctgcccagaatcacactcagggtttttggacgctcaagtccacagatgctgaggtgcccagacgagggtgagcagggagacacatgcctcggagaacgtgcccaggctgggccaggcggctgcgggaagctcctcacgggcagaggagaacgtcttgtgccttccttatcgatctccagcagatgagggcaactttgtgtgcaaaactcagagagcagttactcaaaaaaaagacacccgggcagcagtaaccaggacaccagggtccgaccacggcctccacacacctgtgcccgtggaagacgcgggcgccggggtaggcagcatccacgtgctccacagctgctggtgctgggcaggctggagactcacgggagaggcaggaggagaatcagcgtgttgagtccctcgctgtgttagtgtgaaaaattctcattacagttgcaaataaaagggatcacgatcactagccccggaaaccctcatctcccggaccatcaggatcgcactgaacagaatggtcccctaatggtccctgaggacagcgtcttgcagaacataaatgtaaacattgaatggcagacgactcccttccccttgaaatcttcacaaaagtgtgtacgagaaagtatgtacatcagcacttcagaaaaggggcccacaggacgtgtgcggggtgtgcagggtgtgcggggtgtgcggggtgtttgagggtccggatgtgcgtcccgaggtcggagggttggacgcccctgtgtccagttgttgggaggggtgggaggcctcgccctgctgttcagccccttcccctccactgggccgcgttcccagggacgtgcaacagggcgctcaggttaggagacccgaaaccacaggcagacaggacccgccacgcccgctcccagccctgggcacccccacccccgtttccttccagtccattttccgcggcagtttttggtcctggggaccgtcaccgatgcctcccacgcacgctttcttccctgaagggagacgtcgctgcgctgggcctctcggcggtcccccccacccgggtcccgggcccactggccccccgcagacgccgctacacgctgactccagccaggctgcgctgggaccacttcaacctcacctacaggtgcgccctggctgggccccgggggagggggcgcggccggcgcccgctgagctcactctccctgca

SEQ ID NO: 131 - DNA, 2300 bp, Homo sapien
gctcccttttcttcagtctcttctgctttcttttcctcagacgatgtgattttattgtcttcaggctcaccgattatttcttctgcctgctcacatctgcctgtgagtttctgttgtgaatatttactttttagtgtctattgtgagcatgtacttattagctctggaatttctctctggtttcttgttggatcttctgtctctgttgatatttccgtcgtgttcacgcgtcattttcttgactttctccacatcttcctttcgttctctgaggaactgaaggtttaagacagttccctaaaatctttgtctgggacatctaccgtcaggtgattttcaggaaccgtgtctgttggcttctttttttcccctctgaatgggacatactgtcctgtttctttgtttctcttgtgtttttcttagtcaaaaaaatggacatttgattctcatgatgtgattcttcctggtccccactcaagggtgtgcacttgttgttttggttgtgctgggctgtgtctgtggggtcggcctgttgtggaaactcagggtcttcacgggtcttttctgagcctgagccttttcctggtcacgtgcagccactttttaacgttcccgtcaatacagatgtttttaatgttcttgtcctgaagtgtctgcctcctaaagggggaatagagagaaatgaagggggcaacgggggacgtggtgctcatgccctggaagtaccttcagcttgggggtggccgtggctgctgcctcttcatgcctctggggtgggacacgcagtcatcacactgacctcgggtgtgtgtgtccgtctgcccacctgggtccggcgagctgcatgcaggctgctgcctgccagcggggagtgaggtgggagccactaatgtgcgaagcggtgacgttgattaatgaatcacagtttactctccaagattccccctgaagttgcaaaccttcagtagactccagagcacctcagtagttgcacaggcctgatcctgtgatgcaagtgttgtctcggtggggagactgattcccagtgcttcctactccatctttccagaatcttctcccgccccttcctttttgaccagtgaagatcagtctagaaggtccacctgggtcctcgggctcacggcctccaggttggagctttttctccctgggcttcctgggagacctctggcctctgaccccgatgctgtcagcaccctgtgcacgctgtgggtgtgtctgccaggtgcgggtgtgggagacgaggcagctgtgccgggtggggccttttgaggaaggcagtgctgctagtgccatctccctctctgccctgcgcgccagtgtctgcacatcaccgaacgatgagagaggactacagcgacaaagtgaaagccagccactggagtcgcagcccgcctcggccgccgcgggagcggttcgagttgggagacggccggaagccaggtgaggccaggccggcgcctgcgcagaagccagcacagtgtgagtcttttctgggggatgtttggcataagtgtgtaggattcatttaaagcccagctaagtaaccgcttcagaagaaagtgagagatgtgctggctgaagtcctctcgtgtcgtgagagggaccgtgagtgtctgtgtgcggccaggacacaggacgtgtgtttatccgctgggacattcgccactggccccgttagagaagtggcttccagcgtctgtggatgagctggtttccgaccaagcaaagttaatcgttacgtgaaaggcactagttttggggtggtggtagcttgtttgtttaaaaacatttccccaaattcacctttatggtttatctcataagtaaaagaagagaaaatggaagaaagggacctgctgtccgacttacaggacatcagcgacagcgagaggaagaccagctcggccgagtcctcgtcaggtacctggaaccgcctggccaaggccttgaccactgctgcccaggaaggcccaggttcaccctctgctctgctgtctttctacagcggaatcaggctcaggttctgaggaagaagaggaggaggaggaagaggaggaggaggaagggagcaccagtgaagaatcagaggaggaggaggaggaagaggaagaggaggaggaggagaccggcagcaactctgaggaggcatcagagcagtctgccggtgaggcaccgcgacgactgtgtgaggtgttgtgacttcactatagtgttagaaaccgcagagaagtagctggcgggcgggggagttgaaactcccttctatctaggactct

SEQ ID NO: 132 - DNA, 2300 bp, Homo sapien
gggtcactgtgacaactgtgtgctattgtaactattaaggtttactctttcctagagttaccgtgacagggcgtgttgtagctgttgtactactgagattactctttcctaaggttaccgtgacagggtgtgctgttgtaactattgaggtttactctttcctagggctactgtgacggggtgtgctgttttaactattgaggtttactcttccctagggttacgtgacggggtgtgctattgtaactattaaggtttactctttcctagggttactgtgacagtgtgctcagtgtgctgttgtaaatactgaagtgtactctttttttttttgagacggtgtctcaagagtcttgctcacccaggctggagtgcagtggcgccatctcggctcactgcaagctccgcctccctggttcacaccattctcctgcctcagcctcctggctaacacggtgaaaccccgtctctactaaaaatacaaaaaattagccaggatggtctcgatcttctgacctggtgatccgtccacctcggcctcccaaaatgctgggattacaggtgcgagccacgacctaggattactgtgacagggcatgctgttacaactattgaggtttactctttcctagggttactggtgaaagcctgtctctactacaaatacaaaaattagcctggcatggtggtgtacacctgtagtcccagctactcaggaggctgaggcaggagaattgcttgaatgtgggaggcaaaggttgcagtgagccaagattgtgcctctgtattctaccctgggggacatagcaagattctgtctgaaaaaaataataagtccgggtgcgatggctcatgcctgtaatcccagcactttgggaggctgaggcgggtggatcatgaggtcatgagtttcagatcagcctgaccaatatggtgaaaccccgtctctactaaaaatataaaaattagctgggtgtggtagcgcacgcctgtactcccagctactccggaggctgaggcaggagaattgctcgaacctgggacaggaggcagaggttgcagtgagccaagattgcgccgctggactccagcctgggcaacagagcgagactccatctcaaaaaaataaatacaggccgggcgtggcggctcacacctgtaatcccagcactttgggaggctgaggcgggcagatcacaaggtcaggagatcgagaccaccctggctaacacagtgaaactccgtctctactaaaaaatacaaaaaaaattagccgggcgtggtggtgggcgcctgtagtcccagttacttggaaggctgaggcaggagaatggcatgaacccaggaggtagagcttgtagtgagccgagagtctcgccactgccctccagcctgggcgacagagcaagactccaatctcaaataaaataaataaataaataaaattaaattaaataaataagatgtgatgtatttttacatgcccctgaaactgtcaccacagtcaagctaatgaacctgcccctcaccccctgcaggtcctctgagaggcatttcgttccatctgcacaaaacattgatttcttacatttttcatctgaatcttaagactcctaggccgggcgcggtggctcacgcctgtaatcccagcactttgggaagccgaggcaggcagatcaccaggttaggagattgagaccatcttggctaacacagtgaaaccccgtctctactaaaaatacaaaaattagctgggtgtggtggcgggtgcctgtagtcccagctactccggaggctgaggcaggagaatggtgtgaacccggaaaggtggaggttgcagtgatccgagatcgcgtgtctacactccagcctgggtgacagagcgagactccgtctaaaaaaaaaaaaaaaaaaagatgcctgaagttggagaattaatgtaattttttaaatgatgtttcagcttcgttcctatctgaatcatgcatttttctgggttgaaaaaacctcataatagcctgatgcttttccgcactttctcaagcatgacgcagtgctgttgtgttttatttcagaggagaagaagatgattctttggccatcaaaccaccccagcaaatgtctcggaaagaaaaagttcatcacagaaaagatgaaaagagaaaagaaaaatgtaggcatcatagccattcagcagaagggggtacagaagcatttactttctttgacatcatgttcaagtgtggtttctttcctgttcctactcttctgccttccccagagcaccactgaaaaaccag

SEQ ID NO: 133 - DNA, 2300 bp, Homo sapien
atctagacacagctttagtgtgttaaatctgcctttaatgtcaactgaatattagaatacattttgggctcacctgcgacatttggaagtacaaaagaacttcaccgaagaagcgttgttctaatggaaaaatgagggcaaagaaattaaatctcctttaagaaaaccacttacttaaaaaaatatggcttacattttttaagcgttttatctctgctttctcctcttgttccttccttcgtttcttttcctgaagaatttcatctaaagttttcactttccaagagtccttttcatcacccatttgagttaaaacactgcaaaaagaaaaataattcagcctacatcaggacacagcaagctatggtgctgaacacttgaacctagtcacttttgagggattcagaataaatcctcattaagaataagaagttgtgcccggcgcagtggctcaagacggtaaccctagcactttgggaggccgaggcgagcagatcgctggagttccggagttcaacaccagcccgggcaacatggcaaaacctcgtctctacaaaaaatacaaaagttagcccagtgtggtggcgcgtgcctgtattcctagctacaggaaggaggctgctagaggcaggaggatcacttgaatcagagaggtcaaggctgcaatgagccaagactgcgccactgcactccagcctagataacaaagtaagacttggttaaaaaaaaaaaaaaaaaaaggtaagctctaggctgaggcgggtggatcacaaggtcgggaggtcaagaccagcctggccaacacggcgaaaaccctgtctccactaaaaatacaaaacttagctgggcgtggtggcgggtgcctgtaatcccagctactcgggaggccgaggcagcagaatcgcttgaatccgaaaggcggaggttccggtgagccgaggtcgcgtcactgcactccagcaagaccccgtctcaaaaaaaaaaaaaaaaaaaaaaaaaaaaaaaaaaacaagaatgataagttgtaagccaggcaaggtggcgagcgcctgtagtcccatatactctgcaagctgagatgggagaccgattgagcccaggagttccaggctgaagtgcgcttgtgaacagccactgcgctgcagcatgggcgacaaaaaagagtgatgggttctgaaaaatgaccgcttgaaatcaagtctcgtttctgtcattcttgtatggtcttgggtaacgtaattcacctcagttcagtcttccgtacaaccagaataacaacacctacgtgatagtatcgatcgcggattaaagatcatccgtttaaaggctcttaactcaggacctgccactcatcaaacactgcttttactgtcagaatctgctagaaagaccgcttggactacgtgaagccactagcacactggacagctgcaccttgagaccggggagatgctccgagatgtgctcgcgaacaaggccacctgacccgggcactgggctatttcctcgggttcagtcccgcacacttgaggttcagcctggcagacgttggctccagacagcgtttggacccgccgcctccaccacccaaagttccgtgcgggatgagactgtccgcggaagcgagggtgtcgctcgcccccgggcccgggtccgccccgctccgaggcctgctcggaagaaagacctcggtgcgcagttctcgtcgcgctcccacacctggtccgcccagtcggaactcacccctacggggccgcggccggtccctgagcctgagaagaaacagcaaccggcgctcgccagaagtatcctcacttcctgtgttgacgcctaatgatgatataatagccgacctctggcccagaactcaagacgacaggggctcgctctgtgcggcacttcctgtgtctgcgcgggatgatgacgcataaaacagcgcttgctcaggtccaggactccaaaagaaactgcgccgtgagctgcacttccgacttcggcgcgggccggggcgccgagcagagcgacgccgacttttggagcagtttgcgcctgcgcggaacgcgtggccggcttccggaatcctaccgggacttttccggtagcgaagcccgcgcctgtgccaaggcttgcgagcagaatgccttcgcgatggacgcccgcattccacccccttgaccgctgggacccctagtggcgggtgggtggagcgcgctccatttacctgctggttacctcgtgaggcgcctcaggtctgtgtgtcttgtaaaggccgatctcggaatttaactctgaaccttact

SEQ ID NO: 134 - DNA, 2300 bp, Homo sapien
ccaagaccacgccactgcactccaacctgggcggcagagcaaggctccgactcaaaagtaaatacatgaataaataaaataaaatcacatcgtaagagctctccctgctttgtttctgagtaaggttcagagttaaattccgagatcggcctttacaagacacacagacctgaggcgcctcacgaggtaaccagcaggtaaatggagcgcgctccacccacccgccactaggggtcccagcggtcaagggggtggaatgcgggcgtccatcgcgaaggcattctgctcgcaagccttggcacaggcgcgggcttcgctaccggaaaagtcccggtaggattccggaagccggccacgcgttccgcgcaggcgcaaactgctccaaaagtcggcgtcgctctgctcggcgccccggcccgcgccgaagtcggaagtgcagctcacggcgcagtttcttttggagtcctggacctgagcaagcgctgttttatgcgtcatcatcccgcgcagacacaggaagtgccgcacagagcgagcccctgtcgtcttgagttctgggccagaggtcggctattatatcatcattaggcgtcaacacaggaagtgaggatacttctggcgagcgccggttgctgtttcttctcaggctcagggaccggccgcggccccgtaggggtgagttccgactgggcggaccaggtgtgggagcgcgacgagaactgcgcaccgaggtctttcttccgagcaggcctcggagcggggcggacccgggcccgggggcgagcgacaccctcgcttccgcggacagtctcatcccgcacggaactttgggtggtggaggcggcgggtccaaacgctgtctggagccaacgtctgccaggctgaacctcaagtgtgcgggactgaacccgaggaaatagcccagtgcccgggtcaggtggccttgttcgcgagcacatctcggagcatctccccggtctcaaggtgcagctgtccagtgtgctagtggcttcacgtagtccaagcggtctttctagcagattctgacagtaaaagcagtgtttgatgagtggcaggtcctgagttaagagcctttaaacggatgatctttaatccgcgatcgatactatcacgtaggtgttgttattctggttgtacggaagactgaactgaggtgaattacgttacccaagaccatacaagaatgacagaaacgagacttgatttcaagcggtcatttttcagaacccatcactcttttttgtcgcccatgctgcagcgcagtggctgttcacaagcgcacttcagcctggaactcctgggctcaatcggtctcccatctcagcttgcagagtatatgggactacaggcgctcgccaccttgcctggcttacaacttatcattcttgtttttttttttttttttttttttttttttttttttgagacggggtcttgctggagtgcagtgacgcgacctcggctcaccggaacctccgcctttcggattcaagcgattctgctgcctcggcctcccgagtagctgggattacaggcacccgccaccacgcccagctaagttttgtatttttagtggagacagggttttcgccgtgttggccaggctggtcttgacctcccgaccttgtgatccacccgcctcagcctagagcttacctttttttttttttttttttaaccaagtcttactttgttatctaggctggagtgcagtggcgcagtcttggctcattgcagccttgacctctctgattcaagtgatcctcctgcctctagcagcctccttcctgtagctaggaatacaggcacgcgccaccacactgggctaacttttgtattttttgtagagacgaggttttgccatgttgcccgggctggtgttgaactccggaactccagcgatctgctcgcctcggcctcccaaagtgctagggttaccgtcttgagccactgcgccgggcacaacttcttattcttaatgaggatttattctgaatccctcaaaagtgactaggttcaagtgttcagcaccatagcttgctgtgtcctgatgtaggctgaattatttttctttttgcagtgttttaactcaaatgggtgatgaaaaggactcttggaaagtgaaaactttagatgaaattcttcaggaaaagaaacgaaggaaggaacaagaggagaaagcagagataaaacgcttaaaaaatgtaagccatatttttttaagtaagtggttttcttaaaggagatttaatttctttgccctcatttttccattagaa

SEQ ID NO: 135 - DNA, 2300 bp, Homo sapien
tcccagcactctgggaggccaaggcgggcgaatcacaaggtaaggagatcgagaccatcctggcgaacacagtgaaaccccgtctctactaaaaaaaatacaaaaaattagccaggcgcggtggcgggtgcctgtagtcccagctactcggcaggctgaggctcgcaggataatggcgttgaacccgggaggtggggcttgcagtgagccgagattgcgccactgcactccagcctgggcgacagagcaagactccgtctcaaaaaaaaataaaaataaaaaaatagggagatttccccagttaccaagaactcaggaagcaacattaagagcttgggggaggccaggcgcggtggctcacgcctgtaatcccagcactttgggaggcagaggcaggctgatcacgaggtcaggagattgagaccatcctggctaacacggtaaaaccccgtctctaccgaaaataaaaaaaaaattagccgggcatggtggcaggcgcctgtagtcacaggtactcaggagcctaatgcgggcgaatggagtggaggcgggagaatggcgtgaatccgggtggcggagcttccagtgacccgagatcgcgccactgcactccagcctgggcaacagagcgagactccgtctcaaaaaaataaaaataaaaaaagagcttgggtacacaaagcaagcagcatttcattccgggatgaaaagaattccgatacccatcgcccttcttgggcccttgtcagtttcttgccacatctttcattttcccatttcaggcccagtaaatgcggatgtttatcttccattgtttgtttcctgagattcagatgtctaaagcatttttctgtgacttttcaaggcaagaggaaaacctgacatatggaaagggaattaattgctcgttttatcctcttctcctgcaatgctctgaatccatgggtttggagtggggccctgggagttgggggaagcaccatacccagtgagtctgcactttgaggacccactgccagtgtcagcttcaaaatcacattgtaaaaggcccggcgcggtggctcacgcctgtaatcccagcactttaggaggacgaagcaggcggatcacttgaggtcaggagttcgagaccagcctggccaatatggcgaaacctcgtctctaccaaaaatataaaaattagccgggcgtggtggcgcgggcctgtggttccagctactcgggaggctgaggcaggaaaattccttgaacccgggaggaggctgcagtgagccaagaccacgccactgcactccaacctgggcggcagagcaaggctccgactcaaaagtaaatacatgaataaataaaataaaatcacatcgtaagagctctccctgctttgtttctgagtaaggttcagagttaaattccgagatcggcctttacaagacacacagacctgaggcgcctcacgaggtaaccagcaggtaaatggagcgcgctccacccacccgccactaggggtcccagcggtcaagggggtggaatgcgggcgtccatcgcgaaggcattctgctcgcaagccttggcacaggcgcgggcttcgctaccggaaaagtcccggtaggattccggaagccggccacgcgttccgcgcaggcgcaaactgctccaaaagtcggcgtcgctctgctcggcgccccggcccgcgccgaagtcggaagtgcagctcacggcgcagtttcttttggagtcctggacctgagcaagcgctgttttatgcgtcatcatcccgcgcagacacaggaagtgccgcacagagcgagcccctgtcgtcttgagttctgggccagaggtcggctattatatcatcattaggcgtcaacacaggaagtgaggatacttctggcgagcgccggttgctgtttcttctcaggctcagggaccggccgcggccccgtaggggtgagttccgactgggcggaccaggtgtgggagcgcgacgagaactgcgcaccgaggtctttcttccgagcaggcctcggagcggggcggacccgggcccgggggcgagcgacaccctcgcttccgcggacagtctcatcccgcacggaactttgggtggtggaggcggcgggtccaaacgctgtctggagccaacgtctgccaggctgaacctcaagtgtgcgggactgaacccgaggaaatagcccagtgcccgggtcaggtggccttgttcgcgagcacatctcggagcatctccccggtctcaaggtgcagctgtccagtgtgctagtggcttcacgtagtccaagcgg

SEQ ID NO: 136 - DNA, 2300 bp, Homo sapien
cagtgaaacccggtctcaactaaaaatacaaaaaattagccgggcatggtggcccagctactctggagcctaagatgggagaatggagtggaggcgggagaatggcgtgaacccaggaggcggagcttgcaatgagcggagatcccgccactgccctccagcctgggccagagcgagtctccctatcagaaaaaataaaaatagctaggcgcagtggctcacgcctgtaatcccagcactctgggaggccaaggcgggcgaatcacaaggtaaggagatcgagaccatcctggcgaacacagtgaaaccccgtctctactaaaaaaaatacaaaaaattagccaggcgcggtggcgggtgcctgtagtcccagctactcggcaggctgaggctcgcaggataatggcgttgaacccgggaggtggggcttgcagtgagccgagattgcgccactgcactccagcctgggcgacagagcaagactccgtctcaaaaaaaaataaaaataaaaaaatagggagatttccccagttaccaagaactcaggaagcaacattaagagcttgggggaggccaggcgcggtggctcacgcctgtaatcccagcactttgggaggcagaggcaggctgatcacgaggtcaggagattgagaccatcctggctaacacggtaaaaccccgtctctaccgaaaataaaaaaaaaattagccgggcatggtggcaggcgcctgtagtcacaggtactcaggagcctaatgcgggcgaatggagtggaggcgggagaatggcgtgaatccgggtggcggagcttccagtgacccgagatcgcgccactgcactccagcctgggcaacagagcgagactccgtctcaaaaaaataaaaataaaaaaagagcttgggtacacaaagcaagcagcatttcattccgggatgaaaagaattccgatacccatcgcccttcttgggcccttgtcagtttcttgccacatctttcattttcccatttcaggcccagtaaatgcggatgtttatcttccattgtttgtttcctgagattcagatgtctaaagcatttttctgtgacttttcaaggcaagaggaaaacctgacatatggaaagggaattaattgctcgttttatcctcttctcctgcaatgctctgaatccatgggtttggagtggggccctgggagttgggggaagcaccatacccagtgagtctgcactttgaggacccactgccagtgtcagcttcaaaatcacattgtaaaaggcccggcgcggtggctcacgcctgtaatcccagcactttaggaggacgaagcaggcggatcacttgaggtcaggagttcgagaccagcctggccaatatggcgaaacctcgtctctaccaaaaatataaaaattagccgggcgtggtggcgcgggcctgtggttccagctactcgggaggctgaggcaggaaaattccttgaacccgggaggaggctgcagtgagccaagaccacgccactgcactccaacctgggcggcagagcaaggctccgactcaaaagtaaatacatgaataaataaaataaaatcacatcgtaagagctctccctgctttgtttctgagtaaggttcagagttaaattccgagatcggcctttacaagacacacagacctgaggcgcctcacgaggtaaccagcaggtaaatggagcgcgctccacccacccgccactaggggtcccagcggtcaagggggtggaatgcgggcgtccatcgcgaaggcattctgctcgcaagccttggcacaggcgcgggcttcgctaccggaaaagtcccggtaggattccggaagccggccacgcgttccgcgcaggcgcaaactgctccaaaagtcggcgtcgctctgctcggcgccccggcccgcgccgaagtcggaagtgcagctcacggcgcagtttcttttggagtcctggacctgagcaagcgctgttttatgcgtcatcatcccgcgcagacacaggaagtgccgcacagagcgagcccctgtcgtcttgagttctgggccagaggtcggctattatatcatcattaggcgtcaacacaggaagtgaggatacttctggcgagcgccggttgctgtttcttctcaggctcagggaccggccgcggccccgtaggggtgagttccgactgggcggaccaggtgtgggagcgcgacgagaactgcgcaccgaggtctttcttccgagcaggcctcggagcggggcggacccgggcccgggggcgagcgacaccctcgctt

SEQ ID NO: 137 - DNA, 2300 bp, Homo sapien
tcacgccattctcctgcctctgcctcccgagtagctgggactacaggcgtccgccaccacgcccggctaatttttttttgtatttttagtagagactgggtttcaccgtgttagccaggatggtctcgatctcctgaccttgtgatctgcccgcctcagcctcccaaagtgctgggattacaggcgtgagccaccgcgccctgcctatgtattttatttttcccgaaacagagtcttgctctgtcacccagagctggatttctttggtttgatctcggctcactgcaacctccgcctcccgggttgaagtgattctcctgcctcagcctcccaagtagctgggattacaggcgcgtgccaccatgcccggctaatttttgtatttttagtggagacggggtttcaccatgttggccaggctggtctcaaactcctgacctcaggcgatccgcccgcctcggcctcccacagtgctgggatgacaggtgcaagccactgcacccggccaaaggtgcaatttaaagactggagactagccaggtggactggaggtcaaggcaggcagattgcctgatctcaggggttcgagaccaccctgggcaacatgggcaaccctgtctttactaaaacacaaaaaattagccaggcctggtgaaatgcacctgtagtcccagctgcgtgggaggctgaggcatcagaatcacttcagcccgggaggcgggtgttgcagtgagccgagattgtgccactgcactccagcttgggctacagagtgagactccgtctcaaaaaaaaaaaaaaaaaaaaaaagactggagactttttggtggcaaatacaaaggaatgaggttatgttaccagcaagtataggagtccatgcagctggcatcagcagctggccacctcataccctgttgcggaaatcagcggaccttttttctgaaacttctgatctgtcatgaggaggtgtaattgtccccaaacatgaagtgaaaagccgacgttggggctggcgggaatggtggacagtcaggtgtagctctccctcttctctgctttccgtctggtccaagtcagtgcggtaaattctcaaatacccatccgagctggtagctgtgcaccacgcacgcagcgttccacagctgaggagctggagcttgtgcttcctctcacctgcaggtcccgcaggccctgcaccgagtcgccttgtccatggcgctgccctgccccatgcttcctgcgtcctgagtaggaggtatctccgagacaggaaaagtggccgctctctctcactttttctggaactcatggtggtctcctgggcttggtcactgtctctcaccagcatgtttctttgtgcggtcaggaattatttccaaatgctcctgaagcctagtgttttagtgaacattagtgattgttagcagtggttcaaaaaaaaaaaactttttttttttttttgagacagagtcttgctctgtgacccaggctggagtgtggtggtgccatctcagctcactgcaacctccgcctccctgctcaagtgatcctctcgcctcagcctcctgagtagctgggactacaggtgtccaccaccacgctgggctaatttttgttttttgttattttattttattttactttttttgagagatgggattttgctgtgttgtccaggctgatcttgaactcctggcctcaagtgatccacccaccttggcctcccaaagcgctaggactgcaattatgagccaccacactcagcccaattatttttcctttttttttttttttttttggagccagagtctcacgctgttgcccaggctggagtgcagtggcgcgatctcggctcactgcaaccccacctcccaggttcaagacattttcctgcctcagtctcccgagaagctgggattacaggtgcctgccaccatgcccagctaatttttgtatttttagtggagacagggtttcatcatcttggccaggctggtctcgaactcccgacctcaggtgatccgtctgccttggcctcccaaagtgctgggattacaggcgtgagccaccgcatgttgcccaattatttttcagtagtatttttttgttttatttaatttcattttataagagcagtgaattaagtacacattatggaaagtttgcaaagggtacttcctgtcaccctttttttgcacggtcctaacactgtgtacttggtacccttttcacccaacaaatgatcttaagggattgctttccctggggctacaaaggcactgtgagtgtgtgggagatgt

SEQ ID NO: 138 - DNA, 2300 bp, Homo sapien
agtgattttaaattggtggttgaaacctttgaggacattaaatgttcaaaacgggtgatgtgtttccttttcttaatattttagcgtctgcttctacgctttgcctgggagaggccctggtggcctcgttcctggcgcccggagtccctgctgcggccccacccccgggcggtcacggtgacccatgctgcccagcctggaggtaaaatcgttcgtggctgtggcttcagcatgtcgtcctcggtgaaaaccccagcactggaagagctggttcctggctccgaagagaagccgaaaggcaggtcgcctctcagctggggctctctgtttggtcaccgaagtgagaagattgtttttgccaagagcgacggcggcacagatgagaacgtactgaccgtcaccatcacggagaccacggtcatcgagtcagacttgggtgtgtggagctcgcgggcgctgctctacctcacgctgtggttcttcttcagcttctgcacgctcttcctcaacaagtacatcctgtccctgctgggaggcgagcccagcatgctaggtaggcggcggctcgggcagggtggaagccggccacctgccaccccacagggagcagccagcaaccacccgggagggccgggggagcccaggtcaggatgggagaccgggggtggagcccactgcaggcacgggaggggtgattctccctcttgtcttcggccccctccctcccgcaggtgcggtgcagatgctgtccaccacggttatcgggtgtgtgaaaaccctcgttccttgctgtttatatcagcacaaggcccggctttcctacccacccaacttccttatgacgatgctgtttgtgggtctgatgaggtaaagaatctcctggttttggttgagtgtctctttttctttaaatgtaaagtccctctcgttactagagcggggactctgctggctggtgagttttcagtgcagactttataaaagcaccagggctgtccagatttcaggacaccaaatgaatgtggcttcgtggctctcactgccacgtgtgttcagtcagcttctttccgggctggtggtctcaggacagggtgcctccttgtctctgggacgttttcaaggggtggcagaagtcacttcccattggacgcagtgccgtttcctgggggctcgacctaaagcgtcacagaagcgggtccaggcaccatgttggtgatgaggaggtgggcggagaggggccgacgtgccaaccgagcgagcgagccccttggagagcctgcccggtgggtgcaggcagacagactcgttctaaggtgatggtgcttttggctcatttttaggtttgcaactgtggttttgggtttggtcagcctgaaaaatgtggcggtttcgtttgctgagacggtgaagagctccgcccccatcttcacggtgatcatgtctcggatgattctgggggagtacacaggtgaggccccctgggccccacccctccgcctgcgccccaccatcccaggcctccatccgtggtgcccgtctctgctgcctgccatggggctctgccgcgaggaccactcagagtggtgcccacactggcagtgccttcacttctctcacggtcacatgtgcgggggtgtcttggagcctggcgtctgccaggtgttctcacactggcatgcggaggtcagggcagggttgtgtctcgtggccctaactgggtggggagacaggtgggggctgggcagattcctggcaagcaagattactgcaggtgccaatcactgatccgaagaggacgggcgggggccgccttcggccagcaccatacaggcggccgtggcccctggtccgtgggccctcctgtgccagcaccccacagcctccccagcacccgccaccacaggcctgtcctgggccccagcccctgacctcagctgcaacccaggctcctgcctctcccacctcttaatgactcacaggcgatttccagtgacatgtcagccccatgtcgcgtacccagtgtggctgcatgaaaaccagcgaggagcagaggcgcccacagagcgcggcatcttgaacggagtgtgggggtgcacacgtgttcgcttatttaagaaacgacaagatcttaaggccgagggaagtgtctgtctgcctttggggacgggaggaggccgagggtccaggatggggttgggcttgccccacatgcacttgagacccgcacacacgtttaggtgattataacaaaatcaaagcctaaaagtcaactctggtttttttttgttttttttcttttg

SEQ ID NO: 139 - DNA, 2300 bp, Homo sapien
gagaggccaggcgtggtggctcacacctgtaatcccagcactttgggaggccaaggtgggtggatcatgaggtcaggagttcaagagcatcctggctaacaacggtgaaaccccgtctctactaaaaatacaaaacaattagctgggcatggtggcgggtgcctgtgatcccaactcctcgggaggctgaggcagaagaatctcttgaacctgggaggtggagcttgcagtgagccgagatcgcgccactgcactccagcctgggcgacagagtgagactccgtctcaaaaaaaaataaaggccgggcgtggggtagctcacgcctgtaatcccagcactttgggaggctgaagcgggcagatcacaaggtcaggagatggagaacatcttggccaatatggtgaaaccctgtctctactaaaaatataaaaattagctgggcgtgagggcacacatctgtaatcccagctactcaggaggctgaggcaggagaatcacttgaacccgggaggcggaggttgcagtgagctgagatcgtgccactgcactccaacctgggcgatgagagcgaaattccatctcaaaaaaaaacaaggagtactttttataaatctgcttttgaaatcatttggataccacagcggccctgctgaccacaacagctgagactgttgggcaaatcaccagacatttctgggtttcctggaaagtaggagaatctactttgtaaactgctctcaaatttatgaactccgtgtggatagtgaactcaggcagcaggcaggtggcactccactgcgttaatttcacttcattttataattttctttcttcctttttttttttttttgacggagtctcactctgtcgccaggctggagtgcagtggcgccatctcggctcactgcaacctccgcctcccgggttcaggtgatcctccttcctcagcctccggagtagctgggattacaggcgcccgccaccacgcccggccaatttttgtatttttagtagagacgacgttttaccacgttggccataccaggctggtctcaagctcctgacctcgtgatgcgccggcctcggcctcccaaagtgttgagattacaggcgtgagccaccgggcccggcccaaaagtaatctctaaagagccctttagccgtaacttcattcctgaaaattatttgggaaagtaacgctaggaaaacgctcgacgaagctccggagccgggggtcctcggggccgcaggcgcgcccgcgggtgtctgctccggatgtcccgcggcagccccgacgccagcctggatacgaaggccccgccccggagcgcgccaccagccaatcagcgccctgaggcgagtcctcaccccgcgcggcggccccgccccccgcagctccgggcccagctgtcagagcagctttccctcaggctgggcggagcgtggccacttccgccaggaggcgcctttgtgtcttctaagttaagcctattcagtggatttcttattcctggaacccaaacctgggcagtaaaccctccggggcttagaggccgctgcctccacagactggccgatcccgccctgaagtgccgctggtggaacagcccgggcggaaccaacgggctgccgcggggggtggggccacggttccccccccttctgccttcagtggaacggccccggcggaaccaacgggccacggggatgcactacgcgcaccgtcgtcctctccctctgcctgcagtggaacggcccgggcggaaccaacgtgcggccgcccggagcactcggcgcgccgtgtccctccccgtgtggctgcactgcagcggcccgggctggaccaccaggcggccgcggagaggcacttaaaagccccgtgttaccctagaccttaaaaaaaaaaaaaaaaaaaactgcgtgtttccacccccgtcggcctgcagtggaagggcccgagcagaaccaacggggcaggggacgctgagcgcgccgtgtttctcctcccgtctgcctggagtagaacggctcgggcggaaccaacgggcagccgcgggggcgttgtgggccgcggcgcgtttccccggctccgtggctctggggcactgaggagcggcgcccgcggggcagcgaggagcccgatgcagggttctgcgcgtcatttccggtcccgcgggcgccccgtgaagcccacctggatccgccagcgctgtgccactccccagtgccgagctccgagctgtctccgcggcctcgcgcccggcccctccaccgcgcacctcttaggccccgcccgcca

SEQ ID NO: 140 - DNA, 2300 bp, Homo sapien
ctcttaaaggtcctgcttcctcctggcgcgttggtgatgaagtttcagcgtgagcgtgggggggcgggcatgcaggccacgatgccaggtctctgaccacagcgcccgtgagtcgggaacctccctgcaggagggtggggtctgcaggtggaatgagcaggttggcactttgcttccaggagaacatgatcgtgtatgtggaaaagaaagtgctagaagaccctgccatcgccagcgatgaaagctttggggcagtgaagaagaaattctgtacctttcgagaaggtgggctgtcagcagctctgtccttggtttctccagcacagttccccgccccattggaagcttctggcactgttgcccttgtcattggtgtctgcgcactgcgccacagaggggccactgtgtgacagcctcttcttggttttgctttgtgtttcctagattatgatgacatttccaatcagatagacttcatcatctgcctggggggagacgggacgctgctgtacgcttcctcgcttttccaggtgaagcgctgacatttccagacccacaccaggttctagtctaggtgctgcgtaacgaggggctcacaagcatggcttccattgcttttcacccctttatacgagagcagtcacctagagcggccagcactgaggcccatggtggcagcccggtggggtgcgacggtggggccaggggcagtgtggacacagtgctacggctgggggtggccagcgcccgcctgggacagcagggagtggcgcagggtggtgggtcctgggaaacgacctcgcctactggcccatcccctctgggcctcccttgagctcctcttcctggtttctcagcagcacagctctcccctggggctgtagggccacgctgtgtgggggaccctggctctgcccttggcccactgcatgttggtgacaccggaaatgcccgcagcccgccctgcttttctccccatctccccattagcacctgtggggcgcgaggctccgaccccaaggctgcctcccacccgccctcgccagctcccccagccctccgtgcccagggggccgctcagccctgccacctttgttcctcaccagctccccacaccaaccttggccctggtggcccggcccaccctggcctgcgacgtccccctccgcttgtccacatggccagtccctcctgcagagggtcggggtgctgtccccacagagctgggtccctcctgaggtgctgctggaaagctgggtggtgcgggggtgcacggcgtgggcactgagtgacctctccgtcggctcacagggcagcgtccctccggtcatggccttccacctgggctccctgggcttcctgaccccattcagctttgagaactttcagtcccaagttactcaggtgatagagggtgagttggaatgttctggagcccacaggagctctgatcatggcgctgctgtctcgcttgcttgcggggggtttattttcatttaatgatgcatggagcaacatttaaaggtttcaagattcagggatttctaaatcttgagtggttcaaaccttttactgacactgagaagtttcagcagatcacaggttgaagctgccatgtgtgttgggcagaagtgagctgattctcactctcagaaggcacagaagtgtcggccgggcgcggtggctcacgcctgtcatcccagcactgtgggaggtcgaggcgggcggatcacgaggtcaagagatgagaccatcctggccaacacggtgaaaccccgtctctactaaaaatacaaaaattagctgggcgtggtggtgcgcacccgtagttccagctacttgggaggctgaggcaggagaatcacttgaacctgggaggcagaggttgcagtgagccaagatcacaccactgcattccagcctgggtgacagagtgagactccatctcaaaataaaaagaaaaaggcacagaagtgtgtcaacttgggagaagaaagagccctctgactcccactggcctccctggggtggggcccctgaccccactgacttccctgatgcatgccctctgactcctgctggacctcagggaacgcagctgttgttctccggagtcggctgaaggtcagggtggtgaaggagctccgggggaagaagacggccgtgcacaatgggctgggtgagaacggctcgcaggctgcaggcctggacatggatgtcgggaagcaggccatgcagtaccaggtgagtggaggcgcctcggcctcggtgaggggcccagggtggggcgacttcggtcc

SEQ ID NO: 141 - DNA, 2300 bp, Homo sapien
gagaaattgcacaacctgtcagctgaaggaaaccacagccctggttttgttttctcatctctgaaacagggaagctctcctgcaggcagtgcccaggcccagggtagacaaagggttttcatgccacagacggggcagctgctggagctccctacacagcgggacacgcgaagggcacctgctgtgtgacctggggcccacgacagtcactggttgcctctgcagaagcagttgactgcctccactctagaagattctactgaggcctggctcagtgcctggcttgtgggtgcgccatctagatcaagcattattatgctaatgatcatatgcaaaaactcagctcacgcattattatgttaatgatcttatccgccccctctccccccgccaaagaaaaagaactgggcagctcaaggccgcttctgtgggtgtggctggtggtcactttgaaacagttgggtttgcaaaataaccccgggagaagttacagagcttaagaaatcccccaagttctcatgatccttgcttccctttccagtcacccttggtgccctgtacttcactgtggtcctgaactgaagagctgtgtttttcaggaagacttggccaggccgtgttccgtgtctctggattcaagtcccaggagtcctgaccagagagcaggtatgcgggtgtggggaagggctgcagaggactcaggtccacaccgaccctgggccaggtgatcacacagaaagtatagacagggactgaacctcagaaaacaatggctgggccaggtgcagtggcttacgcctataatcctagtactttgggaggccgaggcgggtgaagtttgagacccagcctgggcaaaatggtaaaacctcatctctacacacacacacacacacacacacaaatatatatatatatgaatgaagtagtcgagtgtggcgggacctacttgtagtcccaactactagggaagctgaagtggaaggatcgcttgcacctgagaggtcaaggctgcagtgagccgtgagcccgccactggactccggcctgggggacgaatgagacactatctcagaaaaacaaaacaatgtctggcacctgggggaccagcaggttagagcagctggtcgtgcattgccagtttacctgacagtgactcgagagctgagaactgggtatagggcacattattgggatatttgaggcctgaaggcgctgatgagcagccaccagttcagcaagtgcgggctgggtgggacccgcagttccaacaaacactacaaagtccgctcctgtggctttggcctcctcccccaactccccgagtcctccagcctgtggggtgcgcaaaacacggctccctggtccccctagaggtgccccaggccaccgggtcctccctccactgccagccttgggatcccaagcgtagacctctgaggacgttcgtgggcgtgcaaggcgcacctggccgctagaggtgggcgtgaggccgatcgcggttcccccaggcgcagggccgccctcccagccccgacggacagccccgagggagcgcagcgctgccgcagctgctctaagtttcggttcccaaatccggctcggcccacaccgtgtcacagcccggtaattagggaagcggcggcgggcggggccagctctcgcggggcacctgcactcccctgagccggcccacgtggtccgggaggtcccgcccgcggtggcggtgagttgggggcgggacgccgggctgggatcacaatgtcgggggcgcctaggcgtagacgtggcgggcggacccgggggcgccctccggacgcggcaggtgagtggggacgggagccgggggccgccctcctcggggcgccgacccccgcctacccgagtcgcggacgcccgcccctgtccccgctgcccgcctccactccctggtcactgctctccaccgcgattcgcccctcttccccaccgcccgcctctttcccgccacgcccgccgcctcccgcccgcgcggggtgtcccggcgccggtgggacccggcagacgcgcgggacgccccacgtgcgcggcagcgcgcatgcgtggcgggtgcgcctgcgcagtgggcgggcgcggcgcattgctgctcggcggcgccggcgccggggtccgggcggccatggggcaacaggcggccagggcgccaagggccaggtagcgacggctggcggcggcgcggcggcggggcctgcgggctcggtccggcatgtagacgcccccgcaggcgcccgcggcagcgaacggtgagtgagcagacccgg

SEQ ID NO: 142 - DNA, 2300 bp, Homo sapien
cacccactgctgccccatccctggggcctggtcaggcaggagggggcctttcctgacccccaatcccttgaaggcagagcctcttcctgtgcaccatctggcagaagcccccatgatagccctggacccttctgttcctgctgcgggaacatctcttccctttggtctcagcccaagcaaagctgcctcttggaccattctgggtgccctaaggagccttcccagctttggtcttagttattgctggccaggcctggggtgaggtgtgggtgtgagatcttggcccctgaatcttcaaggtcatatccggggcctgccctgagaaattgcacaacctgtcagctgaaggaaaccacagccctggttttgttttctcatctctgaaacagggaagctctcctgcaggcagtgcccaggcccagggtagacaaagggttttcatgccacagacggggcagctgctggagctccctacacagcgggacacgcgaagggcacctgctgtgtgacctggggcccacgacagtcactggttgcctctgcagaagcagttgactgcctccactctagaagattctactgaggcctggctcagtgcctggcttgtgggtgcgccatctagatcaagcattattatgctaatgatcatatgcaaaaactcagctcacgcattattatgttaatgatcttatccgccccctctccccccgccaaagaaaaagaactgggcagctcaaggccgcttctgtgggtgtggctggtggtcactttgaaacagttgggtttgcaaaataaccccgggagaagttacagagcttaagaaatcccccaagttctcatgatccttgcttccctttccagtcacccttggtgccctgtacttcactgtggtcctgaactgaagagctgtgtttttcaggaagacttggccaggccgtgttccgtgtctctggattcaagtcccaggagtcctgaccagagagcaggtatgcgggtgtggggaagggctgcagaggactcaggtccacaccgaccctgggccaggtgatcacacagaaagtatagacagggactgaacctcagaaaacaatggctgggccaggtgcagtggcttacgcctataatcctagtactttgggaggccgaggcgggtgaagtttgagacccagcctgggcaaaatggtaaaacctcatctctacacacacacacacacacacacacaaatatatatatatatgaatgaagtagtcgagtgtggcgggacctacttgtagtcccaactactagggaagctgaagtggaaggatcgcttgcacctgagaggtcaaggctgcagtgagccgtgagcccgccactggactccggcctgggggacgaatgagacactatctcagaaaaacaaaacaatgtctggcacctgggggaccagcaggttagagcagctggtcgtgcattgccagtttacctgacagtgactcgagagctgagaactgggtatagggcacattattgggatatttgaggcctgaaggcgctgatgagcagccaccagttcagcaagtgcgggctgggtgggacccgcagttccaacaaacactacaaagtccgctcctgtggctttggcctcctcccccaactccccgagtcctccagcctgtggggtgcgcaaaacacggctccctggtccccctagaggtgccccaggccaccgggtcctccctccactgccagccttgggatcccaagcgtagacctctgaggacgttcgtgggcgtgcaaggcgcacctggccgctagaggtgggcgtgaggccgatcgcggttcccccaggcgcagggccgccctcccagccccgacggacagccccgagggagcgcagcgctgccgcagctgctctaagtttcggttcccaaatccggctcggcccacaccgtgtcacagcccggtaattagggaagcggcggcgggcggggccagctctcgcggggcacctgcactcccctgagccggcccacgtggtccgggaggtcccgcccgcggtggcggtgagttgggggcgggacgccgggctgggatcacaatgtcgggggcgcctaggcgtagacgtggcgggcggacccgggggcgccctccggacgcggcaggtgagtggggacgggagccgggggccgccctcctcggggcgccgacccccgcctacccgagtcgcggacgcccgcccctgtccccgctgcccgcctccactccctggtcactgctctccaccgcgattcgcccctcttccccaccgcccgcctct

SEQ ID NO: 143 - DNA, 2300 bp, Homo sapien
tcccctacccccaccccccagctccctttcctcgctgggtgaccttgagcaagttacttggcctctctgtgcctctggcccccgcgtgaaaaatgtggacaataaacgtaccaggctgtggccgggcgctgtggctcacgcctgtaatcccagcactttgggaggccgaggtggatggattacctgagatcaggagttcaagaccagcctggccaacatgatgaaaccccgtctctgctaaaaatacaaaaaatgagccgggttcagtggtgtgcgcctgtaactccagctctggaggctgaggcaggagaatggcttgaacccgggaggcggagcttgcagtgagctgagatcatgccactacactccagcctgagctacagagcgagacttcgtcttatactaggctgcttggtaaggatcttgtgaggacacagggagtcccagtcctgccaggtggttactgttgatgatccccgcccactctaggctctcaccacttcagggtcctggtccttgctgctgcctctgcctgagagagaaacacttgtccctgggtaccttggtcaaaactgtaccccaacccctgcctgcccccaccaattctgcttcttgcccgtctgccccactagaaggtgaacacctgatggactttggtttccactgttgaatcctcagtatgccctgcacatggctggcatcctgggaaagaggttgcccctcgccccaaaccaggccaaacagaagactgtcatgtgagcagatccagacactggcccctgcagacgcccctatcctggctttcagcctgggcagggcctgtgccgggtgctggctggaggctggatgagatgaccagatagcctgccatactgatgtccttcactgggagcctcagtccttcccagtcatcctttccccaggctccaggccacttacccttgtgggttctgggcagacttcgttcacccagtttactggagccaggccacctgaagccaacttccctctctcctcagcctccccaggagcaacctgtaccccagtgcaccccatcctgctccatccctcatggcctccgttcccccttctccctccaccctccccatccctgctgacccccagaagaggatgggtccaggttttgggggttctgaagtaaacaacatgggagccatccttaaagaatacaaaaaacaatgcgaaattatgtgaagagtccactgccaccttgagcaatggcagccctggggctgaggaaggtcagggcaggggatgccacccactgctgccccatccctggggcctggtcaggcaggagggggcctttcctgacccccaatcccttgaaggcagagcctcttcctgtgcaccatctggcagaagcccccatgatagccctggacccttctgttcctgctgcgggaacatctcttccctttggtctcagcccaagcaaagctgcctcttggaccattctgggtgccctaaggagccttcccagctttggtcttagttattgctggccaggcctggggtgaggtgtgggtgtgagatcttggcccctgaatcttcaaggtcatatccggggcctgccctgagaaattgcacaacctgtcagctgaaggaaaccacagccctggttttgttttctcatctctgaaacagggaagctctcctgcaggcagtgcccaggcccagggtagacaaagggttttcatgccacagacggggcagctgctggagctccctacacagcgggacacgcgaagggcacctgctgtgtgacctggggcccacgacagtcactggttgcctctgcagaagcagttgactgcctccactctagaagattctactgaggcctggctcagtgcctggcttgtgggtgcgccatctagatcaagcattattatgctaatgatcatatgcaaaaactcagctcacgcattattatgttaatgatcttatccgccccctctccccccgccaaagaaaaagaactgggcagctcaaggccgcttctgtgggtgtggctggtggtcactttgaaacagttgggtttgcaaaataaccccgggagaagttacagagcttaagaaatcccccaagttctcatgatccttgcttccctttccagtcacccttggtgccctgtacttcactgtggtcctgaactgaagagctgtgtttttcaggaagacttggccaggccgtgttccgtgtctctggattcaagtcccaggagtcctgaccagagagcaggtatgcgggtgtggggaagggctgcagaggactca

SEQ ID NO: 144 - DNA, 2300 bp, Homo sapien
tctgttcacagactgggcctcatggagtatgcttgcaccctgggcattgcaccacccatcctgctctccagccgcactggacacacctcaccccccaacctgaacatgcacagacacttagagtggcctctggttgggcagaaccatctaacataatacatatcttataagaaaaagttgaacatctcatgtaaattattggacactcctgaaaatgaaaacacagaatagttgtatgggtacttggagcatggttttcctattaaatgcgtgtgtctttcaaaccatcataaagtcacaaaattgtaagtcaggggccatgtgtggcttatacattcggtcattccccttgtccttcatagttcctgtcagctgatgcttgtccacatcattttatcagcgcttgagagctgtgattttagggttcagtctctggttcttggagtaagaagctgatggattctgtgtagcttcactacagcctgcacagggtgggacagagaggtcatctttgagacctatgaggtcatgttttttgtttttttgaggcagagtctcactctgttgcccaggctggagtgcaccgctgtgaactcggctcactgcaacctctgcctcctgggttcaagcgattctcctgcctcagcctctcgagtagctgggattacagacccagcacccaccaccacagctggctaatttttatatttttagtagagacggggtttcaccatgttggccaggctggtctcaaactcctgacctcagcctccccaagtgctgggattacagtcatgagccaccgcgtccagccaaggtcatgattctttcatgcagtaaacttgggagtgcctccgcctggtcccctgtgtgagatgcaggctgtgctgaggtctccatgactcttctttcctgcccttctgtgctcacattcaaacaggctaagtgctacaaggctcggtggcctggtctggatgggcatctgacggggtgggggtgcttccctgaagcaagggtgagtgtgaaccaggaagccagtggaggagggctcgggtggagacccgggagcatgacagtgagctgcggggcacgacagcaagctgcagggcactacagggggcgccaggtatgcagggctatcctcctctgagctggacttgggttcacctttgtggtccctagtgtccctgtggtgtggcctccaggaagtatttgaccacgcatactttcgtaggcacgtagttaatattttgagctctgtcatctatgcatatttttcttctgtcagagccagtttaataatgtttgttggccaggcatggtggctcacgcctgtaatcctagcactttgggaagccgaggtgggtggatcacaaggtcaagagatcaagaccatcctgaccaacatggtgaaaccccatctctactaaaaatacaaaaattagctgtgtgtggtggcgtgcacctgtagtcccagctacttgggaggctgaggcaggagaatcgcttgacctgggaggtggaggttgcggtgagccgagatcacatcactgcactccagcctggcgacagcacgagactctgtctcaaaaaatagtgataataatgtttgttaaataaatgctttgttttctctgtaatcttacactttctacattaaaaccccagtgggtttcttcttttggtgcattttatttttgttgtttgctgattcacgcagtgtcgcatgactccctggggtgtagttggggggaaggcttttcagtaaacactcaaatctaaacaggtatcccaagaatcaccagtgccactggaacccctgaatcttcagattagggccagtctgtcaccaatcctgggcacacactaactggtttgttgaccctatgcttttagttccacagtaaataccagaactgtgatcaatgtacaaaagaaataatggtcaacagaagtcattaacaacttgaactgccgggttcaaatgattctcctgcctcaccctcctgagtagctgggattacaggtgcccgccaccacgcttaatttttgtatttttagtagagaccagtcatcatgtgtggatattgcggactgattttttgttgttgcttttcctcattttggaagttgtttaggacggggcatcttggtgtgtcctgctctcgcctctgatgcttccttcccagtgggagtgggtgggaatactcagagacacagaattgtgcccacgctgatgtgggtgtcacagccactgtccccaagaaaacaaacccacccacacatattcacgagcaccc

SEQ ID NO: 145 - DNA, 2300 bp, Homo sapien
catccctctgcgctcctcctgggtcatgacctgtgcatatgccccttctgggaactatgtggcctgcggtggcctggataacatttgctccatttacaatctgaaaactcgtgaggggaacgtgcgcgtgagtcgtgagctggcaggacacacaggtacctgtccttgttcataagcttcaagtgacacaagctgtttacctggggtacattatatgctttggatactcactttttatcaatcattttttaattaattaattaattattttttttgaggcggagtctcgctctgtcacccaggctggagtgcggtggcgtgatctcggctcactgcacgctccgcctcctgggtgttcacgccattcccctgcctcagcctcctgagtagctgggactacaggcgcccaccaccacgcccagctaatttcttttttgtatttttagtagagacagggtttcaccgtgttagccaggatggtctcgatctcctaacctcgtgatccacccacctcagcctcccaaagtgctgggattacaggtgtgagccaccacacccagcctttttttctttttttttttttttttttttaaagacagagtctcactatgtcacccaggctggagtgcagcagcgcattcttggctcactgcaacctctgattcctgggttcaagcgattctcctgcctcagcctcccaagtagctgggaccacaggtgtccgccaccacgcccagctaatttttgtatttttagtagaggcggggttttgctgtattggccaggctggtcttgaactcctgacattgtgatccgcctgccttagcctcccaaagtgctgggattataggcgtgagccgctgcgcccggccttatgaatcattaaatgagactggttcaaataaaagtcacagtaatggccagaagttttctgaaaatgaaactaaaaacaagcctgatatgcctttaccagtaagaaacctgtggatttgcgctggacatggtggctcatgcctgtaactgcaacactctgggaggccaaggtaggaggatagcttggagccaggggttcgagaccagctggggcaacaaagctagaccccttctctacaaaaaatgaaaaacagccacgcacagtggcacacaactatggtcccagctcctcaggaggatggctcaagcctgggtggttgaggctgcagggagctatgattgcaccactgcactccaggctgggcgaaagcgagaccctgtctctgcaaatgaggcataatagagccctgtggccgtaagtgctaggtagtctattatttcaccaagattttatttacttgtgacactaattcatcatgaaaggcatacatttgctgaaagaggatgtactattctaatattttacctctctggctgtattatttgttctcagacattttatgccccagtactttttgataacactccgcccacttcacatgcagccaaagaaatcagttcatggagtcactagtactacagttgacacccattaagcagtctgttaaataagttaattttggccagattacaagtttaaccttgtcctttgaaagataatgctgctgctgttgttgatttctgttctctgttcttttctgccttctgcttactttggagttgccttcttaattttccagctacctgaagtagatctgtaggccactggtttgcttccttttcaaatagaatcacttaaagttttaagtttccctctaagcatggctttagccacatcacacacatttgtttcatattgtcttttttttttttttttaagatggagtcctgctctgtcacccaggctgtagtacagtggtgcaatctcagctcactgaaacctcaaccccctgggttcaagcgattctcctgcctcagcctcccgagtagattacaggcgtgcaccaccacgcctggccaatttttgtatttttagtagagacggggttttgccatgttggtcaggctggtcttgaactcctgactgcaagtgatctgcctgcctcggcctcccaaagtgctggaattacaggcttgagccaccactcccagcctatattgtattttaattatcattcaatgtgaaatttttaatatccttgtgagtgcttatttgacttataggttatttagatgtataatttttacatatctgaagttttcttagttattgttgatttctaattagatgtcattgtgcttaaagacacacttggtatcatttcagtcctttgacatttgaggcttgtttttaatggagctgatgg

SEQ ID NO: 146 - DNA, 2300 bp, Homo sapien
tccacaaatcacagtcgctaggatttatatgtgaaaaccagggaaagaattaaccagtcttatcccttaagaataaactgcccttgaggtgtgaccttgtccatacctaattccggtgatgctccatgtgtgcagggaggcctgaggtatttttccttagtgaagctttcctcatgattaaaacatccgtttcaaataatgcctttagaaacaactatttggtcagaaatctttctgacaccgtgttgctgtgcagcctgcctccccagagagcagtggcagcaggatgcctggtctgcgtgctcgtgttacggggcatgccttgcaggcctttctggttctgtggaccgtagacatcaagtatctatactgtaggttattcgaattcctttaggcacactaggaaagttcagactggaaactgacggctgagcttcttaggtcatcggatagtttcccacagatgggttttaatctcaagaaaataactgctatcagttagattttgatgtatattgtattagccttttgacttacacaaaagttataatggtaaaattgatcctctgtgtaatttatgtaggaaattgaagtgcttgcataagccgtacttgcatgtgagagctaattgtaagggattaaagacattagcaactgtgtcctcagctttgttatacttgagtcatacttaacagccaagatcttcagtcatacattaacagctaagatcttggtcagaaatgcagcctccatttatgacattctcttgggaaaataagtctcttgtttaacaaggtgatttagtttttactttgatttcaggaatattgtctaacgtgagtagggcgagaaggcagggcggcttgtactgagcctaatttagcctgcacctataaggatcaaggtgttgtttctgagcctcctgggatcccagggctcacttgggtgggagagtgggttgtccctgagccaaaaaactgctggacacaccctgtgtgctcaggattgctgtgtgagcatcctgacagcttttgaccagtagcggttcatggttactgagatgaggtggctttgagattcttggttgccaggttgccactcacccccgttccctgaagtaacttcccctaggtcttcatgcgatagctatcctaagtgtcaggttttattttttttattttgagatggagtctcgctctgtcacccaggccggaatgcagtggtgtgattttggctcagtgcaacctctgcctcccaggttcaaatgattcttctacctcagcctcccaagtagttgggattacaggcgtgtgccaccatgcccagctaatttttgtatttttagtagagatcgggtttcaccatgttagccaggctggtcttgaactcctgacctcaagtgatccacccgccttggcctcccaaattgttgggattacaggcatgagccaccacacctggcctaaatgtcagtcttatgttcttggatttatagggagacctagatttttttatgaaaaatgcttaacagatttttctttttataacccaccagcatatgttgagtagtattttagacattgtaatattatgcaaagccaataaataatcataattatattttatttacctggccctacttagccattgtataagttctgatgaatgctgaagaaaagttctctggtttgtaatgagaccatagttctcagactttccttttttttttttttgagacggagtattgctgtgaagcccgggctggagtgcactggcgccatctcggctcactgcaagctctgcctcccaggttcacgccattctcctgcctcagcctcccaagtagctgggactacaggcgcctgccaccatgcctggctaatttttttgtatttttagtagagaaggggtttgaccgtgttagccaggatggtctcgatctcctgacctcgtgatctgcccgcctcggcctcccaaagtgctgggattacaggcttgagccaccacgcccaccttaaactttcaatttacttttctcacctgcttcattaaattatccaacagttgtttattgattgtgcttgtctttctgtttcagatctcacattcttgaaggtggcattgaagagcactaagatcggaagatgagtgagcttgaccagttacggcaggaggccgagcaacttaagaaccagattcgagtatgtagttgtgtgtgcttggttttattaatcatttgagtttcaggttagatgttacttgttttaggaaaaatggtttacaggatgacttgttctatg

SEQ ID NO: 147 - DNA, 2300 bp, Homo sapien
agtattaggtgattaagcagttgctggtgagattattaattaagaaaatatgaagattatttttcatgattagcaaatggacgtattagttttgtggaaagtttcagtgaactgcatactgaataaggtctttggagcaagcattgttattgataaggtttttgcataagttattttctaatctgaagtgatagtcttttgggagagggaggagctctttattgaaagtaaggttttaattttcatgctattgacatgcatagtctattctggattctttgggaaggtatgtatatcaagaaagtggataggcggttccttctttgctaacgctgggttcgaggctggggatggaggtggtgccactgacatggagacaggtctgagagcctccccagggtaggactgaatggtgggttttgtcttggtttatgctaaggcagaactttctttactttttgagatggagtttcgctcttgttgcccaggctggagtgcagtggcgcgatctcggctcattgcaacctccgcgcccccgggttcaagtgattctcttgcctcagcctcccgagtagctgggattacagctaccaccaccacacccggctaattttttgtatttttagtagagatagggtttcaccatgttggccaagctggtctccaactccagacctcaggtgattcacccgccttgatctgccaaagtgctgggattacgagcgtgagccaccgcgcccagccggtaaggcagaactttctaacgattagagctgcgcagaaatgaactgcaactgcagggtccagaggctgatgctgtcaaccctgggggaaggctggactgcaggtgttgggcggtggtcccaggttacgagcatttggtttcatcaacactgaaagtgctccccccgcccgcctttttttttttttttgagattgagagtttggaaaaccagttaagttctgaggtgcctgtgccccctcccagttaagtgcgcactgcccaggcccagtgtgaggatgacattttatcttctgcgggaacctttcaagatgagtcttatagaggaaactgttccaacatgaaatttcagctcagaattgactttctcaaaagagcacatccactggccaaaagctatttctctcgcgtaatctgaatttatgacagaaccatagttatctcatcagacaagtactgacagtgctcttcagtgatacctttaaaatattgttttttctttgatatcttcagttaattctgtttttttggtgggtgggaaagttgaagtaaattttctcagatttaattttaatcttagaagattcaagagactgcagaatagtgtgtggtttttttattgtttgtttttaagagtaaaacccactgggtgtggtggctcacgcctgtaatcccagcactttgggaggtggaggcgggcggatcacatgaggctgggagtttgagaccagtctggccaacatagcgaaacctcgtatctactaaaaatattaaaattagccggcgtggtggtgggcgcctgtaatcccagctactcgggaggtttaggcacgggaatcgcttgaacccgggaggcaggggttgcggtgagccgagattgtgccactgggcgacagagtgagactgtgtctcaaaagagtaaaaacctctgtaaatccttttgatgcccaatgactttgatttcaaagctagtatcatctaggtagatttatgttgatcacttgagaaacagaatttgaaaagttaatttatttctcaaaggagatgttgtactatcctgcaaaagtaccagagctttgttctcttccctttgctttgctaaaaatttctgggtcttttggtttattttatgtgtgtgttggtccactggaaaagttgtagctttgtagctaaaaacagctttgataaaaggatgaaaaaggtcttcagggcatctctagacttcatctaccatcagttgactttttgtagctaatactttaatgaataacattggtattattttagaagtgcagtgttggcatttattatagttttgtcgttgtttttctctgcccgaaagatttggctcatgttggtctctaaattggattacattcttactgtctgtgactttggctttagcattagtggattggtaatagatattctcaatttttaaatctggcttgaccatatggcaggccatgttattttgaaacccctatttagtgtaagtctcacaagacatggaacaaaaatttttataaaattttaaactggtttgaccgggcgtggt

SEQ ID NO: 148 - DNA, 2300 bp, Homo sapien
cataggttaccatttctacactatttacccataagtccagtactgtacaccctaactgtaaatgtacaccaactcccttttcaaaacacaaattttaacatcggcgttttccttcaggagcccatttcacaatcttaagaaaaagcttccatgaagacaggctgggcacggtggctaaggccgctaatcccagcactttgggaggctgaggcgggaggatcgcttgagccccagagttcgagaccagcctggttaacaggatctcttttacaaagagatcccatctcttaaaaaaaaaaaaaaaaaaggcttccatgaagatgaattaagcaaacaaaagctgatactgcttctgcatgctaaccatgtaatttaacggacacaagaaatgttaaaatatcatttgaatcaactatcgattcacaagaaaaaatatagcaggttcttaaaagtcaaaagcctcagccgacagccctgtggaattttcaacagatctccccactccccacccccaccccgcttccagccgaaaagccgatccaggcaagaggaagacacccagcctttgtgctatttcctgtcctctcccccaccttcgggccttcggaatatcgcaaaccgggccccgaaactcggcgcggcggcggccgccccacaaaggcagcggtgggagcgccatcttggcgcggccaccgggcccattcattcgcggggccgggccggggtccgcgcaaccctcgagtcgacacgcgcggggcgccagcgccggacagacccgggcctcggcaggagaagggcgaggccacagcgcgactgcctcagcggctcgacacagcgaaaagggccgaaaccgttattttcccatttcccgacgccgcgcccggcttccgctttaaatccctactccgaccgcggcgcgcggcccggcttccccatttcattgttccccttccccacgctcgcgccccgcggccgcccggccctcaaagtcaccccgataggcggcccgcgcgggggctccggccgccgacaccgccccgcctgcaggcccgcccggcctttgttctcgcgccgcgggcccgagagccacgtccggctccccacgcagggcccggccccgcccgacccgcgcccccggggccccggccgccgccacgggaagcgcccgcggcgcacacaaccccgcaccccggtgccgaaactcggcccccagccttgggcctgggaccccggctcctctccctagaccccgccctcgaccccgaccctgcaccccgaacctcggaccccagcccccggcccccccttcggacgccgcccgccgcacccgggcggggcaggaagacgcggccccgaccggcgggtggggtgggggcggggcgggcgcccccagggcgggcgggtggacgaacaggacccgggtccggggctgggggctgccgcgctcacctcagcgccctcgtcgcggcctgacgcgcccacaccgccgcctcggccgccgctcggcaggtcgtcgcgctcgggccgcgctgcgcgctccgcgggcgctgcgggcaggtgcgcgccggcgaggctcggtccagtcccgccgcggcggctgctccactcccggccccgctccccactcgccgcccgctcccgctcccgccgccgccgccgccgcctccgtccgcccctcagacgcctccagccatcgggatgggcgcggcgggcccctgcccgcagcctcggaaaaccccacgcgctcgcgtcaccacgcacgccgcgcgtcgcgcgcgctcgccaggcccgacgggcacgcgcacgcctgtgcgcgtccaaaccgcatcgggccccgagcgcgtgtccgagcggcttaaaggggccgtgctgctgccttcgggtaccgctgccccgggagacccccggcggcccggccctgcggggaccgggcgggatggggaccggggcagtggaccctcggagttgggatggggcggggggaacgcgggcgtggagccctccggggacagggtaaggttgggtaaccgtgggcgggggctcctccaggggcgggggtggggtaacggcgggcggggggcactcaagcgacagggcaggggcgggaaggccgcgggcgggggcggtccctccggggacggggcgggtgggggcaccgcgggcgagatcgcttcctgcagaggaggcaacaggccccgctagcaggtcagggtcccgggcaggcgcaggtgccccccggcctctcaagcagggactgcggcgagctcagacgcggctgacgggcagagactcgcgcttgg

SEQ ID NO: 149 - DNA, 2300 bp, Homo sapien
tttcaggcacaggagtgatatgattgacaattcaggctgtgtccgcagtggctcctgcctgtgatctcagcactttgggaggctgaggtgggaggatcgctggagcccaggagtttgagaccagcctgggcaacacagggagacccccatctcaaaaagaaagaaagaaagaaaaaaaaacccaaaataaataaataaaataaaaattaaaaaaatttcactgggaattcactccttgctcaactgtgctaggcaggcaggcgcccctgtgggggcggggcctcggtggtccagcggaggtcagaggccacgcagggtgaggagcgggtagcatatggtggggtggaagcaaggatgagagactggttacacaggagataatcagagccaggttcctcactcccaaagcaggaggcccctcattccgaacaggttgagccctgtagtgttggcctggcatcagagtaaacacgtggtgcccaagaaaaacagacaaacacgcccatgaaactgtgtgtatacatatgcgtgtgggcatgtacatagatgtgttcccttgctccgccagctgcaatgacaccccagtagcaatgagcacatccggagccagatcccgggctctgcatgacattctcccacaatgaaccaggctgcagcagaaatagctgggttcaggctggggcagggagaatacaacagggccctggagcatctcgtgccagaaagaaagggctccagaaatgatgcggacaggtgaagtgggagggagagagaagggtggcaaggcgtgggttccctgtctggtggaggctcccctaggtagggggaagcgcgtggcacggagggcaggtggcggacgcatctggaagccgcacttactgtgtgtccactttctcacacaagcaccatgcacacaaaacaagaaggaaaacgtcagctgagagaggcgggtggtgtcccagggtgtggagagagtagaaggtgggaaataggtgttggaggtggcatggccccttgaggttgtggccctggttgaggggaggcccagtggatgaggttgggtctctctccccttcagctgtgctggtgcaggcctggaggaaaacggacgccaggtttggtgtggaaggggagctcggaggcgatgaaggcccaggcaggtggaaggtggtggttgaggaccggggagcagggcgctggctggggagaggcagagtgaagaagccgagggtgaggggcagccggaactcagctggaaagacagcaggaggcggtgggcgcaggggcgggttccatggacgttctggaggcttctgaggacaccaagcctggaagccaggacatgtggccttcttgacttcgttccccttcctcacctggaggtctccagtccccgctgtccactgctcagcggcatgggaggagtccgcggccttaccccgacactcccgcccaccggcccccgcccctgccaggcggccctgctcgcagcagcgcgaggagccacggggtgctgccctcctccgcagcccgaggcccacttcacacgcactgagcccaagcgcgagtctctgcccgtcagccgcgtctgagctcgccgcagtccctgcttgagaggccggggggcacctgcgcctgcccgggaccctgacctgctagcggggcctgttgcctcctctgcaggaagcgatctcgcccgcggtgcccccacccgccccgtccccggagggaccgcccccgcccgcggccttcccgcccctgccctgtcgcttgagtgccccccgcccgccgttaccccacccccgcccctggaggagcccccgcccacggttacccaaccttaccctgtccccggagggctccacgcccgcgttccccccgccccatcccaactccgagggtccactgccccggtccccatcccgcccggtccccgcagggccgggccgccgggggtctcccggggcagcggtacccgaaggcagcagcacggcccctttaagccgctcggacacgcgctcggggcccgatgcggtttggacgcgcacaggcgtgcgcgtgcccgtcgggcctggcgagcgcgcgcgacgcgcggcgtgcgtggtgacgcgagcgcgtggggttttccgaggctgcgggcaggggcccgccgcgcccatcccgatggctggaggcgtctgaggggcggacggaggcggcggcggcggcggcgggagcgggagcgggcggcgagtggggagcggggccgggagtggagcagccgccgcggcgggactggaccgagcctcgccggcgcgcac

SEQ ID NO: 150 - DNA, 2300 bp, Homo sapien
tcctggctaacacggtgaaaccccgtctctagtaaaagtataaaaaattagccggacttggtggtgggtgcctgtagtcccagctactcgggaggctgaggcaagagaattgcttgacctgggaggcagaggttgcagtgagctgagatcgcgccactgcactccagcctggagatagagcgggactctgcctcaaaaaaaaaaaaaaaaaaaaagtcgaattcttttttttttttttggagatggagtctcactctgtcacccgggctggggtgcagtggcgcaatctcggctcactgcatcctccacctcccaggttcaagcaattctctgcctcagcctcctgagtagctgggattacaggcacctgccaccacgcccggctaatttttttatttttttattttttttagtagaaacagggtgtaaccatcttggccaggctggtcttgaactcctgaccttgtgatccacccacctcggcctcccaaagtgctgggattacaggcgtgagccaccacacccggcccccggagtcgaattcttaaaaacagaaagtagaatagtgattgccataggctggggggcggggggtggtggaagagggcagatgctgtttaatgggggcgggggtccgttttgcaaggtgaaaggttctagagatctgctgcataactgggtacggccatgaacacaactgcacttgcacctgaacgtggctgaggcagcattctaattgttacagggtttttctctttttctgttttcttttcttttcttttttttttttgagatggagtctcgctctgttgcccaggctggagtgcagtggcgcgatctcgcctcactgcaaggtctgcctcctgggttcacgccattctcctgcctcagcctccggagaagctgggactacaggtgtctaccaccacgcctggctaatttttttgtattttttttagtacagtcggggtttcactgtgttagccaggatggtctcgatctcctgacctcgtgatctgcccgcctcagcctcccaaagtgctgggattacaggcgtgagccaccgtgcccagcctctttttctgttttcttatggagaatagcccttcggtgatcagaagagacacaagaaggaaaataaagattggatgagtctcaggtcctagagatacggggtatgtccgaaggccacacagaggctggtcagcatgaggagagagggttagagggcgaggacctgttctgctgcttgtactgggtcttggatatgggtagaagcctagatggagaggagagaggttgatggtggttgtggccatgttgccccttcctacgggcggggcggggggtgtgccctctgctttaagttgggctccaggggtcacagctttgagtttcactcgtaagcccatcaggatgtctggaaccttcagggctgtggcccaggaatgtcagacgctggaagcctgggaacggaggaggcagagcctgctgtccactggctgtgagagttgttggggtggggacttgtccagggccacgaggccagtgcagttctctgtgtctctgtacccagctggcctgtacctggagaccctgagccagaacccaggatgggccctggcctgggtgctgcggctccctccattctatgcccctgggggaaggtgctcagtgcgtgaattgttccctgccccagcccaggggaaagctgaggccagggagcagccaggatgaaggtcagggcctcccttggccccaccagacccagggccgcttccctccagccccggctcccgtttggctggaggtgccctgggccattggcctgccctcgtcagcgtcaatcttgcagtctcagcagctggcctgggtttcagcgggagccatcctgtagctgcaggtttgctggcaggcagagggttgggctggcgggggacactgagtgccccacctgctcagactcttcatgccatcaaggggccagtcggggggcaggtgtgagtgtgaccctgagggccctgacctgccactgcaatcctcacactcttgcctgggtggggcagggaggagctggaccctggctttgggagtctggtgggtaattagacccagacagggagggctcagtgcgggtctgaggagggaacacacgtgtgcaggcgtgtgctccacggtggcatgttgatacggaccagcctgggcaccaggccccctcgggagccagctttgctgttctgagtggaagggagatcaggtttccctgagaaaccccaaaatagcccccaactgtgcctggc

SEQ ID NO: 151 - DNA, 2300 bp, Homo sapien
gcaccccaaccctgccctctggagtctggcttgttggacgctgtccccacagagcccacccagcctggccctcctgtcagtgcagcacacccactgtgccaccccaaccagcagccaccagcagactgtacgcagccttccctggccgggtcgggggagcagatggtgcttctgggagctttcctgggcacaggcctcagggacgccggtcttgagctgcctgccctcacccccagccccccagggcccacagtgcctaggaacttgccattgccccaaacttcaagccagtgacattgaccccgcagtggcgttttgcaggatttctgtccaatgggtcccttgctgcccttcctgcggccgacccaccatggctcaagcttgcgccacaccagatgggaggggaaggcaggttccgccaggtccaggccaggccccggccgcaggaggaggtgctactggatggcaatgtttcctgaataggcccctctcttctaaaccctgacccgactctcctgctggcaggcctctggtactgagtggcgaggcccgcccagctcctgcgtgggggccgtgcccacaccttccggaactcggggctgtggcctcaggctgtgctgtgcacatgcactcccattcccactcccgtgctgggcctccacgaccagtgcagtcaatgtggcaggaagaagggccaggggctgggggagctgggcaggcaggaagggcccttgaggaccgtggcacaggccttgggaggtgaaaggcaacttcaggcagagcccaacagtggaaggagtgatgcagtgaaggggcaggtatgggcagaagagccacgcagaggaggccctgccctccagggtcactgcccttgtggtaggggtgggggacactgagcagcgcccacatgtggaacagttctgagcaaggggtgcatgcccctcctgcagtaagatggaccctgccccttgctgtgctgaccacctcccttagcctgaccaccagagagacggtgtgctgttggtcccacggggagcagagggcaccaagagcctaacagggcccctggcctggtggcagagggataagggtctggggtccccctggaagaaatggccccaggcctgcccctgcacagggagcagcagacattgcaggctgagggaagggcactgggctccctgtggccctcgggaatggaggtcacattccccaggtggggcatggcccccaaggccaagtgctttgggaaagtggtctgcacccagcgcctcaacagcccagagccagggccaggctccagccccctgggccagcccccagacagcgcctgcagcgcaggtccacaatcaagtgtccaaacaccaagttcgggatgcccagcatcttggtggcgttaccctacagtccacctggagcccgcctgcgagactggacccgagggaccacacccaaggcagccacgactttccaggccagctcccgagggtccccgggccacgcccagaccagcagcagagcaggccacgctcggccgaggttaaggcgccgtgcccgggctgaggacgagacccaccgtcgcctcacgagtctgggccaggtggagctgcggggtagggcttgtggcggacaagccctctgaacacgttgggcgtggcccagtgggaggggattgcgctgagcggggtatggtgggcgaggcttacgttgggcatggggccagtgggcggggtttgcattgagtggaggcccagcgaatgggggcgtctcgtgggcgagggctcctgtgggcggggcctgcggcgaacaaggcttgcactgggcggggcccagtgggcggggtttatgctgcgtgaggcgtcctgtgggcgaggcctgcgacgaacgcggtttgctctgggcggtgcccggagggcggggtttaccctgcgtggggcgtccagtaggcgtgtgcgcctgtgggcggggcctgcggccagcggggcccggtgggcggggtttactctgagcgggcgttctgtgggcgtgtcatgtggtgggtgtgtcctgtggtgggcggggccccataaagccgcgccgccgggctttgctccaacctcctcagagcatggcccgggggccgctggccgcccgcggactgcggctgctgctgccgctcctgccgctcctgccgctcctgccgctgccgcaggtgggtcgggcggcgttctctctcggttcggccaccgcggggcgggtccctgctcggaccacgcccctcccgggctcacccttgtccccacaggtggcgctgggcttcg

SEQ ID NO: 152 - DNA, 2300 bp, Homo sapien
agcaggagctccacgccacctgcatttacccctggggtgtctggctctgcccacccttaaccacagggtttcaacccggagaacaggggcgggagtgaacctgaccctcagacccgagcagggccgaggaaggatccatggccaatgtgcatgggggcccaaggccacccccatcggggggggtcacagtgcccttggtccagcctgaccccgagaggcaggagctccccaggctgctggcctggccggaacccatccagggctcccaggttgagactggggaaggctgtgtagtcccttgcacctgtggacctcgcaggccgactgggaggacaaggtgtcggccactcccacccagcactctacctttcctgcagagcagaaagctctgggcctggcagggccttcgggtgaccctgagggctgccgaaggcctaagtgaggaagggcatgtaagggacagttggctcacatgggatttcaatgaatgcagtgattcaaaatggatttcattcaacttagcgaaagccactcggtgatggttctcacccccacacacattactgcagatgcagctctcctctccctcccctaccctctcccctcgctccctccctaccctcactccctccctcccctaccctccccccaccctctccccctcccgcaccatgtcacccccaaccccatactgcacactgcctgtgggctctgtcatggagggacccttctgtgggaagccatttccaagatggaggctccttggaaaggctggtgtgtgcagggaccaggttagggtgtgggactcgcccgtcaaactcaaggcaagggcaggctcagctgtcactgctgccccgaggacaggggacccagtcccggcctgtccaggactctattctcagcacctccaatcacaggactgccccctgcatggccagagggtttggtgctcccgcctgcagcccgcccagcctcctgggggacagaggtcagggaggggcttcctgaaggggcacgcagcctgaaatctcaagggggaggtgaccttgaggggagtccacgggcagaggacggtagagtgcccgcaggggctccggggaggtggagggaagtggcaacccctgtgcccacgctggtctctcctcagaggtgcctggtccaggtggccttccggccagtgctgcccgagaagctgatccgccaggaagccctcccactcctgaacaaagaaatggagaccaaatctgtgcgtggggcccgggaaggaggggcgtaggtcggggaagggcctgttgcaggaacaaactccaccgccttcgagtcctggggggctccggccacgtgccgggagcacagggtagacctttcccaagcaatgcacgtgtcgagctgtatctgaggttaaaaagcttgctcaccaagaccctcccttctctctggaaggcactgccaggcgggagcagggaagggtgggctctggaggtgggggcagtaggggctgtgacccaggggtgcagcggatgcaatgaagggcccctccaacaacctggaggccccgggaggcgcacctgaaacacggagtgtcctgcagaatctgccccacaagtgccggccctggaggtggcctcgaggctcctgccacactccagatgcacccttcccagcctggcttcctcccacgggtttgcccttcccggcctggcttcctcccaagggtttgcccttcccggcctggcttcctcccaagggtttgcccttcccggcctggcttcctcccaagggtttgcccttcccggcctggcttcctcccaagggtttgcccttcccggcctggcttcctcccaagggtttgcccttcccggcctggcttcctcccaagggtttgcccttcccggcctggcttcctcccaagggtttgcctttcccggcctgggttcctcctgggcgtgcactcgaggggaagcacttgccttcggccttccgcggtgaagataggggaaggcaccagggtggggaccccggttctggccgcctcctcactccgtgcctcggtttatcctctggtgaagcagacgccacagtctgtgagcagctctgtgggggtctgtgtgcccctccgcactggctactgtcttcctcgggcgccggtcggcttttgcgtccccacattcaatcccaactgcggctcccgcggttcccgcactggccgcagaggagccacggggcacagctggctgtgtttagggccctgcacagccccacagccagtcgctccccccacagttccgaaagaatatggc

SEQ ID NO: 153 - DNA, 2300 bp, Homo sapien
ccatgtcctggtcctccgaacccatgcgcgtgttaggggacgtggcacgtccttaactgtgaagtgcctgttgacgtcttttgcccattttgctgtggggctgtctgtctttatccattcatggatattccttacatggtcttgacagtaaaattctgggttatgtgctgtgattgtcttctactttgtaggttttcttttttcttttttttgagatggagtctcgctctgtcgcccaggctggagtgcagtggcacgatctcagctcactgcaacctccacctcaccagttcaagcaactctcctgcttcaacctcctgaggagctgggactccaggcgcctgcaccacacctggctaattttttgtatttttagtagagacggggtttcaccgtgttagccaggatggtcttgatctcctgacctcatgatccgcccgcctcagcctcccaaagtgctgggattacaggcgtgagccaccgcgcccggcctgtaggttttctttaactttccctaggatgtcatctgaacaaaagatttggttttgtttatttgtttgagacagagtcttgctctgtcgcctaagctgtagtgcagtggcacaatcttggctcactgcaacctcctcctcccaggttcaaaggagtctcttgcctcagcctcccgagtagctggggttacagccgcacgccaccgcgcctggctaatttttgtattttttgtagagacggggtttcaccatgttggccaggctggtctcgaactcctgacctcaagtgacccacctgcctcggcctcccaaagtgctgggattacaggtgtgagccactgcacctggcctgaatgaaaatttttaattgaaatgtgggcgactctacccaattttccctttgtgcctaatgtctttagcgttttatttgagaaattctgaagtaacaaggctccattcccaccccccatcgactccccgctaacacacactgtagctgaattttgatttttcccatacgagtctttaatccacgtgagactgatctttgggtgggtgccgacaaagatgtccattccgtggctgctgttcagcaaccctgcttctatcctgcatagcgctagtacgtgggggcctgtttctggcctctctgatctgttccattggtctgtttgtcttgtccaaagcactctactgtcttagttttacagctttagaatcaatcttgatatctggtggggcaccccttcccccttcaaaactattgttccattgttcttccatatacattttaaaattcaccagacgagtttctcattctcttgctcttgcatgtagacacacacacacatttctgttgggatttggataggggttttagggaatctatagagcaatctggaaggaactgacttcctgacaacattgagtttgtagtgcttgaacatgagctatttatttatttattttattttttaattttaattttattttattattacttttttcgagacggagtctcactctgtcgcctaggctagagtgcagtggcaagatctcagctcactgcaagctccgcctcctggcttcacgccattctcctacctcagcctcccgagtagctgggactacaggtgcccgccaccacgcccggctaatttttttttgtatttttagtagagatgaggtttcaccctgttagccaggatggtcttgatctcctgacctcacgatctgcccacctcggcctcccaaagtgctgggattacaggcgtgagccaccgcgcccaggctatttatttagactttcttttagaaaaaacttttattatggaaaattgcaaagtcaaaaaagtaaagagaatgataatacgaagccccaggtgcccgtccctgcctcagcaactatcagcctcacagcattcctctcccattacccctccctacgtgtagatctggactagcatgtttcaaagaaaatcccaggcgatatatcatttcacctgtaaaaacctttgcagatgcctctgacagatagaaactcatttttagcataaccacaaaatcatcatcaaccccaatacaattaataatttcttgttttttttgagatgaagtctcgctctgtcacccaggctggagtgcaatggcacgatcttggctcactgcaacctctgcctcccagattcaagtgattcttctgcctcagcctccgaagtagctgggattacaggtgcccgccaccacactcggctaatttttgtatttttagtagagatgaggttttaccatattggccaggcaggtctc

SEQ ID NO: 154 - DNA, 2300 bp, Homo sapien
agagagagaacgagagagagagagagagagagagttggagtctcgctctgttgcccaggctggagtgcagtagtgtgatcttggctcactgcaaactctgcttcctaggttcaagtgattctcctgtgtcagcctctcgagtagctgggattacaggcatgcgccaccacgcccagctagtttttgtattttagtagacaggggtttcaccatgttggccaggcgggtctcgaactcctgacctcaggtgatccacctgccttggcctcccaaagtgctgggattataggcgtgagccactgtgcccggccctttcctagaaagtatattaacagttcattgggaaaggtccagggaggcaaagttgataaggaagaagccctatcatttccgtggagtcgggaagaagtataatctctcttataaaagcgaacctgggctggtaatggtggcttggttctattcctcagattctgaggaggaaagcgatctggcactgcggaaggtgggtgagtgcagaggtgctgtggtgtcacccagctactttccacagccattctcacgggtgctgggcattctgcaaggtgtcttgcctctgatggatcaggttatgggccaggataaaaccaaaggacctcccaggcctcactgtggcatcaggagccggccaccctgcaagccctacacatggcgggctgaaagactgccagggtaggggacgcgtccaattcactcgtgagcccagttcttggcatagagtggcccggtgagagaccactccctttcctcacactcccatgtctccattgcaaacggcccccacggaccagcggtgcgagaagaggctccggtgtaacaggatgcacagtgagatgggctgggcagcgggggatggggactgtgggaaaggcaatggggaacgtcggaaccggcttggcatgttgggcccatcttccgttttgttttttgtttgtttgtttgtcttgagacagagtctcgctctgtcgttcaggctggagtgcagtggcgcaatcttggctcgctgcaacctccacctcccgggttcaaacgattctcctgcctcagcctctggggtagctgggactgcaggtgtgcgccaccacacccggctaatttttgtatttttagtagagacagggtttcaccatgttgaccaggatagtctcgaactcctgacctcaagtgatctgcccaactcagcctcccaaagtgctgggattacaggcatgagccactgtgcccaaccgggtttttgctgtttttaattttgaaacagggtcttgatttcgctcaggccagagtgtgatggcaccatcatagctcactgactttgctatttacttttacaatttttcagttggagcctttgctggaacataacattcagaagtctttttttttttttttttttttttgagccggagtctcactctgtcatccaggctggagtgcagtggtacgatcttggctcactgcaacctcctcctcctggattcaagcgattctcctgcctcagcctcctgagtagctgggattacaggcagctgccaccatgccctgctaatttttgtatatttagaagagacggggtttcaccatgttggcgaagctggtctcgaactcctgacctcaagtgatccgtccacctcggcctcctaaattgttgggatgacaggtgtgagccaccgcgcccagcccgatcttccatttgcaagagaagaggaaaatccccattttcacgggaaacctcctagttttttaggttgacaaacgactccaaaccatcatgcacccgccccggtcctctgggccaacgcgccggtgctgagctcctccaggccccccaagtctgtctgtcacctccaagccttggccctgggccaggcctggctgtctgggaccccggagacgtccccgccccgcggcctgtggcctggcccttcagccgcgcctcggggcccgcgacctccttgccccggccccggcccgcgcggtcggtggtgggtcggaccaaaccacccgctccagccggggagcagaacgggcgaggctccccctccggccacgatggagtcttccgttgccatggagctgcccgccccaaaccacgccgccggcgccgcggagggcaatcgccaaggaccgccgcctgcctgagcagcccggggtgtctgtgcctccggagcccgagaacctgggacccaggccagccagaggtgggtgtgggggcggatgcgtttgaccctggggctgagctggaagggtttgacccccgcccc

SEQ ID NO: 155 - DNA, 2300 bp, Homo sapien
gacagtgccccgccctccctgtctttccttcctgagctttggaactaagcagtgagagtggttcatggtcgcaatcccttcaatatctgcgaagagcttatctgaggatatcttggtgctgatcacctctgagaagcagcgttgatcttgactcactggatccgattcattcaggataagccacaccctattgccattttcttcacgctcctctattatctggggcataaaattaacattcaattttcttctttttcttttaagagacaaggtcttgctctgtggcccaggctggagtgcagtggcacgatctcagctcactgtagcctccacctcccgggttcaagggatccttgcacctcagcttctggaggagctgggaccacagaggcatgtcactgcacccagataattttctattttttgtagagatggggtctcactatgtttcccaggctggtctcaaactcctggcctcaagggatcctcccccgtggcctcccaaagtgctgagattgcaggcatgagcctccgtgcccagccaatgttgaacttttgctggaaagtcgtgctgttgtgtgtatgtcagttgaagctgggcgggcatcttagccaaatatctggtggtttggtggcatcaaattgtctcctcttccttcagtcctagaggcaaatgcatgtcccatccatcattcacaggtttctgcaaggtttgaagtctgcacacttcatttccattctttattgttcctaactggtctttctttctttctttctttttctttctttctttcttttttgtttttgagatggagtttcgctcttgttgcctaggccggagggcagtggcactatctcagctcattgcaacctccacctcctgggttcaagcaattctcctgcctcagcctcccaagtggctgggattacaggcgcctgcgaccatgcccagctaatttttgtatttttagtagagacagggtttcaccatgttggccaggctggtctcgaactcctgacctcaagtgatcggcccacatcggcctcccaaagtgctgggattacaggcgtgagccaccacacccggcctcctaactgatgtttcagtttggatctgaagaacgggaattttcataatttctttttcaaggtttttgagaattagtttgttgccatttccgaacttccatcccattgtgatgtgcataaccagtcggcttccttagcctcatcctccacccagggaagctccgaccacgccagcaccaggaaggccagccggggagcagcctggcccaggggtcaggagccggggcctgtgtgactggggcctgtgtggctggcacctggtggatgtgagccccaggacagggagtttctgtgcccatgagatggaagcagctcacttcttggcccctttcaagaatctgggaagagctccaggagtcagaggtctgggtgccagtcccagctctgctccaaactggccgtgtgacctcagcgaagttatttcccagttttgttttcttcttttacaaaatgacagggtgagagtcgtgattggttttcttagtgtcagaagtgctgaactctgttagaaagcgtctcaggttgttttgtttgacagtgactacccactttgcagagacctgggctgcccgctctctggggaatactggaggttatgccccatctcctgtcctgtgggagaacccaccctccgaacgaggctctggtgaggttttcacaatcagtaacaaggccgatctccatcaatggaagtctccccgtttgagatggggtgtgtgctccttacccaggctcctgaacaaaacccacctccttgtcttggcaccactgagagtgcacaccgagggggctccagcaccagattgtgggaacagtcacgagaaagcagctcagacttcacacccagagcccttgatccctacacacccagtattccttcacagcgctcttcctgcttcctggacacgtggaactgcttctccatcggggaggatccatccagagccctttgggtgggtgctcagggcaatagctgctgcctcttccttctgctcagtgctgggaggcgttacactttccccatatggcacggagcagaacgtgcacctttggctctggaaggaatgaacatcctacccgttagttagccctgggagtcactgactcggttcttccctggacaccaatgtcctatggagcacacagaaagccacggaagtgtggtctgcgggttgaggtgggtattcagatgccagcctgcagcccactta

SEQ ID NO: 156 - DNA, 2300 bp, Homo sapien
gctacagtgagctgagatcgtgccactgcactccagcctgggccacagagcaagaccttgtctcttaaaagaaaaagaagaaaattgaatgttaattttatgccccagataatagaggagcgtgaagaaaatggcaatagggtgtggcttatcctgaatgaatcggatccagtgagtcaagatcaacgctgcttctcagaggtgatcagcaccaagatatcctcagataagctcttcgcagatattgaagggattgcgaccatgaaccactctcactgcttagttccaaagctcaggaaggaaagacagggagggcggggcactgtccggaggcagtgatggcgtgctggccgcagtgggtgcatggactttgcagatgtggagtctgcacctcctcctacatttgctgagcacctacttcatccaatacaccaccaaggagaagacggacaagacccctgttctggagggggaagaataaaaataatgcctctcaccgggggccgggccaagctctgggcacctcttcatgaattaactcctaaattaatccatggaagggacacgtgggaaggggcacgtgtgcagagcacaggctcggacaggaaccccgggaacacagggaggtcagtgcttctgtacccaaaggacccctctcggcaggggccagtgagcagccgggaagggggccttggagttgagacctgttgggcttgttagagccccgttccttgatttaagaaagcaggctagggctgggtgcagtggctcacgcctgtaatcccagcactttgggaggccgaggcgggcggatcacggggtcaggagttcgagaccagcctggccaacatggtgaaattccgtctgtactaaagatacaaaaaaataaccgagcgtggtggcaggtgcctgtaatcccacctactcgggaagctgtggcaggagacttgcttgaacctgggaggcagaagttgcagtgagccgagattgtgctccagcctgggtaacagagccagattccatctcgaaaaataacataacataacataacataacataacataacataacataacataacataacataaataaagcaagcaaactggaaccagcctcattcttccacttcccacagtagggattgggctggaaattccgaagcaaatccctctctgcactttcctccacctgcccctgtgcggccagggcccttcatccagaagcacgcagcctcggggacagcttcgccatttttaagtgttttcacgaggggttgacactgtgctgtcagcgacatcgcgagcccagaagtgaataactgacacaacaatgattaaagtttgtgagcagcttcaggaaatggcagcgcaactttatgttcaaaagatccaaggcaggagagtgtgaggccttccctttcccagatcctaggggtgtggagggcgggcctggggccatgagaggtgtggagagtcagaactgcggcctgcggcgcagcccccacctgcttttcctctccccgcccccgtcgagggtccccagggatcaggacttgctcccaaagtcgcctggccccagctcccgcgaaggcaggagggttttggaagcagccgctggtgggggtctctctcctgacagctgcagggactggccccctccccacccaccgccggcgcagccagaagcagccacgcagacgtgcgaccccccacaaaccgcctcgggacgaggttctgccgcgcccgtgggccacagtgtccacgcggggcttgtgccggtgtcgcctcccatgaagacacccggagggtcccgtctgcggcgcgtgagggcagcggtcccggagagccagaccccggccagggagagctgcccgcgagggagggggcgcggctggcggaggggggcgggatggggcggggggcggggggaggagaggggagcggcgggcggggccgggctgcagggagcggcgggctggggcgggctcggggcgggctccgcgctccgtccgccccctcgcgcccgcgccgcgctcgctcagctcccgcccgcctgtgccgcctgtgcggccgccgggagccaagtttgcgcggaccccgtcccgagcccgccgcggccatggacgcgcccgcccggctgctggccccgctcctgctcctctgcgcgcagcagctccgcggcaccaggtgagcgggcggggtccgcgcggcgcggggtcgggggcggtggggggcccgcgtcggcccgagatagcggctgggagagcggccggcgcgagccccgggccccggaccccaa

SEQ ID NO: 157 - DNA, 2300 bp, Homo sapien
gatgggggtgaggagtagattgctgaaatgggcattaggtatgctagagacttcaaggaagtgtgggtgccagtccagcagatctctgcaggcaggtgctcctggaagagggagtggctgtgcaaagagggagtggccgtgcaaagacggaggccggggcagcaaagaggcctcgaggccggggcagaggagctggccttccctccaggagtgatgggaaccactggggggacttcgatgacccagaaagatggagtgggggaagacgtcagctgagaggctcattaggaggatgcctggggctgggtgagtgttggttgggagctcagggggcccatctgagctggggatgcaaagcgggccaaaggctgaggctggggctccacagttttaaaagctgcagaccaggagggcgagggatgggagatttagggagctggaacccggggccagggatgtgtgagccttcccaggaggggtctgataccaaaggccaagttaagaaaatgtctgaggccgggcacagtggctcacgcctgtaatcccagcactttgggaagccaaggcaggtggatcacctgaggtcaggagttcgagaccagcctggccaatatggaaaaaccccgtctctactaaaaatacaaaaatcagctgggcatggtggtggacacctgtaatcccagctacttgggagactgaggcaggagaatggtttgaacccaggaggcagaagttgcagtgagccgacatcatgccattgcactcagcctgggcagcaagagcgaaactccatctcaaaaaaaagaaaaagaaagaaaaaaagagaaaacgtctgagaaccgacggcttgtatttaaaacgtgtgagtgggtggtggcaggagaggtagacagggagcagggccggcttggcggaagctttgctgtagagaggggcagagatggctcggtgggtggagggaggggcaaacggtgtttaagaagaaaaaacgacagcttctgcgtaggagaggggcctcctgtccatctccagggagaacatgggttctgtggccacaggtctccccagggcctggcatcaaggaggcgccaggcacgacctgcgggatgaaagcacgtggctgaagtcctggtggctgtgtctgggtgaggggtgtgagggcgtggcctgagcaggtccactctcaggggagaggggccgaggccaggaactgggtctgggtgtccacctggtgcctgggtgaggtcctgcaggcagcaggtctgggcttcagtggatgcagccagtaagggatgggctgatcagggaaaaccgtattttcaggggaggagcccaggaggcagggagctgggcggcggtggaggggcctggagggcgattgtccagatcaagcccctcgagtaaggcccgagaggctgtggcttcagaaatgaaggtcatgggcgactcgggccaatgccgcgtccttgacctgggcgaagtgagcggttgcactcacgagtgtggacggcccttccctacaggggaccttggattcgctgggggcggagtgggggctggggcccagagaacccgagtccggacgctcccgtccgtgaccctggccgggttctccgctcctcgcagcttcagtccgcaagtgtgagatgtcaggggacccctggacggcggggccctcgggctggcagcgcgcgccgcaggagtttcgattcggagggtctgggcgaaggccgagaactcgcgtttccagcgagttcccgggggcgccgctccgtcccagaggccggggcccctccggttgccgggcagagccgcgccgcgcgcggtcccattggcgcaggtgcgccgcgccccgcccaacaggtagccccgcccgacaggtagccccgcccgcgcctcgccattgggccgcggccgggtgtcccccgaggattggcccaggtggcggccccgcctcgccctcattggccgcaggtgccaccgcccgccccgggaccgcccgccccgcggattggccgctggctccacctcggtccgccatgttcggacaccgccccccgcccccgccggacggtcccgccccgcgcgccccccgctcccgccccgcgcgccgccggagttccgcggagttgaccgggtcggcgccgtcggtcctgagcgctgccttccgcgttccgccgcggccccacctggagcccccgccccgcgccatggccggagctcccggggcgcagcgctgacggcggcggggggagcgcgccatgcccagcaggaccggccccaagatggaagggagcggc

SEQ ID NO: 158 - DNA, 2300 bp, Homo sapien
gggtccacacatccagcagccgaagcgccctcctttcaatccagggtccaggcatctagcagccgaagcgcctcctttcaatccagggtccacacatccagcagccgaagcgcctcctttcaatccagggtccacacatccagcaggtgccgactggggcaaaactcccaatgccggcattaagctagattggcccggaatcagaggtcttgggtgggatgccccctctcacccatccctccttcgaatagagcccacggtcctggtgtggctctgtcatggctgggctgatgtaggtagcatgtgcagaggatgtggagtcggctcctttttcctgtgacgaagttgaaagcgatgatgcatgtgtgttttcttacccgatgcccactgtgtgctgggcactgtcctaggtgctggtcatccggccccacccaaacaagtgggctgtgtgggcggggggagggtccccgggccctgacgtcccgagcaggctcttctgatgagcaggagagtcccgtagagggtctggaccccctttgctcagccgcacctgatgcccacatgtgctgagggtcccggttcctcacgtgaactcagtgctgtattttctcttcagtcccgtttcctcacgtgaattcagtgcaggcggttcacagtacactgtatttcctcttctttttttttttttttttttttgagatggagtctcactctgtcgcccaggctggagtgcagtgacgcaatctcggctcactgcaagctccgcctccggggttcacgccattctcctgcctcagcctcccgagtacctgggactacaggtgcccgccaccacacctggctaattttttgtattttgtagtagagacggggtttcaccgtgttagccaggatggtctcaatctcctgacctcctgatccacccgcctcggcctccccaagtgctgggattacaggcgtgagccaccacgcccggcctatatttcctcgtcttaactcaggtgtgaggtgagctctgtaataggaaggaaatttgtgaaaaatggtaaaagagggaaaagcatatgaaagggctgtgtctggaaagaatctgaattggaggctctgggcacatggtgacagtgcagatgcacccctttactcccaggaacactttgggcacttaggcaaggcagaaaatgtccaagcaggtcccgacaacattcattctcatgccttttgtaacatttaaacgttcatgaaaacatcgccaaacaagctgataattaccatcattttggaattgttcagaaccatgaagaataaagaaggatcatttaaaatcttgaaaaatactgaacaaagaatactaagataattgcaggctgccatgtagcagttcaagatgttcatgagtccgagttccccttctctgaggctgtcaggaggaggttctgtttgaatgaaggtcaggcagggggtacccccacacactctgcttagccctagacgggaccccaggctgctctacgcagagcgcagcaggagctgcagccccccagcccctgcaagccacggggccttgcctgaagcagcacctcgtcacccctgcccgatggcacctcccctgtgtcccctcatgcagagcagggttccaggcctctccttggggccactggttcccccaaccttgggatagacccaagaggaggctctcaagcttgggcaagcctggcgcccggaagggacaaggtgccggggccacctgttgcccggctcagtgtcctcttttgagaaggtataggtgtggaaggccctgcctgtcctctccgctggcccctcagtgtggcctgggcctgacgctctgttcccacctgcagagagcgtactgcggtcagtgcagcgagaggatatggggcctcgcgaggcaaggctacaggtgcatcaactgcaaactgctggtccataagcgctgccacggcctcgtcccgctgacctgcaggaagcatatggtgagtggcagggctggggaggcccggggggcacgggcggggtcggggcgtggcagccagcccattgtccaagcagaccttggtgaccctgggttcttcaagaggggccgtggtgccgtcctagctctgggctgcagcgtgagactcaggcggcagtcttggataggacccatcttcctgagcccccacaagcccccggcacactctgctcattggggcatgaggctcaggcagcaggctcaggtaggacgtggtacgctctgctcagtgggtcggaggtaaggttcattcataccccagtcttgaacc

SEQ ID NO: 159 - DNA, 2300 bp, Homo sapien
cccccaggctgtgcttcccagcatcccttggggtcaggactgtgtgtgtcactgaggggctacgggtgaagccacacacgcccctggcctggccttgcgcccctgcctgagagcctctatgcaggacagcgcctgtggggcacccaagtgggccgagcccatgtggattacaggtgcacaccaccagcgtgaggagaggagtgggctcggagcatgctcagccatggtcccaggcatcttgtcagcagccagctcagcttgtgtcacgcagagtcgccttagagtgaattgacaccagattgtcctggtgggtttttgctctgaagaaatgtcaaaagtagcattaaggtttttctgtagacaaaaaaaccccaccatcattgcagcttgagcagttgcaaattaaataaattccttcctcagcaagctgcctgggtcctaggccttgggcagagagaactggctttcagcacagttcccgtgattggcttttctctggagaagaaggggaagcggcctccgcctctacctctctaagtgtttaaatgtcccccaaattctctcagcctcctgaggcattgtattgatgcttttctctagaattcatgtatttctttattttctctggaaatggcattggctttgtccccgtcctatgggccgtgatagcttaaagttaggatgaacccacagaggccgtggaggcccttcccaggcgccgcagcagcactgttggggtgaacgtggctcctctcggggggacaggtggaagggaccagcacccattggggcgtgtaactcctggtggcaaaaaatgtgcggtgaagtcaccctaagggtttttgtggttttttgtatttttattttattctttgagacagagtcttgctctgtcgcccaggctggagtgcagtggcgcaatctcagctcactgcagcctgtgcctcctgggttcaggcgattctcctgccctcagcctcccgagtagctgagattacaggtgcacaccaccagccctgggtcatttttgtatctttagtagagatgaggtttcaccatgttggccaggatggtctcgaactcctgacctcaggtgatctgcttgccttggcctcccagaatgctgggattacaggcctcgtgagccaccacgcccaggcactctaagggttttgaataaattctttcttaacgttttctgaccgactcttaggtcgtgggtgtcctccaggggttggaggccttcatggagcttcgttccgtggggttgacgttactgaacgagtccctccacgggtgcactgaggacgttcctgcacatcgagggcaccctcagagctgctctttctgtcattgctattttgtttataccggggattggcaaactttttcttgaagggcccaagagtagacatttttggctttgcggccacagggtctctgttagcaactccctctgccacggtggctggaaagcagacatagaaaatagatgcaccagtgagcatagcctcgttccaataaaactttatttacaaaacagggagcagtggaccagcgagtccccaaggacaagggccaggttaccagagaatttccaggcacatccgttggaggcaggggagacaacaaaagccgaggaacgagccttccccagccgctccccaaaggcacggcttattcttcagggtgcccgactggccacgtggacgtctctccagctcctcacttggggcccagggctctttcgatttttaggagtttgtttccaatcagaaacttcacagatgatttgcagccagttcacctgccctgtgtaaactggcctctgtcctctctggcttaattctgggagcttgtggagggcaggagcagggacaggtgccttgaggcgtaacagtggcggtggtgtgggagcttgcgtgggatcgaaggaaacgggcagagtcaccacacgcttccctccttcactccccgctccacgaggggcagccaggagcagccaccagtcggaagcaaataaacaattcaggtgccagaggagccgctgacctaaaaaaacccgccacagggtatttctgggagattgtatgagaatttaattttgaaaattgagtctcatgaaatgtaggaaaagatcttattaggaagagaaaccatgtggcccagtccctgagacgggaagggcctgcgtggtcctgatgacatctgcggatcttttaaaatcatacgatcatgtctgcgaaaccgggatgccacttcccacctggcttctccctgaccccagcttgttcccttgg

SEQ ID NO: 160 - DNA, 2300 bp, Homo sapien
cctcctggagcctggcctctgcacactgccctggagaagagaggcagtgtgtgtgcagagggccccgtcagccaggcagatccacctgccttgcccctgcactgggaggtggcgctcatcttgtcgggggctcccatgggccgtgtctagaccccaccctccgccggtccaggcacatcctcaggctcctaatcctgagtcctccggtttggctgtgggagcaaaggccgtggggaagttgctgggcctgtcccgggtgagctttgagtgatggacaggctcattctgaaggaactgggtccagacagcacgtcctggcctggtggctggggctgccactctaagagggtccccatccccgcaggatccccggtacttggcacactgcaaagcctgagtatttgtggatcacgtgatctgtgctagtgactatcaggagtctgagatttgaagcgatggatttcccagcatggtcccagctccccactgatgtgaaaggtggtggtgagttaacagctgagccaccacctgctgcccaaccccacgtgtcccacatggccgggcggtgctgcgctaactcatctccccctggatggaaacgtttgcgtggtgacagccgattctcttgagagtcatttgctgcccatgttgctggggagattctgcctcagggccaggagtggtttgctcctcccaccccgggcccagggctgctggtgggaggccccagggaggagcaaggactctaatgcttcgtgtggtgggagcctcaggactttcccacgtgcgacaggcacgttcctgggagctcggtgggaggaacccagccacgttgtgtgctgcgcaaggagccggcggcagggaggggaaaacggaaagacgcagaggagggcaggtgacaagaggcccacagagagatggctgggtctgggcagcgggtgggagcaggagggaggcggttatgggagacgtggagcagtggaggccgtcagaagtggggatcacagctgtgacctcatggagagggacaagccccacagctgggctggtgccagctccactacccagggccaacctgtgtggccgtaaaattctcaagcctggagtgtgtagaaggcagcagtgccctggcctggccacccgcgaacccctctgtccaccccatgctgcgtggcacagggcaggcgtggggcctctagctggagccttgagtgggtggatcctcggtggggctttaaggccaacctgtttatgaaaatgcatggggactgactgcagatgcacagacaactcagatgcacagacgcccggacgacgtggacacccagacgatgtggacgcacagacgacatggacgcacagacgatgtggatgcacggacgacgtagacacacggatgactcatccacagatgactcagatgcacggacacccagacgacgcggacgcacagacgacgcggacgcacagatgacgtggacgcacagatgacgtggacgcacggacgacgtggatgcatggacgacgtggacgcacagatgacctggacgcacggacgacgtggacgcacggatgactcagatccccagacgactcagatgcacggacacccagatgacatggatgcacggacgactcagatccacagatgactcaaacgcacagatgactgggatgctcagatgaccgctgctgtgctgccaccccagggctctctgggcgtttcctgtggtttgggcaccaggagcctgggagtcccatgctgcccccagggcactacctcctgggcccagccctgcatccggtggcagggctcaccgtcatcaccccaacagtgcagggtggtctcagggacctcctctcatcattgccaagaactggctccaggatgtttccatgtggccggctagtatggccaaagtggaccctggcgtgctgtccccttggacgcctccaggccctgcccagcacgtggggctcgtccattctgtgcctgaccatgctctgccatgcggggcctagcccagccccccagccctgctgcttctccccaccccacccccgccacctccaccaagccaccagcatcctgcctggccctacggacagcagggtcgtcctgtgtccaaaagcctcctccccctcagccccttcactcgggtctcatggggcccctctgtggcccccagcgcacaaggcacacacccactatggggcctttgcacagctgtgccctccccaggctccagccctcacctcccccaggctatttctcagatgtcccttcagaactagagccc

SEQ ID NO: 161 - DNA, 2300 bp, Homo sapien
gtgcaccaggcctcactcagaggcatgaggtggcgcgaccccctctcccagggagctcagaagacggctctgccacacctgacacctggcagctggcagccctgcctctaggaagcctcagctctggacagctgtgccttcacctgaggggtgggtggacggagagcgcgggtgtgttcccgggagcaggaggtccgcgccgctgggaagagtgcctgtgtttctgggtgtttgtagggtcatcacgttcaactttaaggctggggtccgtcacatgcacatcttttagttttccctaactctcagtgctgtgtgacagataagaatatcttccaaaaatcaaatgcgtcgcacgaggcatcgtgcaggcactgcttagtgtggtcagaaatgatttgtgcagatttagtgttcagttttttctcttttttggtctactgtgctttggtgggccacgttttagaatctctatgatccaatttcccccatcggtccagtgagctggctggcccagctgccatctgcttaaggtgtcacttcaccctagaccacagcggctgggacacactctgcaggaagaacaacaggaacttaccggggtttttaggaaacaattcttgattgcggtgtgtccccacaggtacttcaactcccgcccccacctgtgtcccgctggctcctaagctgcccccctacgtgtgggttgcgtctgagatgtggggcaggcgccactcacggaaaaaaggcatcagaggagcttccacatcatcggaacattttattcctcaggacgctacacgctcactttcctggcggagcaggtcagtgcatcgagttctgtttccgtggaaaatgtgcaccttggaaaccgcatgacagccccctcggcagggtccccgcggatccgccgcgacgcaggcacagcagcaagttcctccagcacgaagctggcctgcccgggcccaggtgtgagggactgttctgctcccagcagcgcccgctgacgcttccctctgcggtctcggcgcaagcgtctgtccctggccgccctcggagccgtgcccagcctggcatgcatatgcggtggttaaggatacagttaaagggtcaatcacgcgtgtccacgacagagacgcacgcggcctcacaccgactcctcggtggacagcaataatgggttgatatactcaaagccttcgaactctgactggtcgatcctctttatggcatccctgtgggcaaaggtggcaggggggaggggggtgaccgtgtgttcattcccttgggggaagcggagtcacgttcgcataagaatcctcccccaacgcccactggagagatgacaccaggcgggtgggactcaagggcaggctgggtcaccagctgcccaaggtgccggcctgccatggggctgcccgaggggtgctccagggacccgcacccagtgggactcactcatcgtctggggtcagctgcacgggctcgctggtgaactgtgtgtcaaagttgtccagaccgtagtcgtctgtgatctgtggctggaatggagggagcgcctgcttcttctccagcttggaaaaacaataggagaagggtcagctccgcgcgggcatcatccctaccagattgagtgttttgcacgcacttcaatcacaaaatgaaacagtgagaaagtcagcatttcaatctgcctagtatttgactgccaagtgttttttcttacaacacaaaatctagaaaatatccaaagtcagaaaaattgttgtcgagctgagaaatgccagtgtcggccatgctggccacatgtgggacggagcaggatccccagccacccatgcgaggccacccccttccttgggggggtccttgttcagaggggcaccgacaactaactggctgaacaagccgtctcatgacgtcttggaaccctgaccataaaggtgtaggacctggccacagcaccctgcctgcgctggcactgcacagacccgtctgtcaggagcctcctgccggcccatttctgcctatccaggcatcgacttcagaatctcaggtgctgcttggcaggaaaatgcccagcaggcgggcctgggactcggtgatgcgcctgtgccggggagggcagaacgctggtgcctggcacaggtgccacaacacatacgggtgaggacactgaaaacccctcagttcccccgactcatggccacttgtcccagtgacacagccatgctctcccactcacccacaatagggtctgaatgtgccccccagattcacagtgagaaactcattccccagag

SEQ ID NO: 162 - DNA, 2300 bp, Homo sapien
tgcccgtcctgccctgcccagcctcccccaccacaggacacgctgctcacagctgctgggcctgcccttgtcgtcgccccacgcccagagttcccgcccagctcgcccagggcaccgtcagtcccgtgggtgtggacaggcacgtgacagtgtggattcaccactgtggggccatgcagaggagcccatgccccggagacctcctgtgctccgcctgtgccttcctagcccctgcactctcttgatgtttttggtcctcacggtgttgccttttccagaaccccctagggttggaatcacagtgtgtagcattttctttcccttagtgatctgcatttatggctccgtgttttttgcggcctatctgaggccatgattgaaaggaaaatacagacgtctgggtgttcacaccacgtctgcccccagatctgttccctcagccaccacaaacgggggtcagagctgagcccgcaaagcccggctctccagaacctgggggctgaacagcagtggacaggaagctccctgaagacgctgctttctgtgctccactcacactgtgagcccaggcagacggtggctgacggatctgggtgaaccagatgcccactgctgctgtccttccccagaaactccggatttcaggagaagctgcctcaaaacccctggcgaatgatgaggccctggagcccccggagagtctcagctcccgcagccctaacaaacgaccacagacctggggcttcaaccagactctctcggctccagaggacggccctcttctggcctgtgtcccccacggtagaaggagcaagggaactccccagggtctccattatggggcactaatcccatcgagaggcgccgccccgacctcctgtcctggcagagttcttgccttgtggtgaggatttcaacctagggattggggagttacaggcccgcagcacacggtggcaggagcctttccttttcataactagctgcagctgcaagttcattttggggaattaaaacaccaccgatggtggagcgcggtggctcacgcctgtaatcccagcacttcgggaggccgaggcgggcggatcacgaggtcaggagatcaagaccatcctggctaacacggtgaaaccccgtttctactgaaaacacaaaaaattagccgggcgtggtggcgggcgcctgtagtcccagctactcgggaggctgaggcaggagaatggcgtgaacccgggaggcggagcttgcagtgagccgaaatcgcgccactgcactccagcctgggcgacagagcgagactccgtctcaaaaaagaaaaaaaaaaaaaaaaacaaaaagaacgccaccagaggctggggctgctggctcacgcctgtaatcccagcacttcaggaagccaaggcgggaggatcgcttgggcctaggagttcgagaccagcctgggcaacatggcaagacccctccatctgtacaaaaaatactaaaagtcgctgggtgtggtgacgcgcgcctgtagtcccagctattcaggaggctgaggtgggaggatcatcaagcccaggagtctgaggctgcaatgagccgtgattgcaccactgcactccagcctgggcgacagagcgagaccctgtctcaaaaaaaaaaaaacaaaaaaaaaaccgtgactgcacatgagctaaccacgcctgtccacaaagttaggaaaacgagctaccctcagcccgtccgctgtccacagtgggggcgccaggggaaaggggtcagcttccccgcctggggctgtgtctggttctgattgcactgcagtgaatctgccctaaaccaaacgtcagaaagaaaagcggcagacgtttcatcacaacacagagacagacaggagcccgccctgctttaatgcgcatgcgggggagccgagaggcggggctgctggcgggggagccgagaggcggggctgctggcgggggagagcgtgtccgggcgccgcactctgcgcagggctcttggatggcgctcaccacgtcacgtcttctgtgctttcggccaagcactgggccaggtggctgtcaacatccagctgggtcagcctgcaagggaggggccacactcactcggccacctccgcggcatgctggccgcagagagcaccgtctggacctccgggccctctctgctcctgccgctggagaggatccggctggtcagaaacaagggacggggccaccccaggggctcatgcacccggcagaccacggtaaccgccagtggtgtttccacaccgtgcccgtgaggaggccacgcca

SEQ ID NO: 163 - DNA, 2300 bp, Homo sapien
ccaagggcttttctcctctgtctttttttgtttttcgagacagagtcttgctgtgatgcccaagctgttgtgcagtggtgcgatcttggctcaccacaacctatgcctcctaggctcaggtggttttcgtgcctcagccacccaagtagttgggattaaaggtgtgcaccaccatgcccggctaatttttgtatttttagtagagatggggtttctgcatgttggccaggctggtctcaaactcctggcctcaagtgatcctcccgacttggcctcccaaagtgctgggattgcaggcttgagccaccacacctggcctatttttttttttttttgagttggggtctggagtgcagtggcacgatcttgcctcactgcagcccccacctacctgggctcaggtgatcctcccaccttagccacccaagtaggtgggaccacaggcacatgccaccatgcccagctaattttttatttatagagacaaggtcttgccatgttgcccaggctggtctcaaactcctgggctcaagcaatctgcctgcctggacctccccaagtcctagaattgcaggcatgggctgctgggcctggccttttctcctgtcttgggaggctgggaccagtcttcctggaagtacccaaggccctcctgcagaccatggtgacatttccaggaaagacccagaagctcggagctgaagccagggcagccaggactgtcggggagccctggacactggctgtctgagagcgcttggtcagctggcacctgccatgtggtggacgtggggctgcagagaccccacggctgggcttctctcgcctgagagcaggcccagccacaggctacctcccacagggccccctgagaccacacggcctgcagcagctcccccaggccccctccccctgcccgggcagcactcagcgctgcatctccatctgctcactcaagtcgaagggcctgggggttggtgcctccatcttgttctgctgggggcctccagcatctagagcaggaaggtgtgcggaagaaaaccactcatgcagggagagggggacctcccagtccaggccctgctgctgaccctttccctgaacaccaacctatggcctccaggctggggccccttgaaggacggtgggccactcgggtggcctgggttcagggccgggctccacagctgagttctggagggagggcacagacgactgggggctgggaggggccaggtgaggggtaggaacagccagggagccctgcaggaggggtgcccagcatagccccaaagctgctggggctgggcagggcagaaactgccaaggagtcccagagccctgagtggcgtctggcgagggcccctgaccctgatctctgtagaccccactccttccgtgagggtggcagccactccagggcccagcagggccaagggagaggcaagtggcctgggcccatggggcactgggcacagccaagtgtggcaccagggtgcctgggcggctgctgccaccacgtggccgactttgaggtcgcagagcccggggtccaggcaggaaagcccctcagctgcccccagggccctggcccaggcccctgaggcccaagtgagccacctggactttgtcacttcgcctctggtttcttggttaaggagcttgagttccccgccttttgtaaagaaacggtggtggcgacggcggatttcaagctttatttactcctggaatggtcctgggaggagaggcggctccgcagagccggaaacgggggcgggagctgttgggtgcagccgggaggaggcagtgccggggcgggccgggcagccatcggggtaacggagggggctccggcccgggggctgcccggacgggaaaggggacacgggcggggctcccccacctgggccccccaccctcacgccaggcccccctgtgcggtgcaggacgaaggaaccctggcctcagtttccctacaggctgggatcagggcccctggggttccgactgtctcggaggggggcggcctcgctgcagaggtctggaggcggggccggggcgggggcggggcctggaggggcgggggcggggcttgcgctcacttccgcccggcgcgggcttggatggaggcggcgcggaggccgcggctggggttgagccgccggaggccgcgcccggcgggcgggtgaggccgggagccgggcgggggcgcggccggttttcccgctcccacgtgcttcccggcgcccccgcgggcctcccgctctattctccccctggggagggctccctgcccc

SEQ ID NO: 164 - DNA, 2300 bp, Homo sapien
ctggaaggctgggagcctgaagggtcctgggggtgtgagcagggcaggagggaggcttcacgtggagggtgtggagttcctggacgagtggcccatagtcctgcacaaagtggggtggccgaacgccaccagcaccaagcagcccccctgaacttcgtgtgcctcggcctgctgccctccccctgttggctcaggatccagctgtccccgctgagccccacgggaggcccctggcctgagctctggtcagccagatgtgtcctgcccgacagggtccgggtgcaggccagggggctgggccctgagggcgctgggtgggtgagtgtggaaatggtttcttctgtggagttgactacatgcctccctacagcaagcacacggacacagcggagagttcctgttctagagagctggcagcttccttgggagagcataaaaaattaagtctccaaatgttctatgttggatgggggtccatgttcttaaaaggaatagacgagggtaagtcgagaggtgctgagttggaggagggcttcctatgaggtccatctcagcagccctaaaatgggtgtgggataagctttcggggcgggggccagcagcgcaaaggcctgggggcaggacggtgcttggtccctgcaggatgcatgcagcaggtgggggacggagtggtaagagaggacgcgagggagggggtggcagatggtgggtagaggacaccgtgcctgtttgctgttgacctccagctttgctcccctggggaacccggcctggggggctctgctcctaacctgggaggctcttgacaggccagggtggagcagctgctgggtgcagtgagtggggtccgggctttgtgcctcctgcagctgtgagggctccctgaggtgcttgagcccatgactccccatccctccacttccctgctgggaaaactgagggcccaataagcggaatcgattcaaaacagatgaggctattttttttctgaacactttgtttccagtcccacccctagcctggcacagagctggagtgactggctgaggggagggctctcgcctggcccggcccaaacccctctggggcccctggctggcccctcccaagcctgcccagggagctgctgcccacaggcttacccgctctggccgagcatgggggttacataaacaggcacattcgtgactccaaagggcgaggcaagaggctgcagggacccaggtatgggctcagggtgctggggccacctgtaccagcagctgccccacagatgctgcagggaggggcctggtactcaccccctcccagcaccttccgcacgcgggtccacctccaggccaggcactgccctgcgggctcttgtcgccatgagtaatgtttaacttggaagggcccgtggacaactgcaggggagaagttaacaacaagtttggattgcaatccgcttgccaggaggggggcagagagaggaagggagggagacagggtaaagttgagaggaagaaaagagaccagaaggcgggctggaggacgtgcactgcagggaggcagggctgagaggacacccctggcctgggacccagggccatggtctgtgtgcagccaaggccccgggctcccaagaagcccaggccctagggccaggtgcccgttgtgcccaggggtgggagctctgaggctgactccctggcagtcacccccccaggcaggggctgagcctcccacgcctcagtttcccctgcagaaaacaccctgcatccaagacgggccttggtgtccagccctggggcggaaacaccgcacgcatgtccacacacgtgcaggcacgcgggcacacacaggctcacatgcctgcacgcatgcgcgcgcgcacggacacacacacacacacacacacacacacacacacacacacacacacgggtgttaccaaaacggccccgcctgaatcgctgaggcctcgacccaaggccggaaaagtccatgacgctggagcagggatgaggtcccattccagcaggctgggggagggccgccgcactggagccgggacagagctctccccaaacagaggcctcctgcagcacaaaccccggccttttgtggggtcagtgcccacagggttgagcaccacgtgcctggctgggcagtgctcctgccagggtccccttctccactgtaggaaacacggctgctcctgcagccgcgtctgctctgctgcatctccagctcctgccaggcatggtgtgcgcggccccaagacagggagtttccagtgcgtgagtgggagtccgggc

SEQ ID NO: 165 - DNA, 2300 bp, Homo sapien
tgggccagccacacagtgtgggcgcctgtgcagcaggcggaggggaagcacagggtggggccaggactccgaaagggaagggaggaagggcaagggcggccgcgggcactgggtccagccctgcctcagggccatcctcagcgcagcatccgtcctggtctgtttctcagggtggaagggcagctggcactgggggagatggcactgcctccacccatccacccctctaaggcccccagagcttctcccgggggtcttgggtgacttaggccccttcctctgacatctcgggcctgctggtgcctgctagtgggggagtggggtgggcctgaccccacatcctgcttggccaggcacccacaggccaagtgaccagcacagccaccccaggccttgccatacactgcaccaccacggccttcgctccctcccaggccctgcccatcccctgccagtgtgggagccccaggttgcaaaggcccggggcccctctctcctcaaggcagggcccaggctcctcgtaagcctgagccacacttggcttcccgagcaggcccctcccgcccctgccgtcatttctggcaggccctctgcgtgagctcacgcgttacataaggcatgcgagctatgtcttgggggaatgagaaacccctacacagggctctatgtcccctcgccctctccagtcaaggccaccacaagccaagggaggtctgggcgtgagaggtgagaccccgtgctccccctgccctgggtggaggaagggggtgccctgccaccctgagaacaatggtgtgtgcagaagagaagggactgaaactctttgaagatgttccaggatttagcacccagggagcggcggagactcagccccaccagcctccggcacggagggaggaaagcgttccccaggctgctcaggagaacgtttgttgctgtagtgggcagtcaccttccaaccggggacagtcacccccctgctcggggacagtcacccccccgctcggggacagtcacccccccgctcgggcacagtcacccccctgctcggggacagtcatccccccgctcggggacagtcaccctcccggaatggggcttcctttctcggggctgggaatcaccctggatccctccccactcggggtgctcttgggccatctgagggctcctgggtcactcttgggccttctcagggttcctgggtcattcttgggccatctgagggttcctgagcccaatgacacttctgcctaggctcgcgctgcgggaggaagcagccaggcgaggtcccctccgtgccccggtgcagcctggcctgggagagaggagcccccagcgacaccgagagccaaaacagggcagagtttctcagaggtggcacccggccagggagcccctcgcggctacagggtttctccacggactcggccatctggggagagcagcccagagccctcgagcctcctgctgtattctgtggcctgggacttggggggacccattgaggacactgggacgcagccaaagggaggtgcagacagtgtgtactggcgtttccggggaccaagcccagaaggagcaggacggccacctcctggcctggaggaaaatcctgcttcctggcaagaaaaccacccctagaggaataggactggggtgcaggacgctttctcaggcaaccgcccctttccttctccaaaactggggcaggaaaagagcattcaggccaggcagcgaaaaccccagctctggtacctcccgccccagcagaggccgcctggaggcacggagttccggcctggatgaggcctgggaagcccagcgactcacaggccacggccgcttcccctctccgaggaaggaaaagtccctgcagcgcggcctcggctaaggctccggtgcccaagcaaaggaagggagcgtgcttgcagacgcctcctgctgggagcctgccacgcccgccacaccctgcgcggggacaaagctctccgtggctgtggcagggacacaccgcgtgtgggtggctgcaagccagcagccccgagcggcccctcccgctagactcccagcctgggccctctgtcctccaggcaacgagaacatggatgcctcgcttttcagagactcgcgttcttggaacttacacccttttgggtttgctatttttacccaccctgagccttccggtctccatggcgacgcctccaaacagcagattccaggcggcaatgacgtcatctctccctttcctgccgcccaggccttggaggtactgctgcctggggccgggggtgggg

SEQ ID NO: 166 - DNA, 2300 bp, Homo sapien
ccgtgtgctgaattgaagagccagtgtgggcacccagccctgccaccctcacccactgaaccctgtcctgggggcatcctgtgcagccctggattgtgcgctgtgctggtcatagctgcccggggctgcagccacaccacgccacgccacgccaccccagtcattcgccgccacctccctgcgtgccctcggcacttcactgagcccgggacccccaggccagagatcactcttgacttagctgaagcggttgtgtgtcaaacagtggggacagagcgagagccagggacccagccgcggcctgggcatcaccagcatcctccgaggccctggctgctgtcctttacccggcacacaacactgagcaccacgaggtgggcacaggggacccaatgggggcagaagggtgctgtccttgcccacacaaagctttcagccagcacttctcgaagtgggggaccatccccgcagtgctttccaggggcccaagctgtggcactgttggttgcaatggcagaacctcataagtcatcacaggcactgtgggaccctggtgccaggactggtttccctcaacatgctgagccaggtggcattaccgccacgtgcagaccagagcatgctgaggctcagggcagcctgggacctactggggcaagcggctggtcggggcgggaggtcaggtgagggcagggtgtgtgtgagggccagacctcgggggcccagtggtcccaagggcagcgggggctccttcacgcaggtcctacccttcagtcacccacggcacctgcccgcagccaccttcccgctactcagagggggtgcagcctccaggctcagaccaagccatcccaggggcccaacccctcacctcctgctctccgcctctgcatggacgccccttgcccccatcctcacccctccccatcagcagcaggatacagcccctcccgctgtctagggccatggcccctcagccacccttcctgagagcaggatctgccccacactgggctcccggcaccacccttggccccctcagggaacccccacccaccccgttctcctgcttaagggtttgagggcaaagtccaagacgctgccagggacccctgccagtgttctgccctcctcaggcccgagggctggcctccccctcctcctagtgggactcccggtcaccccctccttgtcaggggctggctgccttcccagcaacaggccgtgagctgaccaatggctggcctgggcctggtgaggtgcagctgtgctaggccctactgctggcgggacacaggtccccaggccaggtgccccttggcactgtgtttggagggatggctccctcttggctgggggcactgccctgaggacccgtgctgtcacccaggccccacgcgccgcccagaggcccttgcccctctcggctcccggggtcccattccaggaatgaaactgggctgggccagccacacagtgtgggcgcctgtgcagcaggcggaggggaagcacagggtggggccaggactccgaaagggaagggaggaagggcaagggcggccgcgggcactgggtccagccctgcctcagggccatcctcagcgcagcatccgtcctggtctgtttctcagggtggaagggcagctggcactgggggagatggcactgcctccacccatccacccctctaaggcccccagagcttctcccgggggtcttgggtgacttaggccccttcctctgacatctcgggcctgctggtgcctgctagtgggggagtggggtgggcctgaccccacatcctgcttggccaggcacccacaggccaagtgaccagcacagccaccccaggccttgccatacactgcaccaccacggccttcgctccctcccaggccctgcccatcccctgccagtgtgggagccccaggttgcaaaggcccggggcccctctctcctcaaggcagggcccaggctcctcgtaagcctgagccacacttggcttcccgagcaggcccctcccgcccctgccgtcatttctggcaggccctctgcgtgagctcacgcgttacataaggcatgcgagctatgtcttgggggaatgagaaacccctacacagggctctatgtcccctcgccctctccagtcaaggccaccacaagccaagggaggtctgggcgtgagaggtgagaccccgtgctccccctgccctgggtggaggaagggggtgccctgccaccctgagaacaatggtgtgtgcagaagagaagggactgaaactctttgaagatgttccagg

SEQ ID NO: 167 - DNA, 2300 bp, Homo sapien
ctggctgcctctctagacacctgccctgccgcaggtccggccaagacctgcacagggactccgggccggctcccccaggataggaactgcgcccaggagtgctggtttgaggcaggttccagcctccactggggaagtgaggggcaggaggtcccagctgaaggtcactcaggttgcagcggcgtggccctctcgcctccgcccagcacccaggccagcttgggcacccccggcccgtggggcatgtccctccgcctcaggcgagcacagaccgagccctgcccctccccaaacacaccattgcgtccctgcgcccgcaggcctcgctggaagctgcctcccctggagaccacccggccgactgtccaacttcggggccccgggcttcccgctccccgccctgccaaggcttgagtctctcccactgcgtggccaggcgtggagggccggccgatccgaccccgaaagacgtctcagcgctccacggccccggggcggaggtcaggggtctcgccggcccgaacgccgggccccgcggggccgaagtcctgataagccacctggcaggagtggctggcagaccggctgcgtctggggcaccgggcgccgcccctcccaggcccgaagcccccggcccgcgcagcagggacactccgccaggggccggcgggcggggcggggccggcgcggccgggagccgcggacactcggccaccgagccaccggccacggcgcagcgggggccgccgggctgcgccgccagggtcacgcgacgcggtgcccgtctcggcgcagggtccctgggcgtggccgctgtccccctcgtgtgtgggaccccaggtcaccgtgtggcgtcccggtagtgtgtgggaccccagaggcgtccggggcctccccgctgtgtggtgtcccaccctgggagaaccccgggtgcgtggcgtggccccccggccgcccccagctggtttgcggtcgtggcgggggcctgtgggtttctgggccccgacggcggcgagacgggcgccttcccagcggcgcaggaagcggcctcggccggaaggggggccccgggcgccaccgccgcctccgcctccgcccgcgcccagcggccctcggcgggcggggccgagcggggccgagcggagtcgagcatggccgagcgtagccgagtcccggccgagcggagccgagtcatggcagggcgggtccgagcgtggccgagtcccgggcgagcggagccgagcgcggccgagtccgggcggggagcgcgcgttcctggaagagcccggctggggagcgggtcacattcttggccagcgctagggctgaggcggacgcacggcaacaaacagcgcggggggcggggccggcgcggggcggagcgggcggcgcggggcggggcggcgcggcggcggcgtgagctcagcgccgggcgctcagtccgagccggagcgagccgccgggaggatgtgcgccgagcgccccgagccccgcgccgccgccgcgctctgagggccgcgggcgagaggcgcctccgccgccccggaagccgggcgggcgggccgcggagccggcgggcgggcgggccgggggccggcggcgggcgcgacgcggccggccagcgccgccgggacgagccgggcgggcgcctcgcggtgggaggagcggggcggcggcggcgcgccgcgcgaggacggcccggcgggccccgcgcccgcgcccccgctcctcccgggcccctcggcctcggccgccgcggcgattcgcgcctcgcggcgccggcacctgcccgcgcgccccccgcgagccccgggcccgcgagcgttggcgttggcgttggcggcgcgcgccggggcatgccccgcgcctagagcccggggggcgcgcgggggacgcgcggggggcccgggcggcggcgggcgcggcgcggggcgcgtggatgtggcgccgggcccgggcggcggcgggctccagcggcgggaccccttcgccccgcccgccttccccttcgcgcccccgggcgaggccgcggccgtgatcggccgtgagccggcggcggggggcggccggggtcggggccgcgggcgccgccggggcgcgcggggcggcggcgggggccgggggggcccgggcgcgcgggagcgggagcggccgggggagccggagcgcaccatggaggcggcggcaggcggccgcggctgtttccagccgcacccggggctgcagaagacgctggagcagttccacctgagctccatgagctcgctgggcggcccggccgctttctcggcgcgctgggc

SEQ ID NO: 168 - DNA, 2300 bp, Homo sapien
gcgtcctgcaaagaggccgggtcaaaaggtcactgccccgatttttattgctgtctcttacgttctcacgacctcttgccctctgcacagatgggcggggctggagcttccacgagggccggcctttccggggattaaaaacccactgaaaggtctgagcctagctaccaagcttaaatgtcttagtagcttaaaaatggtgttaaaaattaagcaaaacacacatagacttccaggtttagcataaatagaaaccagaggtgttgagaccgtgctgccccctcaaaccagcgcagtggaaagaggggcagagccctccacaggagccctccgctggggggttggggagacggccctggcccagcgtctgcagctcccagcggcactgaatggcagtggccgtccctgtggtctgggggcctccttcccccacaggctacacaagccctggtcctgccaaggctcggggaagccctttgtgactttagaaaaataataatggagggtgaactggttcctatttttgcattgtaattgattgccaagaacccctgaaattaaatacaaccatgtattttaaatggtgtccttaatgtagaatgtttttatcaaaaccaaaactccctgttgaggccttagtgttctgtcaatagcgtgttggagtctggttcccgtctcccctgccccggcctatgtgtgctgaccctgggaccggtgaggcagttctcaccacgccccgagcctccccctcccacgccccgagcctcgccctcccacgcccctcctgcccccgaggctcgctggcgtctgtgcttcttccaggcggagggggaggtggtaggcaccttgggtcttaaatcagagaaactgtcccagcagtagtaaaagtcatcagctggccccaaagagcccctggaaacacaggctgtaccccgcctccatggagacatttggtgccacctgcgttcagtgcagatgccacacggctcttcctgagatggcttccgaggccatttggcccttcatctcgggaacagaccaagggggtgttttcggccgtctgagacccacctgggggtgtctgggccttggccatgctgccttctccaagccccatgcttctcccggcccctcctccttcccactggcgccggagacctttggtagtgggtgtggaaagacagcagctgtggggtccctgtcctggccggccactcctccttcccgccagtgccggagaccctcggaagtgtatgtggaaggacagcagctgtggggtccctatcctggtcagagggtggcattcctcccacagtcctgggagccacagggctgagatgggacttctcagcttggcatggggagggcaggacggggtggctgccatgcctcattctgtctgtgatggaaacgggagggcctggccctgcctctgttactgagcttgagccagggacacccgtgaccctgcctggggcggtcctccccagccttgtgagccagggcagaggtgcaggttgggtggctgacctggtggggggtaagaacatccacggagaagtgtgacgagtgtgcgaccagagtgtggacccagccaggaggcctgaccgtgactgcagcctcccccagcattgcaccaaagtgtgctcgtgcaggacctcgaagatgccccgtgggcagcgttcgggctgaggctgcagggggccttgggagcacggtggccctcctgtctgttctgtggaccgggtgcggatgggccgtgcaggcagacgtgctcttgggtggttgtggtggggatgcctctccgcccaccaccctctcactcactgccctggctggaaggtgacggcatctccctgaccggcagcgccaggatggcagccccacaacagtgtcctggtcgccccagaggcatgctgagcgcccatgcgtgtgcgcaggtcctacgggccgtgtccagacccagccccggggtcaggtgacacctgtagttgggtgagcgctcacacaggcacctccaggtaagggggattgaggaaggtagcgctttgtcaatggcactggttttgctccgaggctggactccttttccctttgaggagctctgctcatgtgctttgcctgctttcccatggcaggctttttattggttaaataaagacacaaacttttcatcagtctttgcaaatacttggttccggcaagttcttggcccttcccaggcttggggctgccggctcacggttcttctctctgcatttcagccaggcccccatatgctgggtttgcaggtcacgacc

SEQ ID NO: 169 - DNA, 2300 bp, Homo sapien
ctattataaagagaacctactcttgtagtaaatccaagtaatagaagaaagaaagtgtaaagtcaagccaagcgcagtggctcacgcctgtaatcccagtactttgggaggccaaggtgggcggatcacttgaggtcaggagttccagaacagcctgaccagcatgctgaaaccctgaccctactaaaaagacaataatagctggttgtggtaaggcacacctgtaatcctagctacttggcaggctgagccaggagaatcccttgaacacaggaggcagaggttgcagtcagctgagattgtgccactgcactccagcctgggtgacagactgagactccgtctcaaaacagaacaaaaaaagcaagtataaagtcgataacacctgtacccccaccaaccccaggcaagtgccgtgaacctttggtggtgtggacgttcccgccactgtactcctctcacgcagttttgtatctgctctctgccagttttgtttcttttttctttttttttttttttggagacagagttttgctcttgttgcccaggctggagtgcaatgctgccatctcggctcactgcaacctccggctcccaggttcaagtgattctcctgcctcagcctcatgagtagctgggattacaggcacctgccaccacgcccagctaatttttgtatttttagtagagatgcagttttgccatgttggcctggctggtctcgaactcctgacctcaggtgatctgcccacctcaacctcccaaagtgctgagattacaggcatgagccactgcgcccagccactctgcctagttttcttctctctctctctttttttttttttttttttttttttgagacagtcttgctctgtcgcccaggctggagtgcagtgatgcaatcatggctctctgcagcctcaacctcctgactcaagggatcctcccacctcagcctcctgagcagctggacccacaaacacgtaccaccacacctggctaatttttaaaattttgtgtagagacggggtctctccgtgttgctcaggctggctgcctgcacttcgattcctgtgcttgttctggctgaaggcgccggccgctcaagcgtgtttcggcagatatttttgagaacatttttttatttttaaatacatgtatagcatgagtgatggagccaaacacaagttttgaagccaagctcttggttctgagaaacaggcccaacactgcacagtgtcattcgcagtcaacccaaccactgtctgagttcacgtgacgatttctcctgccaggtcacgggaagttgttatttaaagatggcagttattacgaaggggcgtttgtggacggagagatcacgggagaaggccgccggcactgggcctggtcaggtgagctctagctgggatggcacattcactcctttctcataacccatcgggctcagttggtccgccgagtctagatgcagaaggcgtgacgtgtagacgggaagctttgtgccgtgagaggcctggcctaccgagaagccctggggacctgactgaggctctgtggtcaccgctgagagcaactcaggcttccggagacacttttctagaataaagatttatctgtcccaagttacactatttcttttttatttaaagctatttcagccacattgtatccctagatgggaaaccagctctggggattcgttgccgggagctgtgtgtccaggaacctcagaccctcacgccagaggggtcggtgggttctcagtggaggtgttttctctcaggcttggctttcagtttttaaagagccagggaaaaacctcacccttcaccctgcaaaccgaccagagggtcctttgccctcgggatagatgcccaaagagagtgtctgcctggggctgtctgcatgcccagctgttggggagaccagacctgcttaccatgttttccctcatgaagcagactgagtagtatgatggaggcagggacgtccattctggaatggttcctgcgtgtcatgggccagggacagaggagagccgactggggccgcagccctgaactgaacctcctgtctcccctcctccttgtccacatgcaggagacaccttctctggacagtttgttctgggagagcctcaaggctacggcgtcatggagtacaaagccggcggatgttatgaaggggaggtctcccacggcatgcgggaaggtctggcgcccacaggagccgggtgctgtgagggtgggcgctttcaggacatggaatcctacgtccacttgggttcaggaacctct

SEQ ID NO: 170 - DNA, 2300 bp, Homo sapien
tccaggggggtctcccaggcctctgtttcccctgcccatccagccttaccctgagcagccagggaagcaccagggtacaatgggctcgaaagctacaggaaatgccacttgcccacccaacctcccggggagaaactggtttcgtcagctgtggggcagcagctgcaagaagagaccacagatgcttctcaccgtgcttcctccctgctttccattctccttcatatcgaaagaaggaatttgggtatacgtagacaccataacctgagtattgagaagacacacacaggtaagcacagacacagagatgagggatgctctccagtgctgaaggagggagtgcagctcccttgagggccttcaaggggttggtacacgtcaccttcagcagaccagaggcgacctgtggggctcatgagctctcctgtcgactgttgggccattcatttgctcatttgtttatgtgacaaggatgaggacctacttggtgcagagaagacaggcccagtaagaggagggctggcttgaaacaactgcaggtccttgagagaccagaggtgctcgggaggtggtgaggagcaggttgggagccttgttgcaggagatgagtgagccaggggaaggcagagcggcagtgtcagtgaggcacacaggggaggagcagactctcccatcccctgccgtggcccttcagtggcctcctatcgctggggagaaaatccacactcatacccaaggatggcctggccggcttcatctcctcctagttgctgggtgtgccacccgccaactcctgcagttccaggaatgggcagggctccctccctaccagctcctcaggcacattttgtgggcagggtttatgggaaaatgtcggggaggagggcagggggttactacaggctactgtatctgtcccaaatcagggtcaggttctacctgaagatagtagtgttagctctgagttcattccagacccgtttatttgattctagaaacagttcctatcaaaacctgctcttttttttttttttgagactgagtcttgctctgtcgcccaggctggggtgcagcggcgcgatctcggctctctgcaacctccgcttcctgggttcaagcgattctcctgcctcagcctcccgagtagctggaactacaggaggcaccaccccgggccaatttttgtattttttagtagagaccgggtttcgccatgttggccacactggtctcgaactcctgacctcaggtgatccacccgcctcggcctcccaaagtgctggaagtacaggcaaaaactgcttttgaaacgcgtcctagcgtttctggacagcaccggccaggaagtcaggaggcttggtgctgctcctgcgcctgccctcgccccaagtcctgggcttcgggatccccatggcaaccccaggtcccgctggctgtgaggctgcggccggaacccggtcttcccggctaggagcccgcggggggcgaccccctgcagggcttggcctgctgcgggaggagggctcggggaagggtgcgagccgagcccgaggcgcacggcgagtcctgtgggagtgggggacgcgggggcggccctggctccgccgcggcacctggacctctactttccgaggtgagcatttgggggtcgagggcgtagagcgatcgcaccctgaatggagcccagggcagccagcgacctgtcccgtggcccgcagtcgttaccgttccggggcggccgcctaggcgggtcccgacgcggcccgcgggagctcggggtgccctcgcccgccgctgccatcttgccgccgagggttctcttagcgaccagcaacgcccgcttccattggtctttgtcgcaagggggggtgtggccacgggcctagtccctgagcccgcgcaatctctggagcgaagctagccgggcccggagccagaggacgcagctgcgcctgtgcgcgtttccgccgctgtcgtctcttccgccgggaggcccgcccgccaacggcctgcgcgtctgcgccggaagcggaaatggttggagcccttggccccgccctcgcgccatcttgggggccctggaggcggcgccgcggaggacggagcggaagtgctcgctgcagcttcccggagccggagcgcagcgcctgcggccgcccgtgccccgccgtcctccttcccgcggccgtgagggagaccgcggctcggccgtagcggagctgcgaggtgccaggaagggctgcgtggcgcgggaacggccgggcagcgccgcctccgcttcttccgggctgtcaaggccg

SEQ ID NO: 171 - DNA, 2300 bp, Homo sapien
aacacagcttgcaccctgactgaacgcattgccaggaatagcctgaggcagggcggcaggagcaagaacgtgaactttggactccaacagcctgctttcagatcctggctctaccactctctgccagtgtgactaggacaggctattccaggatgcctcaggttccagtctgtgaaatgggacaacagcacctctcatgccttctccacaaggctctcgtgaggaatcagtgggcagcccgtggagcacccttggagccgggcaaggcagtgccagccctgttcctggatcagggccagccctcacaccagctgccccctctgcagtcctcttctctgctcagtttgaagcccacctcctcttcacaggcctccgttaccgcccacactgacccccagtcccttacatcacatcaccctatttttattttgtgtacaactgtttcctgatacctttctggtttacttctcaattttctcctgctagaatgaagctccttgaggggtcccttgtctggttcggggctgggccctgccacctggaagtccattacatagtagacagcccatcaattacctgttgaaggtgactgctttatgcctggtcacaaacaaaacagaaagggagataaaaccagtccaagcagagaccatgaggacgtgccagaaagtgtaagactctctatgtgccttgttccaggcccgtcacattcatccacatctgtggtccatcactctgcacgtggaaaggatgaagtcctctgcctggcgtccgggagcattgacagtctggctcccacctttctcttcacgtccccatccccaattcctccgggactaagaaagcccccggctgccgtgcaccaagcttcacgcctctggtgttgttcagtcctctgaaatgccctcccagaccccgtctcttcctccttcccaaggccacattccagcctgggctccccgctcctctgggcctgaccatcttatatctccacctggctctgacacactgttaccgccgtcgccgtcacctcaggcatacggcagaagccatgtgagagtctgaattactgagaaccctttatccacttacggggataactgcatcttcctgggaaatgtcaactcaactaaaaataaagtgcttccaggactagcggccagtctctactcttcataaagggaaaagggcaaaagcccactgaaggtacttaggctgaaagcagccctctgtgctgtgagacacctggcagagaaacgaacgatacctttatcagtggggccacagaccagtactaagtcagcctggagaatttatgattttattgcctatttagaatacgatcaaaaccgatgtaactagtttcccttcagcccgtcagtaacgccttcaccccagagcttaacactaaatcctacagataagcgctgacctggacgcaggatggggacagggcacattactctggaatacagcccaactcgcagcgctgtgggggccgcgactgcccgcttcccccagatgccaagcaggggatgcggacgagatgcggcccgggtggctcgagggctgcagcccccgcccggcccctctcccgctcccccgaccctcgcaggccccagggctccgccgcaccccccagcaccccgtcccgggcccgaccccgaggcgcgacccgtacccctcagggccgcgggtcgggaacacggtccccgcggccacccgggccccgacggccctccccgcccggccctcagcgcggccccgcccgcccgcggccttgacagcccggaagaagcggaggcggcgctgcccggccgttcccgcgccacgcagcccttcctggcacctcgcagctccgctacggccgagccgcggtctccctcacggccgcgggaaggaggacggcggggcacgggcggccgcaggcgctgcgctccggctccgggaagctgcagcgagcacttccgctccgtcctccgcggcgccgcctccagggcccccaagatggcgcgagggcggggccaagggctccaaccatttccgcttccggcgcagacgcgcaggccgttggcgggcgggcctcccggcggaagagacgacagcggcggaaacgcgcacaggcgcagctgcgtcctctggctccgggcccggctagcttcgctccagagattgcgcgggctcagggactaggcccgtggccacacccccccttgcgacaaagaccaatggaagcgggcgttgctggtcgctaagagaaccctcggcggcaagatggcagcggcgggcgagggcacccc

SEQ ID NO: 172 - DNA, 2300 bp, Homo sapien
ctccttcccgcggccgtgagggagaccgcggctcggccgtagcggagctgcgaggtgccaggaagggctgcgtggcgcgggaacggccgggcagcgccgcctccgcttcttccgggctgtcaaggccgcgggcgggcggggccgcgctgagggccgggcggggagggccgtcggggcccgggtggccgcggggaccgtgttcccgacccgcggccctgaggggtacgggtcgcgcctcggggtcgggcccgggacggggtgctggggggtgcggcggagccctggggcctgcgagggtcgggggagcgggagaggggccgggcgggggctgcagccctcgagccacccgggccgcatctcgtccgcatcccctgcttggcatctgggggaagcgggcagtcgcggcccccacagcgctgcgagttgggctgtattccagagtaatgtgccctgtccccatcctgcgtccaggtcagcgcttatctgtaggatttagtgttaagctctggggtgaaggcgttactgacgggctgaagggaaactagttacatcggttttgatcgtattctaaataggcaataaaatcataaattctccaggctgacttagtactggtctgtggccccactgataaaggtatcgttcgtttctctgccaggtgtctcacagcacagagggctgctttcagcctaagtaccttcagtgggcttttgcccttttccctttatgaagagtagagactggccgctagtcctggaagcactttatttttagttgagttgacatttcccaggaagatgcagttatccccgtaagtggataaagggttctcagtaattcagactctcacatggcttctgccgtatgcctgaggtgacggcgacggcggtaacagtgtgtcagagccaggtggagatataagatggtcaggcccagaggagcggggagcccaggctggaatgtggccttgggaaggaggaagagacggggtctgggagggcatttcagaggactgaacaacaccagaggcgtgaagcttggtgcacggcagccgggggctttcttagtcccggaggaattggggatggggacgtgaagagaaaggtgggagccagactgtcaatgctcccggacgccaggcagaggacttcatcctttccacgtgcagagtgatggaccacagatgtggatgaatgtgacgggcctggaacaaggcacatagagagtcttacactttctggcacgtcctcatggtctctgcttggactggttttatctccctttctgttttgtttgtgaccaggcataaagcagtcaccttcaacaggtaattgatgggctgtctactatgtaatggacttccaggtggcagggcccagccccgaaccagacaagggacccctcaaggagcttcattctagcaggagaaaattgagaagtaaaccagaaaggtatcaggaaacagttgtacacaaaataaaaatagggtgatgtgatgtaagggactgggggtcagtgtgggcggtaacggaggcctgtgaagaggaggtgggcttcaaactgagcagagaagaggactgcagagggggcagctggtgtgagggctggccctgatccaggaacagggctggcactgccttgcccggctccaagggtgctccacgggctgcccactgattcctcacgagagccttgtggagaaggcatgagaggtgctgttgtcccatttcacagactggaacctgaggcatcctggaatagcctgtcctagtcacactggcagagagtggtagagccaggatctgaaagcaggctgttggagtccaaagttcacgttcttgctcctgccgccctgcctcaggctattcctggcaatgcgttcagtcagggtgcaagctgtgtttggtatacgtgtgtgtttggtatacgtgttgtgtgtgtcagacaagcaggattggctgatggcgttttgagtaggttttctacatgttcagttggagagtgagaagttctgagctttgcctagagaacaccctttggcgggagagctgggtattttctccctgacattactctcatcacctccagtccagtaaaagtgctttaatgggaaacagtctgagtaaaacggggaaacttacaaggagctataggacgaacaatgtgacgggtggctttcagatggcctggctttggcctaaatagggtggccattccaggtgacacattttagtgtagcctctatttaaatatggagttctttcagtggagagtaaaggtgctcctcctctgtgtctggt

SEQ ID NO: 173 - DNA, 2300 bp, Homo sapien
gcacggcagccgggggctttcttagtcccggaggaattggggatggggacgtgaagagaaaggtgggagccagactgtcaatgctcccggacgccaggcagaggacttcatcctttccacgtgcagagtgatggaccacagatgtggatgaatgtgacgggcctggaacaaggcacatagagagtcttacactttctggcacgtcctcatggtctctgcttggactggttttatctccctttctgttttgtttgtgaccaggcataaagcagtcaccttcaacaggtaattgatgggctgtctactatgtaatggacttccaggtggcagggcccagccccgaaccagacaagggacccctcaaggagcttcattctagcaggagaaaattgagaagtaaaccagaaaggtatcaggaaacagttgtacacaaaataaaaatagggtgatgtgatgtaagggactgggggtcagtgtgggcggtaacggaggcctgtgaagaggaggtgggcttcaaactgagcagagaagaggactgcagagggggcagctggtgtgagggctggccctgatccaggaacagggctggcactgccttgcccggctccaagggtgctccacgggctgcccactgattcctcacgagagccttgtggagaaggcatgagaggtgctgttgtcccatttcacagactggaacctgaggcatcctggaatagcctgtcctagtcacactggcagagagtggtagagccaggatctgaaagcaggctgttggagtccaaagttcacgttcttgctcctgccgccctgcctcaggctattcctggcaatgcgttcagtcagggtgcaagctgtgtttggtatacgtgtgtgtttggtatacgtgttgtgtgtgtcagacaagcaggattggctgatggcgttttgagtaggttttctacatgttcagttggagagtgagaagttctgagctttgcctagagaacaccctttggcgggagagctgggtattttctccctgacattactctcatcacctccagtccagtaaaagtgctttaatgggaaacagtctgagtaaaacggggaaacttacaaggagctataggacgaacaatgtgacgggtggctttcagatggcctggctttggcctaaatagggtggccattccaggtgacacattttagtgtagcctctatttaaatatggagttctttcagtggagagtaaaggtgctcctcctctgtgtctggtttacacggctccgcgagaccaaagggcccctcggtctccttgagcagcctggcactctgcacagaggatccaggaacggtgtcatggagccacattctgcacagacttgatgatgtggagggagctgcctggatcacttcagcgcatcagttgtgatgggagagccaaggcacttgagggcgggattgcgtctggccacctgttgccttccacctgaagggaagatttccccagtgctcacagtgaggatgggactggaaaagcgttggtttcaggaaggtgcaggttctggctcctgcccactgcgaacatgctgatgggccagggcaactctttagtctttgtgagcttcagttttcttatctgtaaatgagaacaataagactgaccccaactgttgctgaggaatgatgtctttgctttcatgtctggtatttcttagagcctcattttacagatgaggaaactgaggctggctgcgtgctcagagggtttgctgaaggcctcacagccgcttagcacaggtgggactttaagccaaacttgagaccagagtctgtttctcctcactgccctgccgagggagcagatggggggtggtgggggaggtgaacgtcacccctggcgtcttctctagctcaggggccaggaggcctctcatctttaaagtaggaatgacaaccggcaggccctgggtactgagctgtgctttaccgaagagcggcaggtcctgacgccgtctcctctcaggagtggggtggcggcgtgctcagctgaggagccaggtggcagtcaggcttggcttggcctgcccagaagcagggctgtggcaggaccttggacacgtggcttccactgtttgagacttggtgaaatgggggtcatgatgcccttcacttgagcatctgggaattaagtgggtgaacaatgtgacctctggcacctgggttctcaggtgaattcctcatggcatcacagcagtgttgaaataggagcagatacgttacctccgcttgccagataagaaactgggacgcagatg

SEQ ID NO: 174 - DNA, 2300 bp, Homo sapien
ccagtggttctgatctagattcgattccctttggggcaaaactcaccgcctaatcccctataactctaccggggagcccggtggagagcagacgggctgacgctgccacctgccggccatcccaggataggaccgccgtattcaagtcgccctcaggaaggaccctcggggcaccagaggccttcgaagccccaatgagtgaggcaactgagggtcgcgggtgccattacaaggcccagccaaggcctagagccaaggcttgaaccgtgggggacccccaagccccacctgcccaggaacagcagacactgggacactttgtttcaggtcctgcccaggcccctcccactgtgaggctgggatttgtcgcccagggtgcagatgagaagagtggggaaagcagtcctgagccaggacagcggtgggggatgcctcctagagcaggccctcccgtcaggggcccatcatagaacccagtgtgaatccaaaggagccgaagcctcctcctcagaatcagacgtggagccatgaacccaggggccagagcggcatctcaaactgttatctaagcattgaccagaacacatgatcacctcagcggctccacgtgggcgatgccgggttgcctggtccacggatgaggggttcagcccaaggtgctcaacccaatcagagggcagcctctgtgtccaggagacacgggtgcacccgcggggtcagaactccaaaggggcgcgggggcgctgggaggtttggtagccagagggcctgcggggcggggccacccaggccatgccccttccctgtaagaggggccattcctgcagtgtggggctctggctttgtgactgggctgtgccagtctggggatgatcccacagctgagctcctgtagatggaaccagaggtgaggcaaggaactggaggccctccccactgaggtcagcggggcgcagacgcccccttgtcgtgccctgccttcctcctgcaatcctgcaggactctccagggccaagtgctgcccttggggccaaaaaacagggccttctccttcacctgccctgcagccattcaggtatgtaccaggcatctcctgccctccctggccaggcggccccagaggcacaggccgcagacaccgcaggcgacctgcgtgggcctccagttcccgccccagcccttcccacccccagctcagggcaggtccagctgtggccagcggctggggaaggttctgtcccctccaggtgtgcggccttggcaagtgcttcaggcctccctccgctcgtcccctgggagcagagggatcggagcgcctgcgatgtggttccccagagcacctgcggggctcaggccaggcagggtggagggtggagggtggaaggccaccttccgcccgtcctggaaccacgcggcggcttcccggctgccccccacccgccaggccctgcctcccgtgggcaccaggggggcgtccacaccaagccggccgtgtgcttttcgcgcaggattactggggaaggcggctgctcggggcctggaaggtcccgggtctcgcctcgtgcccctctggcccccaaaccgaccggctccccggaactggccaacccgcgctgagagcccgcgcagctcaaagggcgcgagggcgggaccgccgcggccggcgctgggagctcggcttcccgaagacccaagcgaaagcctccgtctccccagccgtaaatgggcctgcagcgtctccactccgcagcgctgtccccagtgggagggcggcccgtggacgtgcagggagcagagcaggggcccctggcagcgtaggaccccgaggtcgcagcaaccacgcggccgcgagcccatcccgctgcctcgccagcgcccctcgcgcgtgccccgcccccacctcggctcgcgggccccgccccgctccgctccgccctgcgcctccgactaccttcccgctgccccgccccgcgctgcgctggttcggactccagccccgcttccgcccgggccctggccccgcctccagccccagtccggccccgccccagcaccttgacgcagaggtctgcgccgcacgcagagccacgtcgtgccgtcatcagttctcgcccgtctgggcgtgggcgtggccggcgtggctgctcgggaccacccgaacccgcggccatggccccggccgccgccagccccccggaggtgatccgcgcggcgcagaaggacgagtactaccgcggtgggctgcggagcgcggcgggcggcgccctgcacagcctggcgggtgagggccgggcgcggcc

SEQ ID NO: 175 - DNA, 2300 bp, Homo sapien
cctcgtcgtgacgctgcctgcaccaccagcttagttcattttcccttctccccctcccttcttctctgaataattttataaagtttacaggggtgatttcagcctcaaaccctgtcttcaagtggtgctcccaccctggcctcccagcatgagcctctgtgcccggcctgtttatttttaaatttcatttttaaaagtatatatttgacagattatagttgtatatatttatgaggtagatagtgatgttatgatttttaaatacaatcatttcagtttaaatcaagctaattaacataaccatcacctcagatatttaccatcttttgtggtgagaacatttgacatgtactcttagcagttttgaaatgcacgaaactctattattaattatattcaccatgctgcacaacagaactaaaaaattcccccaaaccacaaaacatacccttcctgtctaactgaggcctggcaccctttggccatcatctccccattccccaaaccctggcctctagggaccagctttctaccctgcttctatgagctcaggtgttttagattctacatataagtgagaagatgtggtatttgtctcctgtggtttggcttatatcacttaacttgatgttctccagttccatccatgttgttgaaaatgacagaatttcttcctttttaaaggctgaggccaggtgcggtggctcacagctataatcccagcactttgggaggctggggcaggcagatcacttgagatcaggagtttgagaccagcctggccaacatggcaaaaccccatctctactaaaaatacacaaaattaggccgggcgcggtggctcatgcctgtaatcccagcactttgggaggccaaggcgggcggatcacgaggtcaggagatcgagaccatcctggctaacacagtgaaaccctgtctctactaaaaataaaaaaattagctgggcatggtggcgggcgcctgtagtcccagttactcgggaggctgaggcaggagaatggtgtggacccgggaggcgaaggttgcagtgagctgagattgctccactgcactccatcctgggcaacagagcaagactccgtctcaaaaaaacaaaaaacaaaaaacacaaaattagacgtgcgtggtggcggccacctgtaatcccagctactcaggaggctgaggcaggagaatcacttgaacccaggaggcggaggctgcagtgagcggagatcgcgccaccgcactccagcctaggcgatagagtgtgacactccgtctcaaaaaaaaaaaaaaaaaaagctgaatagtatttcgttgcttgggcgcatgcacacacacacatatttacacacacatatgtaacacacacatacatacacacatatacacacacatatatacacatgcacagatacacatatacatacacacatatacacacacatacacccccccacacacattttctgtatccactcatccactgatggacactcaggctgattctgtaactcggctgttgtgaacagtgtggcagtggacatggaaatgcaggtctcttcaacacgtggatttcatttcctttgggagtatatgcaggagtggggttgctggatctgctctgctggtttttaggtggcaggctttagacagggtctgcctctgttgccaaggttggagtgcagtggcatgatcttggctgactgcaatttctgccttctgtgctcaagtgattctcctgcctcagacccccaagtagccgggattacaggcacgtaccaccgcgcctggctaattttggtgtgttttttttttttttgtagagatggagtttcaccatgttgcccaggctggtctgaaactcctcagttgagcaatccacctgccttggcctcccaaagttctgggatgacaggagtgaggcactgcgctgggctcatgcatttttgaggaaatacctatgcagcacacggccggcagcaccacagtgtctcagctgtctttccaggaaagtcctgctccccactatactgtgggtcccccggctaattcagctggagtccccgtcgctcgagagcctcctcccaggaaaacgccctttgctgcggcagctttctgttctccctggctccctgcacggaactgagctttggtacagttcatcatttgtgctgtttcaacaaagaccttcttagggaaatggcctcttctctgctttaattctgagcacgcactggtgaaggacactgtatctgagccgaggcccagggtgtcacccatcagagcctttcacc

SEQ ID NO: 176 - DNA, 2300 bp, Homo sapien
ctctgccctctgccctccaccctccggccaaggcagaagctgggtctggtcctcccagctgtgccggcccatgggcaggggctctggcgggctcacagctggctctgcgtccctggatgtgcttgttccttccagtcgccttcttcaaacgaggagaaaattaaactccctggggcctggctcccctgccaccatggtgcctcctcacctgctgcccgccgcctgccgcccgccacctgccacccgccgggccaaatgctctcaaagacagaattctgcttaaatgcccagaaaagagatttaggagatcagaatcttaagcaaattaacatgtgcagcgggcggcttttaatcaccgcctttaatcgcaggccgcggtgacggaaatcatctcctggctgagtggcgggcggggctggccctgaggatggattattccttagaacctgaacctgggtttcaccggcctctggaagggggctcaggggcctctgtccactccaaggaggcgtggctgggtcgggacctgcagcccgcacacccctctccctccttcccacccttgggcgtgtctgtggctttcgccttctgtctcctctccccacctcagtttctcccttctgagacttggggctgctggccctttcctgagtggactgtcccaggggacatgcagagcccaggtgtgggggatgctgggacgcctgttgctcctgggccactggttgcctctggcacacgtgcactgcagtgtcattgcctggacagcccccattgtggcctggcctcccctcagccctgccactcagctcagcaccgggacccactgagacctggggcccagagggagggggccgcccctcccttctcgcagctgtgcccagccaggcggacacaggccctgggaccctggctgtgccgaatgggtcgtgagagagactgttcattcacgagggcaggtcccaagagcccagggcaggggctggtccagccgagggtcctaggccacctgagtggtggtaaaggcaggaggcagctcctttgagggtgccaggcagctgcgcccaggggccttccttggcaggacccaggtggtgactgcagctgctggtggctcccctccccctccacacctggggccccgcatggcaggaggtggtcacaccttgaggtggcagcggctcagagagcccagaggcggccccacatcctcctgcccgggcctgcgtgcctgcctgccctgcccacatccggggctcagtgtccacacaagcctcccaggccgcactctgggatgggggctcaaggccccttggggcagaggtggtacctttcagaacaccccccatgggtggacgtctcttttgtctggaaaatgttacgtccctcagatgctgggagcagcgcgtgcagggggaggcagaatgctggctcggagagggagaggaccccagcgcgggcagctcagcactggacagacagggcagggaggcgaggggctgggagagcacaggaaggggtgtagcagcacgcagggctgcagccgtcaccgtcaccatcaccaggagctactgctggaactcggcctcccccaacgctggacgccccccagggcagccagtgaaatgtcacctcaatgacccttggcagtgctcagcccttcccagaggccctcctggggtgagtggctcttcttggctgcagcctgcggggcctggggtgtaatgaccagagggtccctgtggtggaggggcagccagccagggagcatttggctctggtcctgggggtgcagccacccctcagtaggaggagccctgccgggagggagggagggagggaggacaggatgaacggtgggtggtcgctcaagctgctatgggaagagccagcagccaacccgcctccccttctggcctctcagcggagccagctcagctcccgccagagaccccagcccaggtgtcctcccttcccactccagcagaggctgctgggcccgggctgggcagccaagggttaagtgggcggggctcccacgggaggggcggtcccagcggcggccccgtcccgccttcccctcgccttcctcaccttcctcacgggcgggcgcggcagggcagcgtgtggggctgcgatcggcatgggctctgcgcgcggggtgcccctgctcgggctggggctcaggggacgccgggggccagcacagggcccggtgtccctcgggccgtgccggtaactgggattggcacccgccggccatggaagagcctgggcccccaggtgggctcagccaagac

SEQ ID NO: 177 - DNA, 2300 bp, Homo sapien
ggctccaatgctctcattgaaggggtgccttgtgctctgggggtcagtggtgcttgcagcccaggcggctgggctggcatcctggtgccggacatgagggcctttgccgttaggagactctgcagaggagactggctgggtatggctgggagggtggagtgtgtgtcttgtggtggcctgtggagggccccggtccgggctggcctgccagctctctgttccagcggcagacagggtcctgtccaggctgccctgttgcaggcctctgcccgccccctgcccctgtgtcctgcctcacccctctcctaaatccctgcagccatacctgcgtcttcacctcccatgtgccccggagagcccagccccccatgccatggcttccatcccttcaattcccctctgctcgtgatcacgtagtagcttccccaagaaggcccggccagtactgcccttggtcctctacaacgcccccgccagggtccctcagcgtgcagacctggggtggggattaacgtctctgtgctttagcagatggtacctctgggacccgggctttctgtgagcaggtgtgcaggaaccgagggggtgagaccagtctgttcctgggctgggacagctgactctggcctggactccctggaccctgcagccccctctcctgggacaagctacagcaggaggctgaatggagagaggaggggagagaaggagcgaggcaggcagcctgggggaggggaggggaggggttgtgaagctcggatccggcaccacagcctcccaagtccatactgcagtgcagggcgtgcgacgcagacattcatggcaccattcgtggcgcttgttgcacatgaggggtgggggctttcctggagatgccccaggcaggggcacaggcactcaggaattcgaccgctcccaggagccacctgtggccaggggcgggggcaggggcatggggttgctgcctgctaggcccaccccgcccctgacaaggggcctccactgcactatggccccagacagccagcccagccacctcatctgtcttgcctcgtgcccggccttcccattgttgagttctgtgctggctccgtctgagtggtagctctcggggccccaggcccagcgccggttaccagggctgctaggactggtccaggaggtggtgggagtggcaggtggccgagcagggtggggagcagggccctcagttcccaggaccatctggggaggagtggcagggcccagctgagctgtgtgacccaggcaagccggcacctggggtggaggtggccctgggctctggcctttgccctgtcactggcagggcggtgtgggcggggccgggcgaggtgaggagtggccgtgcctccgctgacggccgtgtttctcccgtgaggagtggccgtgcctccgctgacggccgtgtctctcctgcgaggagtggctgtgcctccgctgacagccgtgtctctcccgtgtccagtggagcggtgcatgggtgccatgcaagaggggatgcagatggtgaagctgcgtggcggctccaagggcctggtccgcttctactacctggacgagcaccgctcctgcatccgctggaggccctcacgcaagaacgagaaggccaagagtgagtgggagccctggggtggggacaaatcagagtccctggggggacacgacggtagggaccctcccagggcagccactgatggctgaggagcagcgagaccctaggcctggacacctctgggctcagtggccttggggatctgcagtgacctcgggctgtggggtaggagggatccaggccccctgcccgcctggcagagctccctgggactcagtgaggaccgagtagcactgtgcccagccctgtgctgagtgctgggctggaaggaggggcacagcatagtccatctagctggggaggtcacagctccccataaacagaaacgacccccacagaggtatgctgatggatgggtatgggtgcaaacagtggctcaggcagccactgggcatggctgctggagggagcaggggccacccgagatggaggctctgtgcagggggtgggtggggagagttgaggcacacagggaacgggtagggtcccacggtttggggagagacatggcagtcctcaagggctgggatcagggcgcagccagggtttctgatggctttgctgatggtcaggacccaggcatgccaggcaaggcctcagcccagcagttgccaagcgtgtagccactttgggcccgtggagagagtcgcgctgcggagcccccagg

SEQ ID NO: 178 - DNA, 2300 bp, Homo sapien
gggcgtgcgacgcagacattcatggcaccattcgtggcgcttgttgcacatgaggggtgggggctttcctggagatgccccaggcaggggcacaggcactcaggaattcgaccgctcccaggagccacctgtggccaggggcgggggcaggggcatggggttgctgcctgctaggcccaccccgcccctgacaaggggcctccactgcactatggccccagacagccagcccagccacctcatctgtcttgcctcgtgcccggccttcccattgttgagttctgtgctggctccgtctgagtggtagctctcggggccccaggcccagcgccggttaccagggctgctaggactggtccaggaggtggtgggagtggcaggtggccgagcagggtggggagcagggccctcagttcccaggaccatctggggaggagtggcagggcccagctgagctgtgtgacccaggcaagccggcacctggggtggaggtggccctgggctctggcctttgccctgtcactggcagggcggtgtgggcggggccgggcgaggtgaggagtggccgtgcctccgctgacggccgtgtttctcccgtgaggagtggccgtgcctccgctgacggccgtgtctctcctgcgaggagtggctgtgcctccgctgacagccgtgtctctcccgtgtccagtggagcggtgcatgggtgccatgcaagaggggatgcagatggtgaagctgcgtggcggctccaagggcctggtccgcttctactacctggacgagcaccgctcctgcatccgctggaggccctcacgcaagaacgagaaggccaagagtgagtgggagccctggggtggggacaaatcagagtccctggggggacacgacggtagggaccctcccagggcagccactgatggctgaggagcagcgagaccctaggcctggacacctctgggctcagtggccttggggatctgcagtgacctcgggctgtggggtaggagggatccaggccccctgcccgcctggcagagctccctgggactcagtgaggaccgagtagcactgtgcccagccctgtgctgagtgctgggctggaaggaggggcacagcatagtccatctagctggggaggtcacagctccccataaacagaaacgacccccacagaggtatgctgatggatgggtatgggtgcaaacagtggctcaggcagccactgggcatggctgctggagggagcaggggccacccgagatggaggctctgtgcagggggtgggtggggagagttgaggcacacagggaacgggtagggtcccacggtttggggagagacatggcagtcctcaagggctgggatcagggcgcagccagggtttctgatggctttgctgatggtcaggacccaggcatgccaggcaaggcctcagcccagcagttgccaagcgtgtagccactttgggcccgtggagagagtcgcgctgcggagcccccagggggacctgaggtcacaagagcctcgatgcacctgagcgcggagctgggggtccctggagccgctgtccccacctgcggcgctggagccctggaggtgtccaggggcttccttggaacgtggagacgtgctggttaaacgtggagccccgggccagccgggcactgggggctgcaggtggagggaggtggatgctctccctcgtgggggcgtgtcttttccacaggaaagggaaagggggagggacacgggtcagcagtggggggctgtgcagtctcgcagatcttcacccttggttcttgaactctggaccctgagccctgccgagggtcccgcaaaggtgggcaaggagctcccggctgcttggtctccgcagtgttggggctgccagcagggggacgctgggcccccggggacctgacccgtgctccctccccaccccgcagtctccatcgactccatccaggaggtgagtgaggggcggcagtcggaggtcttccagcgctaccctgacggcagcttcgaccccaactgctgcttcagcatctaccacggcagccaccgcgagtcgctggacctggtctccaccagcagcgaggtggcgcgcacctgggtcactggcctgcgctacctcatggccggcatcagcgacgaggacagcctggctcgccgccagcgcaccagggaccaatatccttgggcacctatcgggcaatgcagacccagggaccggccccttggctgctcaccctgggggggcctgtcctttgccgggtcacacactggggaagtggccggta

SEQ ID NO: 179 - DNA, 2300 bp, Homo sapien
tcccactgagggacacttgtgcctctctgtccccctggggtagccggtgtcccctctgcccatgaaccttgaggacgtgagacctctactcacgagtccctgaggcccgggggcagcaggaatgggtatcttggggagagaagccggtgggtaaggaggggccccacccccagaaagctgagcacaacccggtgagtgcttgtgcagccaacagccttgccccgtgaggacccttccctgagcaccccctcggggcccagaacccagcctccctgacagaggcagggctggggggcctgctgctggctgagaccctccaccaccatccaggccccctcacctgggccttctgctgcctgcagccccttggagcatagttgggtcttgctgtctcctctgtttgggagtcccaggggtgacaacgggtctggccgtgcagtacgggctgtgtctggccgtccgtctcctgggtcagcgcgtgcctctcctcggtcatgcctggatttacagtcgctcgtggctctgggtcactgcagcattttggggatgtttaaggagctgtgaagtgtggtggccccgaccggctccaggcgcactgtcagtctggctcctagcgcctctcccggcagccgtggcaccaataaattcagaggaaaccggggctggcttttctggaggtggagagagacgagcatgtctgagagccatgtggacctggacaacctgggagcctcctgctgcagtgcacgtggggcctcgggctccagccagtgcagcctggtgacgggaaggccccttggccactctgggccgtggggagggccgtccaatcccatcctggctccctatgagggtgaaggaggggcagggcacacctctgggccgtggtacccagagcacagggaggctggcgggagctccccggccgcatcaacaggactgagaggcccgtctggcatggggcctgcggacgcgacgtgccctgatttccaacgcgtccagcgaggcagtgtccaggcaggcccaggtccaggctggggagagcgggcagcagtcggagctgtttgctgtggcgtggctgagcgccgagtgtctgtggtcatgagagctacagtggcctctttgcagcagtgtgggagcatccaggggtgtgggagggtgtgtgtgcaggggcgtgctgtgggtgttgcaggggtgtgtgcagaggggtgggcgtgtacaggggcatggccacgggtgggtgatgtgtccgcttctggcggaagccccctcctaacagggaccgctgctgcaggcccacggctttgctgtgtttcaaagaaagtagcccccacccttggtgggggacaggatgtggtatgggagcccctcctgagcacagctgggccatgttttggaggtgtctgtgggaggggctgcaggggtcaggtggtggcacaggctctgctggttccattgggaatgagctttggggtgaatgagcagctcgtgaggcagccctgggttcggcggggggcaggcagggtagccctggatgtgtctgctacttatacagcggtaggaaggctcacagtggtttcctggggttccccagctcagaacccgcctcagggagtgcccacctggagccgtgtgtctgattagggatacccgcgcactgcgggaacaggtcagggccgtggaatgctcgtaaaagggttgcgcaagcaggcctggccgagcagtattccaggcacacaaacgcagttattacgtagtcaccactggtgggaaaaaaggattcagaacttaacgagtttaaaacaacacatgagagacgctgaggcaggtgtgagcgaatgtttccaccggggcctgactttcaggccgcttctcctcggcagctgcctctgccccagggtggactgggaacggctgccacgggggctccccaacctgtccccgccctgccctcccctcccgtctgccttactccagacctggctcaagcccacctcttccaggaaggccttctgggaccaccaggggctgtcccggcctccctgcctggttcaaggctagactcaccttgtccctgtctctcccctggactcagagcaaggctgaagaggacgtggagtctggggaggatgccggggccagcagacgcaatggccgcctcgtcgtgggaagcttctccaggcgcaaggtccggcgcagctcccaggccagggtcccggtctgggcccagtgtcctccctgctcccagtgccccgtgtcctccctgctcccagtgccccgtgtcctccctgctcccagtg

SEQ ID NO: 180 - DNA, 2300 bp, Homo sapien
ccggggccagcagacgcaatggccgcctcgtcgtgggaagcttctccaggcgcaaggtccggcgcagctcccaggccagggtcccggtctgggcccagtgtcctccctgctcccagtgccccgtgtcctccctgctcccagtgccccgtgtcctccctgctcccagtgccccagtgggccctgccccagccagagcagatgggggtctcctccagtccccagggttcccagcctggctcacaggatcccctctgagtcaggccgagctatcggttgcaggtgccagggactgggccagaagcctgggctcggagctggtgggaacaggtgcctggctggctcacatcccttctctggcccacgctggccctcgccccaagctcaggtgccttgtggctgccctgagagtctgccagagcccagatcgagagggcaccgaggaggctttggcaggcccagccaggcgggatggacatgggaggctgcgtgggccgctggggaccccggaggataggccctccccaaccccccagccttcgccaaggcctggcctgggccagaggccctacagctcacacctctgccccccgcacagaagaagggcagcaagctgaagaaggcggccagcgtggaggagggagatgagggtcaggactccccgggaggccagagccgagggtaggtgccctgccccacggggaggccccgcacactcctgggagcctggcccaaccgggcccttctctgcggtgaccccaccaggaccatccctgagcagggcaggacctacccccttcttggcccctggaagcagtgaagtggtagggagtgtggtgtgcagggcaggctggtggctgtgggcagtgggggcaggggcggctgagcaggtggctggagggcccaggtccccacagccctggatgctgccgggctgtcggctctcggtcctcaccgcctcctcttatgaggcccccagcctcatgccctccccagggggcaacaaatgcctgccatgaagtggctccccctcttcccgtccagtcaggctgaattcaaggcccaggcccccgtgtcggaggccttcctcagcactgtctggggtctctttgaggtctcaaacctacaggcccagaaggaactcccacccctcccggaccctgggctccccccgtgccgcccactccctcctattgccgtctcccctcacttccatcccccaatggttcctccgtgcccctcgcctgggcacagccccctcctgtctcatcccgtcccacgtgccagccgggctctgcccttagcacacatctgatccacgtgtgccgctgccacccggccgacacggaggcccccttggaccctggcctcctctccacatagcgattctaggccagacccaggccccgagcccagctctcccctgctcagaaccttccagaagcccccacacctgccacgcttggcaggccacgtcatcctccactgcacacagtgcctagggactttgcacctgctggtagctcccagccagcccacatcctgcccagcactcaggtttccgcagcccgcggcccagtctggcgtccgtctctgatggttcggggcctgctgcgtgaattaatgaggctgcccgagccctggagcccgtctcacggagctgggtgccaggctggccctggacgggaggggttctgaccccctgcacctgccacagggcgacccggcagaagaagaccatgaagctgtcccgggccctctctgacctggtgaagtacaccaagtccgtggccacccacgacatagagatggagggtgagtggctcggggacctggggccacgggcggaggcctccctgtcccccatccctgctatgctgctgggcgccgggcgaggtcgaggactggcagtctgatgcccggtcaccggcgccacagcggcgtccagctggcaggtgtcgtccttcagcgagaccaaggcccaccagattctgcagcagaagccggcgcagtacctacgcttcaaccagcagcagctctcccgcatctacccctcctcctaccgtgtggactccagcaactacaacccgcagcccttctggaacgccggctgccaaatgggtgggtgcgggcatggtgcgctgggtgtggtggggagggctcggctcagacggtccctgaagcccaaggggcgagcaggggacccgctggggcctcggttctgtcctgggctctattgcccttggagcctccacacctctgtggcatgctgccgacaccaggctgccactgacaccaggcta

SEQ ID NO: 181 - DNA, 2300 bp, Homo sapien
caccaagtccgtggccacccacgacatagagatggagggtgagtggctcggggacctggggccacgggcggaggcctccctgtcccccatccctgctatgctgctgggcgccgggcgaggtcgaggactggcagtctgatgcccggtcaccggcgccacagcggcgtccagctggcaggtgtcgtccttcagcgagaccaaggcccaccagattctgcagcagaagccggcgcagtacctacgcttcaaccagcagcagctctcccgcatctacccctcctcctaccgtgtggactccagcaactacaacccgcagcccttctggaacgccggctgccaaatgggtgggtgcgggcatggtgcgctgggtgtggtggggagggctcggctcagacggtccctgaagcccaaggggcgagcaggggacccgctggggcctcggttctgtcctgggctctattgcccttggagcctccacacctctgtggcatgctgccgacaccaggctgccactgacaccaggctagcactggggcagggtccttcaggccttgtgggggatgtgggagcgatggtgcaggcctgtccacctactcccagggatacctgcctgcgaggctggctgcgccagctccggggatgtccctccaggatgtgctggcctcagtcctgcacaggtgtgaaccttggagtcccattcacattgggtgaacgaggggcagacggcagatacgcggcagctgtgcaggggaggctagcgtgtggtggtgggtgggcggggcacacacctggaaggtcaggtgctgaccagggcagccttgtgtcaccctcgcagttgccctgaactaccagtcagaggggcggatgctgcagctgaaccgagccaagttcagcgccaacggtggctgcggctacgtactcaagcctgggtgcatgtgccagggtgaggcactcggacactcagggctcggacgctcagggctcggatgggcctcctgggtgtccccagaacagagatcggagccccacaggctagcaagggggtgggggcggctttggcagagtcccctggagggtcaggttgggacgaagctcccaggatgctggggaggtgggtgggggaaccctccttgctagcgttgcaaagaagggcccagctccgtcaggaatccagggatggagaactggggagcctgggccccacatgagattcatggcaggacttgtctgaggggccccagtgccagcgacccagccccctgtgcctggcccctctgtgggtctcaggacctgggtctgggctgggtgtttggaggaacctcctcccggctctcagacacctctgttttgtctgctgtggatgacttccagcttggtccccctgtggccctggcaggagtatcaccatgggagagggcaggacaggggctgggcgagcaggcctcccactagaccaggctactcctgctgtggaccagctacttccacctctgcccttggcttgccctcctcagagttctcagcctgagtgggccctggggacactgtcaccagagaccccacccctcatacccccagggacccagacccacccccagaagccatgtgacctcctcggctcagctgtgggaggcatgggctctgtcccacatgctgcggtagccacaaaggtgatccatactgggccaggtgcaccccgaggtgcccccctggaccactgcctccctccctccccctggcaccggctccagtctcctatgtgggggctggggagggggctgttggcagccatgccccagcaagcagggggcttgctgagggctgggccactgaccacctccccggcatcccctcaggcgtgttcaaccccaactcggaggaccccctgcccgggcagctcaagaagcagctggtgctccggatcatcagtggccagcagcttcccaagccgcgcgactccatgctgggggaccgtggggaggtgggggccagccccacacaggcgggaggggtgggagttgggggcgggccgggcatcgcgatgggccctgatgccacccccactcctgtgtcccagatcatcgacccctttgtggaggtggagatcattgggctccctgtggactgcagcagggagcagacccgcgtggtggacgacaacggtgaggctgggccgtggctccgtcacacctgtgatggaagtctgaggggggagggttggggctacctggtgtgcccgggtgccctgcccaggcctccctcagtgacagtcctgggcgccctcccctctaggtgggcag

SEQ ID NO: 182 - DNA, 2300 bp, Homo sapien
tactaccccccacccctctacttcctggtgtcacgtggaaggcagctgcccgggtttgcctgtgactccacacccagcatgtctgtcccctgccccaggtcagggtggggcctcggcttccgcaggaagtggtcttggtgccagccctgctgccctggctttgagctggggcccagtgccctctgggtcctgctggctgcagctggccctcggggaacccgcacacacagcaggaggggcctgcccaggcccagtgctgactctctcctgccatgctctcgggcccagaggtgccatccagcccctgccgtctatccacccatctgttcctcgtcccccaggctgcagggctccccacgccactgctgtggccgcctcacctgctccccctgtctctttggtcttgcagtcggcttctctatggccacagcctacttttagaagtgcagctctgttaggagccttgaaggtacccggtgcgcgggacagtgcggcccgccgcccctgcatgcccaggccgcaccccattagcatccatgattcctggtagcatttggagactgtcgctcatgtgacgtggatcatgacatggctccgggggccctggccatccccagccatagtggcatttacgaggcagatccagggttcagctgggtggccgccttctcactggcctctcctcccctcccctccctcagtcctccctcccctccctcagtcctccctcccctccctcagtcctccctcccctccctcagtcctccctcccctccctcagccccttccctggcgggcagcccgctggagcccccactgtgcccctcctatccccctccttctctctcctgcccccatctcggaccctcaggctgttggttctgagttcgcctcccactccctccctgtccttgccaaccatgccagtgcatgggatgagggcacccctgaggccggcgctccgagccagaatcccggatctgcttctaaatggcttcccagccactgtgaccaaatgcgtagatttgggatcttgaatcaggaagctgattcaagtgctggccatctgaacgcatctgcccagaggcgcccctgcaggggggtgacccacctgccgggcctgggccgctctgtgcacgagcacggctcgtcatgggggcgcggtgggtgctgtctcgggggcatctggcatgtgagggcccctctggcctctgcgccctggagatgcggctgcctccctctcagcagctgttctgcccaggcagggacctcctgggcccagctgtccaggaagattggctgtggccaggtgctggtgggctgggagtctgagcccatcttggcagggctcagggggcagcaagccagctgcgggccttgggggctcacatgagtggagggcagggcaagaccagaaaaggctgcctgggggaattcaggaaggcttcctggaagaggtggtacttcctagggcacgagtatcaccatgggagtgggcaggacacgggccgggcaagtgggcctcccgctgcacctggctactcctgctgtggaccagctactcctgcctgagggtggggcacacacaaccagggagtgccacgccagtgtcccctgctagcgccgggggctgcgggcctctgagcaggtgcaggctgtggtgggccaggctggggctcgaggtctctcctccggagggaaagaccttctctccatgcccctcaagggccccacatgccctggacaggtcaggcgagggcagtttctgccggaagggtggggtgggccatgtgtacttagatctgtagcagctactgtcccaggcagagctgccctagggaccctgctcctgaaggccctggtgtgtccacacacccccagcctgaggtggcccagcccctcggaccgagacacgcatggcacgtctgtggcacggtctggagagctggccctgggggagcagctgcagctgggctgggacccctggcaacagctacatgggctccttctcttgcaggtcaagcaggctctgggcctaaaaggcctcttcctccgaggcccaaagcccggctcgctggacagtcatgctgctgggcggcccccggcccggccctccgttagccagcggatcctgcggcgcacggccagcgccccgaccaagagccagaagccgggccgcaggggcttcccggagctggtcctgggtacacgggacacaggctccaagggggtggcagacgatgtggtgccccccgggcccggacctgctccggaagccccagcccaggaggggcccggca

SEQ ID NO: 183 - DNA, 2300 bp, Homo sapien
cgggtctgcaggggtgaaggggaatgggcagggccatggtagcagttaagcagggagggacccctgccagtggccccctggaccccggaagaagggtggggtccttgctccggaagaacagggggagggagggatggagggaaagcaggtgaggggcaggggcagggggaggtgggctggaggggtggacatggtcggagccctgggtctccccccgcccaggcctttcactagcttccggaaggtaggggtggggcaaggtgacagcgcaggaccttaggctgtgtccactgagaggcgacccagggccacagcccgcagtagatctgttgctacagccaaaggggcttggccctgggccaaacaggagaaaacatttgccccgagttgctgctgcacactcccacggcctgcagcgccagtcctggcatgggctccggggacacctgcccgctggccaccgtgccaaggcaggatctggcagtcctggcaggagcctgcacggggccatcccttgcctcagaaagggcatgtatttttaggcaggccacagggtgttggctgagtctgcaagaactgaggcctgtggctcccagggaccagctcccaaggggcaaaatccatccagcaaggattgggccggagtgggccgcattcccacccccgctgaatggtagccccgtgtgtgggcctgccctgcctgctccttcctgctcagcccctctcgctccgctcagccttcagcccctttctggctactccacaggcagtctagacagggtccccccaccagaccaacccagtgcctgccagtggtccctaccgagccccggggtatggtgggcagaggacagggaaggcccccattcacctgcatgtttcccgcatgttcagtgggcacacaggtgggcgcccctcatggagggcacctcctgccagcctggcccatggcacaccatgctgccaggggtctgagctgccagaggtctaagccgcctggggtgtgctccactcttccacccaggcctccctggggcaggctccccctccagagccacacacccacccccttggaagacacaggcaaggatgcctcctccctgaaggcttgccctgcgcacacagatgcattatccctggagtttgtgccgccccacaggcctgtgctcccaggagccctgccaggcagctggtggcattctccacgtgcagacagaggctgagggccagagacatgcagtaatgaccccgggttacccgggaggggctgatctgtctgcttccaacactgggctttttcccaaggcgcccagagcctctggagaagacgcatctcttcatgccagcagggcttcccagccactcaccctggaaccctggcctgccccacctatacccctgtcctggctccagctgcttccaaggcttgttcctgcagcctcccaggcacctgtcttgcccacaggcagcctgcctggcttcccccgaccacagcactttccacggatcgccattacagcacacatcttccctacccgcaggtgcatgccaggctggggctcctcccaggtggggcagggttccccactcctctggtttgcatgggacttttaacattgaaagtcccacgcccctgggaagccaggattgagtcaccctagcaaagagcgcatcacattcgccctggcgtgcagggccaagcttacagcaggcactcgctgaagggcagggctctctgacagtctgcagacccacgtgcccccttagaagcaggtgggcggcctctgcggcctccctcagcagggctcagagcacttgagttaagcctgtggacagcgcggtaaaagaacatcagtccagatgttctgtgctgatgcgcgatctctggaggataaccgcccgcccgcccgcagccccgggcctctcggacccctgcccagcactggccctagctcgccctgtagcggccgagacctcagaggccgggggtgggggagggaaggggcggggccggcgcctcattaacataatctatgcgagggggcgtttggcagtcaaatatatgcgcatatatctccatggctgatgagctggccgggcactttcaaaatggcggagtgtggagcgagcggcagcgggagcagcggggacagtctggacaagagcatcacgctgccccccgacgagatcttccgcaacctggagaacgccaagcgcttcgccatcgacataggtagccgcaggccgggcgccgggcgcgggctgcgggggcgggcggggcgccggcggtgggccggcga

SEQ ID NO: 184 - DNA, 2300 bp, Homo sapien
acctcgtcctgccctccccacccccagtccaaccccagggagcccatagtcaggcaagggacatgccacaatgtgactgccgccagcatgaaccccacttcagctgcgaaatagctccactgaacacaaccagatcccctgtgtagccgggagtccagagcccctagccagtgccagccgccatcaatgcccagagctgtgggagccatggcgtgagcgcgtggcctggacacccccacacgggttgccctcctgcatccatcaagggccagagtgttgtggtgggaccccacctgctcagagatgagcccccagcagtcccagcccccagtgtcactgcctccctctgacagcctggagcatgagtccccttcaagggaggtgttgtgggagtacagcgggggtacgagggtgaataggggctcccttcctgccacctccaaagtcacctgatgtttctgcctgggagcctcccagcctaacccttcacaatggtgtccggctggcctgtgggagagccaccctgcattggcttgaagtcctgtcttcccctgctgtcccagcactgtcctggctgccccctggaccgtccatccttgtgctgaggacctcctggagctaggcccaccaagcgagtcactcagagccgggggtcactgccgagagcctccggggaaggctcctcattggaccctgccagctggccagggaaccccactcctggattcaaactctgcctaaccagccctgatgccagccccagctctgggggctaaggcccttccgctaggacccggcagggtcccaacctgtctctaggagccagcccaggccccgaatcctctcctagtctctgctgcagagcatttgaggaactgtgaccgcaggctagggggtgggggtctcccaagggaccctcccctaaggacccagggtgggattcattgcctcaaagtggctgcgggcactcagctcagttggccaggtaccggggttattagctcatcccatggaccggtggttgggggcggggggctagggctggcatggcctctgatcctcaagtctgccacctggcacccactccctacccactggcaaaatgccagaggaaagcaagccctacaagtgccctggctgccagagagactaggtggagctgtggcatgcataaacagtggccacagcaagcatgccaagagccgaggcctcccgagctgcgtggacactgtagtcagatccctggccagataggggtggggagaggcccctgagggacacctgccagctcgtggagcagccccagtgctgctgtgggttacagtgctcctgggaggacagggtgcaggaagcggggagagctgccgggtgcccggctccgcggggagagctgccgggtgccgggctccacgtggagcacgggccccagcttcctggagctgcccggagcccagccaggaaggcacaaggcccattttctaggtctggagaagtcaggagtcccaggtgacagtcagggggcttgtaatataggcacgtaggactgatcctaagagcgtcgccccctctgtccccctcccctggaggggcagcaggtcccagtcagggaaggtgcccatcccccaggaagccgtggcacttgttcattctacagtttttcccttatctgctcctacggcctctgccagccagcagtgggaagccgctggggagaggcaggggaggggagcggaggggagggcgggggagggggccctccttcctgcccccctcccgtttggcggcctgggaaaaggcagcatattgaggcgcggggctcccggcatcaggccccgggatgctaatgagggcgagcgcgttcccacagcccggacattgtgccgcgcggcccacctgctccttggggagcgcccattgtgcccgcgccaattcacaggcaatttagcgtgcgctaatgggccggcgcctttgtgcggcccgcccggccattggccgcggagtgtgggaacggccgcggcgcccggactccaggcgccaggccgccgcccgcgcctatatagggcgtcggcgcgcggggccggtgtccgcgccagcccgggacgcgcttggccttgcccgcgcccgctcgcctcgtctcgcccggcctccccgcgtcgcctcgtcgcctgttccgcgccaggcatggcccccagcactgtggccgtggagctgctcagccccaaagagaaaaaccgagtaagtaccagactcgcccggcgcgctgtccccgcggcctccggtcctcgggggtccctgcgccg

SEQ ID NO: 185 - DNA, 2300 bp, Homo sapien
tttctgttgatgggagcccctgggcacagaggatgggacagcggctgtgggtacccgagggctggagccacaccctaagggatggagggcagggtccggggcccagttaagggctccccctccactcctgcgccttcaaggtcggcctgcacctcccctgctctgtgccagtgcaggccaggcagggggctgaggccgaggcctggccattgccctcctggtcacgatctggtgaaggatttgagtccagaagccaaacgtctacagtcgtgtggtgcggacactcaggatggactgcccaggccatggggggctctgaatgaagaggaacctgcgggggcgaggtgggctgcgcgtctgcaagaaagtgcatgagttgagtgctgctgcagagggaagctggggtccaccgctggtgagcggggaggggacgggacacagaaccggccgtggcccaccccgagacggaggcgcagacaccaggcccgttctgtgctctggaggctttgggcagctgtcaggctagtggacggtgtgcagagcagatggaggcgtgaggaggcggctccggggtcacctaggtgggcagccctcacaggggaggccgagggggagggcaggagggcggagcaggcggcggtgcaggaggcccgtggaacttggagggctctgtgtccagctctcatggcccagggcgggggcagctccaaggcctcgggcttggggacagaagggagaggacttgggggttgggggtggtcagagcattgtgggagggatctggggcagctggggcttcccagagggtgaggtgtctgctgggaattggggcagccccaggcgtccccaggcctccagcccagccccggttcctccccgctgcaggccagggtatcaattgcctgctgggaaacctcagggtgcctctgtctcaagtgcctgcccctgacactcctggccctgggctccccccgcctccccgtctgtctgctttccccacctcctcccctcccctggccgtctttctgactcggggatggcgtcacctctcaccccaaatcaggaccctgggccccagctctgttccccacctcaccttccttgtgaccaactcctgacctcccgtgggcttggggtgtctgtggccggaacattcctcagaccctctcctccagccccactctgtcccaccacccaggcatcccccacctgggttccagccctccaaggggccccacgctctgtgtccatgatcaggacactcacacgcacccagctcgcgcccttccttccagacattcgagctctggaagctcacagtcaccctagcttagtgcacagccacaggccaggcaccttcaacatccccaccttccaggtgaggaaaccgaggcaccgagagctgggggccaggccagggggtctccctggggggagcagaggagtgtcggacctcagaagaggctctgggggtctgagccgccaccgggcgctgccttccaggttcagcagggacagagctcagggggaaggcacctcccgtcctggttcaatacatggacccctgaccctgggaaagggactgagccaggggaggcctcaggtcactgcaccatgaagttgtggggagctgcgggggcctctgggctccgagctgggcaggcacagcgtggggaccacgtgccgaggggaagaagcgtgccagggtggacgtctcagtgcacacgcaggaacatgcaacggctgagccagcccagagaggcagcggagcgtgtgcggggcggccggcggaggagcagcaggatcccaggcgggagcgcacggccttttcggaggcaggttccaggacaatactaagcgtttacatcattgcactatttgatccaggaggtcccactgtggcgtttcatcgataaacgcacatgcgaggtggagggtggctggtgtggaatgtgcccggcagccttcatagcaaaggagaattctagaaccaaccgaagtgcccctctgaagggagctggtcccgtccgttccagccgccgtggagtaacacagccagcagtttccctcctgccacgaaagctcgagactgaaactcaggatgaactgttttcagcccgggtcaccccagccctggggtggaggcccattgaggatggccgagcaggggcgggcatccaggcaggtccagcagtcctggcgggctgaggagaaggaggtcagtgctcagggagacatccgcagagggacctggcaggcagagctccagaagggagggaactgcacagacagaaagctcc

SEQ ID NO: 186 - DNA, 2300 bp, Homo sapien
gaagctttggcttagcgtcctggggtgtggagaggcccatgcaggccaggtggagccctgggcccctagaaagcagcacttctggctgccccaccccgtgtcaccctctccccaactggaggcgtggtctccagggaccacgggcctccctgtgcatggaccggctcctgaccaccgtccagggtcattgccagggtaccttttcagaggctgaccccatagacctggctgccccccagtgctagatgggagccaagcacagcctgcccttctgcccacagtcccgggggcaggtgggagcatggggccatggagtgagcgggcaggggtggcagagggctccctggtcaggggccccaacttcccttcccccagggaggccacctgacatctgggctccaggcacagcaggaagcccacctgccccaacctgtagctcctcctcctgggaggagccatggatcctggaaaagctctggggccacctcccaggtttggggggacagagctccaagagacgacggctggggacacgagccctcatggggccgctgtgtgctcaccccttgattttcttcttttcatgcatgagattaggccaagtgtggagaaatcaatgatgttgacgatgaggctccctgagagaaatcacacccagcgggagctgctgctcccaggtctggcctcggtcaccagccacctgctgcatccgcgggagtggggccgaggacatgggagtggcaggtgcagcccccggtactcactcagccccagggagtgtccctggctcccagggctctgggaggtgagggcaggtcccgggggaggctgggttagtggcagctccgggatgagacctcagaggtctgtctgacttgtccaagcccggctatggggaggtggggggaaggaaggaagaggagagaaataaggagaggctgggcaaagaagacaggacggcagagggagaggggagagaagtgggaggcagccagcagcgcagggccctgagagtatttcagcggcaccgctgtcctgggccgcccggtgccacatctttgaaaacagttgtttaatttaagcttgtccactcagtagctgttgaatgtgggaggttatcttgttctattcaagttgctataaaaataaaaactaccatagactgggtggcttaacaagaacagaaattcggcagggcgaggtggctcacgcctgtaatccccacactttgggaggccgaagcgggcagatcatttgaagtcagaagtttgagaccagcctggccaacagggtgaaaaccggcctctactaaaaatacaaaaactaggtgggcatggtggcgggtgcctgtaatcccagctactcgggaggctgaggcaggagaatcgctagaacccaggaggcagaggttgcagtgagctgagatcccaccactgcattccagcctgggcaagtgagcgagactccatctcaaaaaataaaagaacaggaatttatttctcacatttctggaggctggaggtccaagatcaaggtgccggtagattcggggtctggtgagggtctcttcctggttcctagatggctcctcattgtgtcttgacacagtggtcggggtgagggagccttctaggtctcttttttaagggcactaacccattcctggggcttccgccttcaccaaccacctaaacacctcacctcctccgtgaggtcttctctgattgctgagtaagccctgtccccgctccctgttccctgtgtccgcccgccttgaccctccaccccttttctcccttttctgtggtctgcccgctctcctggaatgcagactccagcagtccagggtgttacctcccaggcagcaggaggaaatgtcccaggctcccgacgcagcgcctagcgcccccggctaagtacagcactcactccttcatccattcaatccattcagtgtgggctgtcccagcaccagcaccgccaggccttgtgcagcaaaccagggtcatcagggagggaatgaggcagcccaaggaggcgggagacggggccctctccagcccccagcggtccccaccgacccggttgcccacaggatatcaccgcccccatcccagggcccaccagaaccaacagggagagagaggcaggtgagcaccccccagccccgcgcctcctgtcaaggggactccccagacacaatggtccctggtggcccacggcctctcctccctacacccccatgacctgggcccagggacacagggcccctccccactcctgtcacagccagggcctga

SEQ ID NO: 187 - DNA, 2300 bp, Homo sapien
cgtcagccctgtcccgcaggtgcagtcctgcctggccgcagggagcactggccatgctgagcctggcatgaggctccaaggggacagagccgttggccgcatggacaggctctgcgctcagtgactcaaaggccacctctgggtctggttcccctttctgtctgcctggactcaggtgggcaccagcctccaggtgacctcttcccctgaggtcacagggggaaccaatatctggaggagaaagggacaagaagccctgtggggaagcagcaggcccgagtgccggccggagagtcccagcaccatcccattccactttgcagctagggacgtgggcacaggagaggtctgggcacccaccccgggcaccagaggagccaaggacgagggataagggtcagtcgccaagctcaggatggcccacctggcggtgacaaagtgagaggtgagacagaggtggacgggggccggaggctgacctcaaggcgtcccctgcagggtgcatccatggagatggggttgggacctggcctggggcagccggggccttcctggggcactgtggccatggagagagggtgcagggtgcgggggcatccaggctgcccaagcggaggctgggccggctgtgctggcctcttacctgggtcacacatttggcactgcagacacttgcttaggccattgaggtgggcaatgtaggtgcctggagggcagggttcacacactgtgcccgtcagctccccgcaggcctccttcacacgataacctgccgcccagagagtgggaacttcgcaagtctgcgggaggccccttcgggagcccacccatcactccacccgcgcccagagcccaagcagggagacaccagctaaggggactcaaatggcccatgagccccacgggacacagcagccccatcagccatgagcagagctgctctggggaaaatcggaaagttctggaagcacatggggcctcctgggacacctggcccggctctggtatgtgcccccgagcccatgtctctggccacggtgggccagccacgtctctcagacccaccccctgtgcagtgtgactgtgagggtcccccagggtgaagagtccaagctgctggcctgggggttctgccctcactgtctgcacacctagccccagggcttcatcacacccatggctgtgggggcagagaacacaggggtgtctggggcagaagggggcaagagtgtctgccctcggcccacagagctggcccgccaaagggctgcacctacctggactgcacttggggcagcactcggagcccactgggtactcgtcctccttgcaggacggcagagctggggcgtagcagggggctcccaggaaggtgagatacagcacctaagggggtcaggacaggcattgggagatgccctggctgccctgtgggctctgccaggcttggccccacagcctgaatctccctctgtgcaatggggaggagcggcagtgcctggtagagaggacagaagcgggccccaggccaggctcatggaacaaccttgccgaccgctggagcccgggatagggtggggaccgcccctcctccagccctgatgacgctgcctggcagcgcggagccctgggaactggaactctgccctcgccagggaccccacaccccacacctgggagcattgagcccactgggcagacaacctgccggcccccctgctggcctaggttggacctgctgacccctgaagagccagcaggggcagccagggatgggccccagaggctcacaagccagacagtgggtgacaggctgatcagggccacatcggggagggtggctctgccgtggcctcgttcctgggctggctgatgggcagtcgggggcccctgatggggatagtggctggacaggcaggagtgccacatgagcatggagagtatccccaccccacccacctgggtccagccccctgctgcacactgatcttatcacctgtcaccaaggtcagggctgccggggagttgggtcacctgctcgagggccccgcccagagacgcccagagacacccagcccccagaagtgcccacatccggccaaatgggggctcaccagctgcccgtggacggagtggtgagtgggggacacacgcaggaggaggtctgctgggtagggctgtggctctgctgctcaccccactgtggtgagcccagtgctgggggtctgggttgacccgagagccccaggcagcaggggacgggctggacgccggagccagcaacggccaggacaggggca

SEQ ID NO: 188 - DNA, 2300 bp, Homo sapien
agcaggaaggggccacgggggcactggcgtcgtcacgtgggtcacgaggttccatgtgatgcagggagcgaggccgtcacgagggactcactggtgcctgccttggggctccgggactgtgggctgtctccatccggaggtctccctaccaccaggctctgtggggcagggaagcccagtggggtgcagggagccaggaagctggggtggggtcagggcagggtccacagggagaccgggcgaggctggcagccttcccagtccgcgcagcgtctctgcagggggagcaagagctgcccttccacccctcccaggggacgggtaggggcactctgggcttttcccaccccctcacgcagggacacaggcctggtgggtctatgactgaaattggccagaccgcattctggtggttttattcggaagggaagtttaccctgttcagcagaagctgagatgggaacaggaaacccacagggcccctttattcggcaaaaatgtcagtcagcgccccggggagcagccgagggtccctgagtgtgtgagtgaggtggggaaacacagatggactttggggggctcccccttctacaggaaacccggagtggactggaatggtgcagggggagaactcgcccctcccatcgggcgcctccttcataccggcccttcccctcggctttgcctggacagctcctgcctcccgcagggcccacctgtgtcccccagcgccgctccacccagcaggcctgagcccctctctgctgccagacaccccctgctgcccactctcctgctgctcgggttctgaggcacagcttgtcacaccgaggcggattctctttctctttctctttctcttctggcccacagccgcagcaatggcgctgagttcctctgctggagttcatcctgctagctgggttcccgagctgccggtctgagcctgaggcatggagcctcctggagactgggggcctcctccctggagatccacccccaaaaccgacgtcttgaggctggtgagcccccgagcctcctctccgtctgctcgcagatcccagttctgaccccagggcctcccacagatctcttccccatgcccctgtcctggccgttgctggctccggcgtccagcccgtcccctgctgcctggggctctcgggtcaacccagacccccagcactgggctcaccacagtggggtgagcagcagagccacagccctacccagcagacctcctcctgcgtgtgtcccccactcaccactccgtccacgggcagctggtgagcccccatttggccggatgtgggcacttctgggggctgggtgtctctgggcgtctctgggcggggccctcgagcaggtgacccaactccccggcagccctgaccttggtgacaggtgataagatcagtgtgcagcagggggctggacccaggtgggtggggtggggatactctccatgctcatgtggcactcctgcctgtccagccactatccccatcaggggcccccgactgcccatcagccagcccaggaacgaggccacggcagagccaccctccccgatgtggccctgatcagcctgtcacccactgtctggcttgtgagcctctggggcccatccctggctgcccctgctggctcttcaggggtcagcaggtccaacctaggccagcaggggggccggcaggttgtctgcccagtgggctcaatgctcccaggtgtggggtgtggggtccctggcgagggcagagttccagttcccagggctccgcgctgccaggcagcgtcatcagggctggaggaggggcggtccccaccctatcccgggctccagcggtcggcaaggttgttccatgagcctggcctggggcccgcttctgtcctctctaccaggcactgccgctcctccccattgcacagagggagattcaggctgtggggccaagcctggcagagcccacagggcagccagggcatctcccaatgcctgtcctgacccccttaggtgctgtatctcaccttcctgggagccccctgctacgccccagctctgccgtcctgcaaggaggacgagtacccagtgggctccgagtgctgccccaagtgcagtccaggtaggtgcagccctttggcgggccagctctgtgggccgagggcagacactcttgcccccttctgccccagacacccctgtgttctctgcccccacagccatgggtgtgatgaagccctggggctaggtgtgcagacagtgagggcagaacccccaggccagcagcttggactcttca

SEQ ID NO: 189 - DNA, 2300 bp, Homo sapien
cctggcggtgctggtgccgggagagcccacgctgaatggatgaaggagtgagtgctgtacttagcggggggcgctgagcgctgggtggggagcccaggacatttcctcctgctgcccgggaggtaacaccctggacccctggagtctgcattctgtgagagcgggcaggccacagagaagggagaaaagggacggagggccgaggcgggcggatacggggagcagggagcggggacagggcttactcagcaatcagagaaggcctcaaggaagaggtgacatttcagcaaagacctggcactgtctgtgccctcggtggggcagatgggctcccttcagcccccttgaggcctggcacctggggccctatgtcaggcttggggccttggtgtgggagctgaagtcggggtaggaggggcatggaggaaggggcaggaggggctgagtctcactgatgcctgtgttagtcttgtctcttgccatgcctcagtttccctcctccccagggtggggtggatgagacgactctggaggacgtatctgagagagtggggttggagccccgtaccggcaggtgtaggcgctgtgtctgctcttggaggttgggcgttcttggggagttggtgagggaacgtgctgtccctgcaccctggagcccccatgccctcctggggcccccgggagtggaggatgcaaggggcccccttcttcttccttgcaagacccacatggctctgcatgtgggggacattcctggcagggggcgctgagggccaggatgtgagtgcaccagggaaacagcagatggggctcctctcccaggctccagctgtggggtgggagtccatgctcctgcgtgtctcttgggggcttttcctccactgggtgccacctggtcccccaccctgcctcagagtattggggtctgggctcgtccaccctggatgctggccaggagtgcacctgcctctggagctcgggacgcttggccccacaggacggtgtcgcacaccacagccggcctaacttcacccctgcctgctccctctccagggccggcctgcagggctgcacactttctagttggggtgcaggtccccgggctcctgccacagattcctgtggctggccaccctgccaactctcctgcaggtgagggtgggcgcaatccccaaggtcctttccaccagatgccactgagtcccccaggggccagggctggaccctggagggggtcacctggctgaagtcaggaccaggaggggcagggggcagtcgaggggcagggggcggtcctgggccaggcgtctggcagatgggcttgctggaggtgggggttcctggtgtgcagcaggcggtgccagagggggtgactgggacctgctctgggcaagcacaggcggtgcgtgacagacctgggcttccattgactgcatcacgtccagcagcaggaaggggccacgggggcactggcgtcgtcacgtgggtcacgaggttccatgtgatgcagggagcgaggccgtcacgagggactcactggtgcctgccttggggctccgggactgtgggctgtctccatccggaggtctccctaccaccaggctctgtggggcagggaagcccagtggggtgcagggagccaggaagctggggtggggtcagggcagggtccacagggagaccgggcgaggctggcagccttcccagtccgcgcagcgtctctgcagggggagcaagagctgcccttccacccctcccaggggacgggtaggggcactctgggcttttcccaccccctcacgcagggacacaggcctggtgggtctatgactgaaattggccagaccgcattctggtggttttattcggaagggaagtttaccctgttcagcagaagctgagatgggaacaggaaacccacagggcccctttattcggcaaaaatgtcagtcagcgccccggggagcagccgagggtccctgagtgtgtgagtgaggtggggaaacacagatggactttggggggctcccccttctacaggaaacccggagtggactggaatggtgcagggggagaactcgcccctcccatcgggcgcctccttcataccggcccttcccctcggctttgcctggacagctcctgcctcccgcagggcccacctgtgtcccccagcgccgctccacccagcaggcctgagcccctctctgctgccagacaccccctgctgcccactctcctgctgctcgggttctgaggcacagcttgtcacaccgaggcggattctctttctctttctc

SEQ ID NO: 190 - DNA, 2300 bp, Homo sapien
accttttcagccccccacatcatctagctgcttcctcaaacctcactgttctctgtccaactcagcacacgactgagtctgcttcactgggtcttcacttccttaggagggctcctgagccacatccaactttaatcaaatacactggcatgatgatctgtcttatcttgatttaactcttgggcccagccaggacctcaaaaggatggaggtggagtttttcagcccctacatatgcaaacacacacatagcatgtatctgagcggccacatgggctggccctgctattttcttatggcttctcagcctcccagccaccttctgctctgcatcactggagctgggaggctgcaagctcctttcccactctcctctgcccgttggcttccagtgaggctcctgcagcgatggcgttggtgggagatgccaggcgaggaattgatctcgcattctcgtttctgggaacgtctctgaaaatggctgaatcccgtctgggatcccagctcccaaggaggcggcagcttgctcactgcttgcacagccccagacggcagaggggccctctcctgcacagcctgagacagtggaggggccccctcctgcacagccccagaagatagaggggccccctcctgcacagcccgagacagtagaggggccccctcctgcacagcctgagacggtgggggggggcccttcctgcccagccccagatggtagaggggccccctcctgcacaactccagagggtagagggcccctcctgcacagcccgagacggtagaggggtagccctggtctctgggggctgcactcctgggctctggagctgccacagctcctccctcctagtgcttccccttccttgttttgctttttgccctttctgacatagtgacgacttccgtttcgcagtctggaccttcaccaccccagggcgagggcacaggcgaagcagcagcacccccccggggcctctctttatttggaatacagtgtgggggctcccccttccttctccagcccgcccaggcccctggagctgtcctggggcctggggagtgaggacccgtgccagcagcacagactctgccaggccgggcccgctcaggtgggagcccaggccgggtgaagctgtgacccggccctcaccccaactcggtgacaaaagctatcacagggctgcagtgggggaggaacaggacgcatctgccaggcacctgacccgcagtgcacttctgggagctgtgcttatctccccggggtctatttcgccccaaggtttggcgggttaaaagctgatatgcaaccggcacgacatgaacagtatttcatgattaaagacatcgcgtccatgtataattgagatgctgccgcatttgcggggattttcaagcgaaaaccaggccacgtggaaaggctaagccctcgcacccccccgccccccactgctgggacccccgccccgcgggagaccccggcccgcggtcccctatgcccgcgacccctgcgctcaccctctcccctcaaccctgagtccagcccagtctcgcgcgaggccgcagggagacccccgccgctccctggaccacccctgggcccaccgtacccagccgctccccggcgccccccgggacgaccccgagccggctgcccgcctcccgccgcattccgcacaggcgcaccgcgcaccgagggccgcaccgcccagctccgcctgctgcgccaatggccgacggggtccaagtcggcggcccaacggagaggcggggctaggggcgggaccaggacgcgggacagcaactgtcccgcaaggcccggattgaggaggcgggagggaccgaagcaggcggacccaggatttggcgccgcgatctcgaggcttggcctggagtaggaggggaaacaaggcgggactaggggcgaatccgagggggcggagcagggctcggggtgcggtcgggggcgtggccggggcgcgctgcggccatcttgggggcgggcccggggcggagacgagcccgaaggggcggggcctcggcggcagcaagaaaggcgggaccggggcatctcggggcggggcttggggctggatctatgagccgggagcggggatccaggagcgaggagccgggagcggggaacagggagtcggggagccgggaaccagggctggcagcggccgccatgagcacggtggaccttgctcgcgtgggcgcgtgcatcctgaagcatgcggtgaccggggaggtgaggccgggtggacgcagggcggtgggcgcgtccctggctccttgcc

SEQ ID NO: 191 - DNA, 2300 bp, Homo sapien
ctgggcacttccctcccacggcctgtgacatggggacgacaacactgcccaatacagcagcgaagcccagatcccagcctgggagactctccagacggccagcatcctccaccggggggtgtgctacccccgccatggccatgctgacctccgcccctcggtggggactgccctgcctgggacaggggccccagctggttttcccctgtggctcggccatccggaccttccgtgggcagtccttgtccccagggaccacgtactcctctcgcctggaacttagagtttgggcatcccaggaggagcccttaaaccatgatgcctccaagaccacaggacccaggtgctaggccctagcctcagggggtggcatgggagaccactgaagccctccttctctgggggctgtgtagccccagacagctgctgccccttggagcccgcgatgctcttccaggctcagcctactcagactgtgggctctccgtactggggctggctgcaggaggggcaggagcggccaggcacagtggctgccgtggggccaggcacagtgcagccaggggcatgtgggcagccctcctctgcccctgcccaggccggaacttcgacaagaatggcaacatgatggattggtggagtaacttctccacccagcacttccgggagcagtcagagtgcatgatctaccagtacggcaactactcctgggacctggcagacgaacagaacgtgagcgctgccaccagcacccaggctgcgggggtaccggagccccagccctggccctgagggagagggaagtcagggccggggctgccccaatcctgtctcctgtgcgcaggtgaacggattcaacacccttggggaaaacattgctgacaacggaggggtgcggcaagcctataaggtggggcctggcaggggagggggcgtcagcgcggcaggggagggggcgtcagcgcggcaggggagggggtgccagtgcatcaggggagggggcgccagcacggcaggggagggggcatcagcgcggcaggggagggggcgtcagcgcggcaggggagggggcgtcagcgcggcaggggagggggcgccagcacggcaggggagggggcgtcagcatggcaggggagggggcgccagtgcatcaggggagggggcatcagcgcggcaggggagggggtgccagcacagcaggggagggggcgtcagcatggcaggggagggggggcatcagcgctgcaggggaggggggcaccagtgcctcaggggagggggcgtcaggggctcattcgggacaggtggtgtgcagtgggctgtctggccagggatccccccccgagggcccagctcaggggtccctgagtgactgaggtggtgagcgctcatccgtggggtgtgtgaagggcccttgcagcagcaggacccccacaggggtaggtcctggagccagacctctgctctgccctgagatctgagggttctggagtccaggctggcaggcctgagctcagctcctgtctggtgcctgcaggcctacctcaagtggatggcagagggtggcaaggaccagcagctgcccggcctggatctcacccatgagcagctcttcttcatcaactatgcccaggtggcagccgcagtcctggtcccaccatccccatgcttccccactcatctctggagggcccactctggggcacctccagggaccagagcccagcatggaaggccccttgggggaaaagcatgaggggcagggggcgggagctggacaggatttcaatgctgatgggaggaggggagcacctgctgactcccctcaccccaccctagaaggggcagcctggggatagtggagaccctcccccacccctcctggccaccccaccacgccacctgtagccacgcccccaacatgcccacaggtgtggtgcgggtcctaccggcccgagttcgccatccaatccatcaagacagacgtccacagtcccctgaagtacaggcaagtctcccatgctcacaacccccttgccacccacaaccccctcacccccaccccagtggcctgtaaaagaagaaagcacaaaaagtggctcaacagagacaggtttattttgggaataaacctgagaggggcttctggccgatttcggtcagggacattctcttacagactaagggcatttaagggtttaggaagggggagcctaccgcaggctgcgaatgtttctgtgtgaaggagagttttattgcagagttggaatatctctggctggaggggaggttattctcag

SEQ ID NO: 192 - DNA, 2300 bp, Homo sapien
catggtctatgtgggtgttgggatggtctgtgcgggtgtctggggggacagtctgtgtgggtgtttgggggcatggtctatgtgggtgttggggggatggtctgtgtgggtgtttggggggccagtctgtgtgagtgtttgggggcatggtctatgtgggtgttgggatggtctgtgtgggtgtttggggggacagtctgtgtgggtgtttgggggcatggtctgtgtgggtgttggggggatggtctgtgtaggtatctggggggacagtttattctgtgtaggttgtctggggggatggtctgtgcgggtgtctggggggatggtctgtgtgggtgtctggggggatggtctgtgtgggtgtctggggggatggtctgtgtgggtgtctggggggacggtctgtgcgggtgtctggggagagagtcatctgtgcaggtgtttggggcggctgggttgcactgccctgggcacctgcaaatctgtgagtgtccagtgaccggggtaggtctcggggtctgcagcctccttggcctttagcctcctttcccagtttctcttgtctggcaggtgccaggctaggacccaagcctcctgctgtcacctagaagtagggagaacctgggaataaggggtcccaagtttggcagcccaggtcaccaggtggccttgggccaggctgggggctgctgggctggacaggcctggggttcgggaaggaggagcatgcacagggccagccttggggagtcggttcagagtccagggagcccctgctgagagtaggccaggcccctgcatctgtttctccctctgtggatttgtaccttagagacaagaacactgtgacatccagaaagggcctgctggcaccagggctgtcgggcaggtgggctcggaaaggctctggcctctccccatagcaggagcctccagccaggctggaccctggcccactcccagctccccagaaagggcggtcccagcttcctgcttggctggccttgacattgtttccatttgggccagcaacccaggcagcctgaggccagactgcagctcctgggctggttgctgggcgtgatggcagggggctgctaggacagccagcgggccccagggagagacttcccgggctcagggtggtgtctgggatctgatcccagcctggctgcagctcgaagcctttctcctcccagggcctggccaacctaaagggccatagacaaagcttccaacagcactcagcgtgggagacctggccggggcggccgtgaggagcagtttgccgtgggacccctagctctgtggcccagccctgcccagatgccctgacacatgcccaaggcctgggcaggaggactcgttctggggattctgaaacagaagctagaaacctcatcaggcctggagaatcagacagagactgctctgcccagaacccccgtccgcaagcagggctgggtgcagggctcacactctgatcactgcgaacccttcagaagccacagagcccttctgccagctccccggccagggctgcccaccctctgtagcttgaggtctgaacctcatgagttttctgtgggcagagggaagcagccaaacccaggctagtatctctgggtgggaccctcctggcagccagcgcccacccccttcaggaccaccccttccccttgcaccttggcaagatccccagaacccaccatcctccttggagattgaagagaaagaacacccagggtggggcctttgtaaccccccaccgggtggttaggggcagagcagagggtgtggagtaggacaagggcctgaccttcctcccagcagcccctggggcccctttggactgaaaggtcaggagacagaagcaaggaaggagggcggcttgggaggcggggccagaggccctgagaagggcacccatgaggcagggcagcccgggtgccaagaagctgccctcagcccctccccccatgccacacccccagtggaacctcctgactgtgagcaggagtcaccgcctccagggagcccatgcctgcatcacaaaggaggcccagaagccttcaggcagcctcaactcagccccaagccactgctctcccatcccagtccctggaaatccacccacttggcccagctcaccccaactccaacccactgggacccagtctccaggggcctgactgtgggcggcagccactcctgagtgagcaaaggtgagttgtgctgaaggaaggtacccggcctgctttcctgggccttgaaaccctctccaggccctctcctgggcc

SEQ ID NO: 193 - DNA, 2300 bp, Homo sapien
ccctctgcagagccaggagagagcctcccagatcctgtcccagggcttcaaagggccagccttgtggacagccacacctctgccaggaccccaggttgtgcaggtcagcagggatgggcccacttgtatttcccaggactggcgcctgtggtctcctagttcagcgaggagggaacccttcccgcgcagggtggtccttctgttgtgaatgtggctgcatgggacagccagaaaggcattggaggatgagtcacctcgcagcctgggacctgcctggaagatgaccttcgaggggggcaccatttgcccgtgcacgctatcgaacaggagcggggttgggatggcgcctgcccctggaagatggcgttcaaggggggcaccctctgcccgtgcctgctatcgaacaggagcagggtcgggatggtgcctgcccctgccccgggacactctccgtgtcccccagcacaggcctcaggtgaccttcagcaggacctgcggggtgaccttgatgtgggcagggaggagctccagcgtctgggtcaacaggtttcgaaggaggcctcagggccctaggccgtgcccatgggtcagtgcctccgtccacacctactgcctcagggagcccggggtctctgagacgactgcaagcaagctgtgtggtggctgccacagtttccagagaaatggagatttaagagccacacctgccctggcacgcttttgactcagtttccctctgggggggtcccctctaggaaaatccttcaataatcaagtttttgttgactaccacccagggattagtggggcccacaaaaccacgtgtcaacaagacacatctacaccacacatcaacaacgagtgtaccgcgcgtgtctacaccacccatctatcccatgcatctacacggcacatccatatgcgtctgtacctcgtgtctacaccacatgtctgtaccacgtgtctagactgcccatctacaacatgtgtctacaccaccatcggattaatgcctgctggtgggtcagcagggcaggcaggacacacagagggggccaccagcaggagctgaggggctccaggaagggagtgaccccgggaggcgtcctctgggagaactctggggggccaagctgggctggagcatgattgtggatatgacaggagaggtagaataaacctcacattctccaaggccacctccaacctccttaggaaaaaagtgaagctggttcccaggttggatcccctcccactttctccccaagcggaagacaaagcgggggtctgagtgccgggcgtgcactgttgtgggtgcccttggcctggcccggtgcctccttcctggtcatgctcaggccttgacctttaatggcctggtcacctctgagcattgctctgtggttgtggcctgactgtgtggcagctcatagacacagagaggtgtcacaggctgcaatccaggctacccatgtgaaaccagcaggccatatcttcagggctgttgggttcccaactctatggctgctggactttgttgtgtgctggcacttcagagtctgcagagaggaatgaggggtgctggcctcaagccagagcagagatgtattcctggacaaagggccagcagcccagagggctttgaatagggtctacccagtgggacagacagccaggactaatgggatggagggaggagaaatccctgagagcttcctgggggaatcactattcaaaagcacattctaagtgcctgctgggacagaactgcttacaacacccctccgacctggtgcttggttttcccccttagcaaagggaagtgttgtcaccccagaagttgcagctcaggggccagagaagctggttttctagggtgcacgcaggctgggctgcttctctccactctaaagctaagtctctgcctcagcccacaggcttgtccagcaccgccctaggatgcacttgtctctctctctctctctcacctcaccctgtgggggatgggggactcagagccccacccccagggcctctgaggctcaggacaatcgttgccttggctagattgttacctaggagacaaccccctggccccctggaagaggcctcagcaggcccaggccacctggagggagagcagacctgcggctgaggatgcagggctcccgggcacggtgctagccctgccttgagacaccccgagagctgtgggaagagctgtgggatcccctattgcatcacaaagcggccctggagggctggtctttattttgatgaggctgagaagggaaggctgc

SEQ ID NO: 194 - DNA, 2300 bp, Homo sapien
tctgggcagagagggagtccatggaaactcgatttctccatgagccctgcagactcccagtgtttctaacggctggagacccatgaccaggttaattccttagggaaaaggccgggtttgagagccagaaatgctggtcctgccgtgctggaggaagcatcttattagcgagtaggaggcccccaagccccaggggttccccagaagcccattgagtagcagaactaccatgccggcctgccctccactcccggaatctacaaatgcattcaagggctagagggccccttcgcttggccaggccttgtgccccatgccaactggcagggtcagagcagccccagctgcccctacccccagcccctcaggccccagggagccctgcttcgggccgtgtgtgcaggacaggaggtaggcatggcacctggcaagatggactcacctcaccaggttctttctctcccactttctctcccctcacctcacccctttctctcccactcctctgtgctttttgaacttagccatgggttttcagatacttggcctcaggctctattgaattccaggtcaaggttttactgactccacacccccaccttgttcctccgggtagcaaagaagcacacagcctctggtttaccaacgggctttcctgggagattggaaatgccccaggtgggatccagatcgccagcgctcaccccacccccaatacgtgggccactgagtcaggccaggatgaggctcttgctccccgggcatgttctcctgccccagacttgagcagcaggagccaggagaccacaggggcccttggggatggctgacttggctcccactagacagaggggaacatggaggagggctgcttggaccctatacctcgcaggggactcgatgggggctgaatgctggaaggagcctgcgtttggtctagaatggtgggggtgggtgggagacacaagtcatggaaaaggccatttcttccctattgagacctctgaaatgacccgaagtgggtgcttcctccagcatcatgcctcagccgcacactggggctacaggaatccccccagaccctggggtcaatatttcggggcccctttgaaccttcttctcacccgaggcctgggaaaccttcttgtgccccagaatacttggagaggacaggacacaggtcccagttgtggcccagtggtggcaaggttccattccctgcactgctcaaaggtgggggcctcccaaagccgatacccgattcctggtcccagagtgggtagctgggaggagtggacttcctaggaatgtgagccatgtcgctgatttcgaacaaaccccagatgtgtggaaactgacttattttgattgcaagagggtccttgtcccttgcagatgggcagcttccggggaccggcttgcacgatgccgtggccaccccagtggagaccctctgcccggctttgtgtcctggcgtccccaccagggtgcccagctctcctgcgcagatgtcgggagtatctggatgccccatgggcacttcgagggcccaatccggagttttttgttttgttttgttttaagagattgagactgtgaacctgaactcccttgatctcctcccgttgggcccaggagggagccgaatccaggcccaaccgggctcactgagaaggtgcaggaagcccccaacgactcctactcgtgtgcggcccatactgggccaggacgctgcagtggccgagccgctgggtgtctgcaacggggagctcccccgccgctgggggcaataaacggaatcggtttcacacgctttccctcttgatctaagaacctttaaaaatccgccaacgaatgctgttgcctggatgcgctgcctatgaccttcagccgtgtgttcacgcgcgcccgcagccgtggagtggcggtccctcctgccgcccgcaaccccggggccgccggtctgcgcacaccgggagcaacttcgttacccacagcgcccgcgtcctgcggctcgcgcggaactgcgcgcgggaaggtggcagagcgacgctccagaacgctgcttgcgtagacgctgccgctgccttcagatcccaattcggccgcgcgcgggcggggccctggcagcaacgaaaatggcgagcctcgtagccttccgggcccggcggccacattccgggagtcgccaggtgggagcccgccttccgtgtccccaaacgcccagagcccgggacacgggccggcggccgggtcaccaagccagttcccggaatcggctcgcgccggaatccagactc

SEQ ID NO: 195 - DNA, 2300 bp, Homo sapien
cagcacctcccacccactggggcgagcaggttcagaaccggccttggcggtgcaaagctgcagcggtgccctagttggctaggcagatcaagacctccagagccgggcctgtaaactgagctgttctctgccccaacccctgtagaaagatggtcagggtgtggggagggtgggtaaaggggtcgatagaccctcgaaaggacggcagggaatggggctgtgccattgctcatggcccttctctaggcgacactcacctggtgccagaaacagcagaggtagcggccagtgagcgcttcctccatccggggctcgggcggcgagctggctgcaagactgggcaccctggagccgtgggagccttgggagccgaatctgggttcgaatctgagcagggaagcggtgccgaccgcggaggatccaaggcagaaggcccagcgcaccgccgccgccagctcctgcccaacccggctccgctgggcttttcctctggggtggcgccggccccgcgcccctccccatccggggcgcctctgctaggacaccggggtctcggggtttctcagggctgctgcgtttcacctcctttaacgcggaggcgcggagttgcacgtgtgggtctcagtggagccgccacaggtcttattacacaacaaagggcagggagggcaaggccaggagcctcgcggggcggcgcagagaccccgcatcgcgggcgcgacccctgcctcgggctcaggctgactctgcggcagctccaagtcccgttgccgggcaggacttcggtgctccggaagggtgcggggcagcaacctggccagggcagcgcctcggtttccttccaattcattctcgattcccagatactcagatgagaaatccgcactcaggccgtcaggctcctgggcccgggccaccctgcctgcgctcagcccggcccctccgccgcagcgcctcggagtttgggggctacaggggaagaggaagcgtctggtcggctcccgtccgagctgctccacctgcgccgctggcctttccgcccgctacgcacctgggccccgagaggccagaggggagtgtccccagtggcccgggtccccgaaggtggcccagctcgggcgctcgcgcagccgggtactcaccttgggggcgcggcggcaggagagcgcgggcggagaggtgcgggcgccctgggacgaccagccgaggacgcctggtgtttggacggctgcccccgcgctgtccccccgtgcgaggcgtgttggcctccgtggcctcgcgagggaccgagggcggcgggtccgagtgccgcccgccggcctgggcagtggcggagcgcggagctggcggcgcctccgctgttgtttttgagccgcgaagcccgaagcagcagccgttgggtgggggcgaaggggaggaggcgggggccgggaggcgcgaggggggcggtggggcccggagggggcttcggaggagccgggttctggcgcgcgagccccgacgccccctccagcgatcgcagggcggggacgggggccgaggggagaatgcaggagaaaagcgggccggggcgacggggaacgcaaagcttttaaattagtaatcaaacgcagtaaaacggagcaaaaccagcccggactcgcgtccgaactatcggcgcgtgtgccccgagatccaaggaagtcgtgtggaaaaccgcagccgccgccccatcttcggccccggctggggcgggagcagcagcgcgacgcgccgcgacgcaggggcagggtggggggatagtcacctcgcctccggggccacctgggtccttttaaagtgtccggggtgcgggccccgggcgggagcgccgaacacggaatgttttcttaaagggccagttccgagctgcgctgaaaagggggggggggagaggggggagagataagtgagacgaagaccgagaaggccgaggagagccccccaatcccgcgccgaggcggcggcggcggcggcggcggcgcgacgatgaggatgatgaatacattgcaaagtttttttggccccggcgaggggtgtcagattgagtgctctgtgcgcatgtgcgaaggtgtccaaactgacaatgctggggagatgaagatagtgtgtggctgcttctggactcaaggaggaggagagagattccgcgagccgacaccatgcgatccaaggcgagggcgaggaagctagccaaaagtaagtctcccgcgctcggccgcgccgcgccgccggggcccgggccgccgggccggggcgcccgggccaggggtgcgcgtcgg

SEQ ID NO: 196 - DNA, 2300 bp, Homo sapien
cgccggcccgcgccccctcctccgcccctccccggctcggggtctccctcctctgcgcccggctggcggacgccaaaggcggtgctctagcgcccactatttcaaaagcccggaatatgatttgaccaggactgagagccactcggagagagagagggagagagcgagcggggaggaaaaagttgctctcccctttcgtcaacttttcgctaactttcacttttcgctcccctccacccccggccctccccctccgcccccctccccggcccccaccgcgcgcctcgggttcccgggcccgagcgcctgacactggtggggggggagggggttccgcggggagggggccggcgccttcggggagcgcgcggcccgggcgccccgagcctccgcgccgagcccggtcgccccggagcgcgggaggcggagcagccccccgggccgcgcggccgagccgggggcccggagccgcaggcgcgccggccgcgccccgacgcgcacccctggcccgggcgccccggcccggcggcccgggccccggcggcgcggcgcggccgagcgcgggagacttacttttggctagcttcctcgccctcgccttggatcgcatggtgtcggctcgcggaatctctctcctcctccttgagtccagaagcagccacacactatcttcatctccccagcattgtcagtttggacaccttcgcacatgcgcacagagcactcaatctgacacccctcgccggggccaaaaaaactttgcaatgtattcatcatcctcatcgtcgcgccgccgccgccgccgccgccgcctcggcgcgggattggggggctctcctcggccttctcggtcttcgtctcacttatctctcccccctctcccccccccccttttcagcgcagctcggaactggccctttaagaaaacattccgtgttcggcgctcccgcccggggcccgcaccccggacactttaaaaggacccaggtggccccggaggcgaggtgactatccccccaccctgcccctgcgtcgcggcgcgtcgcgctgctgctcccgccccagccggggccgaagatggggcggcggctgcggttttccacacgacttccttggatctcggggcacacgcgccgatagttcggacgcgagtccgggctggttttgctccgttttactgcgtttgattactaatttaaaagctttgcgttccccgtcgccccggcccgcttttctcctgcattctcccctcggcccccgtccccgccctgcgatcgctggagggggcgtcggggctcgcgcgccagaacccggctcctccgaagccccctccgggccccaccgcccccctcgcgcctcccggcccccgcctcctccccttcgcccccacccaacggctgctgcttcgggcttcgcggctcaaaaacaacagcggaggcgccgccagctccgcgctccgccactgcccaggccggcgggcggcactcggacccgccgccctcggtccctcgcgaggccacggaggccaacacgcctcgcacggggggacagcgcgggggcagccgtccaaacaccaggcgtcctcggctggtcgtcccagggcgcccgcacctctccgcccgcgctctcctgccgccgcgcccccaaggtgagtacccggctgcgcgagcgcccgagctgggccaccttcggggacccgggccactggggacactcccctctggcctctcggggcccaggtgcgtagcgggcggaaaggccagcggcgcaggtggagcagctcggacgggagccgaccagacgcttcctcttcccctgtagcccccaaactccgaggcgctgcggcggaggggccgggctgagcgcaggcagggtggcccgggcccaggagcctgacggcctgagtgcggatttctcatctgagtatctgggaatcgagaatgaattggaaggaaaccgaggcgctgccctggccaggttgctgccccgcacccttccggagcaccgaagtcctgcccggcaacgggacttggagctgccgcagagtcagcctgagcccgaggcaggggtcgcgcccgcgatgcggggtctctgcgccgccccgcgaggctcctggccttgccctccctgccctttgttgtgtaataagacctgtggcggctccactgagacccacacgtgcaactccgcgcctccgcgttaaaggaggtgaaacgcagcagccctgagaaaccccgagaccccggtgtcctagcagaggcgccccggatggggaggggcgcggggccggcgccacccca

SEQ ID NO: 197 - DNA, 2300 bp, Homo sapien
gcccgcaggagctcaggccacctcaagccgcaggaaaggagctctgctcccgcagatagaggtgtgctttctggctggcacactggtgctcggccagagcgctgcccaccctacagcaatgcacagtggctgttaagcttgggggatccacatcttctcccctgccagtaatgtgggaggggaaggcccccagggcaggctgagccacaggctcgggatcccaccacagaggtgcaggaagtgccacgggccgaccccactggcaggcctcccactggcaggcctccccggagtctctctctccttgcgagccccttaggtctccaagctggttccttccaacctctcccttaggcctcatgccagggcgatctcctgcgccagcatcaggccctcatttacagcagaggtgacagaggcacagagaggtcctgacgccagctcaggtgacatccccagcaaagggaccatcccaagcacacgctgagtggcctctggaagccagcaggacatggggagacgaagccagacccagggtggctgaacgggcccagcaggggctggacagaaggtgtggggttgggggtaacttggaggcagctactgaaagagggttttacaggaaagcactcagtgggaatcaggaacctgggtcctgctgactggcctggggcaaggcttctgtcccctcactgggcctcagtgaccccaccgcacctcagtcccctcacgggtcaaggctccgggacaccccagctccctccggcaggccgggcctcgtcggtgcagtacccatcatggactcaggagggcagcagccacctgcctttcccaagagctgcctggaagtggaacctccccacaggcggctccaggtggaggctgcagcccacaggggtcaactcttagctcctccctcatccaccctccctcccaggggatggatggcccacgggacccatccctgaggccagcctgtgccctgcccagatggcacctgacacccaggcagccccagccacagggcagacattgggggactagtgggtggggcgaccagagcaggaggggcagggcaggccgcccctctacctatgacacctgagaaaatgccaagtgacagccccagagcctgtggtgtctcctcaacccgcaacgggatctcacggccgcccaggccagggaggcaggtcctgggaggagggtggtcagtgcctctggctggcacaccggtgcccggcccacgaccccaaggcctggggtcagtgaggggacgctggtagaagctgacccaaagcccagtgtggatgttcacatggaggcctttggcaacaggcctttcctgaaaaggggatgatggaggcaggtcagaagtgggtctgagccctgggacctcaggtcacattcctgaatggccaggcccaagcttgggaggcttggctcagcccccagcccctcccacagcaccaggtggcctgattcctgaacccccagctggggggctgctgcagcctctgcccggggccctccctcactttcacacgggttcccagcaggcggagcaaggaaaggccaggctcggagtccaggctcagccttgtgcacgagggcgagcgccttcctttccaggactcggtccttctctgtgaaatggggatgaccgcgactcaaccacaccaaaaaggtggccagagtgctttgcgccctcttggctgtctttggccgcctggcttccaagaatccagagggccgggcctttctacagcaaacatcggtccccgcagggctggtctccttccccgaaggcttcctggaggaggcagtggagcggggcctggaaggacagtgacgcaggagggagccgagccgctctggccccacgcctggcaggcgactcccgggccggcctcgagggggcgtgggcgcggggagggaaggcgcaggcaccgggcggcggcggctcggcgggaatcgagaggcgcgatccagtccgggcgatcacgtgggctccagccggcccaggtggggctgtgacctgtgacgcaggcggcgccgccacaggtgcccgggacgcgccccgccccctccccggccctccccgcccgggccctcggacccggagcagccccgcccgcccagcgcccacctgcggggccgcagccgccgccctccagccagaccgcgcaggaagcggaggaggcgccccgggccggaccgcgctgccgcaggagcgaagcggctgcaggacaggacaggacccggcgctggaagctgcaccgccagcgcgccgcccctccgtc

SEQ ID NO: 198 - DNA, 2300 bp, Homo sapien
attgaccacatgcctgggtcagggctgctccctgacacgtgtggggagcccctgagcagcagaggggaaagctgggaggcctgagagaccagaccctcggaatccattgctcagtggcctgagggttgcaagtgcccaggggggttgcaagcagcccggggcgtgaaagctcactgtgggcctgaccgctgtggccgagcaatgcgccgtcactcaggaggtgatgtgtagccacaacagccccgcaaagtgcctggaaacagacctctgggcccggctcctggaggccgtgtcggctgggggctctgcacatctcggtcacacggggtccaggccattgaggctctgcctggccacgcgtgcctatagtcatggcagccagggaagacgcagaggcaggtcgagagctggctctccacattcctacctggcaggcacgtatgtcccaaagccagtctcaggactgtgccattcccaaggggcagaagggcagccctgcctcgggtctggaaggaggaaagtgagaaatgggaagcagtagtgtcaggggcagggtgccagccccggaccatgaagggaacagtggggtagagatgggctcgggggcacgcgctgccaggaggggcgggcaggagtgtggcgggggcggggcagcccacggggtgtggggatcgggctacagagatgtctacagggcagctcccgctctctgctggggggtgtacgtgggactgtgggctgccacccctgccaccaccacacctgcccagtggccaggtgtcatactggactctcgggctggtgactggtggggctcctgagaccagaattgtcagctttatgcccagttcagaaacgtggaaaaatgcaagcgtgttgcctggtgtgtggaaaggttccatggacagtccgcgacagtcatatcactgtgtggctaagagaggggaatcacacaggcctgggctcgggccgggagcatgtgggcaaatgcacctgccctccccccaacccagcagagcctggctcaggtgcctggaagaccccaatgaggcagaggctgtggtcactgccgctgtggctgatgccggcctcaggaagccccccagtgcaacgccatgacccttgcgttcaccacgaggaagtggttccaggaggctgcatggctgccaggtgtgagccaggattccaggccaggtcttcagggctccagggccatgcacctgagctgccccacctgcctccaggctcaggaatgtgtcctcagtgcgtgctgcccatcagaggaagcagtgtggcctcccaacctccaaggtccagcctacccccataggctgtgcccacctggtcccttggagctcggagaaccagcgcctgcccagtcccatcctgtgtccagcctccggcctcagacatggctggctcccagtggtcaggactggctgtgccactgatccactgtgctcctggctgcgtcgctgtccttgcctgctgtgtcctgggagctgtactggagccccggccagacatatgcaaaggggtaggggggtggacacccgcgggggcaggggagagcagcctcacgagacctcacttctgcccttcccccaggaccccacagccgcccagcatggcccagcggcactcagacagctccttggaggagaagctcctgggacaccgcttccactcggagctccggctcgatgccggggggaacccagcctccgggctcccaatggtccgtggctccccgcgtgttagagacgatgccgccttccagccccaggtcccggcacccccacagcctcggcccccggggcacgaggagccatggcccatcgtcctgagcacagagagcccggcggccctcaagctgggcacccaacagctgatccctaagagcctggctgtggccagcaaggcaaagaccccagcccgccaccagagcttcggggcggctgtacttagcagggaggccgcccggcgggaccctaagctcctcccagcccccagcttctccctggatgacatggacgtggacaaggaccccgggggcatgctgaggcggaacctgcggaaccaatcctaccgggcggccatgaagggcctggggaagccaggtggccagggagatgccatccagctaagccctaagctccaggctctggctgaggaacccagccagcctcatactcggagcccggccaaaaacaaggtaggggcctgctcgtgtggaccgtggggagggggctgctaggcagaggggcggcctggccgtctccaccaccgtcatcttctgc

SEQ ID NO: 199 - DNA, 2300 bp, Homo sapien
ccagactctggtgtccccgctcccagccttggtggagggcagatccctggaagggcccagtccctgtttccgagctctggacaggagccggcctgcctggatgatagggttcagggtgacctggctgcagtgactggcctgggctccatctgccccggcagctccagacagggactcaggcgggagggactgaagcggggcagctgtgcggtggcctggggcttaggagaagtctgcacattccctctgtacacagagccctgcttccctgcctgctggtggtggctctaggtctggggcatggtggcggcagaccctttgctgggcagggtgtagcctgactgcatgtgtcactagggcccaggggacagagcgtccagctggggctcctgggcccagtgtccctcatcctcggagtcaccatcccctgcggctgggggccaggccttcatttcaggcagccctggagctggaagccacgttcagggagagttgcgtggtacctggacacccacccagccaggactgcgactctggccaccctgcttggtctctttagctggtgggtctgggctcaggcagggctggggtaggggaggcgagctgccctggaaccgcccatcaggaggccctggcagcccgagcaccctcaagaatgcagagcagatgcagggctggccccaggggcgtccttcttgttgggcgccttgctcagacgtgttggaaaacaggccccaagcatatgggctgcctcagtgaaggacgagggcgggggcaggtgctgtgtgacccagatgagttcctgaaccttcctgagccttggcttccccatgtggaagcaaagatcacagccgccctctgggcatcctctgggcagtgtccacggaaggtgtgtgccagagcgtcttcttcactggttgccgtcccagctgcctcctcaggcccagctcctgcccagactgggagtggcagtgccagcctcaggagacgccaagaccacctgtcagaatgtcccatgggcgtccactgcaggccgatggtggctgaggtggggtcccccatgtccccagcaccagccactgtcctcggtcacagctctctcttgtgcctacctgagacgcccaggactcagaaatgcctcagcacctctgccgcaggcccctgcaccccagcagctggaagggccccagcactctctacacccaccaggcccaggcccatggggctccgttcattcattcactgtttatttcatgcagtcagcagacacttctgggcacctgccacatgcttggtgctggggttccaaagtgagcccacgggcatgggcctggttctcagagggcctccagcgcagggagaatgccgagggctgggctgagggcagctcgggggtgctgggagcacagaggagggggctccccatggcctcgggtcagggtagggtcccggaggaaggagggttagcgcagaggcagacaggaggagaggacggagtcggggtgggggaggcaacagctccagccagacctggaggccgaaggggggctgggggagtccttgaggtggggtgcggggcacggggctgagggtgccaggccaggtacagctgggagcaccacacactcccaaccagtaaggggagtttacaggccccaactcgttccgagaaatcagcccctttccttccgggaaccagcatacctgtggcgtcaggaaagtgtggtgtcccagccgaggagggtgggctccgagtcgggcacctgagcgtgggggcttcccaggagcccagccctcccgtcacttctgccatcccggcctcctgctggggcccccagacccatgcttggggctggacactggccaatccttgctcgtctgtcccaccaggtcctagtccccaggggcctgtgtcctgccccactgtcccttcacagccctctcccaacctcacctgccctgccacgggcctgctcgaaactcttctgagcgtcccctcacgatgagttcaacccttcctcctcctccaagcagccctcagtcacgtgtcctgcctgctctgagccctcctcccacctctcttggcctctgcttggcggccgtgaggccctgtggagctgacatctattgggcacagcttcgcatgtggagccgagaggtctctggggtcccagggcagaatcgccgtgggcaacacctgccccggctgacagctgcggtttctgtgtctctcttttgtgcagaagacgctggggaggaaacgtgggcacaagggttccttcaaggacggtgagtgtggc

SEQ ID NO: 200 - DNA, 2300 bp, Homo sapien
gagtaggtgtgtgtgcgtgggcaagggtgtctgtgcatggctgtgtgtgcgtggtcaggggtgtgtgtgagtgggctggccccaaggcccggagggtggctcgggagcatccggcaccctggtgtgtatgcatgggtgtatgtgcatggatgtgtgtgtgggcaggggtgtgtgtgcgtggacaggtgtgtgtgcgtgggcaggggtgtatgtgcgtgggtgtgtgtgcctggccaggggtatgtgtgtgggcaggggtgtgtgtgcatgggcaggggtgtgcgtgggtgtgtgtgcctggccaggggtgtgtgtgcgtgggcaggggtgtgcgtgggtgtgtgtacctggccaggggtgtgtgtgcgtgggcagggatgtgtgtgtgcatggacaggtatgtgtgcatgggcaggggtgtgtgtgcgtgggtgtgtgtgcctgggcaggggtgtgtgtgcgtgggtgtgtgtgcctgggcaggggtatgtgtggtctcgaccctgtgctgctccctatatgcaggaggaccccggagcatcgagtctcctgagcctcagcctcaatgctaacctgaggggcggtgcctctggtcccctcgtgggcttgggtggcgctgggagatgattaggggcctgtagtgcctggcacagggctgccccaacagtggtggttgctggcgcattcttatatcagccccgcccctggcgagtcccacccatctgctgcctgtggggtgcccttgcggaactttggggccctgagggtgggcagggagccgccttgtccctggagacaggggcttcctgtagagctccagggaccagctatgggaaactcccaacctctgactcagcatgggatggggctgggggagggggaggggtctgggatagcggctgcccctcccccagctctgcccccagccaggcaggctttgtgttctctgagctctgtgtcctccggtcccctctgcctcaggcagctgcatgtttgcctctgacctcctcagggctttagattgctgccctggggcgggaagctccggcctcctcccccagctgggcccccgacagctcctggcattcacagtgaactgtctggggaatcatcgctatttggggtaagcggctggtgggcggctctcccagacctttctcagaacctgcagtcacccatatgagctgctgaccggcctggccggcctgggcacgtacgcatgtcgtggccctgctcatccagcaaccgaggcctcccatgacctgctgggtcctcgtccacggggactgcagctccatctgctggggattctcaagggcaagcagctgtcaggacactctccctgcaggaagcgtggctcctgcgtgggtggcaggcccagtcgggccccgtgagcagaggaggagggactcccgcccacctccacgctgggtaagggagtcctccgaaggacagagctcttgggctgggaggacctcctgtggcggcggcctggagacacggatgtggtctcgggttgggtgctctgagggtctgcaggatggacgaggctccagccaccgcctcacacagcaggtgaccatcgtgggtccagccaagcccagccttggtggccgtggccgcccatgggggcagaatcctggcagccctggcctagctctgaccaagtgttaactcccttcatcctgatcaccctggaccaaggcctgggtcatggggaggtgaggggctggtagccccttccagggagtctgccaagagcccacagctggcccccccccggccttgactgttccctcagaacggggtgggggacctagtgaaagtaaacagttcatgaacccagctgggagcttgaccagcagagctgcctcggatttgggactcatccttggaaggggtggccccaggcatcgcccctctttgctcttgtgcctgtcccctgagtctccgtccttgagtttcttcccaggggcaagctggtgcggcagcgggggcccgggcctgtgtggaggcccagtcgttttagctggaaggagcttgaagggcgaagggcaccaactggacagggcaccaggacaggaggtccaaatgggcccgcctttggggacagtccctggggctgcccctggacaacagagggacggcaccagtgcgtgggatcgtggcagggggctctgtaaggagccccaggcctctgaccacttcccacccgccctccctgctgtccagcatcccaggtccgggtcccgccccaagtgcttgctgtgtgctgcctctgggagctgagctcagctcct

SEQ ID NO: 201 - DNA, 2300 bp, Homo sapien
tgggctgaggccctgttgggctgtggctgcggagggcgggaccctcgagcttctgttggcactaactggtgagttgttggcaatgagttgcacattacggtcataaatgatgttgccctgcgtggaaggtgccttcaaacaggcccgtcagcctgtctatccgtgcgatttagaggctcctcatggcaagggctcagaggctgatgggaggggctccccaggaggccccgcagacaggcagggcccaggcaggcccatttctgcagagtgttgggggccaagggggcgggctggcctctggatggcagacaggacggggcaaggtgagacaggctgggactgggtggggcctcttctttcccacgcgctcaaggatggcccctcagcccttgctcccaggtgccctggatcagcagagactgtctctgccacatcttagcactgggcaggcttctgaggggtgggtctcggccagcaggtgggcccctggctgtagtggagagtggagagaaggtggaggctctgccgggatgggccgcctgcttccctgagttgccggggctggagttctgctcaattgaatttgacctgaggacagcatcttagtctgtctgggcctcagtttcctcacctctaaaatggggacagtagccctcccctgcagggaatggtgaggatggcactgcatccccagaacccagggcctggcacagcggccgcagctgaggttggcagtccttcttccccacagctctacccgtggctatgctcctgacctaggcttgcccacatacagggcctgctggcccagggagcatgcaccctcctccttcctgacagctggaaggtatccccaagctttctgtctctgcagtggccccagtcatgtggctttgtgcccaccgctcacctattgtcctctgggaggagacacaggctgcatctctgggaacaggctgagctccagggacacttccactgcatttcggagggagattttcgggccttcctggaaaggccgggaacagtgtgggcgggcgcccagtccttctgtggaccctcaccgccagtgctggaggtggtgctgggctggtcccaggcagggatcactgctgagggtcattgagcaccacagcttgctggtcacagctcttccatctccatggaggctaggagtgggagcccagtgacccccgaccaaggataggtgcgagaaggggctcagagaggatggggggctctggggactctgatccaagccggaatcacagccctggctctcctgcagaggttaagtgcttgacgaggctctaatctgtggttccttctgctgccgaccctgggaggactgcctcccccgggctatgccctcgaggagcgtggggacccagggctctggggttggaagcacctccgtggcctttgcagcctgacacctgggcactgctggccaccctgcaggcaagttctccctgctctctgtccgtcaccacctgctgcagggatgccagctttccctcgcccaggctccctccaagtatggggccctgggccaggggaggacaggacagtgcaggcactggacgtggggactgggggtgtctcagcccatgtttccacatcggtgctgcagcttcaaaccagttccccatcttccccacccttgtcagagttcagccccaccagccgcctctgcaggcccccctcccccgccccgcggcccccctcccccgccccgcggcccggccaggacggctccctttgctgctttggcttcttttccgtgttggctccaagaacacacatgtttgtgcatgtgtgtgcctgtgcgtatgtccgtgcgtgtctgtgtacctcctgtgtgcatgtttgcacacgtgagtctgtgtgcctgtgtctgtgggtcacatgtggatgtctgcgtttgtgcctaggtccctatctgcgtccgggtccgggagcgcgcacgctggaatgcgcggggcgggcgggccggcgcggccccctgggggaggtggggcggggctcggggcggggccgggggcggctccctcggttgtctgcggacttggcctttacctgcggggcggagggaaagctgagaacttaaaggcgaggggcggggcgcgcccggcccagagcggctcccgggcggcgccgagcggagcggatcccggggctgggattgcgcgcccgcccggaacccagaaccagcccgagccgcctgccccgtcgcccggccgccggcttagggcgcagcgcggttggtcctcgccccctcccgcccgccggcctaccag

SEQ ID NO: 202 - DNA, 2300 bp, Homo sapien
tcatctatccctcctatcatttctggaatttatagacatccaagtcactccccatatccacagaaggctcaggcacctggttcagaatcctcattgtcctgccagctcccaccagcagtctgcagcctcggccccagccagtgtcacttcatcccattccctggacatctggttccaggaccacagctccatccttggcgtggtccagaacttgctcctacctctctcccccattctccctctttctcccccccattctctctccctctctttctcattctcccttctcctccctctttctccctccctctctctggaatctctggttccagttgcccatcactgactacagcttgcagctgtccaggtatttctcatctacatccactcagctccctcccggcctctgttcttcctccctcaggggtattctcccactcaccagcacctgttggatccgcggccatttctaaccggactggatacttggacctcaaggtccccgctggtaagatagctgggagacactcgtctgtaggtccctctggcaggtcttgctgggcgtgccaagaacacattgccctgaccactcttttctgggccatttctcacgcctgtgcttgcagtgggcacccttgccggggagacagcctccctgtgggacaaagaccacattggtccacaggatccagggtcctgttttgtagtgcacccgctgtggtgcaacatgcgtctgggcacaccagcgtcgcccgtttcctgttgtagtctttcctctctgactccaggggtattgggtctttctgccagcgcccatgcaactttggcagcctggcctgtctgctggcaagtggggcagaatccctgcactccaccattcttgggcaacactccctctaggattttggcctcccttttctctctggtctttgaccaccgctacccagcaaactcctccatctagaccagccagcattggtttcttccactcccccagctgccgcgtgggaggcgccactgcaaacttccctggggtctcccagctgctcagagatccccatgcccttccctgatcagctccctgcccggttctcatcccggcgattctaaaccgtccatctttacaaatactccgctccatccccactccctgactgaagtaaacagatgtatcctgaactcctcattctccccccatctcactctcctcgcctgtgtgcacctcgcctcgtgtgtcttcctcacctccgagcagagggatctgtcctcctgcccgaaggtaaccctgacccctggactctgcgcctccttcccgcagcctccaccagattgcgggtccgttcaccgcccccctccacacgcgctgggggcacctccgggagctggggctagcgcagggcacacacatgttccacctcgaactgcgagcgctgaccgggatctctgggcagccctctctgtgtgcactggcttgctgaaggctcgcgacagcctgggcccgggcgcgcattccagcactttctaccctccggcttcagagtgcattgctctgtggatccgtcacgaataagccgtgtgtgaagaacgccaggtcccggcagaagatcgctgcccggcgtgcgaactcccccacggtgcaccagggccgccgccctgcatcctccaacctcagctccccggcaccgcgaccctccgtgcagtgcgagcccccgatgggcgcgcgcccccacctgcgctccagaaggccgaagggggcatcccacttgcagggcgggtcacccgctttccccgcgggccaaggggctccaagattcccagcccctccttcccagccgctccgcgacaccctggcaaccggcttcggccccgccccttctcgttgtgtaaacaggaagtgagcctgcgcgtgacggtcgcttccggcccggcgaggggcgggagcgattgtgaacggcggcggggcagagccaatcgcggaaaacggcaggaggagagccaatcccgagggtcggcggacgcgggaaggggcggagccagaggcggggccggcaaggcggagccaatcgcggcggtccgcggggcggggccgggggcgcggccgggtggtggcggtggctgcggcgacggcggtcgcgtcggcgtcagggtcggggtcggtaaggggtgcggcaatgctgcaactgcgggactcggtggactcggccggtacgagccccacggcggtgctggcggccggcgaggaggtgggggcaggcggcggcccgggcggggggcggccgggggcggggacgccgctgcgc

SEQ ID NO: 203 - DNA, 2300 bp, Homo sapien
ccgcgatcttcggcagagctggggacgccggtgccgactctgtgcccgacgcctgcgtttcccccggactccctgctgtcccccagacggcccatctttcctgacacccgggtctctcctggccgccgccactagcgctgggctcctcggcgcgcggggcgcttggaatccaaggggcaggggatgtggccggcggggaacaggggtgaggggcggggaacaggggtgaggggcgccgccccaggcccaggaggaggggaacggctgctttccgccaagcagggcttgccacccacttctcctgtggagccacggtcccgcccggcagaggatcccgcggagagcctctgggggctgctctcccaaccccagccggagtttgggccccacgtccttccaggggtcacccaggacgcgaacactcccgggcggcggccagcaccctgctccctcccccggccgccgcctgtgggctcgggctctggatcccgttcggtgtttggaaggagctcgcgggcgtcggtgcgcttggagttgttctctgcgcgcaccagacctgcgctaggtcaggccgaagctctctaccggccagcgacacccgccgccccgcccgcctgctcctcctaggccatcggggcttccagggccctcgaccacgtacaccaggccctggctaggggacccgacatgctgggcgagttccgagcggctctcagtggcggcgctgcttatggtctgatgcttatggggcccgtgatctggctccgaaccgatgtcctctgcccatggtgacccccacgtcttggaaagtcgcgtcagtgaagcccgtggcttcgcgagcgagccgggctggcgcagactgggttctctggccgcagcgggtccgcgcctgacggggagggtccggctgactcgcacatcttcatggctcacccactgtttgctgggcgcacggggtggggacccaaagacgaatcccatgcagaggtttgggtctagttttggcaacagaaaaggccggcaccgccggagtaggacgcgcgcgcaccaccatccattcggccggggaggttggggcgtccgcggggagcagacccgaggctgggcgcccggaggtacgagcaggaccctggccggctctcagctcccagaacccagggccaggcggggatgtcagggtctgcgcgatctggggggccctagaggcgccggcggggcctggcgcggactactagcggcctgcgggagccaggggtggagggggccgctgtctagggaagaggaccggggtccggagtgggggtgagaacgaggcacgcccctgagcctgcgaaacctgcggaccgagcgcccgcgcaggagctcgctccctctgggcccccaggtcccagacccgcacgattcttcgcccggtgccagcccagatgcgcgcgggtgatgaacgggcggtggccgcgatccacgcgctcgctctgcccagtcagcggcaaattcgttctctccttgatctcagtggcactggagcgtgaggcaagggccaggcggcaggtagaggggtcggactcagcaaaagcaaacaaaaccccaagcaaacgaaataaatacttatacattacatacacgatataatatatgtgcgacagacaccgtattacttattaaagatatatttgtaggtaaacatatatttacatgtaaacatacatttacatataaatataaatatatatatatgcatgtgtacacacacgcagacacacaggtcgctcaattaaatttgaatttcagactagcgagtaatttttccgtattagcatgtcccgtgcaatatttgggaacatacttataactagatttgttgtgaatctgaaattcaaattttactgtgctttctacatttttatcagcagccctagctggaggtgctcaaaggcctcccggcctttgaggtaaggttctcgggtcggaaatccctggtcggaagaaacgtgggcgtttcctttaaagccctgcggcacaagaactacaagccccacaatgccgcgcggaagccggcggcgctgataggctgcagttcacttccgccttctgacttccggcctcggaggccggcgtcggctgttgcagcctgctgcgcgcccaggggtcccgcgggttttcgggcgcagggtggcgcccgcggcaggcggcggccatgaacttctccgaggtattcaagctctccagcttactctgcaagttctccccggacggcaagtacctggtgagcggcggggacctgggccacgggcaggacatcc

SEQ ID NO: 204 - DNA, 2300 bp, Homo sapien
tatatatttatatttatatgtaaatgtatgtttacatgtaaatatatgtttacctacaaatatatctttaataagtaatacggtgtctgtcgcacatatattatatcgtgtatgtaatgtataagtatttatttcgtttgcttggggttttgtttgcttttgctgagtccgacccctctacctgccgcctggcccttgcctcacgctccagtgccactgagatcaaggagagaacgaatttgccgctgactgggcagagcgagcgcgtggatcgcggccaccgcccgttcatcacccgcgcgcatctgggctggcaccgggcgaagaatcgtgcgggtctgggacctgggggcccagagggagcgagctcctgcgcgggcgctcggtccgcaggtttcgcaggctcaggggcgtgcctcgttctcacccccactccggaccccggtcctcttccctagacagcggccccctccacccctggctcccgcaggccgctagtagtccgcgccaggccccgccggcgcctctagggccccccagatcgcgcagaccctgacatccccgcctggccctgggttctgggagctgagagccggccagggtcctgctcgtacctccgggcgcccagcctcgggtctgctccccgcggacgccccaacctccccggccgaatggatggtggtgcgcgcgcgtcctactccggcggtgccggccttttctgttgccaaaactagacccaaacctctgcatgggattcgtctttgggtccccaccccgtgcgcccagcaaacagtgggtgagccatgaagatgtgcgagtcagccggaccctccccgtcaggcgcggacccgctgcggccagagaacccagtctgcgccagcccggctcgctcgcgaagccacgggcttcactgacgcgactttccaagacgtgggggtcaccatgggcagaggacatcggttcggagccagatcacgggccccataagcatcagaccataagcagcgccgccactgagagccgctcggaactcgcccagcatgtcgggtcccctagccagggcctggtgtacgtggtcgagggccctggaagccccgatggcctaggaggagcaggcgggcggggcggcgggtgtcgctggccggtagagagcttcggcctgacctagcgcaggtctggtgcgcgcagagaacaactccaagcgcaccgacgcccgcgagctccttccaaacaccgaacgggatccagagcccgagcccacaggcggcggccgggggagggagcagggtgctggccgccgcccgggagtgttcgcgtcctgggtgacccctggaaggacgtggggcccaaactccggctggggttgggagagcagcccccagaggctctccgcgggatcctctgccgggcgggaccgtggctccacaggagaagtgggtggcaagccctgcttggcggaaagcagccgttcccctcctcctgggcctggggcggcgcccctcacccctgttccccgcccctcacccctgttccccgccggccacatcccctgccccttggattccaagcgccccgcgcgccgaggagcccagcgctagtggcggcggccaggagagacccgggtgtcaggaaagatgggccgtctgggggacagcagggagtccgggggaaacgcaggcgtcgggcacagagtcggcaccggcgtccccagctctgccgaagatcgcggtcgggtctggcccgcgggaggggccctggcgccggacctgcttcggccctgcgtgggcggcctcgccgggctctgcaggagcgacgcgcgccaaaaggcggcgggaaggaggcggggcagagcgcgcccgggaccccgacttggacgcggccagctggagaggcggagcgccgggaggagaccttggccccgccgcgactcggtggcccgcgctgccttcccgcgcgccgggctaaaaaggcgctaacgcccgcggccgcctactccccgcggcgcctcccctccccgcgcccatataacccgcctaggggccgggcagcccgccctgcctccccgcccgcgcacccgcccggaggctcgcgcgcccgcgaaggggacgcagcgaaaccggggcccgcgccaggccagccgggacggacgccgatgcccggggctgcgacggctgcaggtaggaggcccagggccggggggcggttcggctccgcgggcgggggctggagcgcagcgctgggcaggcacctgggctcgcagctccgaagctgggaggtgaggggagagcgatcggggacga

SEQ ID NO: 205 - DNA, 2300 bp, Homo sapien
agcagggagggaacctggaggaggcgctaagggccacgccaagggggtgtggccccagatcccctgtccctgtcctctgcaaggctgggccttgggaacgtttgcagaaagctgggtgccgctctggggcagaggccagtggttttgggtgcttttgagttggaaacgtgtagctcagccgcactgggatccccgcagcctggcccagatgctaagggtggagagatgcggggtctcaggcacggtgccctgggcatgggtggggctcgtgctgaaggcagcctggctgtcttccttcctcacgtccttccacttggcgctctccttttggctatttataaaaccatcaggccggccctgtgcatgggactcgcctgagtctccttttcaatgcatcattccctttggcaggagaggacaccgcctacagaggctgaggatgtgccctgtgggggtcgggagcggaacccaggccccgcctcggccctgctctgagggtctgtccatccctggggagcccgcccccaacccaagaggggtcccaggctcagaagcagaaggcaccctcatccccagggcatccccgatcccagcaggagtctcctagtgctcgccctgggctctcctgcaaggaggctgctgctttccccagaacatccagtctgggccccagccgaccccctgcagggggcttcccagagacgcccttcctgaacctgatctaccagacaaaactgtctttttctcagtcgtctcctcctgagtgctgctgcccttcctgttgggggctgagatcctctgccacaggaagagacgggcgtccaggactcacctgctgcctcccggccctagggccctgagctgggctctccaggccccagccccttggggcacaacacctggaatcgtcctttcgtcctcagcccggcctgctggtggggcagggcgggtccccagggctcctcaggcagctgcagtccaaacctcccctgccctcacccagctctgcccgctctcccgggggtgggggtggggagcgatgaggcccctgccggctctcggtggggacgacagggaggaaggaagctggggagatggagacaagagaaagcaggcaggtggtttgggatttggcaggaaaaggttggaaggaaaggggaaagggtctccgcatggatttctcagctccccatggatttctcagccctcgtgagagccacggcgccctggggactggaagtgtgggtccgcaggccccagtccccaggtttgtctgagcatagatgccctgcctgcttccagggggactcgggcccctctgccagggtcaactttgtacccaagacggctgaaatacaatggaaattcagacggcccaacagggagtggcagtcacctcaaaggccccactagacgggtgcggggcaccactgcagagcccctccctggctgtgccaaggccgtccacgcctgcagggggccccactgccgggctgttctttggcaacagtggcttgtccctgtttcctgggggcttggccagtgccagggtgggctccaaacgcacggctctgggctcttggactcacccctgctttgggcaggcagtggaaggcaggccccacaagagctgctcactcccgtcacctgtctccctcgggggtctagggtcgaacctcctgtgagcccctcctctccatgcagcccttggactggtcctggcggaccaccgagttccccgcgcagggggcaggtgcgccccacctgggtgccaagggaggcgacaccatctctcccccttggggtggcccagccttgcctaccatgatctccagggccggggctcagccctcatgcctgggaacagaggctgctttacggggtgagggcctggggccccccgagccttccccaggcaggcagcatctcggaaggagccctggtgggtttaattatggagccggcgctgaccggcgtccccgccctccccacgcagcctccttggtgcggtccaacacatcaccgggcaagctgaggcctgccccggacttggatgaatactcatgaggaataaaggggtgggccgcgggttttgttgttggattcagccagttgacagaactaagggagatgggaaaagcgaaaatgccaacaaacggcccgcatgttccccagcatcctcggctcctgcctcactagctgcggagcctctcccgctcggtccacgctgccgggcggccacgaccgtgacccttcccctcgggccgcccagatccatgcctcgtcccacgggacaccag

SEQ ID NO: 206 - DNA, 2300 bp, Homo sapien
gtgtagccaagtggccctgctggcaggaacggagtgaatggggtgagggctaggcaaggaggtcccaggcccaaggagcctgggggccacccggaggctttgaaagccgccaggggttggtttggtttgagctcacactcagggggcggaggagaaggacgcagggacaccagtgaggggtattggggggccagtggggcatgatgggcccggaccagggcagcagtatggctggatttgggatattttgaatgtacagcctttgcaatggggtcctggcttcctcccttcactcgagcagctgggtgtgacatgtccaccctgttcatgagcggtgtctccagcagctagagcagcatctatacttgctgtccacagggtgtggacagccacagcaggtaaacgggctcgcgggcagccacccagccttggggtcaggcgcagccactgtgttcaggcctgggctgggcactgcctggtgtttcgcagagctggccggtgctgctcacaggtcaggcctggctcacctttggtgtgtccaggtttggacatgctcttactagtgtagcaaggggagagtttgaccccaggttgttaacgcatgtggagggctctgaacgtattagcggatggtgttgtgtctcagcaaagcccattgccactgcagaagaacgttcgtgaatgttaatgctttgtgtgtttttggaaagttggcaaattttatttatttatttatttactttatttatcttttgagacggagtctcactcctctgacggagtcttaccctgacggagtctcactctgtcgccaggctggagtgcagtggcgcgatcttggctcactgcaacctccaccgctgggttcacgccattctcctgcctcagcctcccgagtagctgggactacaggcacctgccaccgcacccggctaatttgtgtttttagtagagacagggtttcactgtgttagccaggatggtctcgatctcctgaccttgtgatctgcctgcctcggcctcccaaagtgctgggactacagatgtgagccactgcgcccggcctgcaaattttagttttcagttatctgtggcatctgctttaggcaggttttcacacttttcactcgggtatcacattcacagaatgcacacgttcatacatgatacacacagcaaagtgcccgagtcggtgtgttttttacgaactgcacgcacctgtgtggccagcctggagatcacagtcctcggaagtccccgggctcctgtccagcccacacctgaggctgacctctgtaggctgaggaagggagcatcttttttttttttttgaaagagtcttgctttgtcacccaggctggagtgcagtggcgcgatcatggctcactgcagcctcaacctccttggctcaagtgatcctcctacctcagcctcctgagtagctgggactacaggtgtgtgacaccaagcttggctaatttttttttagtattttttctagagattggtttttgccaagtttcccaggctggtcttgaactcctgggctcaagtgatcctcctgcctcagccaaatctcaaagtgctgggattacaggcgtgagccactgcatctgtccctgaggatcgtaatagaatttgactcacagaagcctattctgtgacttggctgggatctgtattttgttcctcaaaattagcaagttaaattctgaagtaagtcataccggaaatgttttcacaatttactttgttgaggcctttttcttctgttattctcgtgcctgagatggtttatagagtggtgttagcagcatggattctggaatgttctaggtctcaaagcacgctcttaacattccactttactcctgcagcgtctctggagtagttgtttgctgcccgccggaggcagcttctgaaatcgtgagggatgctctccgagcagctatgggctgggctggctgaggtgatgtctgcacctgtgcccaggtgtctcagggagaatgggcttcggggaataggcttgcctgcttcatctcctgactcctttgctaggcactttgatccggttttccagttcttgcacaagcaagtttgtgtcagccacgccctggggaggatccactggatcaccgccgtcactgcctgttcccggcggcctctccggcttccctaaagagagcaggtgggcatctgcgtttttgggggaatgcacagcgttgtggcatctgtgtccatgtcacgtggttccctgtgacccagaaccctccaatgcttctcgccagtagcttccctcg

SEQ ID NO: 207 - DNA, 2300 bp, Homo sapien
gtagttgtccctggggccagctgctttctatctctttgtcttgtgcctttatttattacaatctctcatctctgcacacggggagaacacccgctaagccccatagggctggaccctacaagtggcaccagaaaatgtatctgggaagcgaggcagccctggaagtctggccatcgcggggggcaaggtgtgtgtgtgttagctacaggtatctcctgctgcgtcctcatttcccagaacaaggagtgggtgggccagtgtgaagtgagggtggagtgtgaaaggcacacgtgcgtctatttgctacctaggggtcgtgtgagctcggcatccctcccctgggcccacacctcccacaggtgttgtgttcttgtactcacggaaaagcaacctgggccttcagggcctttattgataaaactcgcgcctgtagtcccagctacttggggggctgaggcaggagaattgcttgaatctgggaggcggaggttgcagtgagccgagatcacgccactgcactccaacctgggtgacagagggagactcggtctcaaaaaaaaaccaaaaaccaaaaaccaaaaacaaaacaacaaaaactgagtggaaagtcaaacactaacaagcctaagatttttggttactgtaaaaaaaaaattgtaaattgcaaagtcaattttattttcttaataagaaaataaaaccctcttgccaatcagggaaatcctgtggggagagcggctccacttggagataacgggcccagagaaaccgcctaaggtggggcagtcagcacctgggtgcaggtgcatctgggacccgtcagatctctacgccccgcgcaggctccgcccccacgcccaagaccccgccccgcgcccggagcctccctcgacttggccctgggtctgcaccgaaggccccacccctgccctcgcccagccgcgaccccgcgcttccggatccgggttgttgcgggatctcacaggctttaaaccgcggcgccgcggcgcccgggtgtggatccctagatgggagccggggatgggccgggtgcctggtgggtggcagtcggggctgacggcggcggcactttgccgcctcaggccctggacaccttcaccccgccgcctgcccaggcgggccggccctgcccgtccaccggccgccgagagtccccggccttgggtccccggggccgctgactggcctcggtcacctcccggggaaggctcccgcgcctccatctgcccccgcaggaagggaccctcttctcgcccgcgaggcttctccgggtgggatcgtcctggcccccagccctaagggatccgccccctccgagcatccgccgcccctcggagaccactccagctcggacggacccactccagcccccgctgcacgcggaagcgctcatcctccccgcctgccccgttccctcccccttctcctgtgggacaaccagggaccgcagctccccgctccccaggtgtgggggctccgacacgaacgcctctgctcgcagggcggtgagcgcagatcccacgggtccctcggtcgggggtcgaggctgcttccgtttccatcccggacccgacaatgggcgggaaaaagaaggctttacacgactacgcggcggagttcaccgacctggtggtgaagcacctgattgagcacagtgactctggggacacgtctgtggtggagaccctttactgcagggcctgcgagctgcccgtgcgcgtgcggagggaccgcatcctggaacacctgtcctcgggcaggcagcacggcctgcggacgcccattctcatgtaaatgtcagtgccaacgctggtgtttcaggagtcatcccagcgggctgcgggctattttaggattctctgccctgcaaacgtttccaaagtacgtggacaggccgcctgatgacactacgtttacgggatctgctagtggcttgcctacttagggagtaaaccctgtgaagtctcgcagttttgttaaagtgtgcgtggccacctgaatgctgccttatcacaagccagatacatactggtctgtagggtaactccccactgttgatcctctgagatgattgtggactgggtgctgtgagtcctgccactttgtttaagtgaatgtgtcttttgtccagctcagccgcctcggatctcgctgccaccagccttactgcacacccgtgccacccgcccttgccccgtcagcctcagcctcagctcattctctcaggcagtcccagcattggcacggtacctcctcccgctgtgggccacacgtctctg

SEQ ID NO: 208 - DNA, 2300 bp, Homo sapien
ccgcataagggccgctttagggttccttggtcaagcggtaacgccagcgtctgggaaggcacccgttacttagcagaccatgaaagggaatctcctttccttggaggagtcagggaacactctgctccaccagcttcttatggaaggctggatatcatccaggcctgcccacagtcatccggaggcctaacccctccctgtggtgcttcaatgctcatgctccttgtccactttcatgcccctcccgtactcctggttcctctttgaagttcgtagtagatagcggtagaaggaatagtgaaagtcttaaagtctttgatctttcttataagtgcagagaagaaaacgctgacgtatgctgccttctctctctgccttgcctacctaaaatgtatcctgtaatcacatgacttgcttcaccttgtcaatcacttagaagattcaccctccttaccctgcccccttgtcttgtatgcaataaatatcagcgagcccagccgtttggggccactaccagtctccacgtcttgatggtagttgtccctggggccagctgctttctatctctttgtcttgtgcctttatttattacaatctctcatctctgcacacggggagaacacccgctaagccccatagggctggaccctacaagtggcaccagaaaatgtatctgggaagcgaggcagccctggaagtctggccatcgcggggggcaaggtgtgtgtgtgttagctacaggtatctcctgctgcgtcctcatttcccagaacaaggagtgggtgggccagtgtgaagtgagggtggagtgtgaaaggcacacgtgcgtctatttgctacctaggggtcgtgtgagctcggcatccctcccctgggcccacacctcccacaggtgttgtgttcttgtactcacggaaaagcaacctgggccttcagggcctttattgataaaactcgcgcctgtagtcccagctacttggggggctgaggcaggagaattgcttgaatctgggaggcggaggttgcagtgagccgagatcacgccactgcactccaacctgggtgacagagggagactcggtctcaaaaaaaaaccaaaaaccaaaaaccaaaaacaaaacaacaaaaactgagtggaaagtcaaacactaacaagcctaagatttttggttactgtaaaaaaaaaattgtaaattgcaaagtcaattttattttcttaataagaaaataaaaccctcttgccaatcagggaaatcctgtggggagagcggctccacttggagataacgggcccagagaaaccgcctaaggtggggcagtcagcacctgggtgcaggtgcatctgggacccgtcagatctctacgccccgcgcaggctccgcccccacgcccaagaccccgccccgcgcccggagcctccctcgacttggccctgggtctgcaccgaaggccccacccctgccctcgcccagccgcgaccccgcgcttccggatccgggttgttgcgggatctcacaggctttaaaccgcggcgccgcggcgcccgggtgtggatccctagatgggagccggggatgggccgggtgcctggtgggtggcagtcggggctgacggcggcggcactttgccgcctcaggccctggacaccttcaccccgccgcctgcccaggcgggccggccctgcccgtccaccggccgccgagagtccccggccttgggtccccggggccgctgactggcctcggtcacctcccggggaaggctcccgcgcctccatctgcccccgcaggaagggaccctcttctcgcccgcgaggcttctccgggtgggatcgtcctggcccccagccctaagggatccgccccctccgagcatccgccgcccctcggagaccactccagctcggacggacccactccagcccccgctgcacgcggaagcgctcatcctccccgcctgccccgttccctcccccttctcctgtgggacaaccagggaccgcagctccccgctccccaggtgtgggggctccgacacgaacgcctctgctcgcagggcggtgagcgcagatcccacgggtccctcggtcgggggtcgaggctgcttccgtttccatcccggacccgacaatgggcgggaaaaagaaggctttacacgactacgcggcggagttcaccgacctggtggtgaagcacctgattgagcacagtgactctggggacacgtctgtggtggagaccctttactgcagggcctgcgagctgcccgtgcgcgtgcggagggaccgcatcctggaacac

SEQ ID NO: 209 - DNA, 2300 bp, Homo sapien
aatgttgtcacattggcctgaggtccagcatgtttgaaaatcacatgtattatgctttgtttttacattggtctctgaaacgctgttcaacagactcctcgtctattaaaacactcaagtaaatttctggttcagttaacagaaactcatggtgacaatttgatcgatagcgaagccaatattaaatagaaagcttatcttgggaccgacattcaatctatacaaacaaatcaaagcttctcgtcttgtcacttcatatgaaaatggctagatttcccccagatctagaaggtatgtttggagttggcttaaatgcagaccagtggctgtgggcggagggttacccaggtgccgaggcaagagactgaaggcacaaactgtttcagcataataaagaaaatagttagaataaggatagtcatgatacaaattagatatagagatgatgaacaattatcaatcattattaatcattagcttttaatattactctttgttgcattactaacataatctagtaataaccagcgggtgcagggtcaggtgctgaagggacattgtgagaagtgaatagaaggcaagaggtgagccttctgtcacacccgcataagggccgctttagggttccttggtcaagcggtaacgccagcgtctgggaaggcacccgttacttagcagaccatgaaagggaatctcctttccttggaggagtcagggaacactctgctccaccagcttcttatggaaggctggatatcatccaggcctgcccacagtcatccggaggcctaacccctccctgtggtgcttcaatgctcatgctccttgtccactttcatgcccctcccgtactcctggttcctctttgaagttcgtagtagatagcggtagaaggaatagtgaaagtcttaaagtctttgatctttcttataagtgcagagaagaaaacgctgacgtatgctgccttctctctctgccttgcctacctaaaatgtatcctgtaatcacatgacttgcttcaccttgtcaatcacttagaagattcaccctccttaccctgcccccttgtcttgtatgcaataaatatcagcgagcccagccgtttggggccactaccagtctccacgtcttgatggtagttgtccctggggccagctgctttctatctctttgtcttgtgcctttatttattacaatctctcatctctgcacacggggagaacacccgctaagccccatagggctggaccctacaagtggcaccagaaaatgtatctgggaagcgaggcagccctggaagtctggccatcgcggggggcaaggtgtgtgtgtgttagctacaggtatctcctgctgcgtcctcatttcccagaacaaggagtgggtgggccagtgtgaagtgagggtggagtgtgaaaggcacacgtgcgtctatttgctacctaggggtcgtgtgagctcggcatccctcccctgggcccacacctcccacaggtgttgtgttcttgtactcacggaaaagcaacctgggccttcagggcctttattgataaaactcgcgcctgtagtcccagctacttggggggctgaggcaggagaattgcttgaatctgggaggcggaggttgcagtgagccgagatcacgccactgcactccaacctgggtgacagagggagactcggtctcaaaaaaaaaccaaaaaccaaaaaccaaaaacaaaacaacaaaaactgagtggaaagtcaaacactaacaagcctaagatttttggttactgtaaaaaaaaaattgtaaattgcaaagtcaattttattttcttaataagaaaataaaaccctcttgccaatcagggaaatcctgtggggagagcggctccacttggagataacgggcccagagaaaccgcctaaggtggggcagtcagcacctgggtgcaggtgcatctgggacccgtcagatctctacgccccgcgcaggctccgcccccacgcccaagaccccgccccgcgcccggagcctccctcgacttggccctgggtctgcaccgaaggccccacccctgccctcgcccagccgcgaccccgcgcttccggatccgggttgttgcgggatctcacaggctttaaaccgcggcgccgcggcgcccgggtgtggatccctagatgggagccggggatgggccgggtgcctggtgggtggcagtcggggctgacggcggcggcactttgccgcctcaggccctggacaccttcaccccgccgcctgcccaggcgggccggccctgcccgtccaccggccg

SEQ ID NO: 210 - DNA, 2300 bp, Homo sapien
tactaggcttgttttgtactttagatgcaaaaaactgaagagatttttggatgataaatattttttataaagtcatattggaaaggatggggtcatgaatttctgtggggaaaagaaagagagatcagattgtaactgtgtctatgtagaaaaggaagacataagaaactccatttcgatctgtatgaagaaaaattgttctgctttgagatgctgttaatctgtaactttagccgaaaccctgtgtcacagaagcatgtgctgtattgaatcaaggtttaatggatttagggctgtgcagggtatgccttgttaaccatccgtttgcaggcagcatgcctggtaaaagtcaccgccatcctccattctctattaaccagggacacaatacactgaggaaagctgcagggacctctgcccaagaaagcctgtccaaggtttccccccactgagacagcctgagatgtggccttgtgggaaaggaaagaccttacatcccccagcctgatacccatgaagggtctgtgctgaggaggagtagttaaagagggaggcctctttgcagcagttgagataagaggaagatttctatctcctgctcatccttcggaacagaatgtcttggtgtaaagccgaccattcgttctactcttagataggagaaaaccagcctgtggctggaggcgagatatgctggcagcaatactgctctgttcctctttgctacactgagatgtttgtgtaaagtgaaacataaatctagcctacgtgcacatccaggcacagtacttttccttaaacttattcatgatacagattcctttgctcacgtttcccttctgaccttctccccaccatcaccctgttgccctgccacactcccctcaccaaggtagtaaaaacagtgatccataaatactgagggaactcagagaccagcgccgatgcaggtccttgcatgctgagtgtgccggtcccctgggctgactgttctttctctatactttgtctctgcgtcttgtttcttttctcagtctctcatctccacctgaagagaaatacccacaggtgtggatggggcaggcccccttcaaatttccttcagtcagcaagcagagaagcctttcttcccattcagaccctaatcaaggcttctgaaggtaggggttttgtctttctctccttaaaagatgtcttgaggtaggcatttgaagcctggaaaatcattcccagggagtcaggctactcttatctactcttctaggtatttcttggccaaatgtttctaatcccagagcccaccccctaaaccttttttttttgagatggagtctcactctgttgcccaggctggagtgctctggtgcgatctctgctcactgcaagctccgcctcctgggttcacgccattctcctgcctcagcctcccaagtagctgggactacaggcgcccgccaccacgcccggctcattttttgtacttttagtagagacgggatttcactgtgttagccaggatggtctcgatctcctgacctcgtgatccgcccacctcggcctcccaaagtgctgggattacaggcatgagccaccgcacccagcctaaccttttctaatacaattactgtcttcaagccagcacatggagacatttgagctggactcctgtgtccttgggagctgacttttctttttttcttttctttctttttttttttctttttttcttttttcttttggagatagggtctcactctgtagtccaggctggagtgcagtgacgtgaacacagctcactgcaacctcgacctccccaggctcaggtgatcctctcatctcagcctcctgaggagctgggactacaggtgcacgccaccatgcctggctaattaaaatgtttaactcctgggctcaagcatgcctcccacctgggcatcccaaagtgctgggattacaggtgtgagccaccacacccagcccagaaggcaaccttcaatattgagctttgctcttctcaaaaacctggtgtcacagcactggcctccagcgcatccagccgcgggccccttttgctcaataacggtttctatggagacatctgtgatgccaccactgctcccaggagcccacaggacctggagctctggaagctgatctcctcccactgcaccagccagcaggttcatgttcgaggccatcttcccctccacaccccaagccaggctgaagagagatccacgggaaaagccgggcctgtcctcattcaggtccacattcaggcaacaaagctcacttggtct

SEQ ID NO: 211 - DNA, 2300 bp, Homo sapien
ctggggcctggttcccttcctctgcagagtggggggccctggacagtgcctctcctgcagagctgtaatgtggagagaggtctctgcggccttggtactgttgtctgggggaggggaggaggaaggggagagaaagaggaagagaagagggaagacagaggatggagggagttattcccaccgcacagtagccagggaagagcacctttgcttgcttgccatagcctgacatgaaccagcaacggcccagagaggagaatggaagagaggtggggacaacattccctctgtacaggacagaagggacttgagggacagatgtgacgacctcaaagatctctaggagtctggggctcctcacaactctaagagggctgaagagggggcttagtgcaggcttctgcgggctggtggtgtgcacctgcccccggctccgcattctgtgacttcacttccgtggctgaaaatcagccactgtgggaatattcccaccacagaaactggcaacgccacaaagccgagggttgtttgttttttctccccctggagagccggttgtaagtattcaccagcacacccctgctgcagcaagcctctctggaggaggaggagagggtggcgtcccgggcagctggcacggactgtgcagaccggcctcaaggccaaggtgaggaactgggaaggccacctcgacggctgtgtttcttgtgtagagaattatctcagagagaagcgactactataatcagctgaagcagaaaggcgtcaaagtgccccccctgcaacagtcagaggccttcctgaccagcaaatccaagaaggggacctccaagtaggcccagccaggcccccaaatacggtcagcccagcagaggccggggcccagctccagaaccacccgcccccaccatgcgtcctgctctcagactcagaattaaaccccggtgttggcactgtcccacctttttcttctctgggatccacgcgggggcctactctcctctgcgaccttgagctacaaggacactccccattccaaagctcactcacagggagtcagcacaccagcctgtgcccctagctcctaacaggtccccttgcggcaccaggctgccagaggcctgagccggggtgtccgcccagcactcagcacagacctcacgcctgagcagaaggggtctgtgaccttctgccctgggggctctcctggctggggcactctcttgctggaggacccctctggaagatggtgagggtggggggctctgttcccatccccccgctcctggaaggaaagctttacgcacgggaacggtgtctgtggtccccgacgcttccccggcgcctctgaggctctgggcgcctgaacaccttcggaagggactctccccattacccttctctgctccccacccacacctgcttcccttcccgccgcgagcaccgagcgtgggccacgtgcgggcgccacgcccctcaagccccggaggaggacggtccccgcggccgggtccccgaacccagcattcaggcccagacgcgcccagagcctcccgcagtctcgtcggcgctgcagccgggtccccgcggggctgggaggctcgtggcgtcggaggggctccagcaggggtgaaggaggtcggggaccctggaggccccaagggcgagccgtctgggggcagaaagtgcagccctctgcagaccctgcccggcccccctgcacctcctggccccggggctgggcggcctagagccccggccccttccggacgaggcgtctcccggccccactcgccccgcccccagccccttctggaccaggcgcctccccgctgcggccctagcccttccccgcatggccccgcccccctctcgccccgccccctctcgccccgcccccggccccttctggaccaggcgcctccccgctactggccccagaccttccccgcatggccccgcccaccactctagccccgccaccttccggaccagacacctccccgctgctggctccagcccttccccgcgtggccccgcccccgccctcgccccctgcccaggcccggcccctgcggagcccagagacgcggggacacaggtgaggcgcgcggggtccgggctgcggcttcccggtgcggccgcagtgggcaggtgcgactgtgcgcggcctcgctggctgagaactggcgggggtgggggcgtgccctggactgacccccaccggcctaacccgcggtgcggggccagggccggaactgcccgcccggctccttgcccggctccttgtggctgctggg

SEQ ID NO: 212 - DNA, 2300 bp, Homo sapien
tgagctcacggccgcactgttcctggtgctgcaggctggcgacagcattggtgatacggctcctggtactttgtgaggccacctggattccaggagtagattggctctcgtcccatgtggggccggaagggaggtctgggctggagccaccagtccaacaagtctatcccagcccagcccaccctgtgctgagaagcacagaattgtggcagttctgttagatccgatggacgcgtggctcaggtagtgcccagcagctgggcttggtctcagcccctgccttgtgttcttccccagcaggcgtcactgctgcttagactgccccattctctcccagagggcacgcgagcccttttatttcttttacacatgctgttcctgcttgactgttaagttgtcgcttcctccctgggtctctgttctccctgagggaactcatccagtgcaccctcccatgtctgagccgtgccacccttcccgcttctgagcgccatcccatttctgagccatgctgcccttacccgtgtctgagcagcttgattgcttgagccggaggattccagcaggttccttttttcatttccttcacaacttggggcttgagaaattccatcacccctgccatccattccaggcgaagcaggaggtgtcctctgagtaatcagcccatccccaactctgttcagagtctatcaagtccagccctacctgtctcctccacacccagtgtaactaggactcaccagccacactgaccaagggcgagtgctggcttccagggggcccacatgctgttgcctcctctctgggggcagagccggcaccgaggctgccagagatccccgagggtcaggctttgcatcctgagcagggtcttcctccagccctagaggaagctgggacagaagggtttgctcgcagtgcctgccccaccacccaggcaaggctgtggggcctgggtaccaagccaggaaagagcagagtggaggcggatgggccccttttgcctgaacctgcagcggccgcctcacgtcatggaagtggctgccctcacacgcacgttccctgcgctgcccagaccctgggaaagacatcctaagagtgcatcaggtgccactgtaccccttccatcctttcagtgaggtcacctgcacgttttgccaaagtctgatcagtcacggtcatagaaaacgctttcccgtgggccacggggcttcctgggcatctttgtggcacacggtggtgggcccgatgcacctgtcctgggtcagacgaaggctgagaacccatcgccgttgaagtcggctttcccctttccttcctgcgtgaaccctgagagcactctgtgtgtcactgcgggcaactttgcacttcattatgaagaagaatgctcttagagattttgctgtattttttttttagctcatttaattaaaaaaaataacaccactttggggaacctgcttctcacctgagcagtcctggctaggtcccgacatgaggtcacgtttcacacccagacatcccctgtctcttgtcacctttctgttctctaacgtgatgattgagctgcagggctgctgtggttgttaaagagggtgacatgtttgagtcagaagcttttgcagagatcactgttaaccgtggctgacgccttctcctcggagaggctcctcggatagtgcctttgatgtggggtgcagagctggggaagtgactcaaaggtgaatgacttgtggctccccagggacgcgtccccacagacaggccagtggtggctcttgtgagtgatgagtggtctccctgcctctcgagcatgaccttggactctcttcccagagtccgggcgtctgacgcgtccatgtttctctttgcagacgttggacctctcgaacaaccagctgagcgagatccctgcagagcttgcggactgccccaagctcaaggagatcaatttccgtgggaacaagctgagggacaagcgcctggagaagatggtcagcggctgccagaccagatccatcctggagtacctgcgcgtcggaggccgtggtggcgggaagggcaagggccgtgccgagggctcggagaaggaagagagccggaggaagaggagggagaggaagcagaggcgggaaggtggtgatggggaggagcaggacgtgggagatgccggccggctgctgctcagggtcctgcacgtctctgaaaaccccgtacctctgacagtcagagtgagccccgaggtccgggatgtgcggccctacattgtgggggccgtggtgcgaggcatggacctg

SEQ ID NO: 213 - DNA, 2300 bp, Homo sapien
catgtccaacccctacccctccacatccgacccttcccatcatggcctgaactagtttttcagattaactagggaatgcccttggcccagaggaggggtccactcagatggttggggggcttagaattttattttatttttatttatttattttgagacggagtctcactctgtcgcccaggctggagtgcagtggcgcaatctccgctcactgcaagctccgccctctgggttcttgccattctcctgcctcagcctcccgagtagctgggactacaggcgcctgccaccaagcccggctaattttttttgtatttttagtagagacggggtttcaccgtgttcaccaggatggtctcgatctcctgacctggtgatccgcccgcctcggccttccaaagtgctgggattacaggcatgagccaccgtgcccagcctctagaattttattttttggccaggtttggtgactcacacctgtaatcctagcaatttgggaggttgaggcaggtggattgcttgagttcatgggtttgagaccagcctaggcaacatggcaaaaccccagctctacaaaaaatacaaaaattagccaggcgtggtggcacatgcctgtggtaccagctactcaggggctgaggtgggaggatcactggagccagggaagttgaggctgcaatgagccgagctggaaccactgcactccagcctgggtaacagagcaagactctgtctcaataaataaataaataaataaataagaatttgggggctgggtgcggtggcttgtgcctgtgagcccagcactttggggggctgaggcgagcagatcacctgaggtcaggtgttcgagaccagcctggccaacatggcgaaaaccggttaatataaaaattatattaacacggttaatataaaaattaaccggccacggtggcatgcacctgtagttccagcgggaggctgaggcaggagaattgcttgaacccaggaggcggaggttgcagtgaaccaagatagcatcactgcactccagcctgggtgacagagcgagactccgtctcaagaaaaaaaaaagaattttggttttggtttacaccactcaaaagtgcaggaattccaaaacaagccggtcggggcacagtagagcacagactctggctcctccatccgcccgcaccccaccctgtgaaaggaaaataaatctcaaaaccccacaatcactaagtcaaaggaaaaagtcaagctgggaactgcttcgggcaaatcggcctcccgtcttattcctaaataagatagttacaaatacatatttttaaagctacacacctccctcacaatttgcccacaaagaaattctctgtgggcctcaagatctttaccctaaaacagttctgttgaatttcaccctggcaatgcaaattgatagcttcccttcacaggtgcgagacaaaggactgaactcaaagccatccctctgctcacctagacaaatgcatatctgatcgcttcctttgctctactgtttacgtagaaatgaagattcagtaagccagactaaagcataagcgactattcctctacccgcgtctcacatgcataataaattgtgcagtcagcgaaaggctgaacaaagactcaaaagaatgcaccctccggtctcttctctacctgtgacctgaaagccctctcctggaattgtccagcctttctgggctgaaccaaggtacactcgcacgtgttgattgatgtctcacgtctccccaaaatgtacaaaaccaagctgcatcccaacttccctgggcaccatcgtcacgatctcctagggttgtgacactggcgtgtccttaaccttggcaaaataaactttttacatttcattgagtcctgtctcagatatttttgggttcataacccccaccctcacccctacccgcggagagagcgagccgctctccagcccctccccggctctacgcaggagaggccactctcctctatggcacgcgcggcggcactctagcagccaggtggcttctctatgggcttttccggcacaggtcggaagtggcgcgcgctgccccggaagcaccctggtgggtgggtgcctgccagcagctgaggcgccatggcggcggcagcggtgtcagagtcttggccggagctggagctggctgagcgcgagcggcggcgggagctgctgctgacggggcccgggctggaggagcgagtgcgggcggcgggtgggcagctgccgccgcggcttttcaccctgccgctgctgcactacttggaagtga

SEQ ID NO: 214 - DNA, 2300 bp, Homo sapien
ttttttttttttttttaatacaggttctcgctctgttgcccaggctgtactgctgcagtggcgtgatcatagctcactgtaaccatgaactctcgggctcaaatgatcctcttgtctcagcctcctgagcagctaggactacaggcacatgccaccatgcacagctactttttttttttttttttgtagggatggggtttcactgtgttgtctaggctggtcttgaactcctcccaccttagtgtcccaaagtgttgggattacaggcgtgagccgccgagcctggctagtctctgaacctaaccaacactctctgttacggctcgaagacataaatataggaccttttcagtcaaacagaagggtgtttccagtatgctatactgcccccaacaaatctaaaacaaagtactggcatttaagaaccagctaagagaaatgcacagggactgtggaggcaatgctattacctcagtctggtatttgaaaaggattccttttttagtctaccccctcccaaagaccttccagttgtaccctagggtcccctctgtgtaaaccttcaagtgttacataagatacttggaatgtcactgaaggatgccacttttaggctctataaaaatcaccattaacaatttgggaagaagcaaagctctgttgaacatccagttattggctggtcttcctcaccagaggcatgagggatccctgttgtcccaggggcagccatcgacatcccgacaaatgccagagtacatctctccccaggcagcgatgactccatggcggtctcatccctcactacacttttcctagtgctggcatggtaaaaggcaattaactataaattaaacggaaactcagtgtagcaacttccattttgttacaagactaggaaacaaaacttgtctctgattttctttttaagaagacttttaagtgtgactgcgcgcggtggctcatgcctgtaatcccagcacttcgggaggccgaggagggcgtattacttgaggtcaggagttcgagaccagcctggccaacatggtgaaaccccgtctctactaaaaataaaaaaattagtcgggctactcgggaggctgaggcaggagaatcgcttgaacccgggaggcggaggctgcagtgagctgagatcgtgccattgcactccagcctgggcgacagagcgagaccgtctcaaaggcttatgggtttctgatcaagtcatcttagcgactgaaagggcttcagagaaatctgaacttaagtgcaaacaaaacaaaacaaactccaaaacaaaaaacaaccaaccatcagactttaatctctatagggacagagcaattttcctcaaacttttgctcagcagaacacatctgaaactggccccctatgtgctacgcatccagaagaggaaaagccggatctgaaaacaatattccacgctaaatgggccgtcccggccggggcaggcggtcccagcacccgtgctgagctccccggcatacggcacgacggggccgcgccggctcttcggcgacagcaaggccggcatctaactccacaccgtccgcgcttgcaccgcgcacccaggcttcgtacccagctcccaggtggggaccgcgcccccgcggcgcccgcgccccgcgccccgcgccccgctccccactccggccctgggccggcgccgcagcggcccggaaggtacctgcttagagggaagggccccgactggcgctgccgcggccccggtggagagggcggctgggtcggagcggtgccgcggcccggggaggcggccaggcggcgcctcagcacccggaccccaggggcgtgcgggacccggctctcgtggacttcctcggcagccgccgcttcctcagacggaactcggggggcgccccttccgccgccccaggccgccttgcaccccaagctgctgcggcagtgacagggaagaagcagacccggccacctctgcccatagccccggccgcagcctccactctcatgacaaccaagcccagccctgggccagggcctctgcgcgtgcgcgaccccgccccaccccaggccgcgcctgcgcacaaggggagggctccgctactctggccctcagggttgtgtagtttccggggccacggcacctgggcacaccaggtggcgtcgcgcctttgctttcctgagccttctgagtaaggtaatgtggtgtccgtggggcgacgcctgcgcacaagaccgcgtcgggcctcacttttcccaggccttctgggtaatgtagtttccgggatcggcacccg

SEQ ID NO: 215 - DNA, 2300 bp, Homo sapien
caaacttgagccctgaggacagcatcttagcaaacaccaaccgagaacaatgtgagagcatcccacgaaccaccacctcgtccttccagaagggtgctcagcccagcagaacagaacagcatctcttcctggctccaccttccccatgaaactgtgcaggccccaaccccaaagccctccctctgctcttgggaattgctaggacacctcaaatgaacgcaaataaaattaaaagattttttgaagaaaaagacgaccaattgaacagctgggttcatgaacgagaggactgaggactctgccacctaagcgacgctgaccagttctgcctccagagggcttcctccttgagacccgagagttcacagtaagggggactcttccccaccctgatgggcacctggagctaagcccccaggacctcggagagtgccagcttcccgcccacctccaaagtccttgccactcacagccctgccaggcctggcccaaggtgagcagcaccagctcggcgttgtcgggaacactggggaagtaatcttccgtcagctccgtgccatcctcgtacaggcacagccgggaaccgcgctcagggagctgcagggacgggagaagcaacaggaggaggaagggtctcaagacgagggctttgcatctgcaggcctcacaaacgaccggaatgagctgtgcttaaagaagcaggctcaggctgccgcctgtatgccacagtcgctccaacgcccaggcaaggatgagggagcgggagcaagggcgcctgactgcgggccgttctaaaatacgaagagtcaggaaaaacatacatcagggggtgactgctggctctgcaggattcaccctttttaaatgagctcctgagggcgcttcaaatagagcctgtctttgacagcgccgcctccctgctgccaggagctgaacaccaccatccccagcacacagccgccagagcggtgctggcacacgaaggagaacggttggttgcctctgtgcacaagtgtgaccggcacgtggcactgttaatttgttggagtccggttccctgttactctgcactggtcagttttaggcattttatggctactcccaccccacccgcaccgaccccggcaatgcacacctggtaaccctagtactggtctaaaaagaaaaccaacctagaataaggtgacgattgcaatccccagctgcgagggctggaaggggcctgcagagcccacctagccaagcctttcatgttactcaaggggaagctgaggccggacaggcagagcagccgtgaccccgcgtgccagtacctggcactctacccgggtctcctagctctgatgcagggctgtcctgcccgagaggtgggaagagggaaggggtgatccaggtcgtcccccaacccccctgcgttctgaagccacgctcaggaaccccaggctgcgggggcccggggtcctagcggctgaggcgaacgaaaactacccgccccgggcgccgcctgcaccctccgttttggaagaggaaaagcggcacctcctattctccccacacgcctccccgacgggccgtccccgcctagcccagcgggcacctggaagcggagacagcccttgcgcagcacctcctggcagctccggccagccacgccgaacttcctcgggctgcgcagggcccgcagcttcacgctcttgggcttctggagcattgcagatgtcctcaagccctctgggtcccacaggcggtggcacctgctgcccagctgctcagatccgtcctcgccctggccgcaggggtctgcacctggtgagctctgcaagctggcacaggccgggtgccgatcccggaaactacattacccagaaggcctgggaaaagtgaggcccgacgcggtcttgtgcgcaggcgtcgccccacggacaccacattaccttactcagaaggctcaggaaagcaaaggcgcgacgccacctggtgtgcccaggtgccgtggccccggaaactacacaaccctgagggccagagtagcggagccctccccttgtgcgcaggcgcggcctggggtggggcggggtcgcgcacgcgcagaggccctggcccagggctgggcttggttgtcatgagagtggaggctgcggccggggctatgggcagaggtggccgggtctgcttcttccctgtcactgccgcagcagcttggggtgcaaggcggcctggggcggcggaaggggcgccccccgagttccgtctgaggaagcggcggctgccgaggaagtccacgagagccgggtcccgca

SEQ ID NO: 216 - DNA, 2300 bp, Homo sapien
gttttagaccagcctcgccaacatggtgaaaacctgtctccagtaaaaacacaaaaattagccgggcgtagtggcagcctcctgtaatcccagccattccagaggctgaggtgagaatcacttgaacccgggaggcagaggttgcagtgggccgagatcacacctctgcactccagcctgggcaacagagtgagactctggtctcaaagcaaaaacaacaacaacaacaacaacaacaacaacaacaacaaaactcactttacaagaaacactaaaagaagttcatcaggctgaaagcaagtgaccccagacagtaattcaaaaccacacacacacaaaaacagcaccagtaaaggtaattatgttcttatatagtttaaatgcctattcctctacctccttctcttaatttaaaaagcaattgtatacagtaatatgtgtataatatatacagacatgtactatatttgccaataacaaaacaaagtgggtgaaagcaaacccctgctggctaaggaaatgaccacagacagaaagtaataatgataacacagtactgttgagtttgtaacattatcagatgtaatacatataacaaaataccacaaaaataaccatataagagtaacatttctgtatcacttggaattaacctagtacaaatctgaagcttaagatgtatatggagaatatgaagattaagctgtatacggtaaaacataaagcactggaaaaaacccaaaaaagttgtggaaaaaaaatcattaaattaaaatgctacattaggaaatattcactttaatccacttaaagaaggaacaggggaagaaaaagacagacttgtataaagaaaagaaaaagtaaaatggcaaatgtaaacctaactacagtgtatcaataatattaaatgtgcatgggctaaacaattcaatcaaaaggcagaaactaccagactgcattttaaaaaagatccaagtatatgtgcctacaggagacaagttttggttcaaagataaaaatagtaaaaggagttggaattcacaagtggccactccatttgaacaaaccaggagagcctccatgcagctcagagcctcccaagtggaccgggacccgcgccgggtccactgtgaaaagggtccttcgccttaactgttacacccacgcaatgagcacttgccccttgccagacactggcaccccccttcaatcctcaccaccctcttggtggatccctcatcaccccacttttagcacattcagtagatggggccaagctgaggtcacttgctgtgtgacgtccattggagtggcagcagttgaggggcacaaactcagctctgcagcatctagcactaccaggagttgaaaccagttctggagagggtgccccaccttcctaggaaagtggcccgaaacctcccttcaagggggcgtgacctgggagccccctgttgcccaggacgtgaactgtgagctccacttctcccgagggcgtggaccggagccccccttctcccgcgggcatggcctgggagctccccttctctcgggggtgtggcccagaggccccattctgcgggggtgggtaacctgggagcccccttctcccggggacgtgacctgtgagctccacttcttccgagggcgtggcccggagcccccttttcacaggggcgtgacctggcagccctccttctcccgggagcgtggcctggagccccccaactactgccgggggcgaggcccaagcggaggccgctcctaggccacaggcaccccgtgaccccgccccggttctccagacagcaggtgacccagagtccccgccctgcccggcgcagctgctgccgggacccagccctcaccttccggctcctcatgagtgtgagcaccgcagccaagcaccgcgcgccccggccaacgcgtcccggcggagcggcgacccggagtctgcagagcgcgccgcggcggcgtccgacgtcagcacagccaatcacagtgcagcaccctcgtcatgtgattccccccccccccccccccgtgttggctctttcgtaagcggcgggcgaaggtcacaggccttgggccagtggtgggacactggagcaggaagtcggcctgtggccggccatgttcatgagggcgcgtcccttggcacccctgtagccgctatgtttcccacgcccgtggcaggcctgagagattatgtttgcggggggtgctttttttgtagcttctgtgttcgccatatttgaaaggggcagacggccatgttcgtgaacggcgcttcccttggt

SEQ ID NO: 217 - DNA, 2300 bp, Homo sapien
cctgggagccagccctggactgcgcagccacctgcgggcggagaggggaggggccaggtgtcctcggcctctgatgtggcttccaccctgcgcccttttctgaagacacacatcctagagcccagagaacttgagggctggagggtttaaggcaaggctggatttcatttctatgttgaaattcttaagaacagaacagtgtgccgagcgcggtggctcacgcctgtaatcccagcattttgggaggccgcagcaggcggaccacgaggtcaggagatcgagatcatcctagctaacacggtgaaaccccgtctctactaaaaatacaaaaaaattagccgggtgtggtggcgggagcctgtagtcccagctactcgggaggctgaggcaggagaatggcgtgaacccgggaggcagagcttgcagtgagccgagattgcgtcactccactccagcctgggcgacatagcgagactcccgtcaaaaaaaaaaaagaaaagaaaagaacagtgggcctggcacggtggctcacgcctgtaatcccagcactttgggaggccaaggtgggcggattatttgaggtcaggagttcgagaccagcctgaccaacatgatgaaaccccatctctactaaaaatacaaaaattagccaggtgtggtggcgcctgcctgtaatcccagctactcaggaggctgaggcaggagaatggcttgagcccatgaggcggaggttgcagtgagctgagatcgcgccactgcactccagcctgggtgacagagcgagactccgtctcaaaaaacaaacaaacaaacaaaaaaacccacaacagaacagtggtcctcagctttacaaacacctccctcagcggcggccaaagaggacgcatcacagcagcccaggcctgctaggggcgtgtttgctggaggaggcgtggccgccgtgtgtccatccagacctgatagggcgcggccattggaggaggcgtggccgctgcgggtccacccaggcctgctaggggcgtggccattggaaaaggcgtggcccctgcgagtccacgttggccccggagagtaacgggacggcggaggggtcatttcccgccttgcacgtaacgggggacgaaaaccggcccccagcccgacgccggaccctggcctcctgggcccaccgacggcctccactaaggccccctcccgcccgcaacgtgggggacagctgaggccacttcccgggcgggccaccccaacccaaagcggcatgtcgcggggcagcacagcctgcgacaagcgcgcaaagctccccagcgggaccgcagcacgggcaggcctgggagtccctcgcgctgctcaaggccgctaaccggcactcagaaaccagcgctctgcggcactggagaaagcacttcccgccctcctgcaggctgttagccaggggatgcaaggggaggggcccctcacggacgtcccgcccgcccctctcaaacatggcggccacaggcgcaccaaaggaagagcccctcacaaacatggccgtccgcccctctcatacatggcgccaaagaggcttcaagggaagcgcccctcacgaacatggttgcctgcccctctcaaacatagcggccacaggcgcaccaagagaagcgccccttacaaacatggccgtctgcccctctcaaacatggtggccaaagaggcttcaagggaagagcccctcaagaacatggttgctcccccctcaagaacatagttgcccacctcgctcaaacatggcggccacaggtgcaccaagggaagcgccgttcacgaacatggccgtctgcccctttcaaatatggcgaacacagaagctacaaaaaaagcaccccccgcaaacataatctctcaggcctgccacgggcgtgggaaacatagcggctacaggggtgccaagggacgcgccctcatgaacatggccggccacaggccgacttcctgctccagtgtcccaccactggcccaaggcctgtgaccttcgcccgccgcttacgaaagagccaacacggggggggggggggggggaatcacatgacgagggtgctgcactgtgattggctgtgctgacgtcggacgccgccgcggcgcgctctgcagactccgggtcgccgctccgccgggacgcgttggccggggcgcgcggtgcttggctgcggtgctcacactcatgaggagccggaaggtgagggctgggtcccggcagcagctgcgccgggcagggcggggactctgggtcacctgctgtctggagaaccggggcggggtca

SEQ ID NO: 218 - DNA, 2300 bp, Homo sapien
caccgcagcctggaagctcacccgatgggagaagcttggggaatgttagggctcaccttgctagttttcctcctctcaggaatgtctgtcctttgctgcctggtgtctcatggcctgaaaaccattgcttcatacttttttttgttgttgttttggttggttgggagggtacatccaatctctgttactacacttggccagaagcattagtctctgcctaatcatttaatcagggtgaaaatgtcaggaaaataacactaacatttactgagcactcccaacatgccagatgcagtgctaagaacttcattttttttatctgtagaatcctcgcattgatttgcataagctggtgatattatgacaccattttccacatgaggtccctgagttttgcagaggccatggagctagttagtggtataatcgccactcaagccctggtcagtggggctcttggccacaccgctgtcctgccctattggtgggcaggtgtcatgctgcaataggaagctccaggaggcttttttcaggggccattccaggacaccgagggctgtctttgaatggaatttgacagtactttctgtgggtcttcaaaaacagatgtgacccttctcaagaagcttaaacttctggtgataaccttaatttagtcattaactttttacttccttatcccattgtgtggtcttccattgacttgaatttctcccagggttggacatatgaaggggtcatagaggtctggccacagtggagaccctctaactttacatgtgggggcatttctctggagttagtagcagaaggtccaacatgaactagcttaaccacagagatctattatctcatgtgagcacaggttctgaggcaaggtgggctgcaggcaccatgtgatcagggctgcatctcccttcctttgactctgcctccccttgtcctgaggccccctccctcacggctttaggatggccgcctgcctgctgcaatgagaggagcttgctcattcacagctggtgggagaaggacaggtggagtgaaagtccttctcacctctctgattggccagcctagggcatgtgcctgctcctggacctattagagtcaccagagggagtctgtgtgctgattggctgaaataatccctggcaaggaggatgacatactgtgattggctaattgggatccgtccagagtgagagatgtgctcagcctcccaagtccatgggcagcgcagagaaggggccaatctttttggttttgggtgccaaacccagaactggttcctatagggaaggagggagtggagaaggcaaacagaatggctggcgaagctgtcaaccaggcagaggtggacggtgcagcgggtggagagccaggccttgtcctgggtcctccagcacgtcactgtgggcaacgggcagctcccagaccaggctcccttcctgctcctgcagactgggaggactgcaggactagctgcacaagacaactggcatttctggggtgcatgcttggtgctgcctcagcacgatgtgaaggctgcgtgtgcaccgtcccatcccggagcctcccgacttctcttggggaggggatcatgatcacttcagtttagagataaggaaacaggcgtagagaagttaagaaacttgctccaagtcaaacagctggtgagcaacagagccggtgctgacgcctgtgtccctgggacaggccatgtccctggcagccctaaaccaggacacccacctggctgggacaggaagggcagcgccaggttctggggtctcctccatcccctccctcaggacctgcctagagcagctgactgagaaatcctcaggaggatgtgacgatgactgatgccttcaagctcccactgggcacacacaggcaattcctccatgaaaagagatgaattcacaaaggagaaagtgtataaaatattaagaagacattaagctgaggacacgtgaacccctgggcagcgaatgcaggaggcgggggctgtgcctctggacgctgcagctgggctggagccctctccctgccaccatggaaacagcaatatcagaaagcacagtcctggttagcggcgtgctcgtgccatgtgcctgtcagttctgcaagcatttgttggatgtgaaggttggtgtgatgaccacgctgcccacaacaggtcagtacattcccaggacagtcctgaaaggtgggttctcttttttccattatccaaataaggtcaaggactcagagaagccacataacctagctaggaggagggttcaagctgggtc

SEQ ID NO: 219 - DNA, 2300 bp, Homo sapien
caagataaatggctgaaactagatagaagtgtatttctcgctcatgtgtgaatctggggcagcctttcttgggccagtctgctggctctgccaggaatccaagctccttaattcctagggcatgactggaaccttcatggtccaagatgaagttctcaccaacccctgagtttccaggtagcatcatggagagaaagagggaaggagggtcaaggacaggtatcagctgtatgtattctaagccaccgtccagcatttctacttcttcttttagccagactttttttttttgcaaaggatttggaaattctaagtagcccattctcagacttagagtggacatccagcagtctctaccacatcttccgtatcttatgccaaagttatatatatgcaaatatatatttctggatttttaattctgttctgcatatctagttgcctattcaaatacgatagcccttaattaccatggatacatcttgacagatagagcaatctatctatagacagtgatgtgtcttggatatttgtcccacccaaatcttatgttgaaatgtaacccccaatgttggagatggggcctggtgggaggtgtttgggtcacgggggcggatcccttatggcttgatgagttctttgagatctggttatttaaaagtatgtggtacctccccctacctcactctcttgctctctcccttgccacgtgagacgcctgcttcccttcgccttctgccatgatgaaagcttcttgaggcctccgcagaagccgagcagatgccagcaccatgcttcctgtaaagcctgcagaaccatgagccaattaaacttcttttctttataaattacccagcctcaagtatttctttatagcagagcaagaatgacctaacatagatagaatggtggagatgagcatctaccactttctgtcttcccccccgcatcttcctggttcttcttttcctcttccatatgaattttagtgagaattggtgtatcaagtacgacagcacttttgattgtgaattttattgaatttcattgaaattatagatacatttggggaagtattgacttatttatggtattaccccttctacctatgaagacagtaaatcactccatttattcagtcttcttttatgtccttcaataatattttataactctcttttctagctcatctttccttagatttattcctgggtaacttacagtttttgtggtttgggtaaatctttttttttttttctattacacttttggacgggcttttcttaacatacagaacgacttctgatttttgtatattgattttgaatctagattcacttactagttttaataggtagtagaatgtctttggaatttctctgttgacagtctattcatctgcaaaccacgtcattttgcctttttatcccaatccacattctgtcagttctgttccttacattgaattggccagcacccgcagaaaagtatcaggaaggcactatgatagcagtattctagaaagttcctgatgtccttatcgtttcgtgactctaaagtttcgtcatgaaactcagtgtttgctttttctccttctcctcagcaccttttcccctccccttcctcctcctcttccttttgtgttactctttatcaaataaaggatgtctttgtcttttctctctcgtttcggatttcctaggaggtttctggtttgtcagcattctgttttgtttgcttctcttaccggccgcaaatctgtacagttctgcagcaacctcaattcttgcctcctcagaagaaagaattcgactgaggggcataaggcagagggagaaactgaggcaagttttagagcaggagtgaaagtttattcaaaagctttagagcaggaatgaaaggaaggaacgtacacttggaagaaggccaagcgggtgacttgaaagatcaagtgcgtggtctgacgttttgacttggggttttgtacgtcagcatgtgtccagggtcttgcgtcctttcttccctgactcttcccttggagtgggctgtgcacatgcgcagtgctctgccagcgctcgggagaggagcatgcgcagtgtgtttactggagttgtgcgcatgcttgcttgaggcatttttctcttaaccagcgcaatgtacttaggaggtcatgcgccggttaaactctgccattatgcctcttactgggcatgcttgagcccacgggcccaactcctgagatcccattcggaagctgctgatcaccagtttcaagtgtttctgtttattgggagactgcc

SEQ ID NO: 220 - DNA, 2300 bp, Homo sapien
cggtccggtccggagcccctccctgccctgctggctcctagtgtgcgaagccggccccttccaggcccactccggttgcaggaagggcctccctggtgcagcaccgcctcctcacaccgctaggtggcagcactgccggcgcctccttccccgccggccgccataggccccgctggttccaggacctccctgcctccttcgcctcttaatgggatccgctccctcacacccctcagggagaggctctaggggacgatgacccaggggcggcccggcagggaaactgctgagtcaccctgctgcctctcgggtcctctgaccggctcacagatcaccatagccacagtgtgtgtaaggccttctcatggagccctgcaaacacctccccggggaggggctgtgggacccatcttacagatgaggagaccgagggtcggagaggccacacaactcggccaggaccccgagttagcaagcgctggcccctggtccagccacggcaaggctggccctcctgccaccacacttccctgcctctggccctctgccgggagtcttggtggggaagtcactgtcttcatcctcctgcccgggcagagtccaatcctgtgcctggctcctcaagaccgttggcaaagatcctggaggcctgggggtgaaagggctgcttgggggacttaagccccaagctatggttcgcctgggagactgagccccaagccatggtcctcctggctctgcccttccaccccctcactggctgcccctcccagggaggcctcacctgtgaagtgcttcccgcccctctcaccccccacggctctcacatggcctggggcgattccagagctggcctgggtcaagcacctgcacagagcacagagcgaaggctcggcatggtatatcccccgccccttgcacctttccccagtgaagggtggcaccagtgtcctttccaaggcccggattctgcactgccctcagcctgtggaggattaaaagcagggttttgccgtggtttctcaaggcgtcagcgggtctgcagaggattccgccccatgtcacttctctcagtgaaaggtccccgcccagcgtctgtcctcctttaagtgccccccatttgttttttgttgttgtttttgtttgttttttgcaaatacagactaaccaggtaggcacagaggagtcctggcatgggaagggagcagtgaaacgccggtggagagtccgggaggcccagattccctggaactttccagtgactcctccggagcaagggcctggccaggcagcagctgcgctgggcgatgagggaccgttgggtaattgggggcataggaccgggcttcgctgggttcggggcagaagcgccgaagctccgacccggaacgcggtgacttcatcaacgcagaagcccgcgcagccgagcagaggagtccctcgtaggcgaccctcggacagacgctcctgcgcggcccgcgtggctcagctccgccccaggaaacttttcgcgcagcccccgctccatgcgcccccacccagtccttcttcggggccgccccctccccaaagtagctctccgggtccactgggcgcccccgtaaccgggtcggaacctcgaacggcttcgcgtgccatccggttaccctggcaacaccatccggcggcgcccggcggtccaatcctagcctgcggcctctctcgagcctttcgcaaggtggggaccgggacgcgaccggggatggggaagggggctgcaggaggccccgcctgcgctgtcgcccctgctgggcacagcgccccccaccacccgcggcgaccccggcccccgcaaggtggggcggcgagcaggagccggggccaggccaggggctcgagctcccgttcgaggggcggggaaggcgggtgacgtgagccgggccgggcgggcggagttgggaccggctccgggaggcgggggcgagcgcgcggagaggcagacgcgaggagggaggcggctgagcagcgcgggcggctctgcggcgggcgcggtgggcgcgggcggcggggccccgggatccccgcgcgcctcctccgcgcggcgccgccgccgcgcgtccccacgccccgcgctccacggcgccctcgccccgcgcgcctctcgtgcccgcctcctgccagtctccgggccgcggccgtctgcagagcgagcgctcagacggagcccccgggcaacttgagtggcgccgatcggcggcggagcctctggcagagccccccgacccggcagcgcggaggggactcgcgtccgtccgcgtcgc

SEQ ID NO: 221 - DNA, 2300 bp, Homo sapien
ccatggtattgctcacaaattaggaaaagttgttctttagtttttgttctgtcatttattttccccccaagctttggcacatcctgagacaatgcaaacatccgccactggcatttggccgtctccaggttcctggcactcacctgcatggcgctccagcctgcagctctctctgcgcgccatccggcctcgtccatcccattctccttcaatcactccctcccgctgaggtgggcctcctgactccaggtgagcacagcgtggtgcgagtgcatggtgagggctggcggcggccaacaggcagtggggtggctgctctggtctctgacattctgagctccagagtgagcccaactaaggaggaggtgacggccggggggccctgttggttcgctgatcatgagaacctaggattcccgagggactcctggtatctgctctgtcaactcccagctgctcagcccccttctctgaccatgtgcggcaccctggatgccctgaactctttcctgggtccataagacatcgagccttggaaggaagcgtaatgcaacaaccctcttgtccccgataagagccacagattcaaggcagggctgtgagacccacacaggcacaaacaccagacaagcaagtgcatgcccattccacacccaaaagtctggttctgtaccaacatgacatccgtcaaggtaaatccacacaaaggctgctatttctggatgattgaggcagtgtctgtagacgtgttactttacttttttaaatggttacctgctctcccagacccctcacctgggattgtcgtctaggtaagaggagataatgagtgaaagtgactgggcctcggaaatgcagccccacccacggtgaagtctgcaccagagcacagacttgtcctacttcgggccatatgtataggtaatgcccatgtactttgtgtgtcggtggctgctgatttggcctgatcagtccttctgcagccttggggcagtgtttcaagctagttggtgtcctctttcctctgcttgacccctggaattcagagtctaatagtagacacctcccatcccccacccaaggcctggtcctttcctttgcttgagcttttattcctcaagaaaagaactccaaggaagggtgatgtggtttgttagggttccccagttttcgtccacttccatcttattcctcggagatcccgcaattgcaaaccccctggcagcctcctggcacctgcatttgcctttaaagcttagaaacagctgggaatgcactccttgtacagtccagtccgttttcagacaaagtcgctgctagtcttcacacgcttgatgtcactttgtctgattggaatatgcgtgtcattgctcttgtttccgagtttggcgtgagaaaggcagggttctccaggcatggtcagggagcttccccaccgtttcccattgggctcagattccagccattaccgagacaaatccaagccttctcacgcaacgtggaagcgtggtgacaccctggggtgtgtggaggtggctgctagtgttcctatttactgccctccttgcacacagaagggagaggccacttaggggaccttgtcttctccgtagtatttctagtccttgccaatcttgaacttgagtggacttctcatattacattcagctcccagaaattcactccagtccttcctggagcattgtgaaattagaaacctgaactcatcagcaaaccccacccactctttgaatcgggacaccaggaaacccgttactactaatgtgatcttaccatcttaatcctttctttcaaaaatacgtgactctttcacagccatattttagcgtcaggaaaagccatgcttagagggattggtcttcaaaattttgtgtgtgatgcccaatgtgtaggccatattgaaaggtgaacgcaccaaaggatcgaccctgtcaccttggatggtctctattttgaccctgttgcccatggagaggtattttacccttttgcttctttgctcaggtggtccagggttgtctgtagcccaggaagcggactgaccctgtatcttgaaagataagaccaggaaccgggagtgaggctgggactctcactcagccttttcacggtcagtcttggtcttctcatacttatttcaagatggcaccaggacacaccttcttttgtccacctgttgacaccatcaccctctttcatcaaggtgatctctttcatcagggcatatatgagacttggtgctccaccagactgtcttctcccctacccctgccccttcc

SEQ ID NO: 222 - DNA, 2300 bp, Homo sapien
agctgacgctcgagttatatgccccttttctagtccagttaccgcctccctccccactattctgaagtcaatgtgtgtcttcccatccatgtttaatacctagtgtgcatgtccatgaagaatggatagtgttttttgatctgtttttgcaattttatacaaatagcagtccatacatactctcctgaaagttgctttttcccttcaacaatatcttccagatgaatctagaattgtgtatttctggtcagcagaggatgcgcccccctcaccccccacccaaccccctgctccaaggtgatgctgatgttctggtccaaggcctgcacgtaccatggtgaggcttggggtcttgggacaggtcccttgtcagcccttcctaggaagcacagccagatgaccttggggctggagtcctcacaatgcccctcaccagcagtgtgcacgcccgtcttcactcgtcttcatcaatatttgttaccgtactttctaatattgttcctggatgttgcggtgcagctgaacgtgtgccttgtgtttcccagcccttcgggtctcctcctctgtgaattgctcctggctcatttgtctgttgggtctttggtttctccttgctgacttgtaagtgctattttttttttaggcggagttttgtgcttgctgctcaggctggagtgcagtggcgtgatctcggctcaccgctacttccgcctcccaggttcaagcgattctcctgcctcagcctcctgagtagctggaattacaggtgagtgccaccatgcctagctaattttgtatttttagtagagacagggtttctccatgttggtcaggctggtcttgaactcctgacctcaggtgatccgcctgcctgggcttcccaaagtgctggcattacaggcatgagccactgcgtctggcctattttttttttttaaatgatctgggtatcaatgcttttttggccaaataccttacaaatatattttccctctttgtgcactgtattagtccgttttcacactgctgataaagacatacctcagactgggaagaaaaagaggtttaattggacttacagttccacatggctggggaggcctcagaatcacggtgggaggcgaaaggcacttcttacatggcggtggccagagaaaaatgaggatgatgcaaaagtggaaacccctgataaaactgtcagatcttgtgagacttattcactaccaggagaacagtatgggggaaccgcccccatgattccaattatctcccaccaggtccctcccacaacacaagataattatgggaggacaattcgagatgagatttgggtggggacacacagccaaaccatatcgtgcactgtctttgtcttttaactttattcatagcctcttttgtcagatcaaagctggtgtctccctccaggacacgttctgaaggcataggagctggactgacatttgggagacctgaacctttgttccacttctgccatgacagtttcatgggcccaggcaaatcacggcacctctctaggcctcatttttttattcctgacacagtggaatgacattaacctcggtgcttacctaagggaggagaaatgattcccctgccttctccccatttctgcatttgccacagcatcagatttttgtgtttggccaagaatatagggaaggaagagcaggtaagctttgggcacaaagatcgcatttaggggactcacttaaggaaagaaggtcagggggcagggagaggtggtggagcatgatcttgggccaatggtggggaactaatgaagtgcaatgtgcacgggttagggtgtgtagcagcttgggtcccatcaagagatagaaaccacacagtgggtctaacggggaagtgtagtataaaggattgcaactatgataaaagagtcactgtaagacataaagcaactctgcctggtgccctagtgcagagggaggtacccaaggaagcacagatttgaaaggggttcagatgtcataaaatgtggttcagccatcacataagagacgtttgcggatttggccaggctggagctagtcagcagcttttgcgtaagcactaggcagcactggagtgcagctgagggagtcggccatgagccgctggagtgcaggggagggagctggccgtgagccgctggtgcaggggagggagacggctgtgagacgctggagtgcaggtgagggagccggcggtgagccgctggagtgtaggggagggagctggccatgagccgctggtgcaggggagggagacggctgtga

SEQ ID NO: 223 - DNA, 2300 bp, Homo sapien
agtgacatggctctcggaggcctgagatgcttgtctgttagagcccagctcctacttctcacctccgctgtgtcacctcctgcccctggctggccagcaccctcccacctaagacagatgagcaagtctgttcctcaaattaacatggctttcccgtgacattgagccatgatattgctaccatgagttggattggtgtgaaccgtggcctacccagagtcagggaagtgagttaaaaatgctttttcagaaacattccctacccaagaagtctacagttcatcttagaaattctttgttgcattgatctgggcccacactcttgaggcctcaagtatcactttcagttgtttaactctaaaagggagctgtaaaacatcgccggagaggagtcttgcatgttaagcgtggggagataaatcaagggaggaagcgttatgagaggccaagtgcaaaaagcacattttcagaaatctaaaccagacagacgcttgcagcttcggattggcatccccgggagtctggatggggtgtcagaccatccgggaggagctccagccctcagtgataatggagcgctaagccccccgcgggcgatttccgggtccccgcagaatccaaccctcagcggtaacggagcgctaagccccccgcgggcgatttccgggtccccgcagaatccaaccctcagcggtaacggagcgctaagccccccgcgggcgatttccgggtccccgcagaagcacatttccttcctcctcccacacttgactccttcaaggtcgggctgttacctccactgtgcagctgcagccaggactcaaggagcaaagcgacttgcccagtcacaccccatgtgactctggggacatgcatggagtcaccccagccctcttgagccttagcccttctctggttccattctgattttcaaagaaggaaatacacagataggaggggttcccaggcggcccatgtcctctgggagtgcggtaggacgagagtgtgaaggatggcagtgtctgggacagaaccaggcccccaggtgctggcctggtgatcacatggagggccggttgcctgatcttaggtcttccttgtggggggcaacaaggatgtccctggggaaggtacagccagcacaaagataaagatttgggaagcagcctttattcttgtctgagtctggtctattcttggatccctggcccagtctgcacccgctacatcacaggtgctgttgtaggggctggggaaggagctgtgggtgagaccatgtcctgcctttgctgagctcaccctgtggtcttcccagcagcctggttcagagacaaggagcagggtgagggcctggacagttctcagttgccaggaagggcaagggcacactgtggggaggacagcaggtagaccagaaggacagaccactgccttcagagtcaaagcccgttactggaggcttctggacatcagccacagcaggaagtaagaagcaggctggggatacgagggactgctctggttttaacctgccctttatgactccttgagggcatagacagtgtcctacacaggctgcctggcagcttggagggttctcaccgctgagtgccgccactcagagtgaacctagggggccgtcttgtgcctgacttgcctgggatgctgctgcctgcttgcccatttgaacaccttctggtccatcaccttgatctacagcatggccttggccttggtttccccatctgtgaaggagaaggctgccctacatgccccccgagggctctccttgctggacaatgattccccactcgtgccagacacccgctttatgaccggctgtgcggaagctgtgacggtgccttccccggcggaggacagtgcggtgaccggctgtgcgggagctgtgacacggtgccttccccggtggaggacagtgcggggaccggctgtgcgggagctgtgacacggtgccttccccggcggaggacagtgcggtgaccagctgtgcaggagctgtgatggtgcctttcctggcggaggacagtgcggtgaccggctgtgcgggagctgtgacggtgccttccccggcgggggacagtgcggtgaccggctgtgcaggagctgtgacagtcccttccccggcgggggatggtgcggtgaccggctgtgcgggagctgtgacacggtgccttccccggcgggggacggtgcggtgaccggctgtgcgggagctgtgacggtgccttccccggtgggggacagtgcggtatttatctgatgatgggttccttttctcc

SEQ ID NO: 224 - DNA, 2300 bp, Homo sapien
cgtcactcgctgcgtgtattagtcacagatttaggggccaggctggggtcggcagagcactgtgtgccctgatgtgctgcacatctggttggcagggccccggggaaccacgggacatatttctgaaggtggccagtggtccaagcccggagatcaaagacttctttgtcatcatttactcgtaagtgcacaggctttggggacctggaggcggtggcggaggagaggaggaggcaggcctggggctgctggtggattgaaagtgggcttggccccttcctaaaattgggggagctttcgggccttcgctttgtgaggcgggattctgctgcgagttcagggcccgcaggggtctagggaaggcaccttggaggggcacgtgcagcctgagggacttgggatgcagctcctgccaccaaggagagacaccagtcagcctctgtccccagatagtggcaagggccacccagaagcccctcattacctttttcttgctgagtccctaggctgaacagcatgaatgaagctgtggtccctcctgcggagaggcaggactgtggtggaaatgcccatccctctctcctccaggctaaatgacccggcccctttcccctcccctcctaagtcggatccccaagccctgtgagaatcctttcaaactggtgtgagctcggagatttcctgcagtgcttctgaggatggggcaggggctaacctgcactcagtgcccaccacagaggggccacgtgaccacgtctcagagtggcttcctcgtgagcccatgaagatgcctcacccagccccatttgactgtgaagcagcaggctcttggccctaaaatgctaacaggggcttccgtgctcaggccggcatgacctccagccccaccctgtctcctgcgtggcgctgcccttggcttagcctcagaacccctattgggggtggacacttgtccaggatgtgtgtttggccaaagcgtgccttgtcatttgtttgacatgtggttcctaagcagccctgctgcgccctgagagcctctgctgtgggtgggagatgggcagccaggggtggagccaccaggccctagctctgcctcctggggcctggtcctccggggctttccctgcgtggccccagctctgcctcctgtggcctggtcctctggggctttccctgcacagcctcctgtctgcccacgctcctggcagcccttgttggcctctcgtgggccggtgctgagtcctccgggacaagtgcagatggctcccatcccactgcagggatcgctggctggcgacacccacacagacgtggcaggtctacctccactccctgcagcgcgtggatgtctcctgcgtcgcaggccagctgacccgcctgtcccttgtccttcgggggacacagacagtgaggaaagtgagagctttcacctctcatccccaggagctgaaggtacggcctctctgggggctgttctgagcctctccccaaccccagcctggagacgggcagtgggcattcagctggagcacagtgggtggccctgacagcagcttttccagcgcctccagcgcgcagacgctgttaccagaggcctctcggcagttgcctttcgttagatgtgccattgtggggtgagtgacgtacacaccaaccccaaaggccggtgttcagaattcctggcaaggtgaacagtgacaggagctctggtgttagtgaagccacagttagacggggtgggagggcggcccctggtgccaccagctggccggggttttaagcccaagatggcttcagttctgtctgcggaggcagcgcttagggaatagtcgccgtgtgagaggagggacttgcctggtgtggacccaagtcgcggccacagtcatgtcagggttggttgtggcctcagatttggccgccccggaaccacccatgaccttgggctcccctggctgattgggctgcaggcgcccaggagccccttgcttgcacatcctgagaggctgtgctctgacccgcctctctcgctcttgaagacagaccccaaaggtgtcttcgtgctgccgcctcgtggggtgcaggacctgcatgttggcgtgaggccccttagggccggcagccgctttgtccatctcaacctggtggacgtggattgccaccagctggtggcctcctggctcgtgtgcctctgctgccgccagccgctcatctccaaggtctgtatgtgtggcaggcacaggctgaggggatgggggctcaataccagggcactgcaggacccccacctcggccctgtgact

SEQ ID NO: 225 - DNA, 2300 bp, Homo sapien
aaatccctttggctacaataccactggccatctttatgtacgtgtatatttcaaaacatcagtaccaaccagggctagacactatctgtcagtgcaagatttctgaaggtgcatttgtctttaggtcctttgtgtcctgtgatttacatttacttaaagaattcttctctggataattacagcaccaacttgatagaagcttagatttgtttatttttaatacattaacacttctatttattttagttttcaaaattaaaaacaagtaagtcaaaaatcaaactataaagcaagatatatttggaaggatcttgtttccattcttgccctgccccactctctccttctcagtgtgtgcaggtgtgaagtgtgtgcatgtgtgtgtgcatgcatgtgtgtgtgtgcgtgcatgtgtgggtggtgtgtgtgtatgtgcatccatgtttgtatttgtgcatctgtgtacatgtatggatgcatgcatgcatgtgggtgtgcatgtgtgtgtgtgtgtgtgtgcatgtgggtggatgtgtatgcatgtgggtggatatgtgtgcatgtatgtgtgcattgtgtgcatgtgggtgcgtgtgtgtgcatgtgtgggcggatatgtgtgcattgtgcgtgtgtgcatgtgggtgcatgcatgtgtgcatgtgtgggtgcatgcatgtgggcatgcatgtgtgtgcgtgtgggggcatgtgtgcatgtatgtgtgtgcatgtgtgtgtgtatgggtgcgtgtgtgtgcatgtgtgggtggatgtgtgtgcatgtgtgtgtgcattgtgtgtgtgtgcatgtgggtgcatgcatgtgtgtacatgtgtgggtgcatgcatgtgggcgtgcatatgtgtgcgtgtgggggcatgtgtgcatgtatgtgtgtgcatgcgtgtgtgggtgcgtgtgtgcatgtgtgggtggatgtgtgtgcatgtatgtgtgcattgtgtgcgtgtgtgcatgtgggtgcatgcatatgtgtacatgtgtgggtgcatgcatgtgggcgtgcatgtgtgtgtgtggggcatgcgtgcatgtatatgtgtacatgcatgtgtgtgcatttgtggctggatgcgtgtgtgcatgcatgggtgcatgtttgcatgtgtgtgcacgtgtgcctgcatgcatgtgggtgtgcatgtatgtgtatgtgtatgggtgcatgtgtgggtgcatgagtgcatgcgtgtgtgtgggtgcgtgtgtgtgagtatgcatgtctctgtggttgtgtgtatcttgaaacaaatatagcctttttatcagttgtcccaattaatacctcttcagacaatatggtttttaatgagtagctcttttgaaaccaggaaagtttctatttctaacccctttggtttaggcacagcctctttttgccatctggaatcaaagagcttgtgctgacgtgcttgaccgcgaacttggccctgccaccacccactccaggacctcctggcctgacttgcgcacatgcacacagggtgtcgggaggtgggatcatggcaggagtagttttgacttgggactgcagaccttctccactggcatttaagaagtgtgctgtactcgcgaggaataatggcagtgtggctgcttgggtgccctgtgtgggtgccggcccagaccttgcttagcggtcccctcctggtggagacctgctgctgcagactcagtccctgcctttgacgatgcccgaccttccccgctcatggcagtggagggtgagggggtcttggcaacagtggagatacgtgtgctgtctaaggagggacaagaagctgctcacaagcctcgtgcccatcccaacactcagcgtggcctcctcacaggtcttgttccgagcgagtggtggcaagcccatcgccgtgctctgcctgactgtggagctgcagccccacgtggtggaccaggtcttccgcttctatcacccggagctctccttcctgaagaaggccatccgcctgccgccctggcacacatttccaggcaggtcctgcactgaccctgcagcccacatgttgcaggctcacctgttggaagtagatacctcttgagggtgacagatggcctcatggcttcatgccctggtgctgtcagagcagcacgtggggcctggggaattctctctcctgcctttatggtttgaaacggtgtccctcttgccacctctgagatgactaggtgcgcatttgccggctgagtctgcccttctaaaaaatcccagctcccgcggcccaggtccaggtgtgcctggaggaacacctacctcctca

SEQ ID NO: 226 - DNA, 2300 bp, Homo sapien
ttgcctgccatggattttccaattccatcattccttctctgttgattactggtattttaagtaaggtagagctgtgccttcaccccattcacctatttactttttatatccttatgaacaatgaatttctattttattcattttgttactatcattatttattttgttgctcatattcgtgccctgactaaccagggcagcctcttcaggccagctcctgcgtcctgttgattcacccctgtcctcctttgagtctttccttactgcccagcacagcaagacgccccaggctcagcttgcatttcaggagtgtcagctatttagctcgggttcctttggttggagaatgatatttagaaaccaagatttgagcgttagatgtactcagtactactgggatgtcactgctgctaagtccctctcagcagagacctaagaggtgtatgcctgtgggtgcagatacatacatacacaatatgtgcatatcatgcatatatgatgtatagatatgtgcgtgtatgtgcacagactactgtttctagtgtgctgaagaccatgaatttgcagcagttcttccaacaccaatttaacatcacgggtttcttcctgtttttttccatgtttgtaattctcatttctgctcatgagaaacctagctcgcatttggcttacttatttgcctaatttcctctgtatataaccaatctgctgaccacactggccaaatccctttggctacaataccactggccatctttatgtacgtgtatatttcaaaacatcagtaccaaccagggctagacactatctgtcagtgcaagatttctgaaggtgcatttgtctttaggtcctttgtgtcctgtgatttacatttacttaaagaattcttctctggataattacagcaccaacttgatagaagcttagatttgtttatttttaatacattaacacttctatttattttagttttcaaaattaaaaacaagtaagtcaaaaatcaaactataaagcaagatatatttggaaggatcttgtttccattcttgccctgccccactctctccttctcagtgtgtgcaggtgtgaagtgtgtgcatgtgtgtgtgcatgcatgtgtgtgtgtgcgtgcatgtgtgggtggtgtgtgtgtatgtgcatccatgtttgtatttgtgcatctgtgtacatgtatggatgcatgcatgcatgtgggtgtgcatgtgtgtgtgtgtgtgtgtgcatgtgggtggatgtgtatgcatgtgggtggatatgtgtgcatgtatgtgtgcattgtgtgcatgtgggtgcgtgtgtgtgcatgtgtgggcggatatgtgtgcattgtgcgtgtgtgcatgtgggtgcatgcatgtgtgcatgtgtgggtgcatgcatgtgggcatgcatgtgtgtgcgtgtgggggcatgtgtgcatgtatgtgtgtgcatgtgtgtgtgtatgggtgcgtgtgtgtgcatgtgtgggtggatgtgtgtgcatgtgtgtgtgcattgtgtgtgtgtgcatgtgggtgcatgcatgtgtgtacatgtgtgggtgcatgcatgtgggcgtgcatatgtgtgcgtgtgggggcatgtgtgcatgtatgtgtgtgcatgcgtgtgtgggtgcgtgtgtgcatgtgtgggtggatgtgtgtgcatgtatgtgtgcattgtgtgcgtgtgtgcatgtgggtgcatgcatatgtgtacatgtgtgggtgcatgcatgtgggcgtgcatgtgtgtgtgtggggcatgcgtgcatgtatatgtgtacatgcatgtgtgtgcatttgtggctggatgcgtgtgtgcatgcatgggtgcatgtttgcatgtgtgtgcacgtgtgcctgcatgcatgtgggtgtgcatgtatgtgtatgtgtatgggtgcatgtgtgggtgcatgagtgcatgcgtgtgtgtgggtgcgtgtgtgtgagtatgcatgtctctgtggttgtgtgtatcttgaaacaaatatagcctttttatcagttgtcccaattaatacctcttcagacaatatggtttttaatgagtagctcttttgaaaccaggaaagtttctatttctaacccctttggtttaggcacagcctctttttgccatctggaatcaaagagcttgtgctgacgtgcttgaccgcgaacttggccctgccaccacccactccaggacctcctggcctgacttgcgcacatgcacacagggtgtcgggaggtgggatcatggcaggagtagttttgacttgggactgcagaccttctccactggcattt

SEQ ID NO: 227 - DNA, 2300 bp, Homo sapien
ttgggcagtgatcttggttgtcgagtaggacgggtttggctgggagcttgggcagttatcttggtcgtggagtaggacaggggctcggctgggagcttgggcagtgatcttggttgtggagtaggatgggggtttggctgggagcttgggcagtgatcttggttgtggagtaggatgggggtttggcagggagcttgggcagtgatcttggttgtggagtaggacggctgggagcttgggcagtgatcttggttgtggagtaggacgggggctcggctgggagcttgggcagtgatcttggttgtggagtaggacgggggctcggctgggagcttgggcagtgatcttggttgtggagtaggacgggggctcggctgggagcttgggcagtgatcttggttgtggagtaggacgggggctcggctgggagcttgggcagtgatcttggttgtggagtaggacgggggctcggctgggagcttgggcagtgatcttggttgtcgagtaggacgggggttcggctgggagcttgtgtgttacttgtgttctgtgacctttcctgggggaggcaggcgtcaggacagatggccccacaggctaagcgtctgtgttctcacaggacatcctaggagaactgggtggtgatgggttctgacagatggccaggctgtggggtcacacggttggcggtggcgggctttggtccagctgcagggctgcatcgggagccctgtgtgtttggagggaattcctgcccctgcagcaaacgtgttggtgcgggtgtaacctgtttcatggaaggtgaagaaagcctgcactaatttaacatccaagttgtgccctgatgaaatgcagtgcctttgccgcttgttcccttcttgagtgagcatgcaagtgtaaattcagcttacctggtttattttcccatgtgccctaagtagaaatatagtaagaggaaacggtcatgaagcccagcagggttccgtgtcctgctggtcacacccgctgcagccattgtcatcattaggtgtccttcgagtctgagctccaagaatgctggtcgcctgccccaggcccagttggccttgccacactctccttggtctcttagtacttctcagggtggtgcatagtacaggcttaaaatagaccagtgcccacttcagtcagatgtgggtggaccagaggcctcgtctgcgattcagggaaccattcgctatcagatgaaggtggtcgagaaagctatggagcattctgggctgccccgggtataggatgaacccactgcagcccacagtgaagggaggtgccgggtggaggatgaacccactgcagcccacagtgaatggaggtgctgggtgcctgggaggcccctccttcttggagcaggtcctcgggacgtgacagagagcttgccaggactgccagcccgtgagctgctgcccctgctgtgaattcccgtgggaagaaacacacagcaagaagctgggacaactctgagcttgtgagtgggaaactgaggctttggggctggtggcactttctccccatcatgtggagggcagcgtggcccggagcgtgaacatcggtggcactttctcctcgtcatgtggagggcagcgtggcccggagcgtgaacatcggtggcattttctcctcgtcatgtggagggcagcgtggcccggagtgtgaacatcagtgctggtgcccgcagctctggccctggcacaggcaggctgggctggttcaggctgccgtcccttcctcgccccagcctgcttgtttgtctgccattttcccacatgaatctgggaagtctttgaggaccctgatcgtggcttctttgtagtggtgtttgcccttgaacctggcgccgtggtggagagagtgatgaaagcgttgataagaagcctgagtgcccttctcaccgggagccctgttcttcctgggcttcagaagatacagcccatcatggggcatgaacatctgttcgtgtgaaggagcgctgatctgggttcctttcttagggacgaggatcttgatcctgtgaccacgagttgtcagggccaaaaacggattcctggcaggcgagaggagggtgtttgggcagaggctctgcagcctccactgggagggtgcaggctttaacttgaggggaagctggagacccctgcgaagcatgtgggagcagaggtggccatggcgggcaggacaggagggagggtctgagagcaacagggagaggaccgaaatagcccttgttctaggtgctcgttcccaggaagctggcttggagtgag

SEQ ID NO: 228 - DNA, 2300 bp, Homo sapien
tagcacctacaaagcatttgctgactggcgcagggaaaaaaaaaatggccctgggtgtcaacagggaagcccctaccatgctgctctcgagggatgtgctgcggcccgaacactgtcagtgccactgaggccgagtgtggccgtggagacaatgacaggacctggaggaccaagtgcactcttagggccccacactgcgagagcacagggccaggagctgcacagggctctgcagcagacacggccgccaggcgagaatcaggtgggcagatgtgactctccacacgtaggtccccaaaccctgcaacctgcaacgcggggcctgaatgcggcttccttagcagagcaggagcttactcttggcactgggggaaaggggaggggtgaggctggggtttttgtcggggaggagaagttgcagagaaagaaaaaatcctgaaacgacagacagtgggacagctgtggcctgaacttggtgttcttgctcctcggatgtggatgtattaatttccataaatgctaatagcccacttccccaagagctattacttatgtcatctccccttggacacagttcaacacagggcagacaaatgaaagggaggaaaagacaacccccagtggcggtccccagctcctcagccccctcccaaccaggcagctcaggtctggttcctaaggtggccctgctaaccgcagggtcaagacccctgccttcagctccgtagccaggtccctatcacgacaggaagcaagaaagttaccaaccccaaaaatgctgaatcacaaagtgaggctgagcaggaaagtgggggtggggagggaaggagacggtggccagggaggaaaggtgctaaggggctttccacctggagcaccccgggatgctgcgggcaaagcacagtccctgtaagagcccccaggacaaatgccaggaggagggacaccaggatgcggctggttggcggggtgggaaggtgggcaggtaccccggctgctgctaatgccgcaggacgcggtgcagcagtggggtctttgcatcctgggagcagcagcaggtagggaggtgcggaagtgctttgtgccaaggcctggcaggagggagaagcttaagataggagtaggggctcagggtcagaagtggcggtgtgtgtgctgtaaacagcccgaggaactggtgcaggaagcagggtcacagtcttggggagcagggtaaggtggtgagagcgtgcccgcggggagaggtcggaggggctgggggcagaatgggagggtggggaaagggaccggagcgacacagggacaggcagcgagaacgacggatgagccttgagaagcgatcaggaggagagatggggaggaccgggaacagcagcgccccggtggggctgcgcagaggccgggagaggggatgagaggaggatggaggaaaggggagggcgaggctgctaggaccggagcgggcagagatggggaagaggtgcaccgggaagagggacggcggcaggggcaggggtcagggatgcgagctgaagggtcgggcgggcgggaggacagggaaggaaagacagaaagggatgggggaagggagacgatggagaaggaggtgaggaggctggagaggaggtgagacagcggcggaggcagggacgcagggccggggaagaagagatggagacgggaccgcggcgcctgccgcagcgcgggcctcgcggatacccgccgccgccgtcccggagcagcttggtggaaagcgcgccccgccggggtctccccggtactcacctgggggctccagctccggatcctgtgccccgcgccggatcttccttcccgccctgcccctgcgactttagcgcccccgaatcccgctagctcctgcaggttccgccagcagcatcttcacctcgtgggacgcccggggccacgcctcttccagcttctgattggctattgttcacgccagtcacattaccattggttgaggggtcgtcggacatgcaaatcaggatgggcccgccgccgcaccgattggctggcgctcgcaaagcgcagccctcgacttgggctctgattggctccgcggccctgacggcgacagtgacgcgaggcgggttcttggactgagtgtgcggcgcggtgcgccgccttccgaggctcctcccgcgggtggcagcggacggggcgcgcccctcggccagtcctcggtcctcaggcttgtggctccgttgagcaccggccgccgggcctctgggtccgtcgagtggagactctctgaaaagcgtgggctccgtggcctc

SEQ ID NO: 229 - DNA, 2300 bp, Homo sapien
gcgtgagacaccatgcccagctgccaggctaatttttaaattttttgttagagattgggtctcactatgttgcccagactggtctcgaactcctggcctcaagcaatcctcccaccctggcctccaaagtgctgggttacaggtgtgagccaccgcacccagccagtagtgtcttttaaatgaagtatctctaattttgccactcagcatttaccagtcacctgccttcctggtccaaagaaactttttaaaaaaagagttggcaaatatctgaaaatacaatttatttttaagagccaggaatgaagctgaggtttgagggctggttcagtgtgtctgaaactgcgaagcagccagtgaggttactttcgcatcccctagcttttacctctgctcgtgagattcagcatctgcagctgtggtctgtgatagccgtgaatacagtctgtgtttggagacccacagagtcagggcaacatctccgtgctgggggccaagaggataacggctgttctctggctctgggaggcagcagaggtcacctgtccagagccagagttccatggggggctccagggcaggaggtcaaggtatgtgtgaggaaagaaccccaatttcgagctggacacacctaggctctggttccagctttgccactaatttcaccaagcgaccttggatgttatttaatattcttgggcctcaatttccccatctgtaaaaagcatgtcatagtcagggttgggagcaaggcccagagctggctcaacatgggttgctgtcccccagctctccgtcatggcgcctcgctctttctttttcattttcccattcgttcgccttcctccttctcccttctccctcctgtttgtctctcgacacctctactttcctagtgagcacccagactattttattttcccttccttttcctctttctacctcccctaaccactgtctttatctttatcctgccgggaacacacagcagcacccctggtgtaggcttcagagctgtgtacctatgccaggagagggggtgccagcctccctcctggaatcacacacacgggtgtggcctgggaccagggactcaacacggtgcaggtggctggcaccatgggagatggaatgttccacccgagtcctccctttgcctggtaccccaaagagcttgggctgtgcccagagtgagtcaccagagagcctggccccaggctcagcagctggcgtaggagggaggaggggcctccccaagaaggaatgaggggcctccccaagaaggaatggcagagcagggagaggccgcggggagggagaaaaaccccgcagagggtgctcttacctctggcccgtcctccccagggccacctgtcccctcaaggcggctgccccctctgtgtcctggcacaaagttgggagatggagtggcagagcctgccctgggcttctcagcagtgcacagctcagagcacactttagagtcagccagccctgagtccagggctctctgacccttcgtgttgtcacctgtagcatgggggggcagcagtaccccttcccagggcagcagggaagataagatgagggagcgcaggtaaaaggtgggcagcccaccccagcacacagccgatcccggcacacagccgatcccggcacacagccgatcccggcacacagccgatcccggcacacagccgatcccggcacacagccgatcccggcacacagccgatcccggcacacagccgatcccggcacactgctggcagcagtgaggggagctcttcaacatcaccagaaccctctgccctgagaaaggggctcctgggccgacagggaaggtctgcctcctactctggaggggccgcttggggacaggcccgggctgtctcctcacagccacctgcttcctgtcctctgcctgtctcctgccccatctggccgctgctcatccaggaaggtcggagatgtcgggccctcccacctgggtcacgcgctaggcatgcctgagagcaaaggccacgccccgacaccccacggggccctggcgcgccaggcttctcagccctgcggcggcagtgcatagctctggcacgcgctgcaccaacttcctgttgggtgctgtggtcccaaggcgcgtgctttgcagcagatgtgtgacctggcgttcccctgagtgctcggaaaatggccttgtctccggtcgttcccgttcaggagcaggtacctggggtgctccggggatcccgttgtctaggatgggttttctgtctgacgggtgggcagcctcagctccc

SEQ ID NO: 230 - DNA, 2300 bp, Homo sapien
aactgcagttgagaaaacacctccactgaggggtcataggggaaccgaatattcacacagccttcaagaacctcccctgtgattcctggttaatcatgaaaaaaagaaagagcagtggccggttgcggtggctcacacctgtaatcccagcactttgggaggccaaggcaggcagatcacaaggtcaagagattgagaccatcctggccaacatggtgaaaccatgtctactaaaaatacaagaattagctgggcatggtggcacgcgcctgtagtcccagctacttgggaggctgaggcaggagaatcacttgaacccaggaggcagaggttgcagtgagccaagatcatgccactgcagtccagcctggcaacagactgagactctgttaaaaaaaaaaaagagagagagagagaaagcaagcaagaaagaaagagaaagaaagaaaaggaaggaaagaaggaaggaaaaagaaaagaaaagaaagagctatgccctggcagacaccaccttaaccaaatggccagacctggtcttgccctcgatgggcaaacttgcttgttcgcccctgcctggacgcatgaaaaggaaaagacctccccaaaaaggttcagctaaattgaatcctgaagctacaatcagacaaatccaaagcaagggactgtcagcaggacagatgacctaaacgtttcaaaaaaggtcaatgtcataaaaaacaaaaatgaaaaatatggggggttgcttctagattgagagagatgagagagaaataaccaatgccatttgtgagccttgaatggatcccagatttttgtaaagctgtaggagttatttttggaataattgggaacacctaatagaggatcaggcgatattgaactaagtatcttaggtacaatgctggtgctgtggttaagacaaaattctcagatgagtgctgaggtattgaggggtggagctcaggggattgctacgcactttcaaacagttcagagaaaagtgtgtgtgtgcatgtgcgtgtgtgtgcatgtgggtgtgtgcgcatgtgtgcatgtgggtgtgcgtgtatgtgtgtgtgtgcctgtgtgcatgtgcgtgtgtgggcatgtgggtgtgcatatgtgtgtgtgcattgcatgtgtgcctgtattgtgcatgtgtgtgtgtgcgtgtgggtgtgtgtgcatatgtgtgcgtgtatgtgtgcattgcatgtgtgcctgtatgtgtgcatgtctgtgcatgtggatgtggtgtgcgtgtgtgtgcctgtgcatatgtaggtgtgtgcctgtgcatgtatgcatgtgtatgtgtgtacatatgtgtgtggagagaggaaaaggggaagagaggagcgggaatgcatacaagtgagacaagaggtaaacaattggtgtatgattgcgatcaagagtatatgggtatttattgctattctaattatttccacttttatgaggtttgaaagttttcaaagtagtgagttggtaggaagaaagaaaatgcccaaagagggagcctaccgaccttcctgggtcccctgtccttgtcagccaaccacgtaaagggaaagagctaggatttaatgaccggattccttcctgggctccaagcattttcacatcttgcttctcattgctccgtgagaagttgggcaggcctttctaaatgctccatgcttcagtttctccaaatctaaatccggaagatttgctccaggtcacacgcagaccaagtggaagtggagctgatgggagggacctagcctgtgggctccctgcttggaccctgggccctgcaccccgtcagctgctaggctcccctcttgggtctggtgtgttggtttctgaagcctgttctcccaagtcccggaggtgtcagggatcccagggccacccagcttagctgtgcctgcctccctctgcgctaaaggagccactgtgccagcctggaactcacggcatcccctttaggatgttggctccacagggattggctccttggcagatgcagtcgctcctgattggacagtggtgtctgcagctcgacaaggtggactctgggccagtcggctctgcctgtgtgtcttgcgtcctgaaatgcaaagcaggggctgtggggaaatctcaccaacccctcctcccctgggaggtggcaaaggtggtggactgggctgctgggaccctggggaggaatgaaacagaggctgtgttgatggcctgcagttccttgtaatgtggtcatcaaacggtgtacagttcccgtctgtggctgcaggctggagagctgactgctg

SEQ ID NO: 231 - DNA, 2300 bp, Homo sapien
caccaagtgctgcataacaaacaactccaaaactcagtgccacgcagcaatcagcatctcttccttgctcccgtgtctgcgggttgaccaggcagctcgtctaagctggcttggctgggtttgtctccaagctgcaagttggatccccatgtcctccatcttcccatgcttaactggggcctaccccaggcatgtccttcccatggcaaaagtaccagaggaaaagcagaaacatgcagggtctcttacggcctatggttggggtcagagcgctgtcacctctgctcacgtgcttttggccaaagtaagtctcaggaaccagcccacagtcaaggggctggaaatatattgcccccaccagtgggaggagctataaagtcacatggcaaagggcatgggtacagagaggggtgaaggattgggagcaatacttccatgtaccccaggtctcaaatagccctgatgatctccagaaggcagagcacgtcacaggagaagcccaaagagcatttggggtccaaggaaggaggggccacagccagctgagagccaagaagacttcacggagaaggcagcaggggcttggatctggtccttgaaggctgggcaggattcaacgcagaggctgggaagcatattccagtagatacaacagcctgagccacagctcagaggtgtgcacagagaacaggaagtgacagttacccagcctgggccatcagggacatgatggagaataaagagaggctggctgtagaggtggatgttggtggggggcctcgaatgcctagcgatggggcacagatgcactcagagggcactggggagccatctatggtgtttgagcagggcaggggtcagagatctgctctaggaaggaagcctggtagcagggagtaagacagggaagagagaggctaatgcaaggagaccagacagtgcccaggaaaggtgcaggacggctgagctccaggaactgcacagagagagaatgaaggggtgcagggcctgaaaaaaggacgtcagaagccacgtccacagggcttggccactgatgggcaggtgctgagacagaaagggacagagaggagcagtggacccagggaaggagagggcctcattcggagcatgttaggctgcagctaccacccagtagtgaggcgcaggccccccgaccagggcgacatgtggggatctgacagagtgggcttgggcctttggggacaaaccatttcaattgccaaggccttcgcagctagtcacccgcagccaggcacctccagactctacgtgctctcccagcctcccacttcatttaccttccacactgcgactggggcactgatttcctgtcccccaccttcccccatggcagctaccactgtttgctcattcatcatggggggacggttctgcctccattcaaaatcccacattcactggcgcgctttctcagccggaagatgatgtcacgctgggactttgctggcatcctgtgacacgcagtgaccctgggggtcatgaccctggggttggggctcagcacttagcctcatcccagagctcagccttgtttggcctagtctcaaagcatttcccaaaccccaggtcaggacatgtgccgtggagaagggctcctgtgtccctgcctggagtgagtggcagtgtggagtccaaatagcaggttctggggccttcctgccatttatagctaccggtagtatcagatatacccatctcgggtgtatccccagaggacaggaggagcatgcgcgtgtgctgagcagaggcctctccagacccccttggctgtgggtggtggccccatacgacggggcccccagctcccctgctgcagacacagttcagagttgagtggtatgcggaagccacaggctctgtgtcccgcactcagataccaaagagcaaggcctgcccctttcgacctgtgggtccaaaggtttgtgtttctggcacgcggggatggtggaggcagcaagggtaggcctgagggacgggcaggacctccccctcaccttgggctgcaccccaaccccacgcaccgggagtcagccttgccaggttgcagcacggaactgcacttcccgagcttttaggggaagaggcactcgtgaataattcagcctctttcactgagatgaaaacgccctaatagaactaatggactcgctgcctcaaaactcgactctggtgggactcatctcattcaccaattgcttctgacgtcctgcagtgacactccctaatgaaaaagccgctgtgccagatccttagagtgt

SEQ ID NO: 232 - DNA, 2300 bp, Homo sapien
cgcagcctggcttctcattaaggtagggccctggggtgtggttgggaggagcccctctctccaataggccctgaggggccactggcacctggctttttggcttggaggcagggccgccggctcaggtgtgttcatttcttcctccatccctttgtttgcgtctgtcatagtcaggctctgtgctggcacatgggtgcagggaccagtgatctagtccctgtcctcaagctgctcagtctactgtgggagacagctcaagggacaggtacccgaccctgtggtcagctctgtgttggaggccacagtgatgatcctacagggtcatggggctaaaaatgctcctctcgtgggcccactgagccaggccccttgctcaaacccagagtctgggctatggctccttgtgcacaaacatcaactgaaagcagcgtccgccgcctgcagccccaggtcaccctgctgggctgcttcagcccgaagaatactggaaagcagggcaagtttgagaccaggggctgagccaaggagtgggctggagtggagatggacccacatccccccagtacctcggtaccaacacgagacgcaagtctgatcagaggccttgagataccaagtaatgggaaccacacagcttccagaaatgtgcacacagggcaagcgacagagacggggccctcctgcccaaaatgagcctatgaaccccaattccaaacccatacaaaagtgaatgctgagacatcccccaaaacaataaatagaatccaaataagaaaataggggctgggcgcagtggctcaccctgtaatctcagcgacttgggaggttgaggcaggaggattgcttgagcccaggagttcagggttgcagtgagctgtgatcttgtcacttcactccagtctgagtgacagagcaagaccctgtctcttgagagagagagagagagagagagagagagaaaagaataggatagcctgaaaagactttacatagatgtgtttaggatcctcaaaaatgatggagtaattgacaccctaaaataaagaagaaattaagcaaaagcaggaagaactgaaataggaacaattggatagaaacatgcatgaaattgagataaaacatttcaacagactggacagactctgaacactgttgaagagaacattgataaattggaacctggtgctgaggcattttcccagaatgcaatgtacagagacaaagataaaacagggagaacatggaagacaccttgagatgctccaacaatcatccaattggagttgcagaagaaacagaaaaaatggtgaagaagttggatttgttgagagtttgcagacctggagagaaatgtgaggtctcagatctggagtgcattctggaatagcaagcaagataaatataaataaatgaacccgtagacacgttagaacctctaggtactttagacctagtacctacaaaataagggcagccagatcgttctcagacttcttaacaacaacaggtggcagagaccatggcaaaatctccggtgcactgagggaaaatgtgtgctgatagttttatatccagctaaactctctctcgagaataaagggaattatacggggtcatgggagctcagaagggactgcctttcttttcttatggggaggagtgaaatcagggaagacatcacagaggtgatgtttatgttccctaggcagtaagggggtgggcattccaggaagagagtcaggtagtttggaatggctgggggctgtgaaggagcactcgtcctgcagcgccttgaatacagggcagtgagatggaacttaattctgtgtggtgggagcaggggaggctcatgtcagagccctgatttaggtaagtggctgtggggctaggcaggaggatggattggctccaaggggtgaggttggaagctttgttcttccccagagtcctgcattgggcctgcctgggtcccagctgtctccccacctagcaggcagctctctcctcccctgcctgtggcggggtccccgcccatggcccatggggccccttgctccttggcagttcctcacgtgcccgtctcccctgcagatgaccaagatgctggacctcctggaggacttcctggagtacgaaggctacaagtatgagcggattgatggtggcatcaccgggggcctccggcaggaggcaatcgacagattcaatggtacccccatcctgcccaagggttctgattgagactcctttttggcctcttctcccaggcctggttcttagccaggtcacccagctggtgt

SEQ ID NO: 233 - DNA, 2300 bp, Homo sapien
cgcctgcccctcctcctaccacctgcattgcctcaacccgccgctgcccgagatcccaaacggtgaatggctctgcccgcgctgtactgtgagtgttccgcccgccccgcgccggacgccccgccccaccccaggaacaggccccgcccccaggggaaggcctgccctcctcaaaaggccccgcccctgccggctcctgccccgcctcggtagccgatcccgcaaagcttcgcccgcgctgctcgagaccccgtccacaatagcttcctcgcgcccttctccgcgtctgactcccctagagacgggaggcatgagtgttagggaaaggcagacaggtgtggtgatcatgccaacaccgcgaccactgttcagtgaccacgtgctctgcaagggctccacatccatcatagtgtcctttaacattactgagtattctggcaccaggcatgttactccctttttagatgagaaaactgatgctcagggaagcagagtgacctgcctaaggccacacaagggcagaactatccactcaaattcaggttcctggagccaccccagacctggctcctgttccaaggctggggatagggagagggcaggaggcttctagggcaggaggctcctagggcgggagcctcagtttctacaggaagaggggcaccccccatccgtcaccccccagtcacagtagacatcggaaggccccttgctctgagctgtctgtcctgccccctgtggtgccagatcctccacccctcaggtcctgggctgtgcctcctttagccctgggccgtcctgtgtgcattgtgcgtgtgtatgtgtgtgcgtgcatccgtgcgcatacttgtctgtgtctgtgtaggggccaggggaggacccttttgaggggtgcagccttctgtgctttcctaggattgatggaaggccctggggatgggaggggggcaggagtggggttcctctcagcttcttccctgaggggctgggatgggggtaggagggtccatggcctgggtaggaagggtcccctcttccactcccccaagagccagtggaggagcctttcctgcctcccatgtcctcctcctcctcctctgcctctcggcctttgctgtcaccaaggccaaaggaaggctggctgtgtggtgtaccttgcacctccagaatgccttcaggtgtgatgtggcaccacagatctggtaggtggaggaaggggtgggccattttacagatgggaaagcaggctctggaggcttggatgagtttccgaggacaggtagtagcaaagctgggacctgctatccccaccagagctgtctccctgaatcagtcacccccgaccctgtccagtcagacagcaccgcctccttggagggccaaggctgctcccacccatctcagggcccgagtggtgtggtttgtggctgttgtatttcttgcctttgccagccagcagctcactgtcaccctagcatctgtcagggcccctgcagtgtgtctgtgggctgccagagatggggcctcattgtcccagcctagacgcacggtgcctgggtgcagccctgccccgggtgagggatggtggatggggctgccgtgtccctgggctccagcacagggctcatgctccctgagtgcttggggatcacacagtgatgtgacctcttttcagggggcaatgggaagacctaaggtaggggaagtccagaatctcatgttctgctccctgctctgctgtcccttgccgagtgggcctcagtttccccctctgtcctatgcacatggcagtctcacctacgctggctcagatattctgggtgccgataagttcaccattgagtgaaagggccacgtggtctcacagacccccactgcccatctcctgtgtgcatgacccatgcggctcctggggacggggtggatgtcatggcgtcaccgtggtactgttctgacttgggggcagtggcactgatgggagggagcctgcatggcagcctgctgtcatgggagcctcagggtggggccctgcagctgagccccaccttggggacccttctctgtccacagtgccccccactgaagggcaaagtccagcggattctacactggaggtggacggagccccctgcccccttcatggtggggctgccggggcctgacgtggagcccagcctccctccacctaagcccctggagggcatccctgagagagagttctttgtcaagtgggcagggctgtcctactggcattgctcctgggtgaaggagctacaggtgagtgcccgggagggtggctg

SEQ ID NO: 234 - DNA, 2300 bp, Homo sapien
gtggtgcgcgcctgtagtcccagctgctactggggaggctgaggcaggggaatcgcttgaacccgggaggcggagatttgcagtgagctgagattgcgccactgcaccccagcctgacgacagacaccatctcaactcccccccttgaaaaaaaaaacccaaaaaacctggagatttgtagtaaaaaaatccatttgtttctagcattccagtttttgtttcattttgcttttggacattaaataatattacctagttgcagtcatcgggaagaacaggatggggagaggattatgactgatgagcatctcggctctaatttgttgccagattaagcagttagaactgttctttcttgaacgatatcttgactttcagcctcgccttgggaattggagccagggttaatgatgggggcggctttctggtgatgagaagtattgtaaatcagagtttttctaccgaagggcaggggacctttgaaagggattagagaggtgttggggggctggtaactgaggggtgggcgtgtcagcttagggctttcttcccttgttggtcaccattcatggaggcagttggtctggaaagaacgaggaagaggcaggtttggttcaagcctcggtgatctggggctccccctggctagctgctctgtggggaaacacggccttgggaggggaggccctttggtttcctggcctgcttccctgaagagtgttcctttccccttgcaggcggccagcactgggctgacccggcttctctatctacagcgtagttaaagcggatctgggagatggaggggttcccaacaccccagtctttggttccagaaggctggaccgacctctccttgcccagggatgaatgcagagggtcttttgtttggggtttgctggcaataaaattgaacgggaagaagggaaactgctgccgatcctgcgtgtctcaggtgggttcccccagtgcccctgcgaggcagtgagagggggccctcccttcacgggccttctggggttagagagctggcggtcggccagcccctggaacttttgcgttcttaaggtagctttaagacttgccgccgcggagactggaggcgctcatttaaaattccagtcttgctcccgagggctttggcctccatcttcacctttaacgaccgagggctggtggcggcggctccttcctgctctgcgacaggtgtcgcttctgagcgggagttttgggcacagacatcgcagatccgcaccacccctaggggtctgcatgggtttcagctgcacccagcctggaggggctttttggaagggggcacgtgggcggtgggagcggggaagcaggtgaggggagcccgcctgcgcggatttttctgctgtaaatcagacccacagtctccagagcgtcttttccccaagtgtggaacacatttttcttctaatcctctttggagagggggttaggaacgtgccgaggccggagccgggagcggggtgggtcccggcgcctgtgaaccgagtgggggagcgggccgcgcgctgccctgaagaccctgcctccgcgcccttgggggctcggggcccagcgccttcgcaggcgagcggcggcggctggctctgcccggggtgcgcgggggcggtgtttcctcgcctccccctgcgcccgggctcgccaagccccgactgcccgctcggccgtcgggtccgcgggcgcgcggacgcctcgacggctccccctgccggggcgccccccggtccccaccctcacccggcggctcaggactagtcccccaacttgttctctgctgttaactagtcgcgctgccggaacgatgggatggggttgccacagcaaccagactggacgtcacaatccgggcatgtgtgccgcccccccgccgtgccgccgtgcctctggcgctgccgccgccaccctcggccggctgcgggactcgggctgcggggcgcggtgggaggagcgcccgggctttgcggggagcaggctaaggcggccgagagaaaggggggtcgagacgggggggtggaggtttgggggggtgggggggcaggcggccgccatcttctcgccgaggccgcctcgcccgccgcgcgcgccggtccggcagcgcacgggttaaggctggcaccgcgcccggcgggagggggggcgcccacctcccctcctccccgcgccgggcatgcggggcccagtgggcaccgaggaggagctgccgcggctgttcgccgaggagatggagaatgaggacgagatgtcaggtgagcggggcgcgggtgcgc

SEQ ID NO: 235 - DNA, 2300 bp, Homo sapien
gatggctcccgcctgtaatcctagcactttgggaggctgaggcaggaagattgctttagcccaggagttctagatcagcctgggcaacatagccatagtgagacaccaactctctacaacagcaaaacaaaacaaaacaaaaaaacatgcagctgggcatggtggtgcacacctgtggtcctagctactcaggaggctgaggtgggaggattgctggagcctaggatgtcaaggcttcagtgagccgtattcgcaccactgcactccagcctgggcaacagagcgagagcctgtctcagaaaaaaaaaaaaaaaaaagaaagaaaaaggaaagaacaataaaagtcaactgctgagagggaggtttaggaagaaggggctggcattatgactgaggtgtgaaatagtcttttgggccaggtgcagtgccttatgcctgtaatcccagcaatttgggaggccaaggtgggaggatcacttgagcccaggagtttgaggctgcagtaagctatgatcacaccactgcactccagccttggtgacagagcaagaccctgtctctattaaaaacaacaagaaagggaaatagtcccttgggggagagatttaggattgtcagtagccctgagggctcgcttagggtccgttatcagccagggtccagtcaaaagacaacacattatagtttttaactgagagaatttaatataaaggattgttaactaggtataaagatgtgtttaggtaactgtcggggtataatactaacagtagcaactgcaggaagtagctaccactggtaggtggtattattaaaatgtagatgcttgaggaggggcacagggaggtgaaactcagacatctgaggagagggtgctgctctgctagggctggtgtctctgaggagaaaacgaggctggttctgcaaatgttggaataagtgcagactggattccactgctgcttccagaatgttccaactgccacctccaggataaagaagcaagagtggatgacaccagacaggacaggagcaagcaggaagcaaagccccctattgatagagccaaaccgggatcagctggaaagcagaagtgtttgcagaggcccagcctgatcattatagagccaagaacagcagctggctttggagcttggtcaaccggcttgaggcctgagttgaaagctagacccatcagcacagtctcttctggtgattggacttttgctaggtgagtacactgaagccaggtaaagggagtggagagtgtgtgtgccactgagtgatttacaattcaggatcctggaatataattccgtgaggacgcagcgggtgactgggtgcaaagtagcccagttcaagggacctgtgggcctggggatgaggacctttgcttctccacatgcggtccatggactcgcagcatcagcatcgtctgagagcttgtgagaaatgcagaatttcaggccactgagaccgctggaattggaatctgcattttccagatctcctggtggtcctcaactacttactggtttgggatgggaaactagaaggcttgggctgggaaactagggagtggtgatcagcgagggggcggcctggctacagcaaaaaggacaggcactgggagacagcccctgggcatgagcttccaagctggggctttttgaggaagccatagtggtctggcattgggacctctgaacgaaatttcccggtggctacaaggaattttcccacttccccaaattagtagattcgatttccatcccactagctggtaatttacagtatagtgaatttccttatttcttttttcttcccaagactttcaaaaagtaaagccaacccctttatttatctttgggctcgtccagtctggcttcccccctccgatcgttcgcagtgggacagcccgccgggcctccttccttccccagaaaccctccaggcctgggagaggacgcgttttgcattcaggaaaaaccaatcgctcccctatcgtacataaccaagagaaaaggtggcggacgaggggcgtggcaaagtgattagtgcggcctggaccctgcgtgccttgcgcgctgcgggctctttgcgtctgcgtagttcgctcacctccctttctaactccgctgccgccatggctcctgtggttagtatggctccgcgtgaggcctcggctccaggggaggcacgtgggcctcgccgagcccggcatctacccaggctcgctggggacggcgccctgcagcgtcctgctggggtgggctggcaggtcggccggagcgggccag

SEQ ID NO: 236 - DNA, 2300 bp, Homo sapien
gggaaactaatgcatcattccttaacaaagcacctacgcggttttgtataccagctccaccactttctggggtaatattttctactttttaagagtgttctccagattaaatgagttaatataagttaaacagcttagaataaaatattggcccatatctccccaccctccctccccttgtacaaaaaaaaaaaaaaaaggcccggtgtggtggctcacgcctgtaatcccagcactttgggaggcagaggcgggcaggtcacctgaggtcgggagttcgagaccagcctgaccaacatggagaaaccccgtctctactaaaaatacaaaatcagccaggcgcggtggcacatgcctataatcccagctactcgggaggctgaggcaggagaatcgcttgaacccgggaggcggaggttgtggtgagctgagatggcgccattgcactccagcctgggcaacaagagcaaaactccatctcaaaaaaaaaaaaaaaaaaagaatcttggcccataaaagaatgttggcctataaacacataaacattagccattgctactactgtcattatgatttggtccacaaatagaaccagggctagggaccgggcatggtggctcacgcctgtaatcccagcactttgggaggccaaggtggggcggatcacgaggtcaggagatcgagaccatcctgtgaatggtgaaaccctgtctctactaaaaatacaaaaaattagccggccgtggtggcgggcacctgtagtcccagctactcgggaggctgaggcaggagaatggcgtgaacccaggaggcggagcttgcagtgagccgagattgcgccactgcactccagcctgggtgacagaatgagactcagtctcaaaaaaaaaaaaaagaaccagggctagggacagtcctcaaaagaacagctagtttctctctagaattcacttccttctcctagcaaactcctactcctacgcatccttcaaaacccagctcaaggccaggcaaggcggctcacgtctgtaatcccagcaactttggaaggccaaggcaggcagaatgcttgagcccaggagttggagaccagcctgggtaacacagcaaaacccccgatgtgtgcagcacattgtactttttatttttctactaaaaatacaaaaaaaaaaaaaaaaaaaaggctgggttcagtggctcacacctgtaatcccagcactttgggaggccaaggtgggtggatcacctgaggtcaggagttcgagaccagcctggtcaacatggtgaaaccccgtctctactaaaaatacaaaaaattagccgggcatggtggtgcgtggttgtagtcccagctacttgggaggctgaggtggaaggaagccaaggctgcagttagatatgatcacgcggcgacagagtgagatcctgtcttaaacaaaacaaaacgaaaacagctcaaatatctccgagctttttctaagcctttattgagcactactgtgggtcaggctctgggcttgactttgtaatcgcaagaggggcagaaacgggctgctctcaggacactcaggagaacacgggcggagaaagctcactgatcacgtcgacctagcaagcgagcgcacgctggagaaaacgctgggatcaacacgcatctgccaggcccagacggcagagggggcactgctggaaaggccgggaacctcccctctcaacctcccacccaaacccatccctcttttgggaacttggcaggcaatgaggatagggccttaattaagtggacgcccagtatgtgtatttcacgtgcgttattccactggggcctcacccattatcaggacaccagttctattttaacccagcgctgaggctctgagaggtcagtaacatggccaagagctcacaaccagcgaaaggcagggctgggattacagggcgtctcactccgcctcccaagcgctggaaagtcggtggaggggcgtccgctgctctctggcgcccccaattggccgccgaggaaatgaggcggcgatgacctgttcagacccaaatgggatggaagagtggggattagcgggggtagggggtggggtttggactcttttttttttttaagacagtctggctctgtagcccaggctggagtgcagtggcgcgatctcggctcactgcaacctccgcctcccgggttcaagcagttctgcctcagcctcccgaagggcgccaccatgcctggctaatttttgcatttttagtagagacagggtttcgccatgttggccaggctggtctcgaac

SEQ ID NO: 237 - DNA, 2300 bp, Homo sapien
cttgcgctgtcgctgcagatgtcgggagctatcttcgggcccctggagggcccgagctccctggatgccccgagcatccacccgctggtgtgcccgctgtgccacgtgcagtacgagcgcccgtgtcttctggactgtttccacgacttctgtgccggctgcctgcgtggccgcgcgaccgacggccgcctcacctgcccgctgtgccagtaagtgtcccaaagttccccaaaaccccccagaccccatcccccgggcccaaggttggctctgcccgagctgggacccaggtgccaggagagtaaggctccaacttcaggcagaacgactgggagatactgcacccggtccttagctctccccgccagaagttgcaggcttcggtccattttatagatcagcttaactgaagcctggagattgcagttactggcccaagacctcccatcaaaagtcagagggtaagggcggggctccagcactggtcaggacgctcccggttactcgcttgggggtcctagaagtcttaggtccacaaaaccacagtttcagttatgtgggctcaaggaacccaggagtggctctgatttgcccaatgccgtgagaagatgtcgaggagcagcttctgcttttgatactaggggaccaaccccactgtctgcaggagtgcccaggactgggcaagggtagggaccagggcagggtgagtgctggctgtgatatttatagcagaccccagagctgtggtgcaccccacctcccaacacagctatttttagctccagcctggaatgtgaggggtgggggtggggagccctggggaaggggtatcagaatctcggggcctgggcttctctgcagacaccagacggtgctgaagggtcccagcgggctcccgccggtggaccggctgctgcagttcctggtggacagctcaggggatggcgtggaggcggtgcgctgtgccaactgtgacctggagtgcagcgagcaggcaggggcggcagggcgggtgggtgaggagcagagggtacccggttgcacagtccccaatgcttgcacatgcactcagcatgtcttcagaggacgacctggcagtggattctccagcacctccctagggcaccttggccccaaatgtgaaccccattataccggtggggagactgaggtccagaacaagggacttgagccagtgtccagacagtggcagaggctaaggccattcgatctggggagagctcactggtccccaattcagggtggagttgtggacctgcacaggaggggcagtccagtttgcaggcctgggccgaccctgaagggcctctgctacccaagtggcatagaagcagctacagcccaggggaggtggggacagcatgctgttccctctgggctgtaaaaggcacaggggactctggcctgcggaggccagaaaatgtatcgggaatcccaggaggacggcccgactggggcaaaagctccagcgttctggacaagtgctgagcaatgtgtgacccagacgtacagagaggattagcaggaggtagggactgcaggtagggcctgttatgtccatcattgcatgcgtccataccagggctgcaggccaagccctggaatcccagccctgggtctggcttggggaggagaaccttaaagccctcactgctcttcccctccccccgcccccaagtgtgactccagatggccagggtgtacaccacctttcggccactattgagtgtgccaagggggccgtgagaggccctcacacccttttgttgcaggtaaaaaaaaaaaaatttttttttttgagacggattcttgctttatcgcccaggctggagtgcagtggcgccaacttgactcacagcaacctctgcctcccgagttcaagtgattcttctgcctcggcctcccgaggagctgggactccaggcgcccgccaccatgcccagctaatttttgtatttttattagagacagggtttcgccatgttggccagctcctgacctcaggtgatccgcccgcctcggcctcccaaattgttgggattacaggcgtgagccaccgcgcccggcctcggtaaaatgttttataaaggcagtttctgccctctccccgcgtcccccacccccctccacggacctacttacccagcctctgagccgcagtgccctcctctgtaaagtgggtatatcagagcgccaagtgcctggattacaggaaagggctgcgtttagctgcgcacccggccacggctgggacaaacacgcgcagtgacacgcggcgg

SEQ ID NO: 238 - DNA, 2300 bp, Homo sapien
tgtaaccagcaggtggctggggtccggggggtaggcatggtgggaggtggcagggctggggcgcaaatcaagagcatgctcgccatctctcccaggacaggctggcagagaggaaagcgctgctgctgcaggctgtgcagaggtgagttggggggagcggggcttgcttcccttaccccttggcctccatggcctcagctcagagcctgggcaggccctgccccaccctgaggagcaagacatccgaatgtcctcccagctaaggagggcagcatggctcagggtgcagagaaggggttcagggacggacatgcgaagctggaggcgggtgggggatggaactgcccggccctgctcctggccccctggaaaccaggcagcccccctcccccagccaatacgaagagaaggacaaggccttcaaggagcagctctctcacttggccaccttgctgcccaccctgcaggtacagggagctcggggtgcgggtgggtccctcctcctccccggccaggcactgagcagcatcccctcccccaggtccacctggtcatctgctcctccttcctcagcttggccaacaaggctgagttcctggacctgggctatgtgagtctcctctgctcctgcagatgccccctccccaccaggagcccaccctgcagaccaaagccaccaactcaggggtgggcagcctgtcacctggagcctggaccagggatctcggggctgaccccctcccaactccatcatctgcaaacctgttagggtcactgttacaaggacagtgaagccaggaagggggcatgagcctacagtcccccgtggggcggagtgaccactggagtccagccgccccctctcctgtggatttggggatgggatgggggtttgtccgggtgagtcccagaagagggctggcgctgctaagggacaccaagtcaagtgccaaagacagacgtgctccgcctccatctcccctcttcctgccccctggctgccacacctccaccggcctgaggccctcctcactgccacaggagctgatggagaggctgcagggcatcgtcacgcggccgcaccacctaaggcctattcagagcagcaaggtgtgcagtggcctgggtgggccagggtcgggggccctgcagggcagtggaggccacctcatgaccccatcccgctgcccagattgccagtgaccaccgagctgaattcgcgcgctgtctggagccactgctgctgctggggccacgtcgggtggcagctgctgcaagtggtgctaacacgtgagcagcaaccggggaggccaggcacaaggtccccaacactggggtgtgggggagggtgggcgctgaggggccagatcgccagcaagaagccaggtgccaccattccttcctccgtccttagctcgccaccctcccagcagggtgtctgggcacaggggatggccagggcgagtccactaagtaggggaacaggaagccctggacctgaagtccatggcagaccgggctcggagcttggctaaaggaggaggggaggactcaggcccccaactaccactgcagcctcccctggggtggggcgcctggggctgggctgaccgccacctaggtggcctgaggtcatagggggcctgattcctggactcatctggagaggagttagaagagatgctgaaatggcatgtgtgtgtccaggggccccaagaccaagagagactgggcccacacttcctctgtccagcatagaagtgaacacaccactcactcggtcctggccccggcagcattccgacggacttgctcttggccccacatcctggaacccactccagggactttaaaaaatagatgtggatgtccgggtgaggccttgcctcagccttttcaaatctcctggtggctctgctgtgctccaggtggtggagagggctgtgagatcccggagcagtccagggggctgccctgggaggctgggggaggggcagacttccccacccccctgcatccacactggctctctccccaggctggcagggggcttaggccccaaggcgctgacggggccccactgcccctccccagtaggaaagatgtcggggtcacccgtccaaaagcccacgctgcaccggtccatcagcaccaaggtgctgctggcggagggcgagaacacgcccttcgcagagcactgccgccactatgaggactcctaccgggtgagggggcagggatctgccggaggggggagatgtcctaacccactcctcaccaaggtacgctcagggaaatcg

SEQ ID NO: 239 - DNA, 2300 bp, Homo sapien
ctgcacctggtagcgaggcggccgatagagcagcagcagcagcgcgttgagcccggccacgtagagcgccagcccggtgcggccctgcaggccggcgcgcgtgagcagcggcagcgcgagcaccgaggcgcccagcaggaaggtggcgaggctgagacgcgcctcagagcccggcggagcccgcgccgcgcagcccgccatggcgccgggcggcggactagcgggcggcggcgccggctgtagcccggagaaacgcgccggctgcgcctgcgcactgtgccgccgatgccggcccgggaagggcagctgcccgcagctgcgcgccgcctgccagttctcgcgagaactccggcccgccctgttgctgtccggaatttggcgggagcgccccgcccgcccgcccctccccgcccctcggggacatccgggctctgagccagactctgtgccgggcgggggccgggaagtggtgggagaagtcgccgcccgcgtctgtccaaacttagtcccaaactcaggaggttcctgtcccaagaagcaatgtaaagtttgaaacgagccgagcgcggtggctcacgcctgtaatcccagcactttgggaggccgaggctggcgaatcatttgaggtcaggagttcgagaccaacctgggcaacatggggaaacgccgtctatactaaaaatacaaaaattagctgggcgtggtggcgcacgcctttaaccccagctacttggtgaggctgaggcaggagaatcgcttgatccggggagacggaggttgcagtgagccgagattgtgtcactgcactccagcctgggtgacagagtgacactccatctcaaaaaaaaaaattttgaaacggccgcaccctcgccggccctgcgtcgtccccgaaaaccagacgccctggggcgcggggccaagtgcggcgacctcctgccctccctctgcggctccctggaaaccggcctggacaacggcacctgggcatccatgcaacgggaccaccgcccgcttaaattcctgttgtggaacaaggctggacggtgatgggaatgctcaggatatgttaggttttcttttttttttgagacggagtctcgctctgtcgcccaggctggagtgcagtggtgcgatctcggctcactgcaagctccgcctcccgggttcacgccattctcctgtctcagcctcccgagtagctgggactacaggcgcccgccactgcgcccgtcttatttttttgtatttttagtagagacggggtttcaccgtgttagccgggatccatctcctgacttcgtgatccgcccgcttcggcctcccaaagtgctgagattacagacgtgagccaccgcgccctgcctatattaggtttttaaatagcaggaggcaaagcttttcggtgtgatcctgacttcacttggggaaaaagggcaggtatctgagcctgggaaaatgatcaagctatcagccaaaatggtataacgccgactatatatgtaccttttttttttctttttttcttttttagacacagggtctcactgtgttggccaggctggagtgcggcagtctggaactcctgggcccaagtgatcctccaatcagcctcacaaagcactggaattacaggtatgagccaccacccctggcctatctttaggtagtggcactcttggtgatttttattgtctttatctgtttttgcagtttccatactgcctacaatgaacacaggatactttttttttttcagatggagttttgctcttgttgcccaggctggagtacaatggcgcaatctcggctcactgcaacctccgcctccgggttcaagtgattctcctgcctcagcctcctgagtagctgggattacaggagcctactaccacggccagctaatttttttgtatttttagtagagacggggctttaccatgttggccaggctggtttcaaactcctgacctcaggtgatccacccgcctcggcctcccaaactgctgggattataggcatgagccaccgtgcccggcccatagattacttttataatcaagtttttctttactttttaaagagtaaattctctcacctcaggtagctcagagagctgcgctggaggagaaaagccagtaagtgaacaactggaataaactctgcaggggtggcagtgggggcagaaggagagcaaggatggggagcaaagagggaccccaggggaggccctcagcttggagggcggcagggcgaggaggctgcgaggaacagacgccagagctaggccttggggccct

SEQ ID NO: 240 - DNA, 2300 bp, Homo sapien
acgccaagccctcactccctccttgatctcatttccaatggagggcaggctgtccatccccaagggccccaaggcctagctctggcgtctgttcctcgcagcctcctcgccctgccgccctccaagctgagggcctcccctggggtccctctttgctccccatccttgctctccttctgcccccactgccacccctgcagagtttattccagttgttcacttactggcttttctcctccagcgcagctctctgagctacctgaggtgagagaatttactctttaaaaagtaaagaaaaacttgattataaaagtaatctatgggccgggcacggtggctcatgcctataatcccagcagtttgggaggccgaggcgggtggatcacctgaggtcaggagtttgaaaccagcctggccaacatggtaaagccccgtctctactaaaaatacaaaaaaattagctggccgtggtagtaggctcctgtaatcccagctactcaggaggctgaggcaggagaatcacttgaacccggaggcggaggttgcagtgagccgagattgcgccattgtactccagcctgggcaacaagagcaaaactccatctgaaaaaaaaaaagtatcctgtgttcattgtaggcagtatggaaactgcaaaaacagataaagacaataaaaatcaccaagagtgccactacctaaagataggccaggggtggtggctcatacctgtaattccagtgctttgtgaggctgattggaggatcacttgggcccaggagttccagactgccgcactccagcctggccaacacagtgagaccctgtgtctaaaaaagaaaaaaagaaaaaaaaaaggtacatatatagtcggcgttataccattttggctgatagcttgatcattttcccaggctcagatacctgccctttttccccaagtgaagtcaggatcacaccgaaaagctttgcctcctgctatttaaaaacctaatataggcagggcgcggtggctcacgtctgtaatctcagcactttgggaggccgaagcgggcggatcacgaagtcaggagatggatcccggctaacacggtgaaaccccgtctctactaaaaatacaaaaaaataagacgggcgcagtggcgggcgcctgtagtcccagctactcgggaggctgagacaggagaatggcgtgaacccgggaggcggagcttgcagtgagccgagatcgcaccactgcactccagcctgggcgacagagcgagactccgtctcaaaaaaaaaagaaaacctaacatatcctgagcattcccatcaccgtccagccttgttccacaacaggaatttaagcgggcggtggtcccgttgcatggatgcccaggtgccgttgtccaggccggtttccagggagccgcagagggagggcaggaggtcgccgcacttggccccgcgccccagggcgtctggttttcggggacgacgcagggccggcgagggtgcggccgtttcaaaatttttttttttgagatggagtgtcactctgtcacccaggctggagtgcagtgacacaatctcggctcactgcaacctccgtctccccggatcaagcgattctcctgcctcagcctcaccaagtagctggggttaaaggcgtgcgccaccacgcccagctaatttttgtatttttagtatagacggcgtttccccatgttgcccaggttggtctcgaactcctgacctcaaatgattcgccagcctcggcctcccaaagtgctgggattacaggcgtgagccaccgcgctcggctcgtttcaaactttacattgcttcttgggacaggaacctcctgagtttgggactaagtttggacagacgcgggcggcgacttctcccaccacttcccggcccccgcccggcacagagtctggctcagagcccggatgtccccgaggggcggggaggggcgggcgggcggggcgctcccgccaaattccggacagcaacagggcgggccggagttctcgcgagaactggcaggcggcgcgcagctgcgggcagctgcccttcccgggccggcatcggcggcacagtgcgcaggcgcagccggcgcgtttctccgggctacagccggcgccgccgcccgctagtccgccgcccggcgccatggcgggctgcgcggcgcgggctccgccgggctctgaggcgcgtctcagcctcgccaccttcctgctgggcgcctcggtgctcgcgctgccgctgctcacgcgcgccggcctgcagggccgcaccgggctggcgctct

SEQ ID NO: 241 - DNA, 2300 bp, Homo sapien
acaatgactttaacttagtaggggaagtggctgcccagagataggagcaagaagtgagggtaaagtggcgatggtggggagaaactcggctcagagctcgggaaaggggagggtggaaatcgcaccaagatctctccccaccttgatcctgcgcgaccctcggccagtgtaaggcgagtagcgggccaaggaggctgtttgtgatggaggagccacgggtgggggcgtcagaaagtagggggatcattccaggtggggagaccactgaccgaaaacgggccacaggacagggggcgcggcgggcagtgtcggggttggggtcggggggcaacggaggcggaagtccattcagtggaccagggcggagcgacgcctgagaattccgcccaggccttgaggcgggcctcgcctcccgcagccaaagcagaacattgcgaattagagcattttgcggtcaattttccactgcttaagaaacactaagctatccacgtgagcgtccccccgcccccggcccgatgcgcctggaatcccaggggacgggcttgggaggggtggtggccctgggaacggcgggtgtcggggttcgggcgggggcagcctcgtggcccctttatggcggcccggactcaggagagggggcgggcccggcacccagcggcgggccgcgagagctgcgcggagggccattggtttgctaatgccctcgagttgaaaggcgcgggcggcggtttatagggaaggattgtaattagaggacaaattgccccgctgccccgcagctcgagaacgcggggagggggaggcccgccggggcgcgacgcgcgccaggcctctgtgcagatgtgcagcagctggaagtccgcgcctggcggggcgcccggagtttggccccgagggggcgggggcgggcgcgggcgccgctttgtggggcccgcacaatgcccttaacactcggctgccccttttgtgcccggccgcgccgcccgcccgccccgcggtgcctttataccgcgccgccaccgccccaagctcggagcgagtcgcatggaggacgccccggcccggccggtcctggcgcttcaaagctgcccggcgcgtgccagcgcccgccgcctggtctcggcccccgccgccctcccaggcccgggtcggcccggatctggcccgcgggccctgcggtccgggctggacagagccccagagctgctgttgccgctgcctcggcctgaaagggggagggcgtggcgcgattctccacgctgcttggcgcctgggaacgccgctatcctgggaagggtaggcgggggcgggctggggggagatgccctggcttgatagagctggggggcgcaccccaccctgagtccctacacagaagccggtttgttcattcctctgccacagggctcagctgcagaatttttgcgacttccctgtcaccctcagaagcaatgggggctgcattgttcagaatataattttacaagccccaaaaactaaagccatgagggcccatgggaggtgtctaggtttgaacccagggacttcctggaggtcagccttcctgtccatcacagcagctacagttcagcctcctggagtccaaccagggggatggccccagagccttgctgtaggcctagcccatcctggggcaagtgctccaggcgcctcctccactgggtccgccgtagtctgaatcatagattggggtgcgggccctggatctctcgaagtgtggcctggagctcttcccagaatgtcagtggtctcctgccaccaccacctgtgcgtggagctgagagcaggctcatgggagtagacttctagtgcttctccatggggacagggtctaccaccaaagccacccagcctggaagcccagggctgtaaggaagggagaggcagccgtgttcaccccacctgcctcctgtgggaagtccgcgttggatcctagcagtgtcagagaacacaggacccaggctgcaccctcaccaggacccctcccaatcccaaggccccagcaaggatgaggctggctgtggccccgcgggtgggctgcatgctttaatgggacacaggctgctgcatggcccccgcgggctcagcttgtgcctggctttgagcagccacaggcagaaaattgctgcattgtcccgacattagggcaactaatgcggcgttgcgggtataaccagagcatgaagtgcataaagaggcgtcgccttggcatcttcatcagtcccgagggagcccagagccctgtcatagtcagtgaggcagcctgtggccagctg

SEQ ID NO: 242 - DNA, 2300 bp, Homo sapien
tgccagaatggtgccctgggttcagagcaatgaggaggccacccttcccagctagcagaaggcccagggctggccacagcagtgcctgagcccaggggctcactgaggggaccagttccccaaagcacccacacccttcacttgaagttgggccccgcatcagactccctagttcagtcctggctcagccactcatccgtgtggctttgggcaaaccaggcacctgaaaaccgcctcccaggggcaccgggcactttgcagcagaacccagcacagcacgaaataagccagggccccggggcggccatcagaggccatctcccacctgccctagagccagctgaggccgggcagaggcactggtccaggcagtgggtcagctgggctggcagaggggagccaggcccagacagaggcatggctctccatggctgtgtgtgcaatcttaaccgtggtgtttctaagcggcatggctctcggtggccatgtaattaagtgtggcgtttctaccgtttcaccccgagtcacaggcgagacacttagaaacaccacccttgattacagctgccctgtgccagcctcccactgctggtggcctatttataaccaggaccacctggagggggagccaacctgtccacagagggctcactggggacactgagggccctggctgcccgagaaaccacagggagtataggtgtgcatggccccagattcccccttgctcagccccacacgttattgcggggcctttctctacagacactcctctttttgtctcatgggacggaccctaagacccatcctgggccccctaaaagctgctcagggacctggggtgtggggacggtttaggcaggtgcaggctgtggagcagccctgcccggactgggcaagctccaagcatccgttttggctgcaattggtttgggtctcctcctggtcgggtgcctagtttcctccagacacaggggtgcctagtcatggatgtgtcccagaggcacggaaggacactatgccaggcagccccagaggccttgtgcccattgtgtgtgtggtcaggtgctttctagaaaagacaggcacgatcctcaggaggcgtcctctccagggcccccatcaagaagcaggaggctttccgcctgcatggggccagctgaggctgtcagtctgtgggtgacagcctgtgctctatgaggagtggtgatagcatgagggcttgggagggaggggcggaggggcgggaagaatgggaggaggggaggaggggagtaggagaaggcttcaggcgctgggctgcagaccctggcctctcccggctgggcggtggtgctcagagtttcagagagaacaatttctgagcctgtgggggtggcggggaccactcggcagcccggtggcccgtgcactttattccctcagtggaccccccaggcccggggagcagcgtgaatccgtaactggcccaaccttgcccctcgctgcccctgcttcagactggattcccggttcctagaagccgctggccatgcgtcccttgtcctctccacgccccgccccgattgttcatcttagatgcggcttcctccaggaaggtctccctgagccccagccctggccccaggttctcagtgtccattcctgccccagctccctctggcccccgggcccccagagctccgggcctgggtcttgccccggcgtccgaaggcggcgtccggagtgtgcaccgagccgagctgggagccaggggcgcggcgctgtcaggaggcgccaccagcccagggaggctcgggccggccgcgggcggacgcggggacacgggtgggctgcgtacggacggactgacggaaggacggacgggctgacagaccgacagacggccgcgcctctgagcgggcgggggcggggcgggccgaggggcggtgcggaggccccggcggagacatgcgccctgctccgccccccgcccccggccgcccggcgcagcagcggagcggcgggagctgagcgaagcgcggcggcggcggcggcgcctaggggagggaggggcggcggggccgagcccacctagcggagcgcgccggccgccggtggccgccgccagcatgccccggcccgcgggccgctccgccgccagccacccccgcggccctcggcggcctgcgctcggcccgggggcgcgggaaccgcagccggagccggaggcgggagcagcgagccggagccccgggcgctcgaatgcagggtgagcgtcgccgccctggcccgagggcggacggacgggaggaccccgg

SEQ ID NO: 243 - DNA, 2300 bp, Homo sapien
aatgatttttaatttactagatgggaaatagcaccttgtagttgtttaactttgagattatttactcataaggctaagctatctgagaagtgcttcctctttgcgggaccatctggttgtggcttgaatctgtgttgctgtggaagcctggtaggtcctcactgatttggggtgggtggtgggcctagcacacctggactgggaccagctggaagggttgcttagggaggcagcaatgcccgcctggagggatgaggccaagtccaaagggcacagtattggggcccaggctcattccttgagttccatttggctgcagcttctggagggagccgacaggagacgtggggagacgatgctcctgcttcggagaagcttgtcactaaacgtcctcagaaaggaagtcgacagggcctgttttggggagaaggccaaacagtgagttgggagctgagaggaactatgggctatttggggtcaggggagggaagtgtgtttgggaggacctgtcctgtgtgccagggtgggagacgctgtggcttcaagaccctggccctgggatgccggctactcaggaagatgggccgagatgggcagccagggggctgaggaggctgatggcccgggcctgggccccggcaggctgcctgggtggggagggctcagggggcattttcagccagggttagctgccaggcttgggccagactcagccctctgacctcccctccgggcagacattttgggtcggtgggatccctttagaatcctctcctctgctggcttctagacattaagcatccctgggcgggggcagcaccagcctccctgtgggacccagtgcgtgtggggtttgtaagctgaaaatgactttttctttctttttgcacataggtgagaggacttgtccttttaggacttgttatttttgcacataggtgaaaggacatccttttagtaataatttacctatttaacttttaccagagtgacttcccaggctcagtgcctgccagctggttagatagaataagcccaggctctggcagtttgataagggccttgataagggccggctgttccagtgggagtggcctaatcagccctctctgccctaactttctctttcacaactaaacatgtgaaacttgcccagaggccggcgggtgcagcctggttgaggctgtgcggcctgcactctggctggggactttccatttcccttgctggtcacaggattcctgggaaagcagccctggtgggggcagcattgggggaggttgtggtgataacacatcccgcctcctgcactgggcctcctgtagcctgcaccctggccgctgtgattgtttggcctctttctttcttcctgacacccagtagaaggggaggcggagtgaagagagtacgggttggggggcacagggcccacaggtggcagccggcagcctaagagcccgcgggagtggaggaagggtagtggagttgctgagccccaagacaggcatggcatcctctgaagcaggggttgggggaaggaagagggggagtggggaaggacaggggtgtggcctgaggagaggggaggctggaccgcctgtccactttgcttcagccagggagctggcccttgggacaggctttagatgccagctccatcagcaggatgcaggcttggacctgctggagtccttgctggcctgtgaccttcctcccctgtctacatttcagggagctctagaaggcggcagtggggccagacctggctttggctgagaccctggagaaagactagggggtcttgtgccctgtcagagaaggcagagcctcatagccgcttccctgaggccgctcagcagcggcccctctgccttcctgatctcctggcatggcagccagaagagctcacagaattacttcttctgtaattatttataaagcaaggtttccatgacgaccggtttctggtagacgctctggattggcgaggcagcctcttcctggccagattgggcagctcaggaagctgggggtggggggtgctccccaccaagcccggtgtggcagggagctgggacagtcctgggtcaggcaaggactctgtgatgcttccctgctccctcgcctttctctgcatctgatcctgggatgtcctagccaccatggctttccagctgagcaggtactgccagtcatgggcatgtctaggccgtgcaggggccactgtgggtggattgtttagggacatttggaagggaagggtgggtagaggggactcggcccctgtgcccagcaggctg

SEQ ID NO: 244 - DNA, 2300 bp, Homo sapien
atttgtttttttcacattgagctctgagagatctttctggagcctggatgtaagtttctgaccctaccagcttcctctagcatgaggcagtgagtttcggttggggagagggatgtggcctcccattctagggcatgtcgttgcggagttctccttgaattctctcttccgagtgccctctgatgagctgggctcagtgtgcttttgagttctaggtgcctgtctcatttcctaccttctttctatatgcttggctgcctgggtaggtatgggagggatgggggaagaggtgctgccatctcttgacttttttttttcttttttttttttgagacggagtttcactctgtcacacaggctggagtgcaatggcacaatcttggcccactgcaacctctgcctcctgggttcaagcgattctcttgccttagcctcccaagtagctggcattacaggcgcccaccaccatgcccggctaatttttgtagttttagtagagacagagttttgccatgttggccaggctggtctcagactcctgacctcaggtgatccgcccgccttggcctcccaaagtgctgggattacaggcgtgagccaccatgcccagcccacctcttgactttttagcttccagatgcctttgaaagctgcagaaaactgggtcttttccccagaaaagtagaaaccagacacaacctcgagcatgtttttagggatgctcacagcctactgagccagttctactttgttttgggttagagatggatgccacatctgcagatctctgccaagctgtgtgtgtttttctttagattttgggagtgcctttctgtggcaaaggtaagagcgtttcgagggctcctgccatgtgtcacccacatggccagtgcttatgtagggaggggccacagcttctggcatccagttgttagtagtttatttatttatttatttttacagagtcccgctctgttgcccaggctggaatgcagtaacgcagtgacgtgatcttggctcactgcaacctccgcctcctgggttcaggtgattctcctgcctcaccttccctggtagctgggattgcaggagcacaccaccatgcctggttaactttcttttcactagtggtggggttccaccgtgttggccaggctggtgtcaaaactcctcacctcagatgatccgcctgcctcggcctcccaaggggctgggattacaggcgtgaactactccaccctgccttgtttgtagtttataacagctttcctgagctataactctattgagtctaccctttttgattgtacaattctgcgtgaaccttaatggattcacaaggctgtgcagccaccagcacgatttaattccagaacattttcatcacccccggaattaacctgcacgcattagcagtcactcccatttcccctcctccagcccctgccccccaccagctgactttctgtttctgtagatctgcctgttgtggacatttaatatacatggaatcagatggcgtgtgaccttttgtgattgacttctttcacccagggtggtttcaaggctggtccgtgcattactgtggatctgtaggtcttcattttttatggtcagataatatctcattgtatggatttatcgtattttgtttacctacccatccgtggtggacaccgggttgtttccatccttgggtggttgtgaataatgctgctatgaacatttctagacatctcgttttgtcaattaaaatgatttttaatttactagatgggaaatagcaccttgtagttgtttaactttgagattatttactcataaggctaagctatctgagaagtgcttcctctttgcgggaccatctggttgtggcttgaatctgtgttgctgtggaagcctggtaggtcctcactgatttggggtgggtggtgggcctagcacacctggactgggaccagctggaagggttgcttagggaggcagcaatgcccgcctggagggatgaggccaagtccaaagggcacagtattggggcccaggctcattccttgagttccatttggctgcagcttctggagggagccgacaggagacgtggggagacgatgctcctgcttcggagaagcttgtcactaaacgtcctcagaaaggaagtcgacagggcctgttttggggagaaggccaaacagtgagttgggagctgagaggaactatgggctatttggggtcaggggagggaagtgtgtttgggaggacctgtcctgtgtgccagggtgggagacgctgtggcttcaaga

SEQ ID NO: 245 - DNA, 2300 bp, Homo sapien
gccacactcagagcttgtattctggagcattccgcaaaatgatttacagtgctggctctcttgctgctgggatgtgtggaccctgggtgaagatgcagtctttgtaacccagagagcctgtgcgtggggaggcctttgtctacccactgtccaacctcacgctgtaagtgggccacttagcctggcattgccctggaattggcacctgcagctagctggctccccagttctggtcagaccagaagtggctttctcctgtgtgacccacctggcctgtgtagcctgcaccagggggtgaccccataggctgtcttgccatcccaccccttggcctctcactctcagagccctcctggggagggggatcaaggatgtgcctccccatccttggacccctgcatgggaataactggggaagtctgttacaaatatgggttttctgcatgtgaacagtacttcagcagagagtcaacaagatgaagattgaggagataatggggaaacttgaatagtcccttgataatgattttaaggaatcactgcttttttttttaaggtaggataattgttttgtagtttgcttttttaaaccagctttattgagatagatttagaatgcatacacaagaatatttgaaacgtacagtttgctgagttttgatgagtgtgcacactgagtagtggcgggcccagttgtgatgtcgaatatttccaaactcccaaaattcccctactgttggcccctggcaaaaagatctgctttcactcactcgctgtgcctcttctagaatttcgtgtcgatggaaccggatcgagctcagtgctgggcctcgctcctgtgtccccgtagccctgtattaccctgttccctgcacactgcagtttctcttcaccaggccacagagacttgggatcttgtgaatgaagttcacaaatgcagatttcaattcatttaggacagaaacgtgaagtcacttgctatttaatgatattaggaatttggatgatattttagatgagatctttgttttgtggtttttatttttatttgagacagggtctcgcttagttggccaggcaactaagtggtgcagtggtgcaatcatggttctctgcagccccaaccttctgggctcaagggattctcccacctcagcctctcgagtagctgggactacgagtgcacgcctctgtgcctggctaatgttaaaaagattttttgtagagacatgatctcactttgttgccgaggcaggtcttgaactcctgggctcaagtgatcttcccacctcggcctcccaaagtgctggaattgtgggcatgagtcaccatacccctcctttaggtttttcacaaggagcttttatctttgagaggaaatgcagacatatttacgatgtcgtactgggaaatccgggatttgctgcagaataacctggcatggggagcaggtgggagcagagaccagaggtgccctgagctgactgttttggggctgcttgatggggacataggggttcactccctcctccctctactcttgtaagcatttgatgtttaccacaatgaagaataaaaagaaaaccaggctcctgagcctccaccccagagctactgcctctaactccaggggcggggaaggtcagggaggggtaggcccaggaatctgcattttcctcggccctcctggagcttgagggccactgtcagaggagggccaggcacctgccgtgttgtgcggtgtgttggccttcctcggcttccccgcagccttccagctctcccggtgcctgtgagccaagacctctctgcccaggtggaactccgcccaggtggaactcattcttctacttgcctgagggccagcctgagtggtgcgaggtttaaggtcctggaggtgggaacccttatgagtgttgcttgtggccccacccagttcatcctctcccgcagaggggtggtggccctgtcctgtttccctgtctgtgagttcaggccgagtcatggattccttgcatcactggtcttttgtagagaacatcctgtgatccagttccggaagccgaggaggcggcttgccgggggctggtgggggaggggcggtcctaggaggagcaggagcctggtgctttctatcagggagggatcacaccggctcactgctgagccggccaggcagacacaggcttgggctctgctgggcatcatacttgtcactgggtaaacagtttgcccacttaccgcaggatgaagctgcttgccagggctctccggctctgtgagtttgggaggcaggcatc

SEQ ID NO: 246 - DNA, 2300 bp, Homo sapien
ctcctgtgcggcccgagcctccccaatgagcaccgccccctgctccacggcacccagtgccatcgaccacccaagggctgaggagtgtgggcacacagtgcgggactagcaggcagctccacctgcagccccagtgcgggacccactgggtgaagccagctgggctcctgagtctggtggggacatggagaacctttatgtctagctaagggattgtaaatacaccaatcggcactctgtatctagctcaaggtttgtaaacacaccaatcagcaccctgtgtctagctcagggtttgtgaatgcaccaatcaacactctgtatctaactacgctggtggggacttggagaacctttgtgtcgacactctatctagctaatctggtggggacatggagaacctttgtgtctagctcagggattgtaaacacaccaatcagcaccctgtcaaaacagaccactctgctctaccaatcagcaggatgtgggtagggctagatgagagaataaaagcaggctgcccgagccagcagtggcaacccactctggtccccttccacgctgtaggagtgttgttctttcgctctttgggtccacactgcctttatgagccgttaacattcactgtgaaggtctgcagcttcactcctgagccagggagaccacgaacccaccagaaggaagaaactccagatgcgccaccttaagagctgtaacactcaccacgagggtccgcggcttcattcttgaagtcggtgagaccaagaacccaccaattctggacacatctgtactaaaaatacaaaaataagccaaacgtggtggtgcatgcctatggtcccagctactcagtgtggttgaggcaggagaattgcttgaaactggatggcagaggttacagtgagctatcacaccactgcattccagcctgggcgacagaacgagactctatatcaaaaaaagaaaacaggccaggcgtggtggctcacgcctgtaatcccaccactttgggaggcagaggcgggcagatcacaaggtcaggagatcaagaccatcctggctaacacagtgaaaccccgtctctactaaaaatacaaaaaattagccgggcgtggtggcaggcgcctgtagtcccagctacttgggaggctgaggcaggagaatggcgtgaacctgggaggcggagcttgcagtgagctgagattgcaccactgcactccagcctgggcaacagagcaagactccgtctcaaaaaaaaaaaaaaaaaaagaaaacagaaaaacaaaattcttagtataaaagtcttgaaatcacagagttctgactttgactgcccctgcttctgggagctacagatcatgctgtgggctgcctccacggtctggtaactcaagggtgaccggggtgaggcacagttccttcagagctacctagctgagtgtaaatgggttgttcaaattgcactagggagccggagttgcgtgggttttaatttaaagatgtaagtacaaatctatgtgcattgtagaaaattcggaaaaggtccaactgcctagcaagtaaaaagctgtcattccagcacgtggggggtgaccgcttctcccttcttgggtgttttttggtggattttttttggtgaccccgactggcctagactccattcaagggcacatcttgtgcagtaaaacacgcatgtttcagggctcctcactgcaacacgtgcacctccaggctggcgctcagcgctcccagtaaaagctgcaggcggcggtgtagatagtcgccggcctttcctcctccccacctcgtgacgctttgtgctgcggaagcaaaggcccgttccattccccgtgtcttcccagcagccgccaccaatgctcctttctaggaaacagccttccattctctcttagggccgatcttagcgagagccgcgatgcgggcgactggtgccggggtgggttgggggcgggggtgggaatcaggccccactgccaggagcccgggccgcgccttccgctctgacctcatccggccgcccaggcactgggcgcggcagcgaatcggcggcgcgggcggccgggaacgcccagcacaaatatttaccgccgcgcggagagtgagggcccaagtccgccctgctccgccacttaggccgccccagacgcttccctcggggctgccaccgggtcgggcgcggctgccgcggctagcgggccttccccgcaccggcgcggcccaaccgccaccgaaccttctggaagcggcggctgcctgggcccccacgccgccagaatcgt

SEQ ID NO: 247 - DNA, 2300 bp, Homo sapien
cacccaaggttccttctgcccacagcacccctagagtctcccaccctccagctatcagcttagggattctctccccaggagggcttctctcacccctctgctgggctcaccccagcccaccccaggtttctcctcaacccaagggccagggcacttcccaagaatagggaccaggggtggagtgtatccttactgtatcctaggtggtcccagttcccctaaagcctgcacccgacatttgcccacctagctgtctttaacgttcctctgattccagaccactccttccaagtaaccagcaaaacctgaaaatccttgagttgaagagaactgtgggttacttggttaaagtcctttacccaatgggagagtagaggaagaaatatttttaactgggggtaactggcaatggaaatggtgtttgctcccctgccattcagtcttcaaatggtggtccgcaaacctggagggggatgttctaaggggagcctcctccttcagcctttttctcccaggagctagggtcagtccctccccaagatgcagatgctgcaggcggacttgtgggtgcagacctgagtcagccaagctaagtcgcttggcctggggatgagagggaaaagatccacagagttttttgagctcttaaagaacaattaattgtcttaggggaggcctatggagtcaaactggcctcaaccacggagaacaaggtctcaggttcctccaagccctgctgggccaaatctgttgaaggatttattcttacttgttaggtcttttatgagggttaatgcaggttagcgagccttaaagcgttaagccctgagcttggcacacagtaagtgtccatgaaaggtggcctacattccttcccatgccacagataggtatgggtggcctgggctcccctggcccaggcttctccgggcccctcagtgtgttcgctggccttcttccaccctgcggcgagaaccctgaaggagggagacgtggggctagcggcaggggtggagctcggaagtggggttcgggggacagggggttcatccaacaccctggacagagccctccttggccccgccccataggggaactcctcctggctggctctgtggatccctccagtcatctctctgcccggcagttcgcagtgtggttcgcgggcgtggccgttgccccgccagccggtcgggggaggggagcccggagcagatgggcgggggacgccagccagtttgccgcagcaacggccacgcggcgcgaaggcggtcctgggcgggccactggggcccgcacccaaaactgtcctgcccgcgcgtcacatgagccctgactgtcttgcgggcgagaacccggacccctagccggtgggaatgaaaacgagctccgagggctccagggctgcctctgcttctctaggattccgtttccccacccaaagcctggagtggggtaaccaaaagactcttaactaggcaagccgccgaagggttctacgggctccttagagccgggcgtccagcgactggggcccttgtccaggctcggcctgttcccagcgtcgaggactggagcaagtcacgacctttctccggaactcggatttcccgtccagctcagcccttcacccgataaagcagctgggggtgcaagtccctcccgctgctgtccctcatgggagctcccgtaaccgctgggtcccctgctgcggcccagggcggggctcagagaagacgctgaacccgagcctggggaatgaatgaagggcagcattggagaggagggaccgtagctccagtcaggcaaggcctggccccacctggccctcctgccctcggggtcacgcagcgaaggcccccgatggcgcctttaccactctcccgcaggtgctcggggaaaactgggggccgccaccccgcggtagacaggacgcaaaggcggggagcgggatccccgggggcgtcgcggtctcccctcccggctccaccctgcgcaggaacaaaggcaggaggtgggaccagcgggcggccggactccgcggggcggggcggggcgggcgagccgctcccttaaagctcggccgcgggcggggcgcgcactcgtctggcaccagcccgggccgcgcccgggacctcatttcggacctcggtttccctttgcgtggggctcgcagctgccaccgcttccccgcggagcatggggctgcctcgccgggcaggggacgcggcggagctgcgcaaggtgggtaccggggactgggggcggggctggggactccggggacccgtctaaccacc

SEQ ID NO: 248 - DNA, 2300 bp, Homo sapien
gggcgacagagcaagacttgtctcaaaaaaaaaaaaaagaaaaaaagaaaaaaaaccctccctatctctccatgcctcattatccccgactgtgaactgggaacaatagttgtacctctctcatagcacctctggattaaatatccatgtgaagcatggtgagcacttggtgggtggtacagatttcataaaagtgctactgctgccgtgagctccctagggctgctggggaggacccaattggcccggtggacatgggagagcccggagaggacagaagcctggcaggaagggcctggctcacagcctgagtttgagtcatgtcccgaaaggagtctgagaggttggtcagcaggggtgggtgctcacatgtggcactaatggagatgtcattaacaacagtggcaggggctcaggggcatctgctcagcccactggaatagcaataaagcatcacctagccctggcccacaaaatcacaaaaccatgtgctagatgagctcgtccatgaccaaggtggccaccttaggagtggagaacacaaattgcagggccttttggaatggaggaggcccaggggaggggtgcccaagacaagccattttagcacctcctcccaacagtacccctgccacttgctggcctcacggcacacctgcctctgggcacccagaggagggcagcgccagccgcagtgagcctgttgctttggccaccagctccagcagcgaggctgcgaggaaatgactcctccttccttttgtctgcaaaccactgggcaagcgtcccagattccagcggccacaggtcccatggagagagtgagggcgatctggcctggtggaagtcgttggaaacccacctggctaggcacagcccagcagctccagttacctgggcacctgggagcgcgggaggccatcacgcaggtcgccactaggtggcaggcccagggaaaggaccggaggcagctgccgagtttagcactatgagtttagcactatgactcccactgttcctggaaggggcttccttcattctacagcatttccagtgctgactgtgccaggctggggctggggcggagtgaaaccttcagcccggggtggggccaagcccccacgggactccagagggggtgggtgttgggacaggaagggcacagggtgcttcaagatcgctgataggccgcctgcactcccacagccatgtagctcccaccttctgtcagcttttcctcgcgtcctttgggcactagccgctcccacggctggtgttcagtggagcctgcagggtggcttggcacacattcgctctcctgcccgcgccctctggcactttcctgagcccctgcaggggtctcagccccctctctctggatgccggcgctcccgcgtctccccacaagccctaacctcccacccatccctgccttctgtgtggctggaagcccctccacaccgacagcggctgcgggcggcctgaggccatggcgttcccagcgcactagtggttcccgtcctgccttcctgccctccccgctggaacctctgggggcagttctcggatctggagggaccctggaaggcagggctctttgcaatctccggggatttcgacccagagcccttcagggacgtggcagggctgctcctgcctcagggccgttgtcctcgtgctcctcaccccgcctggaatacccttctcgccgctcaaacccagccccacggcacctcctcagagacctttccctgtccgcccacgcggtcccgacaatcactccccatcacctctggaattgcgtcgccggcgcctggaaccgcagttagcgggcactgggcagatgaatgaatttgtctgtgcctggacggctctccaattcgaacccagttttgctgccctctggggtctcaactgttacgtgaggcaaattaggagagaagcccctgggcaccttgccccagtcgcacgagtgtccccgcgtcgcggcgggggcgggcggggaactcgggcggaggctgcggggcggggcggggcggggtgggggcgggcccgagtcttaagccggcgtccgcgggctccggccccagagcgcggcggagcggagcgccaggcagcgcggagcggaggccaggcccacagccgctccgcctcccggcccgcagatccccgacggccgcaccgcgggctcctctggcccgcaagaacacgtgcatggcgtcctggggaaggcgctgagtgcggagtcgcggcgccgcacgcggcaccatggccctggagcaggcgctgcaggcggcgcg

SEQ ID NO: 249 - DNA, 2300 bp, Homo sapien
agaaccatggtgaaatgtgacctaagccccagctcctgagaaaggcgctcccttcctattggccttggggactgtgggtctgaagctccaggggtcccactggctctgggcctctaagtggtggaaactgtaaggagagggccacaggcctgtgggctctggcctgtgcctgtccaggctgtccaggtgtccaggccccaggagcctcgtgcgtggtggaccacaccctaaagcagcttatctctctgggctgggcaagcccaaggatccaggtcatcccccccacactttctccccccacacccaagcctgcccagcccagagggcaggagacgataagctgggcccaaggccacctgcttctcccagctcctctgcactggccagagaggcttctggccagggctggacactggatctgggaggcatgccaccgcccaaaagagtgggcatgggccacttggccaggaagccctggtaacagggcccactgagagatagcaggtgggccatctcccaggaagggtgggaagaggggcttgctatctgaaggcagaaggtggggttggcctggccatctttggggcatagtaagccagtttagagttaccctgactcctccccttccatctccaggtcacccagtggtctaagtggaaatcggttgtggttcctccctcccatggctgcccccacacccagaatttcatccaaatccctaacctcggcctatgatactctctggcctggccctggcagcttttcccttcctcacccactctgaacatgatgcctgaggctggccctccgacaggacaagagcgtgcatgcctcagggctctgcacttcttgttccctgtgcctggaactgtcccaccgctgcctggctacctgcttctcagcagccaggactccccttggaggtcactgctcagagtgaccaggtggggtctggaggcagcaagaatcagcctgggttggagaagcagctgacagcttgacagcactgatgtcctggggtcagcctgggttatggggagacccccatttaccacggctcatcacccttcccccacaccctggctgggacacctgaatctcagcctcgggtgggctgtgggactttgcccagcctcctttcagatccggtcctggaggacacgggcgtctgactctgctgcccaggcctcacgtcccacccacttccaggactacaggatcagtgctttgcttctcccggtacacactagtaaccacaagccccacggaggcccctcccttctggctcccatcacccaggtgcgcttccagggagcacccaggctcgccagggcatctgccccagtactggcaagccagggagcccattcacttgagggcctctggaaggagctccgtgcagggttcagctgggccaggaggtgccaaaccccacccatccttgagccccgggggactctgggccaggactctgtcctgaggaggaagcctcagtgcccctggcgaaccgcgcggacccacctgcactctgcagccgccctgcgacagcagccactgcaggcaggcgaggtggccggtggcggaggcgtcgtgggccggtgtggcgccgttgcgggcgcgggccgcggcggggagggcggcttcctccaccaggaagcgcagacagtgcagcttcccagcgcgggccgcgtggtgcacgggcagcgcgtccagcgggtcgcgcagcgagggccccaggaggcctgcggcgtgcagcgacctcagcacgtccagctcgccctgccgcgccgcctgcagcgcctgctccagggccatggtgccgcgtgcggcgccgcgactccgcactcagcgccttccccaggacgccatgcacgtgttcttgcgggccagaggagcccgcggtgcggccgtcggggatctgcgggccgggaggcggagcggctgtgggcctggcctccgctccgcgctgcctggcgctccgctccgccgcgctctggggccggagcccgcggacgccggcttaagactcgggcccgcccccaccccgccccgccccgccccgcagcctccgcccgagttccccgcccgcccccgccgcgacgcggggacactcgtgcgactggggcaaggtgcccaggggcttctctcctaatttgcctcacgtaacagttgagaccccagagggcagcaaaactgggttcgaattggagagccgtccaggcacagacaaattcattcatctgcccagtgcccgctaactgcggttccaggcgccggcgacgcaattccagaggtgatgg

SEQ ID NO: 250 - DNA, 2300 bp, Homo sapien
gccctcaccccctgcctgcctcccagcagggggactgggctgatgggggccagtgaggccaaaggcctggcctcactagtgggcatagggtggggatccctgggtccatggcatgttcaagagtcaaagctcctggcgagtcccacaaggggtcagggctggacactggactgggaggagagtaagagcaggtcattgccctccatgggagctggggggtgaaggacgcaggtccagacagctgtgcctcaccaggaactgggcctgtgccacctcttgcacagagtggccgggttgtcatggagttgacagagaatgcatggagactgcccctccccaagcatgcccccccacccccacagccccaggctcagtcggagagtgtcacccaagggaggtggctgccaggtggaaggtgccagtggcatggctgtggaggtgagggctggaaggagggtggggggaaggtgagcaggcactagcagggctgggtggaagtgaagctgtggctggttccagtttagggcttgagctcctgggggaaagggccaggcctgagctgggagccctggaaggaagcgagcctgtgtggagaggatgaggccagggtgggcaggtggagtgtgaggtgcctagggatgtctggggcctgcaggcccctggctgaggctctggagcaggggttggggcagaggtctggtctgagcaattccgggtatcccgggcagggtgccctggggaacactggcgttctggccataggaacagagcaaggatggtctaagaggtgaggggacagcctgaggtcacaggtggccagatgtggtgtggcagccccctggggtcctgctggagcctgggaccttgcagttctcaagcccaaggcaaagccaccccagggccaattcataaaaggtgactcgggtcacaaggccactgggcaagggaggcatgggagggacaccgaacctgcaggccagctccagtagctgccctcttcatgccaccttagaccaagctcccacagtggcttcccctttcatctctgggaggcagagggggccctggaatcgctgagttcccaacgcagactgttggccccgcccaaatccacaggacaggtggcccagccagtgccccgtctccaccgttgagcccaagtgccaggtctgcgtggtcccctcctggctgtgtgagccccctcccggctgtgtgcgtccctccgggctgtgtgcgcccctcccggctgtgtgcgcccctccccactgtgtgcgcccctcccggctatgtgcgtccatctcggccgtgtgcgtgctgggccgcaggcgccagggccggggcccggacgctccacaaagggctctttgtgtcgccgcggcgccccccgcgcgggtgcctgaccgggggcgggagcagggtcgtggcgtccgaacctccgggctgcagggggcgcggagcgggcgggctggcccagaaaacaaatcctgcggtgtcgcatttcctgcaacgtgagccaggtcgggcggggtgaagggtctgaggccaccgcagggacgcatgggctggagagtggggcagaggacagcccccacccggtcactcagtctttggcccggccgcctcactctccctcactgagctgggcctagttgggggcagctgcgatggggtgggaagccacgctgtcacccgaccccgccttacggcccctgaaatccgaggcttgagcgcgggtgtcggtgtcgctttcgtggatggcgatggtttccagatgcaggaggggaagggtggggacgcgacccggagccgggggccaaatatgagaggcctcctctgcccacagtcagccctctcccctctcgggcggggatgaaggtgggggctcagctcccagcttagggagaggcgcagggggcggggtcacatctggccggggacgggtgcagagccgcggccaggtgtggcaaagtagttggcgccccctgtggcatccgcgacggctgggggggttcagcctgggattggcgggccccgggtgatgtcaggccgtcggagcccataggctggctgtgcgcgggtggctgtaacctgagaggaagtatcaggtaacgcaggtgtcgggtcctgccgcccccacagccaggtgcacagcgggggccaccagcaccgtggcaggtaggagcagcccccggacgggcaaccggggtccgtggcaagccggagcctccgagagcacaggctctggagggggctccctccggccccggacccccgaaagacagggctccgcggagccctgg

SEQ ID NO: 251 - DNA, 2300 bp, Homo sapien
gaagttagtttcctctccacccatgggcaccccttctgcccggggcctgggaagtgggctgctctgtgggcaaatgctggggcctctgaaatggaggagacgcagcagggagaggccccacgtgggcagctgcgctgagagtcagcagcacctgtcccccaggcgctcctcctggtgctgctgggggcccgggcccagggcggcactcgtagccccaggtgtgactgtgccggtgacttccacaagaagattggtctgttttgttgcagaggctgcccagcgggtaagtggccacaggggtgggagaggcatggggcaggcagggctggagaggtggcgggcaggcccgggaggtaagaggaggctggcaggggaggtaggggtaggctgacagagaagtagggagctggagagaaagagggagggagggcagggtgggaagcaggtcgggggttgctgggcagcccctctgcctgcctgacccctgcctggttccacagggcactacctgaaggccccttgcacggagccctgcggcaactccacctgccttgtgtgtccccaagacaccttcttggcctgggagaaccaccataattctgaatgtgcccgctgccaggcctgtgatgagcagggtgaggggcttctcagtgcttggcagggagttcctaaggacaggcctttctgaaggaagtggctggctcgggcccaaacttggggtgtgagggtcctgcacccacccttgccagaaccctccaccctgatcctccttcagggtgcccttgccccttctctcttcctggtgaccttcccatctctccatgtgccttggcctctggtcggccttaatctctgagcttctctcttttttagggtagccctgtacctgtctgtctttcgcctatttctgtctccattatcttgggataatgcctctgcctctccatgggagcctttggccctgactaactctccactccccatctccctgcacccccaccagcctcccaggtggcgctggagaactgttcagcagtggccgacacccgctgtggctgtaagccaggctggtttgtggagtgccaggtcagccaatgtgtcagcagttcacccttctactgccaaccatgcctagactgcggggccctgcaccgccacacacggctactctgtgagtacccccacccagggctctctactcccagacccccttctccctgcctgacccactcctgtcccatggtgacgcatgcctctcctggattgcaggttcccgcagagatactgactgtgggacctgcctgcctggcttctatgaacatggcgatggctgcgtgtcctgccccacgtaattcctagctgtcgtgggatggagggaagggcggctgggagcagagcaggggcctggggtggggcaggtgctgctggttcaggaataggaagaggggatagggaggagggagccttggccctgtgatgggtgggccccacttcaggcaaacttagatggcaaaagagcaatctggatccgccttagccagatacataagggtatttgccttcactttcagccagcattccccccagcgatcctagccagatattacagatgatttgtcacttacacagagagtcacattgatatagctttaaaacttgggctgaaggaggttgaggctgcagtgagctatgatcgtgccactgcacttcagcctgggcaacagagcgagacctattaaataaataaataaatattaaatctattaaatattaaatattaaatctattaaataaataaatacaaagggctgagagtcaggactgtgctgctagttctctaggggatcttgggcaagtgcagagaattcgcgtctctgatgtgtggtgtccctttctcaacatgggatgttagcagctaattcacaggcctttgatcagaggtaagggactttctgtagctattcaagtcttttttttttttttttttttttttttttgagatggagacttgctctgtcacccaggctggagtgcagtggcacgatcttggctcactacaacctctgctgcctgggttcaagtgattctcctgcctcagcctcccaagtagctgggactacaggagcccaccaccacccccggctaattttttgtatttttagtagagacggggtttcaccgtgttagccaagatggtcttgatcacctgacctcgtgatccacccgccttggcctcccaaagtgctgggattacaggcatgagccaccgcgcccggcctccattcaagtctttattgaat

SEQ ID NO: 252 - DNA, 2300 bp, Homo sapien
acgagttccttcccctccaccctcgccccgtctccgccgccgcacccctgtccagctgttgagctgcccgccccacctgctcaagtctaagtccgaggccagcctcctccagctgctggcaggggctggcacccatgggacaccctctgcccccagccgcagcctgtcagagctctgcctggctgttccagccccaggtattaggactcagggctcccctcaggaagctgggcccagctgggattgccgaggggcccctagccctggcagcggtcctgggctagtcggctgcctggccggggaacctgcaggctcccacaggaagaggtgtggagacctgccctcgggggcctctcccagggtccagcctgagcccccaccaggggtctctgcccagcacaggaagctgaccctggcccagctctaccgaatcaggaccaccctgctgcttaactccacgctcactgcctcgtgagtggcctggactggggtagggcaggtggctcagggcactggcatgggggcccactcatgcctgggagcatcgcatttggggagggtcatggcggagggagcctgaaccctgcccagtgtctgggcgcagggggctgtggtgggcagcagtgaaggggcctgaggagtgccgtggggaagagagggtgaccagagccactctgaatggcgtcagccaaagaaggactctgtcccctccccaccctgtagggaggtctgagcagagggaggcccccaagagtgccattgaccaagagacagcagacagcctgcctcctggggcgtgccggcacctgcttcagctactgcctcctgtatgcatgagccggatgctgggcaggatccctgcctacgcccgggcccgatttgcgctttgccggactggatggagtggaggaggcccaggccacagtaccaccccacctgcccaggcagcccctcgtcacctactccccgaagttaccagctcagctcgagtcttcagggctgggctcctaggctgcccatcctacttctaccctcactggcctccagtgggattcactcctgccctgcccccaccttcccagtcccacaggccacccctggcttgggctgggttctgtgaagttacgtatttattgagcttttggttcttttataaagacttgtctagactccactgggaagagtcctttgctttggggcccagtgactcggggcacttgagttcagggcggcctccttgtgttcctgtgctcctccacttgccacggatgggccacggatggagcttgccatgggaagcactgggaagtaatggggtgtggggtgccaccagaccaacacccccagacttccccaccttcagccaccatcagagcctctccccaggtgccccccggggattcagggctgaatctgcccagttcccacactcaggccagccctcttgggaaggtgggtcctccatgggggtcccttcaggaactttttttttttttttaatacagagtctcactctgtcacctaggttggagtgcagtggtgtgatgtcggctcactgcaacctctgcctcccgggttcaaacgattctcctgccccagccactctagtagctggaactgcaggtgtgcaccaccacgccgggctagtttttgtattttaagtagagacggcatttcaccatattggtcaggctggtctcgaactcctgaccccaagtgttccgcccgcctctgcctcccatagtgctagaattacaggcctgagctactgcgcttggccccttgcggtacttttggcccaacctcctccatggctggggacgcggaggccgagagagaagtcacttgccctggctctaccttgaagtggttctcagggttggggcgagagtcggggtggggaccgagatgcagctctatcctgtgcccctggtcgcagcaggcagcccagcgcttcgcgtgttctacttggcctgtccgctgccgcctaatgagctcaggtctaggccgagcagagggggcacctggtcggactcggttgggctcgggcggccccgcctccccccgcccgccaggcgggcccttctcgacggcgcggggcgggccctgcgggcgcggggctgaaggcggaaccacgacgggcagagagcacggagccgggaagcccctgggcgcccgtcggagggctatggagcagcggccgcggggctgcgcggcggtggcggcggtgagttgagacgcaggaggctaggggcagctttgagccctgtcccaagagcctcggtgaaggaaggggcccc

SEQ ID NO: 253 - DNA, 2300 bp, Homo sapien
tgcttcatgcttgaagctgggggactgggggatgatagtctgggcgtatctgtgtctggaccttccagtctccagatatgtctgggtcccaggagaggggacaccccagggtagagatgcagagaccctcctccatcccaggctggcctgaggccctggaaacccgccctggggtggggccatgggggctggcagggggtcccggccctgaccacccttccctgaccaggcccctggccgccgccgcaagaacatgtcggagttcctgggggaggcgagcatccccgggcaggagccccccacgccctccagctgctctctgcccagcggcagcagtggcagcaccaacactggcgacagctggaagaaccgggcggccagtcgcttcagcggctttttcagctccggccccagcaccagcgcctttggccgggtatgtggccccatctgcccagggtcaggcagctggctggccatgacccctgaccctgaccagggtatctttccaggaggtagacaagatggagcagctggagggcaagctgcacacctacagcctcttcgggctgcccaggctgccccgggggctgcgcttcgaccatgactcctgggaggaggagtacgatgaagacgaggatgaggacaatgcctgcctgaggctggaggacagctggcgggagctcattgatgggcatgaggtgagtgcgggccacagtgctgctccctccttgtcccgaaaggaggacagccctcgggaggacccagtgatcagatgttccatgggacgccccaaagaggccactgttaccattagcccactttggagacactgaggctagatgaaaatggtgtgctgcttggctgttttaatggcagaggagggcccagatcttgggtgtcttaactgtgattactcatgtggtgtcaagggtgaccctgctcctcttgggacctccatgtccccattgggaaaatgagagttgcatgcaggttgcttatcctccccggccaccctaaggtgctccaggcctcgtgaatgacccatcctgccctccctctagaagctgacccggcggcagtgccaccagcaggaggcggtgtgggagctgctgcacacggaggcctcctacatcaggaaactgcgggtgatcatcaacgtgagtaggggctgcgctggtccccgtggccaccctgcccccctctttctgacagccctcagctgagtctgagcctttgcagaaggagcaggtgcctggcaatgaggtgggggcaggaaagtcagacaagggctgcgcccagggaggaggtgcctcctagaggaacctgggagggggcttcgggcaggtttgtcaggttcagctgaattagcacaggtgaggcctcattctttcactttcgttcagtggctgtttcccaacacttgctgtgtgctgggtgcccagcaggccacgccctggacgggacagagtgagctggcagtgtagggatttcggctcagggaggggagcacctaccctgggcttggagcttcctggagggaggaagcaccctcagaggtgaaatctggaggctaagccagggcagaggtggagaagggaattccaggcatggcttcaaagccagtctcccccgagcttccctccaggagggaccagggcagtgtgacctcgggagggctatgaggactgggtctttcctcagggtctggactacccaggtgcgaaggccaaagggtacagccttcttatccgtggctgctgtggggcctcctggaacggggaaggggaaggagtggcaggggagcctgaggctgggtggggccctagggctgagacagcctcccgaccccagtcacaccatcccctgatcccacagctgttcctgtgctgcctcctgaacctgcaagagtcagggctgctgtgtgaggtgcgctgggattcgggggcggcggcgggtgaggtaccaggaaggagggcgggacctggacctggggcggggctaacctggcggaggggcgtggccaaccgcacctcccgccgcgcccaggtggaggcggagcgcctgttcagcaacatcccggagatcgcgcagctgcaccgcaggctgtgggctagcgtgatggcgccggtgctggagaaggcgcggcgcacgcgagcgctgctacagcccggggacttcctcaaaggcttcaagatggtacgggcggggccgggcgcaggcgggggcactgaggcagggctggggcgccgaaaagcctccacggcccgatccggtctgcccagcatccccaacctccccca

SEQ ID NO: 254 - DNA, 2300 bp, Homo sapien
cagtgagctgatcatgccatactactccagcctgggctacagagcgagaccctgtcttgaagaaaaaaaaaaagtcaatgtaataaaagaccacaaaaaacaaggctgggcacggtggctcacgcgtgtaatcccagcactttgggaggccgaggtgggcggatcacgaggtcaggagatcgagaccatcctggctaacacggtgaaaccccatctctaccaaaaatacaaaaaattagccgggcgtggtggcgggcgcctgtagtcccagctactcaggaggctgaggcaggagaatggtgtgaaccgaggaggcggagcttgcagtgagtcgagatcgcgccactgcactccagcctgggcgacagagcgagactccgtctcaaaaaaaaaaaaaaaaaaaaaaggataaacagacataaccaaatgccacgtgtgaaacttgattagttcctatatgaggaagtatatctgtaagaacgttatttagacacttgggaaaatgtcaatatagactatatatcaaggttcagtttcccaagtgcgacaattctatggggttttgtaggaaaactgtctttgttcttaggcagcagcatgatttctgccccaggggaggggggtgccgagaagagaatgggagagaagcagatgtggtagatatcaacttggggagtccagagggcatgtggatgtcatgtgctattcttataatttttggtaggtttgaaatattttaaaacaagtctgggcgcggtggctcacgcctgtaatcccagcactttgggaggccgaggcaggcggatcacctgagaccaggagttcaataccaacctggccaacatggtgaaactccgtctctactaaaaatacaaaaattagtcgggcgtggtggattgtgcctgtaatctcagctacttgggaggctgaggcaggagaatcacttgaacccgggaggcggaggatgcagtgagctgagatcgtgccattgcactccagcctgggcaacagagcgagaccccttctcagaaaaatttaaaaaaataaaaagaaaagaaatattttaaaacaaaacttgggaaaaataaagagagtgggaggagagaactaggaagtcgtgaatactgatacctgtttacagagtttagctgtgaagggaaagaaagaaagtcagccgtagctggagggtgaggtgaggcctctgtaaaatggagaaataaggctgggcgtggcagctcatgcctgtaatgccagcattttgggagaccaaggtgggcggatcacttgaggccaggagtttgagaccagcctgggcaacatggtgaaaccccgtctctacaaaaaatacaaacactcgcctatggtggtgtgtgcttctagtccaagctactcgggaggctgaggctcgaggatcacgtgagtctgggaggtcaaggctgcagtgagccatgattgtgccactgcactccctgtctcaaagaaagaaagaaaaaaaaagatggagaagccgggcgcggtggctcacgcctgtaatcccagcactttgggaggcccaggcgggctgttcacgaggtcaggaattcgagaccagtctggccaacacagtgaaaccctgtctctactaaaaatacaaaaaaaaaattagctgggcatggtggtgtgcgcctgtaatcccagctactggggaggctgaggcaggagaattgcgtgaaaccaggaggcggaggttgcagtgagccgagatcaagccattgcactccagtctgggtgacagaatgagactctgtctcagaaaaagaaaaaaaagaaaaagatggagaaataaccacgtgttggtgtggcagtgggggaaatgatccagcagaggggaaacttgatgatgtgggagaggggggactgctggggggcgtctcctcaccctggatcgagagatggagggcagttcattctaagtccctgcagcgctgggccggggtcgagggatgtggtggatctcgtggacctcctgaaggcttctgtccccaccccaggtatgtcaccacgccgactgccagcagctgcaccgccgggggcccctcaacctctgcgaggcctgtgacagcaagttccacagcaccatgcattatgatgggcatgtccgcttcgaccttcccccacaaggtgagcacaggcgggagccgcagctcggcccccagagctcctgtgtcagtgtttcagtaactgtcggaaacgtgctagggcgtcataaggacaagtcgactgtaaataatgaaacccgagtatgttacggttccttttgt

SEQ ID NO: 255 - DNA, 2300 bp, Homo sapien
atggatactaggaggaggaagagaccttcggtctggcagtggggaaggctctgttgactgtcggccacaggaagggatatcctggccgagccctttcctgtccccatgtccttctgtggcatgaaggcccttctgccttcatctgttcactgatctcatccccaccaagcgcacctactgtgcaccaggactgttctaagtgccgaggacacagtgagatgcagacggccaaggcgctggcttctggagaggacagtctggtagggaagaatgatgataaaaaagtgaacaaagaaatgaattacaggtagtaataaacactaagaaggaaataatttaacttaaaggaattgagagtgggagggtaagggtggtttattttaagatgagggaaaaggacgtcttagaggtaacatttaagttggggcccggtgtcagctgtttcaagatagggtgcgtggaattccagacagaaaatacagaggagaaggccctgagcttggcgagctgtagggagagaaggaagaccggcaggtggaccctgtgcggaccagctgggagggaggcgggagcccggccatggtgggatttcactataagcaagatgggaagttttagttttcaaaactctgcctgttggccgggtgtggtggctcatgcctgtaatctcagcactttgggaggccaaggtgggggtggatcacttgagatcaggagttagtgaccagcctggtcaacatggcgaaaccccatctctactaaaatacaaaaagtagctgggtgtagtggcgggcgcctgtaatcccagctactggggaggctgaggcagaagaatcacttgaacctgggaggtggaggtcgtagtgagctgggatcatgccactgcactccaacgtgagtgacagagcaagattccgtctcaaaaacaaacaaacaaaaaacaaaaacacaactctgcctgtggtgtagacagtgggtgacctgggctttgggagtggagacagccctggaagtctcccagcctctaataaaacgctgctgccctcccaaagccatctcacggaccctggcccccttcccaccctctttccccatggaaccaggtggaggaggagcaattaggggtgggtgggctgatgacagacagcatggccacctcacccccatgggttctgaggagtgtcccaaggaggccatcccagaatcccagagccacagtctgagtttcagtcttgcctgtagacttttgtctctttatgtcactttatcccccacgccgtgaatggggctaatggtgcctgccctgccttcctgggaatcagtgtaaaagcgctttgacagccgtgtagtggtgactccagcaccagagtctgggcgtttgcgtcctctcaggctttgctgagtgccccctggcggtggggacctggcctagaactgcagggacctgggctgctgtgccatgtgggtcgccagggtttcctgatgcctccacctcacccagctcctgggggctgccaaggatagcctctcagagcagcccgccttctgcccacggccctttccagaggccaccggcctttggctctcggcctctgccgtacctgggcagtgagcagtcggtgtgagggggtgtccctggggctcaggctctcgggcaggggtctccaggttgatgggaggggctgagatgagagctggttgtgaggttggggtgggtgtgtgactggggctcaaagctggtgttggagcagagaggggtgtccctggggctagatggagagccggaccaaggaccctgaggggagtgtgccccatcctggcctcccccttctggtgcctgtattctaagagctcccttgctgggagtaagaaggggtcccctgggctgaggctccgaggcgggggtgggggtctccaggaggaagggaggagggaaggtacccttctggctgggagggaccgtgcgtgttggcgctgagggtgaggtggggaccacagcagagtgggcacccccagggctgggcggggatcgagtcacccaggggaggggctccacagtctccaaggtgggggggggtgtcaccagcgccccctgcctccagcattcaaggagctccccaggagaaagagcaagttctgaggagccctctgagcccggcattggtgttgaggagggagtcagagaagagaggggcccggggccgcgcagaggcgcagaggtgggggtaccccgggccaggcagaggtgggaaggtgggggtcccggggactgggcggaggcggggctgtgggggtccccc

SEQ ID NO: 256 - DNA, 2300 bp, Homo sapien
cgaggattaaaagaggcccatatataacatgcttagcatagagcctagcacagcgtaggtgtgcaaggtgtcctgggagtgggggtaacaaagtcacctctagactttgggtgtgccctccgtacctgccctgggatctgagacctccccaggctccatcccagcttcttgcacacaggtggagctgtgagtttggggagatggagaaaggccgggagatcaaggcagactaatgatattgtgggttccccctgccctcctgtgaggtggccacgggacagtgtgtggactccccagctccttgctgggctccactgggcactgttcgaggtctagtcagggcgtcccaggtcacaagggggcatggaggaggacacttgtggccctgggccacaggggacattgggcaccacatgtgagggtgtttatcatggaggaggtagtgattccagcagccgccattgatccagcacgtactgtatgccaggccctgccttagcgcctggcacagaaacctcatctggccgcctcccccgctgcggtggggcctaccccatctccgtttcctagagagggccctgcagagtggcgaggtaaaatgacttgccaagcaaggcaagatcaggactcaaaccaggcctctctgtcagagcctcccatttcctcagaactctcaggaggaaagggaggtgaatttttctgcacagctcccaaaggccttgacagggaggtggggttcagcacactacaggaaagagtttccagcagctggagctatccccgaagtggaggtagtgagcaccccatcactagacatatgcaagaagagacagaaagggaagcgtagaggggattgcagtgtggagtggaggttggatgggaggacttcagagttcccttgcagcttaacaatggcctgtgaggtggcagggatgagtcagggtatgcgtgtgtggagggaggggtggtgagatgaagaccagggagaggaaagggtggacctgaggcccccatggagaagggacgggcaggatgtgagtaatgggagaggcaatcacctattctcctgggcaatgctttgggggtgagcagcggcagaccaggatgccccagggaatggccaggtttgggccatctctggaagtgactggtccccggagagaggtggtggggctatctgcagctgaagaaacgggcagggccagagaaacaatgcaaggggactcctgggttttggctaagtagttttgggggagcaggtgaagacgtggggatccctggcccagccaggagctgccctagtataggcccagccccaagggttgtgtggggcagtctggaggttttggcctgggaaggggtcgggggaaggctgtataaaaagcttgaaagtgcggaacaggttggtggacctgaactccacctcctcgagtgggccccctgtatccacacccttcccagtcctgagcccagagttattctaaactcccgctgctgggagaggggaactgggaaccactaaatggcagaacagcacccttttccggccatatcacctgggccagaaaaaaaaaaaagagggggcccagagaaaagcgggctgtttctggggcaccgcggaggccgcagatcagaatccagctttttacaatagagcggaagcgaacctggctcagggcgattccggggcgggctaggcctgcgggtctctctgcctggtcccccggggcttttctgtcgcgcggaggcttcctgtcgcgggccctggtcccccctagcccccttccgggatgggcgagctcccgtcttcaagcccaagttaatgaccagggactttgaactttttggagatctgcaaagggctggcccctcggggacagtgacgccccccaccccctcccctgagcccggatcctggattaccccaagccaccgcccggcctccagccacctccctggctccggcgcggggcccttcctgggacccctcctctccccggtcccagccgggcggcgccgttggtacatcccggccggtccaggtggtagcgcccgcgcggctaccgtaattcccctacgtcccgcgccccagtttgcgctgagtcgactgagcccgtcccgcggctcccgtccccctctccccgcgcgccccatgaggctttggcagtctcggcccgagccttagagccttagacaccggggaggagaccctggtcctgttcctaggtgagtcgcggggaagtgggagctgcgctccggacggggggtgggactaggcgccaggacccccctaaaccgat

SEQ ID NO: 257 - DNA, 2300 bp, Homo sapien
acctgtaatcccagctacttaggaggctgaggcagaagaatcgcttggaccctggagaaggaggttgcagtgagctgagatcacgcaattgcactccagcctgggcaacagagcgagactctgtctcaaaaaacacccaataataataataataacaattattgctgaccgaacatgtttacatgccaggcggggcgttaggccctcctgcttgtctcagtgaagcttcttgagaccctcaggagaacagcgttattcttatgaccacatgacttgtaaggaaacggaggcccagagaggtagaggaacttgcccacatcacacagcatgatcgtcagagcctggcctgcgtgaggcttgtctgatcaagagccctattcttactctccaggatgtgactagcgttttgaaggagatgacttcatttattcatttaccagaccagctctgagcatctgtcggtgccaggcccagttctaggcccaggagatctccagagaacaaaggggatgccctcctggaggtgacattctagctgtgctgggaggaaggaagggaagtgaccctggctggccaaacttccccccaggctgccctggcaaaggaccaatttcaggcagggctggacccttcggcttctgggcccacccttgatgttttatttgaggctctcctgggtgctggagcttctgagatgaatttgccatctgtcccctacctcctgcccctggagttcccactgggaggagggctaaccaggatgggcttcctggaggcaactggagtcctgaggattaaagaggtactgagatggaggacagctgagtgagcagggggggacattgggggctataaggggcaagcgaggccagggggcacagggagaaggggacgggaggagggggaggcaggctgcactaggagcacctgcatgtccagatgaggggtctggactgtgtgtcatggagaccccaggagagaaatggcccctccccaggatgaagatatgtagagcagtccacacctctgagctccaggatcaaacctacttttttccagctgtgcgaccctggggaagtcactacacttctctgaaccccaggttcctcatctggaaaataacccggcagcgaggattaaaagaggcccatatataacatgcttagcatagagcctagcacagcgtaggtgtgcaaggtgtcctgggagtgggggtaacaaagtcacctctagactttgggtgtgccctccgtacctgccctgggatctgagacctccccaggctccatcccagcttcttgcacacaggtggagctgtgagtttggggagatggagaaaggccgggagatcaaggcagactaatgatattgtgggttccccctgccctcctgtgaggtggccacgggacagtgtgtggactccccagctccttgctgggctccactgggcactgttcgaggtctagtcagggcgtcccaggtcacaagggggcatggaggaggacacttgtggccctgggccacaggggacattgggcaccacatgtgagggtgtttatcatggaggaggtagtgattccagcagccgccattgatccagcacgtactgtatgccaggccctgccttagcgcctggcacagaaacctcatctggccgcctcccccgctgcggtggggcctaccccatctccgtttcctagagagggccctgcagagtggcgaggtaaaatgacttgccaagcaaggcaagatcaggactcaaaccaggcctctctgtcagagcctcccatttcctcagaactctcaggaggaaagggaggtgaatttttctgcacagctcccaaaggccttgacagggaggtggggttcagcacactacaggaaagagtttccagcagctggagctatccccgaagtggaggtagtgagcaccccatcactagacatatgcaagaagagacagaaagggaagcgtagaggggattgcagtgtggagtggaggttggatgggaggacttcagagttcccttgcagcttaacaatggcctgtgaggtggcagggatgagtcagggtatgcgtgtgtggagggaggggtggtgagatgaagaccagggagaggaaagggtggacctgaggcccccatggagaagggacgggcaggatgtgagtaatgggagaggcaatcacctattctcctgggcaatgctttgggggtgagcagcggcagaccaggatgccccagggaatggccaggtttgggccatctctggaagtgactggtccccggagagaggtggtg

SEQ ID NO: 258 - DNA, 2300 bp, Homo sapien
agagggaaatgagcacagtgtgggggtgaggctgggctgggcctgaggatcctgagagttcccgtaggctgtgcactgaggaggcccagggccccgggcagctgcttccctctcagcctggaggcccccggggtgcctgtggcagcccctcctcgagagccccctccccagggtcatgcagatgtgctgccccccaaagggctaccctgcccaccaggccccctgtgagctccccaagtcttgtcagggtcaccagtgagtccccagcacccagcttagagcttggctcatggggatcctcagaggatctttagtgtgtttgctgaatgaatccagagagctcaggagacccgggatccgtgctactttgctgtgccaggagtccttggggcaggcaccagtttctggtcacctgtgagtcccagggccggacccagcccatgtaaggagtccatgcagggaggctccagctgagaggccttccagtgaaggggtcagggaagtccacccttagcctttgggagagggacccggccctgctggaagctgcatcttctatacctaggtcttgtcggcgcaatgcctcctggtgccagtgtgcagggtgggctgggggtccagaggcaggctcaggagcactgagcccccgcagactcttggccacctctgcgaggctgtttctgtagggcaaagggtttgctatctcctgatgccatttacataaactacaggaccgggcagacgaatcgatgtgttggaagtcagggcggcggtgcccttggggggaccggttggcacgagggaggtggcgggggctggggactgggtggggacgctctgcagctcggtctgggcacaggttattttgtgaaagtttcctgaaaatgtgttgagctgtgctcacaggacaggtgcacttctctgtccgcgtttgcacttcaataaagtttaaaactgaaccagcagaggacatgcagcaagagccgtggcaggcgagtctctcccggtgacagccctcaccctgcgcggggcagcctccgtgttgccatggaaactgacctcggagacagcgattccgggctggggtgggggctctgcgtggctcccggcctgcattcctgcggacaggcaccctccgcgtggatggcaccctccaggacagagccgtgcgcgcttcctgagccgccccggtgcccgccctccgggaggtggaggcagcctccggaccgcagcgcgcaggggccggggagccggggagggaggggtgacaccgtcggcgccgaggcccggccgcgctcctgtccccccgccccccgcccccgaggcggggccgccgcggctcctccccgcccacctgccccgcccgcctcccgtgcgagggtccggcggcggcggctctgcggcctcccagtccccggcgtccccggcgcccccgcccgccgcccgccccccgcgcggcacggggcctgctccatgggtgagtgcaggcggggacccggcggacgcggggcggggtcctggggggccgggccggctcctaacctcctccggggagggcccgctccaggcaagggggtgggcgccgaccgggcttcgggccgctcgtacccaaactcggcccccaagtcggggcctgcctcggcagcaccccgcttctcctccctccccccgcctctcgctggttgcgccgctctgcccccaccgcggtgcactccagcccccaggaagagaggcagcttggagggggccaaattcagggtcaaagatgagtcttggggaacgggggtcgccccagaccttcgggggctcctctgtctctaaagggagcgatgcagggcgtaaggttctcagggatctgggatcttggagccccttccccccagcagccctgccgggaccccctgggaagtctggggccccaaaaggtcactgagcgctcccccacttgtcccccagactagagggacagagggagagagcagcgtatttccaaagatgttttctccccgtggaatctggataatttccctgaggactgcaggagaaaagggctctgcaaacggattcccgtgcagataagttggcatttaaaagagaaagggacgctgacctcttttgaagggaggactgaggagatcaccccacccctcctccggttgggaggccagtggggcccaggggagcctgggtgccccgctgactgatgccctctgctcctcccctgcagacgaccagagccccgctgaaaagaagggactgcgctgtcagaaccccgcctgcatggacaaggggcgggcggc

SEQ ID NO: 259 - DNA, 2300 bp, Homo sapien
gctttagagcagagcccagagggagctacctcccaggggagccaggaccaggggatcaggagtgtagggtctagaaggcagggtgagcacctggagcctgctgagaccaggggtcagaggccggagagttcaggcaggtagaccccagtgccaggaagtaccaggcaaaggacaaggaattccagaacccaagtggcatagaggccacaggatagtcaggcccgatggtggctgtgacctgagcagtcatggggggatctagggagctggtgaggcagacccagtggcagaagacatggcccggagccttcagaatacggggctacaatccagaggccctggggcaaagggtgtgagaatccaaccccaggctcagagttttgagaacgcaggggcctggaaactttctgggcggacagcagatgttgtcctgctcagctggagaagtcccaggctggacgcatgggaaactcccacaaagctggctgagggctccaggtccccgtggaaacacagatggcagaggagggcctgctggagtcatggcagacaaaagccccgaaccccactccaccctcaagtcagcttcctcccagcaggcagggacctcgccacagtcctcacagggccgtctcttgcctcggctgcctccacctccagcctagaggcaggacaggcatcgctggccccttggatggctgagagcagagactcggagagggaaatgagcacagtgtgggggtgaggctgggctgggcctgaggatcctgagagttcccgtaggctgtgcactgaggaggcccagggccccgggcagctgcttccctctcagcctggaggcccccggggtgcctgtggcagcccctcctcgagagccccctccccagggtcatgcagatgtgctgccccccaaagggctaccctgcccaccaggccccctgtgagctccccaagtcttgtcagggtcaccagtgagtccccagcacccagcttagagcttggctcatggggatcctcagaggatctttagtgtgtttgctgaatgaatccagagagctcaggagacccgggatccgtgctactttgctgtgccaggagtccttggggcaggcaccagtttctggtcacctgtgagtcccagggccggacccagcccatgtaaggagtccatgcagggaggctccagctgagaggccttccagtgaaggggtcagggaagtccacccttagcctttgggagagggacccggccctgctggaagctgcatcttctatacctaggtcttgtcggcgcaatgcctcctggtgccagtgtgcagggtgggctgggggtccagaggcaggctcaggagcactgagcccccgcagactcttggccacctctgcgaggctgtttctgtagggcaaagggtttgctatctcctgatgccatttacataaactacaggaccgggcagacgaatcgatgtgttggaagtcagggcggcggtgcccttggggggaccggttggcacgagggaggtggcgggggctggggactgggtggggacgctctgcagctcggtctgggcacaggttattttgtgaaagtttcctgaaaatgtgttgagctgtgctcacaggacaggtgcacttctctgtccgcgtttgcacttcaataaagtttaaaactgaaccagcagaggacatgcagcaagagccgtggcaggcgagtctctcccggtgacagccctcaccctgcgcggggcagcctccgtgttgccatggaaactgacctcggagacagcgattccgggctggggtgggggctctgcgtggctcccggcctgcattcctgcggacaggcaccctccgcgtggatggcaccctccaggacagagccgtgcgcgcttcctgagccgccccggtgcccgccctccgggaggtggaggcagcctccggaccgcagcgcgcaggggccggggagccggggagggaggggtgacaccgtcggcgccgaggcccggccgcgctcctgtccccccgccccccgcccccgaggcggggccgccgcggctcctccccgcccacctgccccgcccgcctcccgtgcgagggtccggcggcggcggctctgcggcctcccagtccccggcgtccccggcgcccccgcccgccgcccgccccccgcgcggcacggggcctgctccatgggtgagtgcaggcggggacccggcggacgcggggcggggtcctggggggccgggccggctcctaacctcctccggggagggcccgctccaggcaagggggtgggcgcc

SEQ ID NO: 260 - DNA, 2300 bp, Homo sapien
atgttggctaggctggtctcgagctcctgacctcgtgatccgtccaccttggcctcccaaagtgctgggattacaggcgtgagccaccgcgcccggcctaggtcatttgtttttgggtttggatggcaagatcatggataagacagcaggctttgattatagagctctgagttcaaatcctggctctaccacttgtcagtggtgtaacttggaggaagatgcttagcctgagcctgttttatgttttgaagattgggtaattgtccttccttcagtgttcctgggtgaggagtaagtgaagtcatgtctataagagatgtagcacagtctccggcatgtagaaacggtcagtaactcctagtgtgtagctagcctctgatgagatggtaaactcaggaggctggcaccacggctgtgctactcacggtcatgctggagggatgcagaaactaaatgaatccacagctacttactcatcttgcctctggcaggttcaccttaaaattgttgctaccaagcttcctgtggtcaaagagcccttgaggaagcaagctccacggccaccatagataacccattcctgaaagtttttcataaacccccacttgttgcttttaaaattttataagcagcttacacatgtagaaaatgatcctccagcccaccaccacatagtaatcactgacactgtgaggtgtctcagctggggttctgctgtgtgtgtgtgtattttacaaaatatgtatggtttctgttcagctcttttcagttaacagatgaacttttgtatcattaaatatttttgaaaacatgaatttagttgtgtaattttatgtagataggtcattttattccaggtaatcacttaaatgcttagaagaaactatagtgaaaaaacactgggaggaaaaaaaatgttgaaaggcggttaatgaagtgtggagactccagcaaatgcttgtgatgtgtttgtttgtttgttttgttgtgcccttttttttctttttgagacagagtctcttttgcccaggctggagtgcgatggtgcaatctcggctcactgcaatttccacctcccagattcaagcaattctcctgcctcagcttccccagtagctgggacgacaggcaggcaccaccacacccagctcacttttgtatttttactagagagggggtttcaccatattggccaggctggtcttaaactgacctcaggtgttccacccgcctcggcctcccaaagtgctgggattacaggcatgagccactgtgcctggcctgttttgttgttgttgtttttaaccattgaagtattgagtgcagtgggagtttattttttcagtatttttaatttttatttgtcactgacttgaagctcaagtgggagtttaattttcctgtcttggttcatatgtaagtaaagaggggatgttgcattctttctggactgtctttgggagtgtattagaaggaaacagggctttgctcctggaagagttcaagttttaaaaaactaaaatgactcatgcctgtaatcccagcaccttggaaggctgaggcaggaggatcacttgaggccaagagtttgagatcagcctggtcaacatagtgagacaccatctacttaaaagaaaaacaaaaaaaaaactgaaacaaacccccacctagtgctgtgccgataaaactgcctctcggcagcgaggactcagcccttgtcttcccacacctcatagggttgggcctagcagagagagattggctgacaagcccagcctgaacagtggctaaagtaaatatgggggccatctatgcagtaagtggggaagcctacgtgatgttcagggccttttcagaaagaccttgctaagttaagtattcccaaggctttgccaggaagagcggtagccgccgagttgggggcagcaggtccagtctgcagtgccaggagctgagcaagcaaagtcttgcgaatcagcagagttcagctgggcagacatgtgctgggctgggaagccaagggtagctatggtaaccggccctgaggcggctgcggtgctctgcagactggcttgggtttttctaatgttttgaggctcacttgatctcccgctgtgaccagcccctctctgcctggcaggggaaagccaccaaactaaggccttcctggtagccaaggagcccagcagaggggctgctgctggctgctgggattgcagaggccggggtctctgtggtgttgctttcctggaaaggagggacggcacctccagggcagccagcagtgtgggagcccattc

SEQ ID NO: 261 - DNA, 2300 bp, Homo sapien
tttccgactcatccgattctggcttaacaccccaggggtcactctcgttagccttcttcactttcatatttgtaagttggttctctggtgggaagaaacctgcctatgattatttacaatatatttgcatatttgctcagtcttctctgaactatacaggccactccctctgctgctggctaccccacatccctgcccttactggccccaaccttgaaaggagcctcgctggctgaattcgcagctcccatcatagtggccactctgacggttgagtggccttgctgcaatcacactgacccaggccatctcccttctgaccctgtcacacacagtcctggtcactggcctgctgactgtgcagaccctgccctcattgaactgctcagctccctgtccctggccagaggagatatgtcatgattaggagtgtgaacgcaggagccggcccctctgggtttaaaccagcttgctgtttactgactggctgaccttgttcaagttgatctctttcccaatttcctcatctgtaaaaatgaggatactactacctgccacagggttatgaaaattagaggctcttggctgggcatggtggctcacgcctgtaatcccagcactttgggaggctgaggtgggtggatcacctgaggttgggagttcaagaccagcctgaccaacatggagaaaccccgtctctactaaaaatacaaaataagccgggcatggtggcacatgcctgtaatcccagctacttgagaggctgaggcaggagaatcgcttgaacctggcaggcggaggttgctgtgagccaagatcgcaccattgcagtccagcctgggcaacaagagtgaaactctgtctaaaaaaaaaaaaaaagaaagaaaattagaggctatatgtgaagggcctcttagaacagagtcattgctgtattgctataagacacacatggctattcattgccctttcattgggatagaagccctgtgagggtggggatgtttgtctgttttgtttacagatatgtcccaaatcactggaacaagcccagcagttagcagatttgtgtgttcgctgaatgaatggccatgttaggacataattggcattagccatttatgtgaaagtgagcatgtctttgtgttaagttgaaagcttagatttccaaaaaatggaattagagtgttcctgtaggtaggatggtctcagatttcctaaggttctttgtcagtgataacggctgaaacaaaaccctcaccaccttttaagtagccaggattgatcactcaccttactcatctgattactcatctttatctttttaggaccacctttcactcacctgaggactccacagaagatggtatattatgggaaaccttcttgtaaaaacaactatgagaattatattgacatagtgaaatatgtgttcagcgcttacaagagagagtcccctctcatcgtcaacactatgggatgggtttcaggtaagcctgcatgtgcacatctgcaagggaaggacaggcagtgtgagtactgttggtttcagacattcacgttaaagcccagtgttttgttttttgtttttaattgaggcagggtctcactctgtcgcccaggctggagtgcaatggcgtgatctcggctcactgcatcctctgcctcccaggctcaaacaatcctcccacctcagcttccagagtagctgggaccacaggcgtgtgccactctgcccagctaatttttgtagttttagtaaagatggggttttgccatgttggccatgctgatcttgaacttctggcctcaagtgatccgcccaccttggcctgtcaaggcatgctgggattacaaacatgagccactgtgcccagccgaagtccaacgtattgatggtttctttgtcttagaacaaatgcatccatttgtcgtaggagcatgtcactgttcttgagcgcgtcactgttcttgagtgtatcagctgtgctaatgtctcttccccacagaccaggggctcctgcttctcattgatctgatccgattgctgtctcccagccacgtggttcagttccgctctgaccacagtaaatatatgccagaccttaccccgcagtatgtagatgacatggatggcttgtacacaaaaagcaagaccaagatgagaaatcgacgtttcagactcgcagcatttgcagatgctttggaatttgctgatgaagaaaaagagagtccagttgagttcactggacataaactgataggtgtttatacagactttgcattcagaataactccaa

SEQ ID NO: 262 - DNA, 2300 bp, Homo sapien
ccttcagcagagaggatacccaggccaccagatgcgataataatgctgatggagttgaatagatagaaacaagatggttccagctctgagccctggggcactccaagaagaggtccaggcaaagatgagggagcagcagatagtcatcggttttggtggaaaacccagtgtgtgatgtcctgtaggtcaggaagtctttaaacgagagttaactgaacagcggtggcgaaagctgctggtggtcaggtgagacctgagaaagcgctggctgtagaggccgggaagtagcctgattggaatggggtcaagagcctgggcggagagggactcacaggcttagtagtaaagtattttgctttggtagaagttagctgtaaagggaagaaaagaaatgaagcactagttgcagggataagtatgatcaggagagttttgtaattttgttaagatggatgaaaaaaacatgctggaacatggcagatgggaatgatccagaggaagggggaggtaaccatgcagcagagagaggagaggctgctggaactatgtaagttggctaccagggatgggtccggttctggcatcatgtggccttaggagcatagccaggtcattcatagtggctagaggaagtcccttggagagggccagaggaagtagaagttgtcctctgattatttcctgctgcactgggaaatgaaatcaaggtcgtcactgtgtgggaagcagatagatacgaggtgggtgtggggaatttgaagtgaaaggagagaagaaatgagagtgggacagcgaacggactgttgtgattgccttttagtcttttgcagagtccagtagctggaccaggactgcagaggaggagatggaattgcctgttctcaagccttggttactgaaagtgaatgttccagatgctatggggcagccacattcttttttcatttattttcagctttatctgtttttctgggacttcaccaccactgttcatatttcttatgctctttcttggatacttccctccctatcccaccctctggatgtgtcagtagattctggagttgttttttcacataagggagatagtaaacttgattatctaattttgttagatattcttgatttgccctcagtgattgataattgcacacagtgtagaatggttggttcaacagacttttttctcaaattgttgaaggccttgttctgttgttttctaagatccagcattgccgataggaagcctcacactaggctgcttctcttttttttttttttttttttttttgagacacagacacagtctccctctgtcgcccaggttggagtgcagtgccacagtcttgactcactgcaacctccacctcctgggttcaagcgattcttgtgcttcagcctcccaagtagctgggattacaggcgtgcaccactgcgcccagcctgcttcacatttctttatggtatctttattttcagtgttgatgaattgcaagaggacggggcccttccttcatcctcttctgtggtgagctggttccaactgagccttacctgcctcagcaagggcctgctcttcctttccttgggttgctttcccagtcctggacttcacagacctgtcttctccctcctttcaactctgtttgcatatgttctgtccgtgtgtttttgctttatgttttcagaggttgccttgacttgattctacatcactcacctggtctagagccagggcctcctgctgaatgtttcctgtgcagtcatgtcttaccaggcattttctttttctctggagtctcctgcggaggcagtgaaggctcgagagaaagcagaaactgaaaatagacgtggataacttcaggaatacagttggcaacacttgttgatgggttggattttggggcaggagacaaagggaggaaacaatttatcttctctggctcacaactgtgtgaggcttgattaatttagtactgaagaaaaaaatatgcattttttcaccttaaagtttaaattgttgatttcagagtccaactccccagattaaacctgaatatttagccttgaggtctgttggcatcagaagagagaaaaaaaggaaaggccttcagttaactgagagtaccctttcagccctggaagagttagtcaatgtttcctgtggtgagtaatacacattgatcaccctgaatgtctgtccaccagacccccagaggaagattagtcataattcgagtccaaggaagacggctaattctagcgatcaatgtttgtttcccattcagaagaagtagatg

SEQ ID NO: 263 - DNA, 2300 bp, Homo sapien
gatgtggtggcacacgcctgtaatcccagctactctggaggcagaggcaggagaattgctttaacctgggaggtggaggttgtggtaagctgatactgtcccaaaaataaataaataaataaaaattaaataaaattaaaaaatttaaaaggctgcagccataaaaagggatgagatcatgtcctttgcagggacttggatggagctggaagccgttatcttcagcaaactaattcaggtacagaaaatcaaatatcggccgggtgtggtggctcacgcctgtaatcccagcacttttaagttccagggtacatacgcagggtgtgcagatttattacgtagttaaatgggtgccttggtggtttgctgcacagatcaacacatcacctatgtattaagcccagcatccattcttcctgacgcccttccccagacccccacaggctccagtgtatgttgttacccaccatgtatccatgtgttctcatggttcaaatcccactgataagtgagaacataccatattttgattttctttctttttttttgagatggagtctcgctctgttgcccaggctggagtgcagtggcgcaatctgggctcactgcaagctccgcctcccgggttcacgccattctcctgcctcagcctcccgagtagttgggactacaggtgcccgccaccacacctggctaagttttttgtattttttttagtagagacggggtttcaccgtgttagcctggatggtcttgatctcctgaccttgtgatccacccgcctcggcctcccaaagtgctgggattacaggcgtgagccaccacacccggccgatatttgattttctgtacctgaattagtttgctgaagataacggcttccagctccatccaagtccctgcaaaggacatgatctcatccctttttatggctgcagccttttaaattttttaattttatttaatttttatttatttatttatttttgggacagtatcactgtcgcccaggctgcagtgtactggcatgatctcagctcactgcagcctttgcctctggattcaagcgattctcatgcctcagcctctggagtagctgggattacaggcacatgcccagctaatttttgtaattttagtagagatggtggtggcgggggtggggtgcaggggggtttgccatgttatccaggctggtctcaaactcctggcctcactcaagtgatccccccacctccttctcccagagttctgggattactggcgtgagccaccgtgcctggcccaatacttattactgatggagtggagtggtgtaattacggttcacagcagcctctacctccgagactcaagcagtctacccacctcagcctcccaagtagctaggaccacagaggcatgccactgcaccctgctaatttttaaatgttttgtaaggagaagtctcactctgttgcctaggctgatcttgaacttctgggctcaagtgatcctcctgtctcagcttcccaaagtgttgggatcacaagcatgagccactgtgcctggccttacctgccttttgatgtgtgaatagcaagttaagattttagaatttggccaggtgcggtggcgcacgcctgtaatcccagcactttgggaggccgaggtggatggatcacctgaggtcgggagttcaagaccagcctgaccaacatggagaaaccctgtctttattaaaagtacaaaattagccgggcgtggtgacacttacctgtaatcccagctactagggagggtgaggcaggagaattgcttgaacctgggaggtggaggttgcggtgagccgagattgtgccattgtactccagcctgggcaacaagagcaaaactccatctcaaaaaaaaaaaaaaaaagattttagaatgtttcagtcattagtgacatgatctataatgttttttctgttttctctccctgctagggttttacttttagtgggatctgtcgtgtgacttgcctctatggccaggtgcaggtatttggttttaccatcagccaaggccagcctgcccaagacatcttctctgtgtatacccactcttgcttgagtatccatgcacttcactactcacagcctgagaaaagcaagaaggaactgaaaagggaagcccggaatttgctcaaatctcatcttaaccttggtaatgaaaagaactgggtaatttactgagggcctactgtaataaggctaattcataatttttagggccaggcgcggtggctcacgcctataatcccagcactttgggaggcc

SEQ ID NO: 264 - DNA, 2300 bp, Homo sapien
tgccttccctcctgcattagacagggaatctccaggaatggcatccacgttaagaatcaggctgcctgagttcgactcctagctctccctctactgtgtaagttacccaacctcagtctcctcgtctgtaaacacttagagagagggacaactactccgtaagagagctggatgtttaaatgggttcaaagcctaaaacacttttggaacccttaaatcctggaatttctgagctctcagtaattgcaaccttttttttttttaactattaaaatccctttcagagttccaggtgcggtggttcacacctgtaatcccagcactttgagaggccgaggcgggtggatcacaaggtcaggagatcgagactatcctggctaacatggcgaaaccccgtttctactaaaaatacaaaaaatatagccgggcgaggtggcacgcgcctgtagtcccaactactccggaggctgaggcaggggaatcgcttcaacccgggatgcggaggttgcagtgagccgagattgtgccactgcactccagcctgggggacagagtgagactctgtctcaaaaagaaaaagaaagaaagaaaacaaaacaaaataaagtccctttagctcgtaaggcctagggaccccttagcagggtacctgttaccctgctgctcaggggagcctagttgccaccaaccatcaagaggatggacttgaatccgactggcagccagagaacaggcccgggggaccacggtcctctcctaccctgcagctctcccggggctgcctctccagccctccctgccctcggggactactaccggcgccccccacctacctgctcgaccggcagcagcagcaacgcgcggccggggcccacgggccgcaccggtgggatgaggagaggccggtggcaactcgaggcggattcgagttcgggttcggactcgggttcggaggccggggtcgggctagggatcgggctgggggtcgcggtgttgggtctccgggccgccgccgcgcgcgacacctggcgggctccctccctccagtccacgccggacgcctgggcttgcagtaaccgccaccgtaggcgccgccgaccgcaccagcgcaggctcccgagccggcggcggggccggcggctgaggatgagctggggccgggccttgcggacccgcagccaagtggaacggcaggaaccccgctttagcagcagtcccgagtccgccatgctgggtcctcagggcctaccgcgcgagaatctcgcgagatcccgtcggtccgccccgctgccctcccagctgccgaaaagaggggcctccgagccgccggcgccctctgccggcaacctccggaagcacactaggaggttccagccgatctggtcgaggggctccacggaggactccatttacgttacgcaaattccctaccccagccggccggagagagaaagccagaaacctcgcgaccagccatgggccacctctccggaaaaacaccgggatattttttttctcctgcagaaaaagctttaggattggcagtttaaacaaaacatgtctatttgcataccttcggtttgcatgcatttgtttcgaagtgagcaaccctgggtaacaaggcgaaagtatatgacaatttgctcagaatcttaatgtcagaaaactggagactggggcaggggggtgtcgactcaaagctgtgtctcatttagtaaactgaggcccaggtaaaaagttctgaaacctcgcaacacccggagaaattgtgttccagcctcccacctcgccccaaaatgccagagctccttttctaagccaggtgaagtcacagagcgtggacagaacccacaaccgtccagaggaagggtcactgggtgccacctggtttgcatctgtgccttcgtcctgcccagttcctgagtgggaccgcaggcccggaatgtcaaggcaaacagtcctgcttcagccactgggctccagtcccaccccttttgggggcctgaagttaggaagcatccggcagctgccttctatttaagcaactggcctccttagaggccactccttggccatgccaggcgcgggcatctggccagcatgctgctctgcacggctcgcctggtcggcctgcagcttctcatttcctgctgctgggcctttgcctgccatagcacggagtcttctcctgacttcaccctccccggagattacctcctggcaggcctgttccctctccattctggctgtctgcaggtgaggcacagacccgaggtgaccctgtgtgacaggtgagtgag

SEQ ID NO: 265 - DNA, 2300 bp, Homo sapien
gaggtcgggagttcgagaccagcctgaccaacatggtgaaacccctgtctctacgaaaaatacaaaaattagctgggtatggtgacacatgcctataattccagctactcccgaggctaaggcatgagaatcacttgagcccaggaggaggaggttgcagtgagtcaagattatgccactgcactccagcctggatgacagactgagtctccatctcaaaaaaatatagatagatagatagatagatagaaataaaagaaaagcagtagtttccctctacctagattgttgacttcatgatggcaccaacctaatttatatttgtcaagctcctaaagcatctaatgggatgtgtcttcccttcccaccccatgaagaaccatggagaatcctacttgtcatctgggactctagggaactttgaacatgggtaggagtggagagaagatagaagagggaaaaagcggctgggcgcggtggctcacgcctgtaatcccagcactttgggaggccgaggtgggcagatcacgaggtcaggagatcgagaccattctggctaacacggtgaaaccccgtctctactaaaaatacaaaacattagctgggcgcagtggcgggtgcctgtagtcccagctactcgggaggctgaggcaggagaatggcgtgaacccggaaggcggagcttgcagtgagctgagatcgcgccactgcagtcccacctgggtgaaagagcgagactccgtctcaaaaaaaaaaaaaaaaaaaaaaagaagagggaaaaagctgcccttgcttaggcctggccacctaggtatggtacaaagccaagaaccaatttcaatgaagttacaatacaacacattctaacagcaagggtgaaataattggaaactggccgaagtgtctaggaaggtctagccagcacttaggtggcaagtggattgatgaacaaggcctggggacagttcaaggggcaaaggcagaggcaaggtcctgtttggaggatggcagccagaggggccctatagccaggggtcccactaagtgtggctctgctggcccctcactcacctgtcacacagggtcacctcgggtctgtgcctcacctgcagacagccagaatggagagggaacaggcctgccaggaggtaatctccggggagggtgaagtcaggagaagactccgtgctatggcaggcaaaggcccagcagcaggaaatgagaagctgcaggccgaccaggcgagccgtgcagagcagcatgctggccagatgcccgcgcctggcatggccaaggagtggcctctaaggaggccagttgcttaaatagaaggcagctgccggatgcttcctaacttcaggcccccaaaaggggtgggactggagcccagtggctgaagcaggactgtttgccttgacattccgggcctgcggtcccactcaggaactgggcaggacgaaggcacagatgcaaaccaggtggcacccagtgacccttcctctggacggttgtgggttctgtccacgctctgtgacttcacctggcttagaaaaggagctctggcattttggggcgaggtgggaggctggaacacaatttctccgggtgttgcgaggtttcagaactttttacctgggcctcagtttactaaatgagacacagctttgagtcgacacccccctgccccagtctccagttttctgacattaagattctgagcaaattgtcatatactttcgccttgttacccagggttgctcacttcgaaacaaatgcatgcaaaccgaaggtatgcaaatagacatgttttgtttaaactgccaatcctaaagctttttctgcaggagaaaaaaaatatcccggtgtttttccggagaggtggcccatggctggtcgcgaggtttctggctttctctctccggccggctggggtagggaatttgcgtaacgtaaatggagtcctccgtggagcccctcgaccagatcggctggaacctcctagtgtgcttccggaggttgccggcagagggcgccggcggctcggaggcccctcttttcggcagctgggagggcagcggggcggaccgacgggatctcgcgagattctcgcgcggtaggccctgaggacccagcatggcggactcgggactgctgctaaagcggggttcctgccgttccacttggctgcgggtccgcaaggcccggccccagctcatcctcagccgccggccccgccgccggctcgggagcctgcgctggtgcggtcggcggcgcctacggtggcggttactgcaagccca

SEQ ID NO: 266 - DNA, 2300 bp, Homo sapien
ctctaaatgaatatagctattgttccctttgtgccctcttgtcctactgtcccttctgttgcccatgccaaagacagctagctccttgaacagcttggcctgaatacagatactagcgtgtctgcagcagagaaaaaaacagcattccccatccagaaatgcaaggtcaagaacagagagcaaattaggtagctaaggactcaggtccttagttggtgtccaggggccacattctttcctttcaccatctctgtagggacaggaatacttcccttctgtcctcagagggtcaggactcagagaaaccacagagcagcagctcaggaaagtggttcatggaaatgctggcaagagagaggggttacaatgccctcccttgggagcaggctgctcccatcagatcgtaacctctctggtatgtgggcagagctaccaggttaaggtcctccctagggtttgcaaaaccctcatgggatcatgagccatacagaaccgacctgtgtgtctccagagtctgtaattaacacaggcattttgaggaaatgcgtggcctcaggccccactcccggctacccccatcccactatgcctagtatagtctagctgccctggtacaattctcccagtatcttgcaggcccctatttcctattcctactctgctcatctggctctcaggaaccttcttggccttccctttcagacctctacagatgccagccttgtgggaaagaagagtgggcacctgagggaagccagacctgcttcccgcgcactgtggtgtttttggctttgcgtgagcacacctcttgggtgctgctggcagctaacacgctgctgctgctgctgctgcttgggactgctggcctgtttgcctggcacctagacacccctgtggtgaggtcagcagggggccgcctgtgctttcttatgctgggctccctggcagcaggtagtggcagcctctatggcttctttggggaacccacaaggcctgcgtgcttgctacgccaggccctctttgcccttggtttcaccatcttcctgtcctgcctgacagttcgctcattccaactaatcatcatcttcaagttttccaccaaggtacctacattctaccacgcctgggtccaaaaccacggtgctggcctgtttgtgatgatcagctcagcggcccagctgcttatctgtctaacttggctggtggtgtggaccccactgcctgctagggaataccagcgcttcccccatctggtgatgcttgagtgcacagagaccaactccctgggcttcatactggccttcctctacaatggcctcctctccatcagtgcctttgcctgcagctacctgggtaaggacttgccagagaactacaacgaggccaaatgtgtcaccttcagcctgctcttcaacttcgtgtcctggatcgccttcttcaccacggccagcgtctacgacggcaagtacctgcctgcggccaacatgatggctgggctgagcagcctgagcagcggcttcggtgggtattttctgcctaagtgctacgtgatcctctgccgcccagacctcaacagcacagagcacttccaggcctccattcaggactacacgaggcgctgcggctccacctgaccagtgggtcagcaggcacggctggcagccttctctgccctgagggtcgaaggtcgagcaggccgggggtgtccgggaggtctttgggcatcgcggtctggggttgggacgtgtaagcgcctgggagagcctagaccaggctccgggctgccaataaagaagtgaaatgcgtatctggtctcctgtcgtgggagagtgtgaggtgtaacggattcaagtctgaacccagagcctggaaaaggctgaccgcccagattgacgttgctaggcaactccggaggcgggcccagcgccaaaagaacagggcgaggcgtcgtccccgcatcccattggccgttctctgcggggccccgccctcgggggccggagctagaagctctacgcttccgaggcgcacctcctggcctgcacgctttgacgtcacgtccggcgcggagacggtggagtctccgcactgtcggcggggtacgcatagccgggcactaggttcgtgggctgtggaggcgacggagcagggggccagtggggccagctcagggaggacctgcctgggtgaggagggcgcggggtgagggagggaggggctgcgggccgccgtggctgccttccgctcggccgctcgggacctgtgggcgcggcgtgggcttcgctcacctgtccccggct

SEQ ID NO: 267 - DNA, 2300 bp, Homo sapien
tgctggatggcatcagaaagatccaggtcactggaggagtcagtgacccaggggaggactctgctccagccctgcatgtgtgcacttcctcctcgctctgagcagttgtcctcctgctgccccctccacagggatgactccgctgaggtggacgtgtacaacccgacgaggaacgaatgggacaagatcccgtccatgaatcaggtaaattttcaggcgggccagcattggaagcacaggctggtcctgattttgcaacccaagtgtcatcgtgatgagtgtttgggatccacagccatgatgggtgggtctcatctcaattaatagaaggctgctcttacccttattttgcacttaaggctcactgagacacagatgttaagtaataccctatgattacacagcttagtacacatttgagcagtgtttattgagtatctgctgtgagccagagagcagaaggaagtgagggagcaaggcatacagtcatctggggacacctgttccagagagggacagcaggtacagaggccctgcagcagggcaccctggcgtgttcttagatacaccagcagcccatgtggccggagcagagtcagcatgaggtctgtgacctaccttttttatttttgagacagggtcttgctctgtcacccaggctggagtgcagtggtacaatcatggctcactgcagcctccacctccttgactcgcagtcctcccaccgcaccttcctgaatagctgagactacaggcgtgtgccaccacacccagtaattttttttctcatatgtagatacaaaaggatattcttaaaatttttatagagacagggtcttgctgtgttacccaggctggtctcacactcctggcctcaagtgaccctcctgtctcagcctcccaaagtgctaggattataggcgtgaaccaccacgcccagctggttcctgaggaagtcagtgtgggaatactttttttttttttatacggagtctcgctctgtcacccaggctggagtgcagtggcacgatctcggctcactgcaagctccatctcccaggttcacgccattctcccgcctcaacctcccgagtagctgggactacaggtacccaccaccacgcccagctaattttgtttgtgtatttttagtagagacgggatttcactgtgttagccaggatggtctggatctcctgaccttgtgatctgcctggctcagcctcccaaagtgctgggattacaggcatgagccaccatgcccagcccactgtgggaatacttgtgttgagcacttgctgtgtgttctgaataggacaaccagggtccaccccttctctctgggcttgttgagaagaggggtgcccagcctgacagtgatgggacagggaggcttcagtgccatttggccatgtgagcagtgttagtctgaggtacacatcatattgcctacagccttctttcctgtgtgtctgttaacatttccaaacctacactccgtgacatccagcctcacagcttacatcacagcttaatgtcctggcatttaagagacccagcgttctgttttccccgcagtaagctgcacatagtcatagcgaatttgggaaagatggaaggaatcatccagcctcgcggttcagagcccagctctgccactgtcagccatgcaagcctcagttttcccatctgtaacatggggagaacagcactgctcagcccagagggccactgcagagattctgagagagaacgtaggaagcgctgctcggcacgacctgcacacggggaggcctggcgctgcagcgggcaccctcatcaccatagggaaggcccagctgcctccggggaggcccgttctcctaggcagggtgttggaaaggggttggcctctctgctgctttctgggagagccaaggccacccctctggggtactgacagggcatgccttgtctccagtggttccccaggtggggccctgccctaccctctcctctgacctccactcactcatccctttggcccacaggtacatgtggggggcagcctggccgtccttggggggaagctgtacgtctctgggggatacgacaatacatttgaactctcggacgtggtagaggcctatgacccagagactcgcgcgtggagcgtggtggggcggctcccagaacccaccttctggcatggcagtgtcagcatcttccgccagttcatgccccagaccttctcgggtgggcgtggcttcgagttggacagtggcagcgatgacatggacccaggccgaccccggccgccg

SEQ ID NO: 268 - DNA, 2300 bp, Homo sapien
atctgggcttatgtgatcttcccacttcagcctcccaagtagctgagactaaaggtgcatgccaccacgcctggccaatttgaaaactttttgttgagacaaaatattgggtcccactatgttgcccaggctggtctcaaactcctggcctcaagaaatcttgccccagcctcagcctccgcgtagctgggattacaggcgtgcgccacagcacccagctaattataattgttttatttttagtagagacagggtttcgccatattggccaggctggtctcgaactcgctacctcaggtgatccacccacctcggcctcccaaagtgctgggattacaggcgtgagccacggcgcctggccgaaaatgttaacttaataaatttttttaggcatatgaatacatataaatcaatttgggtcatacaatgagtaatctgatttttcgctttatagctcaaacatctttccatttcaataaatacatcattattcttcaaggctacatagtaagactgaaatatgatgtttaaaaatccctgttattgggaatacagaaaaaccgtactcaatcctcaactatggaaacattattgatttaatcactggacttacgcaagatgggtaagctgacccaggggacgggagttcttttccctacaaacattccacttcctggctactcagcctttcttgtcacaaagcctgtgcaaggaagctattggccctgctcctgggcccaggaatgctgccgctgccttgaatagctgtgtgaacagtccttctatgggcaacaggcggcccgcctgggtacctgaatgttttctgatttgggcctgtgctgcccatgctcaccctgaaattcagaccagatgcattcttatggcaaaatgacgtgaaactcttaagtagaagagaaagcctgcggttctcatttcagaggtggaataaaaacaaaatgtcttctggaaacgctacgcggccctagacctcgctggaaccaggaaatgatagccagctcccatgcgcgtggcctgctctgggacccacgtgggcgggcgccttcctcaggaatgcgttctcaaaggcccaccggtgtaggggggctggaaaacagcacaaacccaagtgttctctgcaaagcagcagtcctggtggtgaaataggggtcttttctaaaactgagcaaagcctaccttccactgaggaaaaaatggcctccaagggagggctctttttcccctacaagtgacattcaaagtggtgctgtgtctatcggaactaaaataagggcgattccttctttcaccattccccaccgcagtacaagtgacggcgggactgtgcttagtggcgtcatctagtttcaaggcggtctcctatctgactttgagccctcgctctttatacccagttaccctctcgtggagtccgagcagctgcttcagggaggcccgggagcccctagggcgggcagccccggagcctgcagctgcgacgcagactcggaaactacaactgcgcgtgaagccgactaaagttaacgcctgtgtgattgagtcagaagctccttcaggaacacaggagtggggccgactcctggaatccggccccgggtcgcttataaatgcgccaagaaaaaaacgtcaccgaaaaactttatacgcgttcttgctttggtccagaatggtaaaaagcctatcctttgagtgtgtcccgtgatggggttaactagcaacccttgaaactagtggaactcaaaagcaaaacaaaaagccattgtacccagccgccccgggacctgggccggcgcccttgggaagtctggcgtgaaaggaggggtggctttggtttcagggccgagctcgcctctcccgggttgggttcagcagccgggccgggtgggtcgtgggcaaccccgggaggcccccggtcccggcgcgcggcgaggccgccctcggacctggcacttgtcactcgctgtccccggcccgggcgtcagcggggagacgcagaagggcggagggagggagccggccgcggacagcggtgactcagcctgcggagccgggggcgggcgccgcgcgggggacaggcgagcccgcgctcgcggggggcggtggcgcccggcacagaggggttaagggggcggtgcagacgtctccccgcccatcccgcccctcgagagccgcggcgccccgccctatttatagcagcggtgcctagcgcgccgcgtctctccgcaggccccggccgcggcgtcctcgacaacctatcgaaggcgccatggagcgaccggcgc

SEQ ID NO: 269 - DNA, 2300 bp, Homo sapien
tggtagtccaggctacttgggaggctgaggcaggagaatcgcttgaacccgggaggtggaggttgcagtgagctgagatggcgccactgtactccagcctggcgacagagggagattctgtctccaaaaaaaaaaagaattattctttttggtatttacatttttaaactaccaacgggatcaacaccttagcagtgtttcttattctggcaaaacgagttgctccttgtgaatatgaccttgggcaatacaggctaacttcggggcatctgctttggtcacagtaaccaggtaacattccaaatctggctaaatcatctgtgcaattgtataagaagttgttaatcaagtctcgatgggccaagtccaatgtctctgttttaatcagtaatttcatgttttatcttgtaaagtacctcaatttatcacctttgggaagccctccaatgggctacaatattgcagaaataataaaacaacaacaacaacaacaacagtaagctaccatttatttagccaggcactacgctaaaatttaacagcttaggaaactgaggctcagagaagtatttttttttttttttttgagacagagtctcgctctgtcgcccaggctggagtgcagtggcacgatctcggctcactgcaagctccgcctcccgggttcaagcaattctcccgcctcagcctcccgagtagctgggattacaggtgtccgccaccacgcccatctaatttttgtatttttagtaaagacggggtttcaccatgttggtcaggctggtttcgaactcctgacctcgtgatccacccgcctcggcctcccaaagtgctgggaatacaggcgcgagccaccgcgcccggccgctcagagaagtatttctaagattaacaccatctcctaactattaaatatcttcatcagaatgatcataacccttgaaatagcaacagccagcttgatggagcattcggcgcctgtcaaatatcttactagtatctccaagagttcgttttctaatttgaattttcaattttgtgtcactcccctttaacttcttcgaagctaccaaacaggttactgaatcatctgcgttttgtacttacctttttcccccactttcgaatattaaaaatgttcccgtcagaccgccttttggtcaccgcataggggcagtccccaccgtgtccggccagccttccacacgtacagctgtcggatactctgcggtccagcgtttacacactgcccatcccagttaaacaccactaaacaagtaccagtcgatgccagcgccaaacaccgcgtctccgcctcgccctgcgggccggaggatattcaggagagtgggaaaacggccggtcccaaggttaggcttaggcggcaacagaaagcaaactgaacgcacacctctttagaacactgacaacgctggcccggtgtttttaatgcacgaacccggccacctcgagtgaatcccgcagatgcctagagaagagcccggtccagtcccggccccgcgggcccggagcagggagccgcacgaagcccgcagccgcgaaaacaacttcgctgagcccggcctggagcgggggccgggcggcgactccgccctcagcggggagcggggagcggggagcgatgcccggggcggccgcgacgtcagcgtccccgcccctgccgcccctactcccggccaggcctcggggacccccgccccacaaaggggcgcgaaccccaagtaggagacgaggaagggtaggtgccagccgccgccgcccttcgcaacccgggccgtcagccccgcccccaccgccgcagcgactcccgcccccgcgcccgccgagaccaaggcgctaccgctcacactgcccctccccccgcggccgagccggcgcgggcccccgcacctcccccgctcgcgcggcctcgagtccagaagacccgcctccacacaccggggccgccgccgcggagcctcatgggggttggagtccccaaggtttcctttgtgcgcagtattggcggggccttggactaccactcccacaaggcaccgcgcccgcctcccgcgccacgccccctcgccgctggcttccagtcgccacccagactacatttcccgacaggcctcccggctctcccgccctccctcccgagacacgagccgaactgggcgtcaggtcggggagccggtcgggttcccgctcaccgccgccgccgccgccccctgcagccactctcccgcctctaccgccgcgggagctgcatcgtccactccggtcggcggtggaaccgc

SEQ ID NO: 270 - DNA, 2300 bp, Homo sapien
gcgcgctggcctctctcttcgggcccccgccccccgcccgcgggctttgctggctccgccccggctcactccccctccttccggggatcggccctcggggctcccggcctcccccccgcgcggtcccctccccccagccgaggctcgttggggtcgggggtgcgggtccggcgaccgcgggcgggtgggggaggggaggcggcgccggagcccgccggtctcgctgccgcccccgggggttcgcagggcctccccaggcctgggaccccggaatcctgcctggcgcacccccctcacacatactcgcgggatgggccccgcaccttcgggggccgagtgtcgcggggggcggctgccgcgggagggcgggtgggggccgctccgccatctgctttccgaggaggcggccgggggggcgggcggcgtgggccgtgtgggggcggcgtggaacccccagtccccgcgccggtgcctcccgcgcgcccccggcccgaggccgtcgccgccctccacttggcattcgggtttttgacccacttctgctggttccccgccgaaagaaaagttcttcgcgggagttggaggcccgggtggcggcccgcggttcccgtggctgggcaggctcgccagtgcggggagcgcggtcaacgcgggccttcgcctccgctccgtgggcggccctggggtccaagggggtgggagaggagaaggtttgcttgaaccaggttgagaaaataattttctaagggcaccgactttctcgaaagaaaacccgcgggccgcacgcctgctcctcgcggcgggaggggcggcccgagacccctgccccccatttccccaccggctctcccccagcagagtggcggccgggtaacagcacctcgggaaggatgggggtgggtcggacaaggcactgaaaggaacctcagggaacgtgccgggcgaataaacagcaatacggcacacttgttttgcttaggagcaaataagagctccatctctccgtgcttctctcaggagaaaatatctttttgtgatgggtgtttctagatggaatggggctgggacccgcgagcaaaaacctccactattccgtttaaatgtaagactaagcttcgcagtaaggttcttggtttattgtgagttgagatagttgggtgcctggcatcccgactggctgggacagtggaggggaccctctgagcacgagagaggggtcctcaggtggcgctagcttggcagggtcagccaggagtgaactccagggtccaggtctccgagagctctggagaatgagtggttgatttttttttttttttttttttgagttggaatcttagctctgtctaccgggctggagtgcagtggcgcgatcttggctcactgtaacctccgcctccgggttcacgcgattctcctgcctcagcctcctgagtagttgggactacaggtgcacgccaccacgcccggctaatttttgtatttttagtagagacggggtttcaccatgttggtcaggctggtctcgaactcctgacctcgtgatccgcccgcctcggcctcccaaagtgctgggattacagacgagagccaccgcgcccggcgagtggttgatttttgaaatcacttaacatacatcagttccagctgctgctgcagcagttcatactcagaatggaaaatctgtagcaaaaaagtagttattagagcttcgcctgataggcctgtggaaactaatagataaagtcagaaaatgccacatgagcactaagaaatagacttttgtagaagtttttatctcccagctgatttcccagcattcttggcataaagtcttaatactcctctttctgctctctgaaaatagtgttatttcttgacctgaacttaccgtatcttgtttgtggactgtgtaaatctaacggtattttttgagtgattgactacaaaagttccagcttacttccttttgtttctgtgattccgcctggaagcctctccttcaaacacattcccttttctctccccttaataggaatactcccccagttgcaagaggcgcaggaccgtggaagacttcaacaaattctgcacctttgtcttggcctatgctggctacatcccttatccgaaggaggtaatcttctgagtttctgagacctttcttgatgagtagtcaaacccagtgcctccaccgcaagttcgtgggcttctgactggtcagagggtcagtaggtttggaaggggctgcttgtggtgaccccagtcactagtctggcagaaatctgtttcttgagagt

SEQ ID NO: 271 - DNA, 2300 bp, Homo sapien
tagctggacactattcttggcctatgtaatgctatgaggtaggtgctattttttatctccagtttataagctgaggaaactaaggcatagagagggaaaactttgtcttaggtcacccactgattagtggtggagcttggggttcaaccagatggctggactcagtgcacacgctgcctctgtctcagctccctggctgcccgaaatgcgtatgattgtcttcagggactcatggctgcaacttgatgtagatgaaggaggttttttcacttgctgagaacagggcaggactggaggagagcggctgtggtgctcagacttcaggcctctttcgtattcgattaagctcaaaattgaacaatccagcttttttttttttgcgacaggtcttgctctgttgcccaggctggagtgcagtggcacagtcttggctcactgcagcctctttctcctgtgctgaagtgatcctcccacctcagccttccaagtagctgggactacaggcccaccaccacacccacctaatttttgtatttttagtagatacaaggtttcgccatgttgcccaggttggtgtcaaactcctggcctcaagtgacccacctgccttggcttcccaaagtgctaggattacaggcgtgagccactgcgtttggccgtaattttattttttgtagagacaaggtctcactgtgttgctgaggctggtctcgaggtagtgatgctcctgccttggtctcccagagtgctgggtttacaggcacgagccactgtgcccagctgcattcagtatatttctagcaggcaaactgccagcattggtttatttccatctgctacataggtggctaatgcctgctttcttttctttctttttttctttttttgagacggagtcttgctctgtggctcaggctggagtgtggtggtgcgatctcagctcactgcaacttctgcctcctgggttcaagcaattctccctgcttcagcctcccaagtagctgggattacaggtgtcagccatcatgcacagctaatttttttgtatttttggtagagagggggtttcaccatgttggccaggctggtgtcgaactcctgagctcaggtgatctacccgcctcagcctcccaaagtgctgggattacaggtgtgagcccccgcacccagcctaatgcctgttttctagcaagacaaggaggacgttgccactgtttgcaaatgatatgcttgtgatctgaatgaaccatagagtttacttcactgctttggggcagtaattacctacttggattctgcaatattttggaatgtctagttttttaagagtgtcaggaaattctcaaaactaatttaaattcacttaaaacaatatatctcttgggagggcaaatggaaggagaggttttacaatcagggaacaatgagcagataggagtgggtgtccacagcactccttcccacagacacctgttgcacactgatgaattttctgtctctaagatggggctgagggttcagcagggagtttctctcttcgtggcatcacattaaactcatggcactgatggcactgggtttttttttttttgagacacagaatctccctcccgttaccaaggctggagtgcagtggctcactgcaacatttgcctcccgggttcaagcgattctcctgcctcagcctcccaagtagctgggactacaggcaccaccaccacgcccagctaatttttgtatttttagtagagatggggtttcaccatgttggccaggttggtcttgaactcctggtctcaggtgatccgcctgccttggcgtcccagagtgctgggattacaggtgtgagccaccacgcccagccagaactcatgttactgttgcttcaagtgtgatgctgatgggcagagaagctcaaagttgtgcagatgtctctggaggtctgacatggctgggtggctggggatgctctgctctgggctggatcttgtcaccagtaactggaatctgccacctttgtctttttaggaactccctttaaggagcagccccagccctgctaacagcactgctggtaccattgacagcgacggctgggacgcgggtttctcagacatcgcgtcctcagtgcccttgccagtctctgaccgctgctttagccacctgcagcctactctcttgcagcgagccaagcccagtaacttcctgctggacagaaagaaaacggacaagctgaagaagaagaagaagaggaagcgcagggacagtgatgcgcctgggaaagaggggtacaggggggg

SEQ ID NO: 272 - DNA, 2300 bp, Homo sapien
gttccttaaatctcagctgggatcctggacctgggaggcccctgtgagggccagctctggaaaaacctgggagttgatgccggaggctgtggaagaactctgctcgagggcagggtgccctggaacactggtagttctggggctgggagggagaggggctccggctttctctgaaatgaacactgctcttcagcagttcaagtacttgttctcaaaacattttctaattgattggtaggttttcataagcattgtttctttaaggcatggaaagggaagaatgctcaagcaagtcatgtttgttttcagtgggatgggcccgcgttctcactgctgggggcttccccttcatgtggcacctttgtgccaggccaccaggcagactcttcccaccttctcccactgaagcaccaaggggcttgaaccgtaatttggctaatcagaggcattttttttgtcctagtatctttcacacttgtccaaccgtcttatttttttaaaagttctgttgcttgtattaacacgaaactagagagaaatagtttctgaagccagtttattgtgaagatccccaagggggaggttcggtagagaaaaatagtaagctggtttagaaactgacgagggcaaacagccaggacgcattggagaggaatttgccaaagatctaccctgagataacgcctgtccagtgtcttcaccacgtgaataaccagcgctccaaagtgtttttctgctttgaaaaaaaaaaattccacaagcttttaaaggtgcatttaagaatccatgtgactttagaatggaactgccggccctggcaactgtcacgtgtgctagaaggttcgatgcctctggaatgcatgtgatactcatctccattttgtttccttgattgcatttttgttcttttagcagatctgtccctgtgggtggtgtctaagaagtcggacaccttggtttttgtgttagattgagctgggcagctgcaatcagcttctttatatgcaaattaggcacgacccatctgtggttcctggttggtggctaatgaagtgaggggagggagggatgtcaccccaaaagtaggccctcccattggctttggccaggccagacacttcacatcgtttacatggttctgtgtaattttaaagtttatgtgtataaagcgaagctgtttctgtgaaactgtatattttgtaaataaatatattgctactttgaggttcatgattcaaggttcaggcgattgcgttctgtgctgaaggacaattgtgtttcttttctccttgctacctccccaaagcatgattacatcaagtctctgggaaggcagcgtctcagtgtgcacttagcaggatggaaaatgcccacggtgttaaggtaccttgctggtgaattccttagaaacaaaccacaggacgagtagatgtgaatggtttttgcagtttcttcatcagattgaggattagctcaagccccagtgagtggttagcctacttttgattttttttttgtttttgagacttgagtttcgttcttgtcacctaggctgtgaagtgctgtgatgagattttggctcattgtaacttccacctcccgggttcaagagattctcctgcttcagccttccgagtagctggaattacaggtgcccgccaccatgtgcggctaatttttgtatttttagtagagatggggtttcaccatgtcggtcaggctggccttgaactcctgatctcaggtgatccgcctgcctcggcctcccaaagtgctgggattacaggcgtgagccactgcgcctggccgatttttttttttttcttcttacaagatgacgccttccctataggctgctttgagaaagctgcagcctcggagtttctgcaaggcctgaactggaatctccctccccttcagttgccctttttgcctcttcacgtttgggggttccctgtgaccaaacttaagggcagtgagctgtctggcctctgaactgacaccaccagtggccaactagtaccacctccagtgacgtcagaggagtccagacctattcacaattcaaagccctaaaaacactgaggggttggccgttggtttccagttgtccaagcctgtgagtggctatgcgtcctggttgggtgctcaaagcaaggaggtgaaaggcgaccagcattggcgaatggggtaagacttgcacaggcccaaggctaggagttggggtttcgggcctgaattggggcccggagcacccctttacgtggcgccccgggtcccgtccgaccctggggagacgc

SEQ ID NO: 273 - DNA, 2300 bp, Homo sapien
attaccccccatccctagcacgaagaacagggcccggctcctggtaggctcctggcaaatgtagcatcggaagcagctcacttgggctctctggccatgctcgtggtctcgggtttcctattaagagtgctttaacagctgtgacagaagcttccagaaattagatgtgatttaataaaccgagaggactgaatgtccacagctgtccagggaagtactctgtagtgatgtgaaaattccgaatgactctgaggcgctgggtccagccttgctgggcctcacaccccgtgcctctgcccttaggtttccgttcagccgcccggagctgctgaaggaatgggtgctgaacatcggccggggcaacttcaagcccaagcagcacacggtcatctgctccgagcacttccggccagagtgcttcagcgcctttggaaaccgcaagaacctaaagcacaatgccgtgcccacggtgttcgcctttcaggaccccacacaggtaggagggcactgcaccttccgtctggtcacatccagcctgcgttgtttaccagcagctgggggcagtgggggtggcggcatgtgtgggaaaagccaaggccaagaactccagtgacaacagcactgtcacgcctctggggtccacagccctgtggccctgctggccatgacctcggctttaagagaagtcataaattaaaggcattttaaaaatgaattattctatggctgggtgcggtggctcacgtctgtaatcccagcactttgggaggcagaggtgggtggatcacctgaggtcaggaattcgataccagcccagccaacatgttgaaaccccatttctactaaaaatacaaaaatcagctgggtgtgttggtgggcacctgtaatcccagctacttgggaggctgaagcaggagaatctcttgaaccgggaggcagaggttgcagtgagccaagcttgccttggtggaggtgggatgtgtgggcctggctcaggagagggctcacaaagagttggatgctgaagccttgagatcgcatgataggccacaggggcacccacgtggagtgggcaggcagggcagtggcgggacaagccacaggccagcagctccctgcattggtggatttatggggagaggaaagggatccgtgagtggagagtggagccgatgggaagaacaaagcggccacgtagcaaacacgcccagagcggccgcctgggagcccctgccccatctgtcctccccagcacccttcccagatagcctcatgcagtctgcctgaacctcttcaggttggcagtcccttccttcaggaagcccttctggaccctcaaaccccctcttgcctccgaccccttcctgcccctcagtcttcctggcccctgtggcccctgctgtccttcctgtttccctcattggttttgtcttctcccctggaacagaatctccatgagggcaggggctgccttccctgcttcaggccccacacccaggacgctgcctggcacagcccaggtgctcggggtatgtgtccatagatgaacactttaatcaccttcacgtatttgtgataacgtttgtcctggaaagatgacacttgagccactgggagtggggacgtttgtcactgtagccctcggtgcttccagtgcctggttggtggggagaagctgggtacggcctctgccagctctgctttgtgggccccaccccagtgtggcccaggggctgcaggttctgggtcagtggcacctcgagtggtgagctgcgcttctgctgcttgctggcggtcatggggccaggtgccaggccctggggtgacacataggaagtagatgggtccctagctctacagggacctattcagggcactctgaccatgatttgaggacatctttggagaaagagaagcgcaccaagcgggcagtgtgagttgggctgagcttcaggtcagtttcatttagcagctgttcgttgactggggcatgcagtgggccgagcagcggggacaagcatgatgcccgaggcctgccccgagctctgagggttcttggggtctgcatccactctgtgtgtgtctcttgtagcaggtgagggagaacacagaccctgccagtgagagaggaaatgccagctcttctcagaaagaaaaggtgagtgcaccgggccaggtacttgaatgtttaaattatgctgtgggttgagacagggaggtgggattttcccagcaaggccggcccgcagggctgtcgcctttcctcatatgccagtttggattcccggtttttctggagg

SEQ ID NO: 274 - DNA, 2300 bp, Homo sapien
actgcaggctcctttaactcgcagctgcacgcagcacaagttctcttcctgtgcctgacaccccattgcccttccctggaaaacctgattcatcttggcttttttttttttttttttgtatttttccccaggctcaacagggccagtcagacatacttcttccctattcacttgacggaccagcttctgcccagcgccatgttctatgccaccgtggggcctctagtggtctactttgccatgcaccgtctgatcatcaaaccatacctcagggctcagaaagagaagtgagttgacacgtcatgggcatgtcactagccagccctgtgcctcagtttcctcacccttaaaatggagaggataacagagcctcctgcgtcgggtgatgaggaaacctgaattaagtaatgcatgtaaagcacttaggctgatgtctgggtcacgattggtaaatgttaactatttctcctcattgtccgtagttggactgctgttatctcttcgtttgtaaatcttactctcagaaaggactggagtttatagaagtgttgggcctcggctgggcgtggtggctcacgcctgtattcccagcactttggaaggctgaggcaggtggattacccgaggtgaggcgttcaggaccagtctggccaacatggtgaaaccctgtctctactaaaaaaatagaaaaattagccgggcgtggtggcacgtgcctgtaatcccagctacctgggaggctgagacaggagaattgcttgaacctgggaggtggatgttgcagtgagcctagattgcgccattgcactccagcctgggtgacagagcaagactcggtctcaaaaaaaaaaaaaaaaaaagtgttgatcctctaaaccatggcctcaagaaagaagaagttttcctttctcctttcccagcgctgagtttaagaggaatgcgttctggatccgtatgtgaggggcctgcgttaactagagtcttgaaagtcacagaaacacaacgtttttgcagtttcttagataatccattggggcatgccgtgaaacctaaattattagtgcaagcatctctacagaaaactgagagctggtatagatttgttactttataatatctcatttagtaaagcattgcacttagagaatctcagataaaggaatgaatctcctcttctgggcccgtctggcctttggactcagaatcctaattccctaggaggcttgaggcttagaacaagacatgtgctggcccagccttctctcagaagggaggacaggcatatgctgaccccaaggcccatactttgttacaggaaagcggatctgtgtgtctaaagtggtattagttgttcctaccaaaagtgttatttaacaactcacgcctgtaaccctagcacttcgggaggccgagacagtaggatcacttgagcccaggagttcgagactagcctgggcaatatagtgagacccccatctctatcttaaaattaaaattaaaaaaataataatcccacaaggttggtgggatctcctgaaattctcctgtggtggggtcttctttccaaagagactgacagtcggtgtcccgtcagcttggtgaggaggtggggcagagccatctaaggataaaatgaaagctgccagcctgtgactaacagacttgcctgagactgtcgtgggaatattttttaaagttctacaactgaactccagtaagatcacagactgtttgctgggctcgggtccagcacgggaggggctgtgttggctggaagctgggcagcgccgcgctaacgtggggcttgtgttcctctcgcgtaagggaattggagaagcagagggaaagcgccgccaccgatgtgctgcagaagaagcaagaggcggagtccgctgtgagtgctgccccaccgttcccaagcgagggctgtaggggacacactccacaccccacatgttggtctcagggccttagaggtcagacttctcttctccaacaacttggctctccacttagtctttattgtgggatgcgacactgggctctgcagtccctgccctgaagataattaccctccaaaggcctaacaagggcttttttaaagtggtgagtattggcctctttttcttccctctgagtgttctgccttttactgagcaggagggagcaggcttcctgggtatgtggcgagcatactgccaggtggccatgggccgtgtgcgcggcctggcgagcacatgcctgtctgagggggcggcacagctatgcccagcagaatggcaccacaggagaacacaggt

SEQ ID NO: 275 - DNA, 2300 bp, Homo sapien
tgtaagtatctgctgtctgctcaaatgtcccctaattcaccttgtataacatagtagcccttccccttgccccaggtgatcccccccaccatgtttgccatgttcaatctccaacgagccagtctccatctgaagggccatctcctgcactcctcatcagacataagctcttggacttggtccattttattctcacccgcacttctagaacctaaaacccatcgtggtacttgagaggaactcagtgagtgaatcaaagtggatcacagctcagttttggaaacaaagccaaatcacttacctagattagagctggcgtcagccatctctcctcagataatatttgaaggctcagtacagtggcgcgcacactttgggaggccaagacaggaagatcacttgagcccaggagctcaaggtggtagtgagctgtgattgtgcccctcagcctagatgacagagtgagaccctgtcacttcaaaaaaaaaaaaaaatttttgtcttgaagtctaccttatctgttactatatagcttttttagtcttcttatgcttactatttattttttttacccattcacatttaacctgtctctgtttgtgtgtgtgtgtgtgtgtgtgtgtgtatatatatatatatattttttttttttttggagacggagtttcgctcttgcaccccagactggagtgcatttggctcactgcaacctccacctcccaggttcaagcaattctcctacctcagcctcctgagtagctgggattacaggcgcccaccaccacacccagctaatttttgtattttaagtagagacagggtttcaccatgttggccaggctggtctcaaactcctgacctcaagcgatcctcctgcctcagcctcccaaaatgctaggattacaggcgtgagccactgagcctggccaagttttgagtgttctttatcaattctggaattgcttttattctggaagagcttttattctggaagagtgtgatcaggtattgtcagtggctactcagcatgttttctttttctggcttttcagcagtttgtgatgtacatagataaggctgttgttgtatttatgatgcttggggtttcctaaacttcttgcatctgtaaatttccttttcctcactggggctctaattaccaatatattaaacttaacactcttccacgggtttctgagattctgtccatgcatcctcagtccttttcctcttgttgaccaggctggagtgctgtggtacaatctgcctcctgggttgaagcgttctcccgcctcactcagcctcccgagtagctgggactacagacaggtaccaccacgcccggctaatttttgtatttttggtagagatgaagtttcaccatgttggccaggctggtctcaaattcctgacctcaggtgattcgcccacctcagcctcccaaagtactgggattacaggcgtgagccaccacgcctggccaaattttttatatgtggtccagagtttacacattggtccaataggagctactttactcagccaccactggaagcagaacctccttaactgactaacttttgaagtcttcactaacttctttggaaacctcagttaagaactgagatgtgactctccagtgacatctggaggagcccattcctgtcctctccagcctatgactgaatgcacctgtaggggacgttgaccccgtgaagtgttcctcttgttgctttggcttgaggtcagcagacactgggatctttcttctgtcacagtgtcagatccatcagccagactttggaacgggaggccagaaggtggtggactgtgaaaggagcagactgcaggctcctttaactcgcagctgcacgcagcacaagttctcttcctgtgcctgacaccccattgcccttccctggaaaacctgattcatcttggcttttttttttttttttttgtatttttccccaggctcaacagggccagtcagacatacttcttccctattcacttgacggaccagcttctgcccagcgccatgttctatgccaccgtggggcctctagtggtctactttgccatgcaccgtctgatcatcaaaccatacctcagggctcagaaagagaagtgagttgacacgtcatgggcatgtcactagccagccctgtgcctcagtttcctcacccttaaaatggagaggataacagagcctcctgcgtcgggtgatgaggaaacctgaattaagtaatgcatgtaaagcacttaggctgatgtctgggtcacgattggtaaatgtt

SEQ ID NO: 276 - DNA, 2300 bp, Homo sapien
gtgagctgagaagatcacgctactgcactccagcctggacgagcgaaactccgtcaaaaaaaaaaaaaaaaaaaaaagacctgtccaggctcaagtgctccttcctcctcagtcgctgagactacagggcgtgccgctacacctggctaattttgtgtcttttttgtagagatgggggttttgtcatgttgtccaggctgtccttgaactcctggggtgaagcaatttgcctcctcagcctcccaaagtgctggggttacaggtgtgagccaatgagcctgcctactgttattttaatggcataaacatcacctccagagcttagaaaggagagaaagaaacttaggcaattgatgtggagctctttattaaagaaaccagctgttagtttacccttcagcaccttgaatgaagtgtgaatttctgttagtaaaatgaaatacctcttttcaaccagaagatggggctggactcccttggaaagaaactgcagaggctcttttcgggaaccggtttcctgtgctcgctttgcctgtagtttctgtcactagtacccagctgtggtcactagtacatcagaaatcacacagcagctccaaaaatatactgatgcctccacccagaaattctggttccataggtctggggtgtcctctaggtaagtgattctcaaactctactgcacattggaatcattgggacacttagcactccaagcccacactgaaggaatcagcatgccggcgaagaagccaccagccgtgatttgtggatgagccaggtgattccagcgtgcagtatgagcaccactgtcttggactgcttaatatgagaccctccgttggtgattctgacttgcactcctcggcccccatccattctaacttgagtggggttgcatctgctggcataggaatgcagacagtcaggtgcctatttggttgtagctaaagttagggcggctgaggggagtcgggaggttactaggaagattctggctaggaccctccccctctgtgtggatagaggcctgacctcctgcttttttttttactgggagctggcccagggatgcatagacgtgacagtaagtgaggtcttagccaggcagagaggaagtaacagaacagctgagagcaggtgctatccaggacctattctgtctctgtgtctctccagctttgtgacaacaaactgtgctctgcagttttcatcccgtggaatccgacccggcctgaccactgtcctagctcggaacctagacaagaacaccgtgggctacctgcagtggcgatggggtatccagtcagccatgaacactagcatcgtccgagacactaaaaccagccacttcactgtggccctgcaggtgagccgagcagccatcatctcctgcagacagagctctgggaggacccctcctcccaagcactcagtgctccccttaaatcctgcgtcctgatcaccactaagtctaagcccatacagggccctgaggggcaggctctcggtgctcacactcgagtgacctggtggaaccttcgagtatgaaatgcagttgccttcaggcgcctggggcagctttgttggatcatcttaaagcagaacaacatcttaatgtctggtgggagccacccacggaattgggggcgggcagatgaagccccatagcagaatcatgccctcggacgcccctgtggccacaccagggctggtacatgagaagccccacacgggccactgctccttggctctcaccagccgctgccacctaggagcataggctcagtgtcaccagagttttttatttcttgtgagaagctagaaaactgggttttcagtgaagtctcccactttttaattactggctgctaataaatcatggtgcactcactgcggctgccagaccgtgacccctgccttaaaggcctgtgtgcagcagatgcccagagctagtgggagggcagatacccatctccccacagagtcacacgccctagccacgcatccttgcaccctctgtctccccagctgggaatccctcactcctttgcactgatcagctatcagcacaaattccaagatgacgatcagactcgtgtgaaaggatccctcaagtaagtcctggcctggctaaaatggaagcacactggtactgcatgcgggtcttcacagtggaaccagttggtgtaagacaccttgctcgtgtgaatatctacgtgtgtgtgacatttttggagagcttcctattttgaggctgtgggggatttaacactacagtcccagcccttgaggagctt

SEQ ID NO: 277 - DNA, 2300 bp, Homo sapien
tgagaagagggaatatgggtaaggggaatcgcatactttttatttcctatccttctgttctattgattttttgctataagcttgtattttaaaaaataatctgggcgggcggatcacgaggtcaggagagcaagaccatcctggctaacatggtgaaaccccgtctctactaaaaaatacaaaaaaaaaattaaccaggcgtggtgccgcacacctgttgtcccagctacttgggaggctgaagcaggagaatggtgtgaaccagggaggcggagcttgcagtgagctgagatcgcaccaccgcactccagcctgggcgacaaagcaagactccgtctcaaaaaaaaaaaaaaattattttttgaaacgtgaaatttccaaggaaactttttctcacatcacacctttttagatagtctgtgagcagcaactcaagactcccctgtgtttctcccatggatgggcagaatctgctttcgtatacccctgccccctcccccatccatctgataactttggtcgtgatagaaaaagagtaaccactgtttctgtcctgttcccacactgtgtgtttctcaccggtgcacacaatttcacaccataaacaggacccttagaaatcgtgcagtgcggttgcctctttcacggtggcctttccacttctttgaaatgtcaactagatggtcttcctttcatgacgagctaagaagggctgaactggaattgaaatgccttcttttcttttcttttcttttcttttcttttcttttcttttcttttcttttcttttcttttctaagacagagtttcttgctcatgttgcccaggctggagtgcaatggcgtgatcttggctcactgcaaactccgcctgccgggttcaagtgattcttctgcctcaacctcccaagtagctgggattacaggcacctgccaccacgcccagctaatgttttgtatttttagtagagacagggtttcaccatgttggccaggctgatctcaaactcctgacctcaggtgatccacccgcctcggcctcccaaagtgctgggattacaggtgtgagtcactgcgctaggcctcgaataccttattttcctttttctttttctttttttttttaagagagagtcttgctctgttacccaggttggagtgcagtggcatgatctcagctcactgcaaccttcacctcctgggttcaagcaattttcctgcctcagcctcccaagtagctgggattacaggcacctgccaccacatctgactaatttttgtatttttagtagagatggtgtttcgccatgttggccaggttggtcttgaactcctgacctgaggtgatcccctcacctctgcctcccaaagtgctgggattacaggcgtgagccaccgcgccaggccggaataccttattttctcagactcgacattactctgcgtccccgagtttaatgaggtctgctgtgtggtacctgagtattgttacgccagcctataactgacagcccacattctaaggttcatatactgttataagaagaagagtcccatgattctgaaaacactcagacccaccagacatggtggctcgtgcctgcaatcccagcactttgggaggctgatgtgggaggatcctttgaggccaagagtttgaggccaacctgggcaatatagcaagaccccgtttctacaacaacagaataaaaacacctagacccgacagctcgagatccttggtccaagaagctcaaaaggagtctctagcgattgtctcagaccactagggagagccagcttgccttcgtcttgatatttaacatttgttatctgagattcattaggaaatttacactatgaaatttaaggtaggccggcgcagtggctcaagcctgtaatcccagcacttccggaggccgaggtgggtggatcacgaggtcaggagattgagaccatcctgggtaacatggtgaaaccctgtctctactaaaaatacaaaaaaaaattagccaggggtggtggcgggcgcctgtagtcccagctactcaggaggctgaggcaggagaatggtgttaacccaggaggcggagcttgcagtgagctgagataatgcacggcacttcagcttgggcgacagagcgagactccgtctcaaaaaagaaaaaaaagaaagaaattcataaggtgacattttccttgtaagatttctgcagcctcagagataagttgctaaaataaagaatgtttaagtcactctggagagctgagtgaaaactcatttcaaccttgggaagggcc

SEQ ID NO: 278 - DNA, 2300 bp, Homo sapien
gagatcgtgccactgcactccagcctgggcgacagagcgagactccatctcaaaaaaaaaagaaaaaagaaaaaagaaaaaaaaacctaagggaaaaaggaatgtctccacattgttgtttttacccccagtctctctgtatgaaattcttggccgggtgcggtggctcacgcctgtaatcccagcactttgggaggccgaggcaggtggatcacgaggtcaggagttcgagaccagcctggccaatatggtgaaaccccgtctctactaaaaatacaaaaattagctgggcgtgatggcgcacgcctgtagtcccagctgcttgggaggctgaggcaggagaatcgcttgaacccgggaggcggaggttgcagtgagccaagatcgtggcactgcactccagcctgggcgaccgagtgagactctgtctcaaacaaaaaaaaaaaaaaagaaagaaattcttaaagactgtcaaatgtcagcatgcagtttggccctaaccacagctcttttctctgcaaaggagaaaaaggcaaagcccataacattgctggaagagctgatggaccatggaagctgttgtggagaagcttcacacaactaaagaaatagcccttaatttacaacctgggctgacagtttgtttcaggctgactcaacccacccgaacaatctgtctcagcacaccgaagtgtctcatgccaaaagatcctaagagggctgggcaacttggaagggatgagacacaggcccagatggtgcacatctggccaaaaattagaaagagaaagaaatcagcctctcaaatccacagacaggtgttcggggcttcccaggagacctgcttatgaagggcaacggggatggctatggactggtggttagtgaaggaacaacaaaggtttctgagacttgcgcaggtcagcgggaaccaaacaggtggcaagagtgggctgctgtccaccttcccttgacaatggcgtcatttcgaagacctttaaattatttagattgttgtaaccaagacatctttaataatgcaccaaacagcaggcaccaggttgaaatcaattagactccaccgataaattataagggagaaatttacaggagaatggctctggggtagggactgcaggtacacatgcctgccagagacaattatatcaggaaccaaatagttattgctttgtcatttaagcagcagaaaagatggccaggtgctcctaaattagagcaataacaaataactaaaatgaggaggcctgttctgggcaggaaggcttctgggtggccaagagaaaagacaatggaggtaggaacaaatgtcatttgggggatatctaggatccggatgcaccctgcactgggggcacctcgcgcttcttccaggagtttggggccagtggggtaacaggtggtatcacaggggtttgtctcccagaggatgacaatctcctggaggtgacttcaaagtttccctttctaggcaggacgcggtggctcatgcctgtaatcccagcactttgggaggccgaggatctcctgagttcaggagcctcagaccagcctggccaacatggtgaaaccgtgtctctaccaaaaatacaaaaaaattaactgggcgtggtggcgcgcgcctggagtcccagctactcgggaggctgaggcaggagaatcgcttgaacccgggaggtggaggcttcagtgagccgggattgcgccactgcacacacaccaggctgggcgacagagtatgactccgtctcaaaaaaaaaaaaaaaaagcaaagtttccctttctagtacaggaaaagccctagggagtcctggctggatctcaggcccccgaggacgcagccacgccgcgtgccacgcgtccattgggagcacgaagagacacccgcgtggtcaccccgccagggctgcctaggcgccgcgtcccgccctaggccgcgcgggggcgcaaagcgcaggcgcactcccgccgggcgcggacggctccgggccgccaggggccgctgtggcgcagccgggctggcccgcgctgtccctgacgcggatcactggcccctcttgagcacggccttgccggtttggcggggtgaaaggttgcgaagatggcgacggccttgagcgaggaggagctggacaatgaagactattactcgttgctgaacgtgcgcagggaggtgaggccagcggctggacgctctgggggctgaggccgagcccggtcgttcgggagggccgggctggcggtggccgccccacccccgccacgggaggctcgggtccgtc

SEQ ID NO: 279 - DNA, 2300 bp, Homo sapien
ttgcaaaactgaaaccctatacccattagacaagaacacctccattttccaccccaaggactctcaatattttcataagataaaatactcacagaaaaacaaattgaaacaaaacaaaacacaaaccgaccaacaaaaacccagaaggttttttgtttgtttgtttttttttttttgagacagagtcttgttttgtcacccaggctggagtgcaatggtgccaccacagcccactgtagcctcaacctccaggactcaagcgatcgtctcacctcagcctcccaagtagctgggactacaggcatgtgccaccacacccggctaatttttaaacattttttgtagagatggggtctcactatgttactcaggctggtctcaaattcctgggctcaagcttcctgagtagctgggattacaggtgcccgccaccatggccggctaattttcatatttttagtagaggcgaggtttcactatgttggccaggctggtctcgaactcctgacctcatgtattccgcccacctcggcctcccaaagtgctgggattacaggcgtgagccaccacgcccagccacaaaatattttttaaaattatctgggcatggtagtgcacgcctgtagtcccagctacttgagaggctgaggtgggaggattgcttgagcccaggatttggaggctgcagttagctatgatcatgccactgcactccagcctgggtgacagagcaagacccagtcactaaaaataaaaattaaaaaataaataaataaaaggggccctggagaggtacctcagcccttctgccatatgaggaaacagaagacagacgtaaaccaaaaagccagccctcaccagacaccacatctgccagcgccatggtcttggagttgtccagcctccagaactgtgaggaataaatgtctgttgttgaagccacccaatctatagtctttggttatggcagcccaaacggactaagacacgaagcttaccaaatggcagagccatgtgcttcccgagatcagcgatgctgaggagaaggctgatctaccccagttcaggaagagggacttagggctttccttggcaatgttctgctcctggggggtccttggtactcaaatctgaactctgttcctctgcctatcagtgaatgaaaacatctcctggcttctccacttccatcatttttttgtttccagctctttctctcctccccgttttagcatacagtagtcccctcttattcacaggggatatgttccaagatccccagcggatgcctgaagcctcagatagtacccatccctatgtatattgttttttcctacagactacatgcctatgataaagtttaatttatatattaggcacagtaagcaattaacaataagtaataataaataggacaattataacaatgtgccagcatcactactcttgcaagttggggccaatgttaagtactacaagggtttcttgaacacaaacacggtgataccatgacagtagctctgacaaccaagatggctaagtgactaaccagcaggtagagcctggatgcgctggacaaagggaggattcacgttgcagacgggatcaagcttacagcgagagatctcatcacgctgcccagaatggtgcacagcttaaaactcatggattatcccctctccctctccccacggtctccctctccctctccctctccccacggtctccctctccctctctttccacggtctccctctgatgctgagccgaagctggatggtactgctgccatctcggctcactgcaacctccctgcctgattctcctgcctcagcttgcggagtgcctgtgattgcaggcacgcgccgccacgcctgactggttttcgtatttttttggtggtgacggggattcgctgtgttggccgggctggtctccagctcctaaccgcgagtgatccgccagcctcggcctcccgaggtgccaggattgcagacggagtctcgttcactcaatgctcaatggtgcccaggctggagtgcagtggcgtgatctcggcccgctacaacctccacctcccagcagcctgccttggcctcccaaagtgccgagattgcagcctctgcccggcccccaccccgtctgggaagtgaggagcgtctccgcctggccgcccattgtctgggatgtgaggagcccctctgcctggctgcccagtctggaaagtgaggagcgtctctgcccggcggccatcccatctaggaagtgaggagcgcctcttcccggccgccatcacatct

SEQ ID NO: 280 - DNA, 2300 bp, Homo sapien
tctataaatgctgggacttataggcatgagccattgtgcctggcctccttcaagcattttcaaaatttcttctgaataggagtggtggagggctgtgttggagcatttctcttctacctcgtctgtcctcctcactctcaggtatgtctgattatattgaaagtttaaggttgttgctaagcctagtatggtggtcattggggagaatcccaagaacgtcacaggtgctgtttcttcaatgaaggcagaggggagttctcactccaagcaatgagcttactctagaaacagcctatctgttggattcctgcatttcatatgaggtttgagtaactagttccttgcaaacaatatgaaaagacaaaagtttcaaggtttagaatcaccatggcaacgccccagattccctgccgtgcccaggtcttggagtggtaggaactgctcatgcaatttttccgaaattggccaaagcttcaagacctacggggtttcccatttggtgctcagaatgtgaatttttttttttttttttttttttttgagacagaatcttgctctgtcgcccaggctggagtgcagtggcacgatcttggctcactgcaacctccgcctcctgggttcaagcaattctcctgcctcagcctcctgagtagctgggattacaggcgtgtgccaccacgcccggctaattttttttgtatttttagtagagacagggtttcaccgtgttagccaggaaggtctcctgacctcgtgatctgccacctcagcctcccaaaatggaatgtgaatttttatagttgccacggcaaagtctcctgttatatgggtatagtgggttgaatcgtggctcccaaaagtgatgtccaagtcctaacccccagaacatgagaaagggaccgtatttcgagaatgggtctttgcagatgtaatgaaggatcttgatatcattctggattgaggatggactctagctccactgacaggtgtccttatgagaaaaaggtagaggcagatttgagacacagacacaggggagacggccatgagaagacagaggcagagattggagtgaagcaaccacaggccaacaagtcaccgataccagaagaagcaaggaaggagtctgtcctacagtcttcaaagggagcgtggatctactgacacccagattttggacttctgacctccagagcggtaagaaaataaatttctattgttttaggctaccaagtttattacagcaggctcaggaaactaatactctaggtgacgtctgctcctccaccccatgcctctgcatgcttgggttacaacagagagtgctttccccttggttgaacaacactttttttcttgagaaaagaaaacataagggtaaagcagtttttggaagggttactcagccagctagatcgtcagaatcaactctggtaggagtgggccacaaacatccatcctagggcatccggagagagtcattctccctaacaatagctctgggcatggctctgtattcgtctgttcttgcattgctataaagaactacctgagactgggtcatttataaagaaaagaggttaaattggctcacggttccacaggctgtacaggaagcatggttgggaggcctcaggaaacttacaatcatggcggaaggtggagggcaagcagacacgtcccacgtgactggagcaggaggaaaagagagcgaagggggaggtgctgcacactttcaaacaaccagatctcacgagaactcactcactatcacgagaacagcaagggggaagtttgcccccatgatccaatcacctcccgccaggcccatcttccaacattggggattataatttgacatgagattcgggcagggccacaaatccaaaccgtatcaggctccacattttgtttctttgtttttttttttccctgtccttccctctacctgaagctcatttgaaagcaagtttccattgctgctattccttccttactttggtcagaatcctctttttgtggtatcataaatggtttccatggaaacaaaaggttaggatagaacagtgccaatgtgcatgtaaacttcagaattaaacaagggctgttgtttttgcctgtcatggagttccgttcattctgaacatgtcaccggggactttggaatgtgtatccataactccctgattttcaaccacattccagcctgcctgactcatgaagcgtggagcgacccaggaacatcccagctcctcatgtcccacattcttcaggctttctcttagttttggcatgtgcat

SEQ ID NO: 281 - DNA, 2300 bp, Homo sapien
tgtcatgctggccaggctggtctcgaactcctggcttcaagtgatctgcccaccttggcctcccaaagtgctaggattgacaggcgtgaaccactgcacccggcctgtatcggtcttttttaaaatgcagtttttttagcctatcatctcacctcataaatgaacaccataattttgggtattgccccctctatctagcaatgggtgattttctgtttctgatgtctacaactaccataatgttccactgtgtagatgtaacacaatttactaaatacccaatattagcacatgtaggatgctcccaattttttgttgtagttaagtacagtgatcctgtgaagaataccttcacacatacagcttttctggcatttagtgttatttccttagaacagattcccagaagtaagatcactgggtcaaaagatgcagacatttttatggcttttaatacatactgtaaaattgcttttcgaaaggaatatactaatttacaatgccaccagcacttcttttaagaatccgtttctccacacaaatcgtcaacataggtgctattaagaatgctaatcgataaaatattgtcccgccgttgttaaaattttgcaatttttgaggctcataaaattaaagtttcttgaagaatgagtgtgtaacacaaaacattcttttgggacatctttatttctggaaaacctaagacattcttacttgtgaagaccagaaaaagaacacatgttgttaggattggcacagaattcagtgtgacagtcaatcttaatgccagaacacttgaacgaggatttttcacttattttgctagttgtcaccaacagtagcaaaaggaaaaataaaatgcggaagaatgaaatgttcttactgcaaaccgtacaagatcacattgaggggctggagctcttacattcaacttttctttcctttttcttctttttaaacaatttgcgattgcagcctctccttttgtttccggtattacctgcccaggagcagaattccttactttctccggagagaggccggtccctgggagcgctgcccagccacccgcacgcctagccgccccgagagccgcactcggcggacccggttcctaggctcgttcccggggcacctggcgggcgcccacctcccggggggcacgtgctcccgtacgcagcgcgagggcagcgggtgcctggctatttattaggaaaagccccgcgcggactctccggattgaggagggtgggaaactcggctgcccagcgctccacccgggcggccggggctggcgcttctctgctttcggccggcggcctcatcctgggacaggcaaccatgagtcatccgctccgcgggtcacatgggcaacgtgaccaaaataaagtttcggtattttaagccgccagaaaaggggacaacggagctcaccgggggcgggcacaggaggcgggcgcaggcgggcggcgccggggccgtggggacgcggcgccgagggggcggggcctggcgggaggctcgcccctcccccacggccggcagcgacgcccggactcctaggcagtcggactccagggcgcggcacccctgcggacctcagccccgaggccccccgcgtccggctccccaccggcagcggcggcgggctgcgggatcccggagatcccggcgcgtcccccacagccaccgggaccccacgcgccagcagcggcttccccgggaacgtccttcagccccgggagcacgcgggaaaagccccagcgtgccaatgagggagcgccttcctcatgacggtcacgctcgggggcggggcttcccttcgccgctcccgagttccgggaaccccctttgattggtctggacggcctgggaaacactgtagtgacgcccaatcaaaacgccacgtctcggcctcgaggaaatattccgtgtcgggcccgtcctgattggacagttctttcgggttctggccactaggaagctttgtttaggtccggaaggcgggctttcctgggagtgggtggggagggggcgttgattcttgaccaatcctttcagtccgttgggtggtgaccagccaatgggccggatggataggacgctcctcccggagagtagtgagacccctggtgcggggcgattggcggcgggagcgatgagtggcagccgcacggcccaacgggagctgtgcgtgggccgcggggcggggccagggcgggtgcgcggcggcggcggggtggctgggccggcggcggcggcggtacgaggcgcgcgctcggggtcccggtcgcgaggag

SEQ ID NO: 282 - DNA, 2300 bp, Homo sapien
agcaagtccccaaaatgggcaagggcaggccaggatgggtaaggctaacagaggaggagacagcgccagggatactgctttaagggctgtctcccaccaggaagactccagattccacgcagcattcattcactcattcattcacagagacatgctgagcaaccaaccaccaggtcccaggccctgctatgggcgctggggacacagtaaaacctaaaaattcctttctatgggagtgagagggagccaggcagatacctggggaagggcattgcaggcaagaccagcaagggcaaaggccctgcttcgagaagtggccaagatgcctgtgtccccagagtggagtgagggaggaaggggaaggggatgggctcagaggggccctggcgggtgggggtgcagatcctgtcacagtgaggacttcagcatctatcctgagtgagaagggggccctgaaaggctttgagcaaagacgtgccatgatctgacgctcattctaacaaggcctcttgggtggccacgtggagaaggttctagagcaagggcgcagaggcaggagtgatgcaggagaccagagagggggctgccacgctcccgcatcacacctcgccgcgagaagacagcggaactaatgatggtgggcatagagcttcgatgaagctctgctgtgaaggaaaaactagaaacagaactggagggaagtgagtcgcgatgggagcatacgcagacactgatgggaaagaaccaggaaggaaggaaaagaagctgccaccgcaggagagggaagggacgctgcggcggcaaacacttggaactggccaaagggacagggtcaagttcatgagtgaagagttgcccttggcaaggagcatgagggtccatccctccagccgcccccacgagctccctcctcccctgcatggctgtgtccgctctttcccattccctcagcagagtggccgggcgaggctggcagggggaagccagggcagtgtcagtgttgttctgactgcccctgtctcctctgctctgggcgatggaaagcaggtcagcagctgcgaggagtgcggggaggggagcagggtggaggagggataagaggggacggcccggcccaagagaccagagagccagacagggatggattgacagcacggaggagggtcgagggacagcacggaggagaatcagacagagccaagggggcacttgatgctggtgctgggaactgaaggccagtcaggctgctgggcaggtgtgggcacagctcaggaggagaaccaggtactgggcgggtgtgggcacagcccaagaggagaaccaggtatgagtagagctggacgagccacgcacctggtcatgtgagcgaggggaaaggggcccgatgcagaaggcacgtgggcgaggagggacctgtggaatctgagctgagtcggggagggtgtgagaccaggaatggctggggcagcacaaagacaccgagggtccctggattctggtgttgaggcgtggctggactgtagacactgggaggagtgggcagagaaggccaggtagtctgaatgggcttctggaacctgagatggtaaagcaggaagccacagagaacagacccagggcctagggatgagtcgctgaacaaggaggtctttagaggggagaaagcccaggaactgagaaaccaaggtgtcgtcggagagaacgacacgaaacaccacaacacaggagagggctggacaagaacccgccagcgaccatcagggagcaaaaaagaatggccccagggcccaagggtggccccacaagcagcagtggggcgtgaagcagccgaagatgcagactcaaggacaaggggggacagtgaactagaagtggccctggggaccaaggatacccacccccccgccccatgccaaggcccagtaacactcaggccgagaggagaacacagcctccacttgaaagggctgaagggcagcagtgtccccacggcagagccagagcccctgagcggaagaagggggaggctgcggagagggggctttgctaagtgcagcaggttcccaaggaaacacagaatgttccaggagctggggtgggagggtcaggagagggggcgtacagagccctacaggaactggagtccaggggcaagggtagactgggacaccacagagcaccatcttgggtttaacgggaccacctattcgaatgaatacaatccagagggagcagcctctgtcacaggctggtcctgagtctgtcctggcaaacagggatgagtctgtcctggcaaacag

SEQ ID NO: 283 - DNA, 2300 bp, Homo sapien
gagatctccttaaaatacttttcctttcaccaacaaaagtggcataaaaggaatggtatgtaatgtcattttaaagctcagccactacgcagctggctcaaacgctatgcaactggcctagaatctcatcccatgttaaccactactgaatatcctttcatcagtttaagttgccttcagtaaatgtccgtgtttgccatgcgggatagagacatgactgtttttgtttaatacaaaaaaaaaaaaattcccttttcgttcactctggccatttccatgtgctcatgaatgtgtcttgtgtgtgtagaatggctgtgccttggccttttgagtcaaggtcagtttgcggcatgttgggatcacctaactctgctcctgtaggtgtttttacagctttgatgaggctgagataacaatcccatcatctgccttttttattttgggaggcattttttccacatttaaaaataaaaatcagcgaggagccatagtatttctgtagtaagtaaagtttatggagtttattgccagaaaaaaaaagtactttttaagtaacaccagagatacaaattagcctagaggtgccatttatttgggggagtgttaaacataaaactgctatcacagagactcacataagctgttgaagttactaactttcattttatttttcttccattacaactggttcataggaagtaacccatgtggttaaaattagtaaacttctctttcctatagcccttattgttattaataacacttaaatttcaggatctctaaatgcttttctcagtattctttttactttacataaaggactggattattggatacttctagtcatttctttaaggaaaaaacagtccgcatctaagtgatctaattctccttcagaagaagcaagaggctgggcgcggtggctcatgccaggaacctagcacttgggaggctgaggcaggcagatcacttgagatcgggtgttcgagaccagcctggccaacatggtgaaaccctatctccgctaaaaatacaaaaattagctagaaattgcttgaacctaggaagcagaggttggaatgagccaagatcgtgccactgcactccagcctgggtgacagagcgagactctgtctcaaaaaaaaaaaaaaagaaaaaagaagaagaagaaagagagtgaaagagccgctatacccgccagtggaaacattaggaaagctactctgctccactgtctcacaacagtttactgcctacaggaaggctagaaccacttttttttgtttaaggctgtgtacactttccccaagacgaatcggcatgaagttcctaatcagagtgtcagccctaatagatagactcgtgtctgtagagctgtggacttcagagaagtgctactgagctgaagctaagcacattctagtctcaatttcatggatggttcttgggggtttgggttttttgttgttgttgttgttttttgagacaaggtcttgctctgtcacccaggctggaatgcagtggcgcgatcacagctcactgtagcctcaacctctccaggctcaggtgatcttcccacctcagcctcccgagtagctgggattacaggcacccaccaccacgcctggctaatttttgtatttttagtagagatggggttagggttagggttggccaggctggtctcgaactcctgaccacaagagatctgcccgcctcagcctcccaaagtgctgggatttcaggcatgagccactgtgcgcagcctaaattttgtactttttgtagagacagggtctcaccatgttgcccaggctggtctcaaactcccgagcaatcctcccacctcggcctcccaaagtgctaggatttcaggcatgatccagcatgcccagccaatgtttctttattttcagtgttttatgttttccgttgtgagtttctaatcgtaaagcatttgtttcccctacatcgaagcgctgatggggtcgagggcctttagtcctgaggtcgtaacgtgcgcttttttgtgacagtgtgcttctgggactggggccttggggagctgctttgagagccgtgtggtcgtggtatgcgagaagatgatgagccgagcctgctgggcgaagtccaagcacttgatccactcaaagactttccgcggaatgaccctactccacctggccgctgcccagggctatgccaccctaatccagaccctcatcaaatggcggtaaggctgtggtgcagctggctgggggtcagcctcgcacatcctcgctcacattcttcctgagcac

SEQ ID NO: 284 - DNA, 2300 bp, Homo sapien
gcaaaaatgcacttccactgaaacgaagcatttctgaccgctttttcttggttatgaatcttaatttcgaatataagatgataggtaagcgcagctttcttggataatctgaattcccaagtgccaggagtaggatttcattataaaattaatagctaatcttattctatctcctgaagatttaattgctattgttacccattcgaaatcagctgtactgtgtgaacgaaataaagacaataatacgaacccctctctggctgcacggtcgcttatggcagttccacacagtagttggcgcccaatggggggtccctgagacttgcatgtaaaactagtctagatgtcttctttttttgtaagttttatttttgtaattgtgcatgtaaagcatcattgaatcaatggatctgttgaagaactcagctgctggaaaccatgcaaaatgttttgaattgcccttaaaatatggaaaatgttttctgaatgctttatattctttctgctgtaaattaaaaatgaagaaaatttccccatactacgtgtgtgttttgctttaatatgaccgggtagtgaaatctaaggtgatgggcacatgtttcaaaacatatgtaataatgtcaaggatttccttctgatccagatgtaatgttttgacattgaatgttacattgtttcagctaggtccatgaaagaaaaaatgtcttccagccaccattcagagagcttttcccctatctttccaggcacctctcaacatgtcaatcatttgtgtaaggcagtgcaattatttgaaagataaagacattaatttaattcaccttttcagttacaatcctctaaagtcttctaaaaggcattttccagcagattacgaacgtcgtcctttctgagtattgtgtcatcgccgctcccttcccgttcactgcagagcctctccttatctccctagtgctccctcttccatctaatccatctggccactactgccagagaaattttgcatcatggatctcccacgtccgtaagtcaatggtttccagggcccactacaattaaatgacatttttcttgtttgtttatcctctttattcagtcttcttttcacttgtacccaacctgcaccctctaggtggtctgtgcacactgcgtccattttcactgctgtctttgttcatggtgtttgcccaacccttacttggaaagttcttttccactagtacccagctcaaatcccaccgcctttgtgacactcgtttattcgatatatactaacgtttcccttttcaaagtattctatttagagttggaaaaaacagcatagtatttaagtactgtatttttcacttctcatctaagagacccaccaatgacctattagtgttttattttttggtgtaggtaactatgttggtaggaatatttcagtaacaaatatatacaaggtaactcactgcgttcagatttgtgcttccctcccttcgaccaaaacctgaggacctattctgtgctagggcctgaaaatacagaaataaaggaactacagccttgatgccaaggctctcgtaagcagattataatatgatctgcagtgacaaatatttgtgtcaccgatgaaaacatgagcgggaacctcacccaacaccatgtgacaaatacccgaaatggacttcctatttcaactactttagagaaacatggtgccctcaggatcactaggttactctggaacactcagcagaagccagtcatctgtctctaatactgttagaaatggtcccgagcccagaataacatgaattgcccccaccctcacttatccacgcagtccctcgccagtggctaatgcaccacgtttacagaccacgtccccaagcgccagcgcggacggcggtgcggacagggagctgtattgacctgcgttctgcgtttcagagcccggaccgccctgggacccctgtggccctcaagttcccaagtgacctcgtccggggaggggacgtctcgctctgaccccgccctggacgcacccacccacgacgcccccgcccacttccggcgcgccccctcttcgccccgcccactcccccggctccgcctagtgacgtctttgccccgcgccgcgccgtcccacccatctccctggcctccggtcccaacttcgcttctctgctgaccctctctcgtcgccgctgccgccgccgcagctgccaaaatgtgagtgacgctacgcgacgcgggcggcttcgggccccgcaggcggcagctcgcgctgggaccgccatactgcccagttgccg

SEQ ID NO: 285 - DNA, 2300 bp, Homo sapien
cggtttctcatcagcaaactgacttctttccaaaggtcttctgcaggtactttcagctctgccgggtctacttcctcacccgcggcaggcgcctctcatctcaggttgaaatccgccttccccactcgcggcaggcgcctctcatctcaggttgaaatccgccttcccagaggcctgccctgctgatctgactaagcaggctctggcctccccactccacctttctcccagttactcttccttccagtagtttgttttctacacatcgctttaggctttatgaacttgtttatggggttgtttgtatggctttctcaataaaacgtcaactccctgggtggcagggactttgggccactgttctatccgctgggattccaagcgtccctacccagatctgcacgcaataaatgcttgctgaacgaatgcagtttgacaaaacccagcttcggaggagagcaagccaacctagagtatcgcttggaagatataaggtggtttattcaatacctaacatgaacactcacctcacttttcccctcttcctttacatacaatttcatccatccaacaaatactgaatattttttctgtaccaggcagcgaagaggggcggcactctgcactgtacctttcatttctaacatgttgagatactaaactgagctttcagacattttttttaaagggctctacaacttcttttctgaaacagagtgtcttttacgtttgtcttcctccagttgccaaatgaatctaattttaggaagtgcagggaagtgttttaagttccaccgtcaaaattctgtttctgggccggtgcagtggctcacgccagtaatcccaacattttgggagaccgaggccagcagatcactggggcttaggagtttgagaacagcctggctaacacagaccatctttaccaaaaacacaaaaattagccaggtgtggtggctgcacctgtagttccagctactcgggaggctgaagcaggaaactggcttgagcccagaagacggaggttgcagtgagccaaaatcgcgccactgcactccatccagcctggacaacagagcaaaaccctgtctcaaaaaataaaaaatctgtttctaaaaatcgggtgggctttttaccagggctgctttatggcccggttcctccaagtccaccccactcaccgaaagagttagcggaggatgggggcggttggggtgggctcggtaggtcacgggcggtgaaaaccgtgggaacccagaaagacggccaaagcacgatgaggaccgctgccggcagcccgccccaccctgggctcctccccacacccgctcgggcagccgggagccacctacaaactccaggactcgaccccagagcgctggcctgagccgcccctgctcgcccccagtccccgcctctccctccctctaatgcccccgccctcgacaccgtcgcccccccgcccctgcctctcgctccccacgtctctcggcacccccgctcccatccgcccccccgtccccgcctctcgcccccatccgtccccatttccagcctccccctgaccccgactcaagccccccgactccgcctctcgcccctctctgcccccgcctctcactcccctctccttccccgcccgcctctcacgtggaggttgggccggacccgccccgccccacagagcccgggtcccgcccccacgtggctggcagcttcctggccctatcatttctgcgctggcttcagcggctccgccccggcgccgtgccagggggccggacactccagtcgcgcggcacaggcctgaggccgctgagggccaccccgtcccctgcccgcccgccggcctgctgggattggccgagcgccggcctccgcccgagcccgcgcgttatgtaacgcgccccgggggccccgccccctcgccctggcttatataacccgggcgcaccggctcgcgccccgccccagggccaatggaggcctgcggagtcggccccgacgaccaatcgcacggcccgggggcgggaccggtcacgcggcggcagggggcgcggcgccggctgctgaccggcacgcggcgagcctcgagactgcgcgagggcggccccgggggcgagcggctgtgcgcggggccaagggcgggggcagcaggtgagtgcgcggccgggcgggagttctgggcggccgggcgggagttctgggcactcgcgcgcggcagaggagccccgcgagccctgccctcggtactgggggcccccggagcgtggcgcttccgagccacccgcctccccggg

SEQ ID NO: 286 - DNA, 2300 bp, Homo sapien
ccaggaggtcaagaccagcctgaagtccttttcaaaccttttgtcatattgcccaggctggaatacagcagcatgatctcagctcactgcaacctccgactcccaggttgaagctatcctcctgcctcagcctccggagtagctgtgactacaggggcccgccaccacgcctggctaattcttttatcttctgtagagacagggtttcaccatgttggccaggcttgtctcaaactcttgacctcaggtgatctgcccgcctcagcctcccaaaatgctgggattataggcgtgagccaccgcgccttgctcggctttttcattttcttaccagtatcttgagcaaatgtttctaattttgataaagtccaatttatcagttttgttcatctattgattaatttacaaaaatggtatctatggtatacatcatgacttgtttgtttgttttgagaaggagttttgctcttgccacccaggctggagtgcagtggtgtgattttggctcactgcaacctctgcctcccaggttcaagcaattctcctgcctcagcctcccaagtagctgggactacaggcacctgccaccacgcccagctaatttttgtatttttagtggagacagggtttcaccacattggccaggctggtcttgagctcctgacctcaggtgatccacctgcctcggcctcccaaagtgctgggattacaggtgtgagccactgtgcctggccatgattattattattattattattgttattagtttgatgttttgatatatgcatacattgtggaatggctgaatcaagctaattcgcatgtgtattacttcacgtttttagcatttttttgtgatgagaacacaaaatcgatttttagaaatcttcaactatacattgttattaatcagagtcaccctgaggtacatagatctcttgaacttattcctcctgtctcaatttttttcctgtgtgatttgtgtcttgtctaagaaatatttgcctaacctgaggttgtgaaggtgttcatgttttttcccctagtagttctatcattacgttgtaaccacttttctttcttctttttttttttttttttgagacatggtctcgctctgtcacccaggctggagtgcagtgggacgatcttggctcactgcagcctcaacttcccaggctcaagtgatacaggcatgcaccaccacacctggttaattgttgtatttttggtagagacagtgtttctccttctctttttttttttttttagacagagtctcgctctgtcacccaggctggactgctgtggcgcaatcttggctcactgcaccctccgcctcctggattcaagcaattctcctgcctcagcctcctgagtagctgggattacaggcacgtgccaccatgcctggctaatttttgtatttttagtagagacggggtttcaccatgttggtcaggctggtctcaaactcctgacctcgtgatccatccgcctcagcctcccaaagtgctgggattacaggcgtgagccactgcacccggccgagacagtgtttctctatgttgcccaggctggtcttgaaatcctaaactcaagtgatcctcctgcctcggcctctcaaagtgctgaaattacaggcatgagccaccgtgcctggcctatctttgtaacttttgtgtttaggtccacagaaagttttgagcaaagaactaccatgatctgacttatgcagatgcttctggcatcactctgctgtgctgagcctgtggcaggcccgaaggcagacttcaggacgcctgtcggggacctttccacccatccgggcttggaccagcttgggcagagtacagttgggagtagaggccacattctggaaatgtttatcagcgagttttctggtgttaagtccttcctccctccttgctgaataataatcaactttatgaagttatttcctttctctgaagattgaagtgcttgcggcttcacatgaggccacgtgtatgtacagaattgtcttgagcctggagcaatgtttgctatgtattttaacttttcactgttttaaaggaaatagctggttttacgttttaatccacagattgtcattcttcagggatggcagccctaaacacagcatggcaactcatctactcactcatgaaagattaaaaaatggaaaccaacgtatttcatcttatgctctgcgtcacttctgctcggactcataaatccacgtctctttgctttggccacttcaactcatatccaagccttcctttaattcatgattt

SEQ ID NO: 287 - DNA, 2300 bp, Homo sapien
tgggaggctgaggcgggtggatcacatgaggccaagagttcaagaccagcctggccaacatagtgaaacctcatctctactaaaaatacaaaaattagccaggcatggtggcacacgcctgtaataccagctactcgggaggttgaggcacaagaatcacttaagcctgggaggtggaggtggcagtgagctgagatcacaccactgcactccagcccgagagacagagtgagactctgtctcaggaaaaaaaaaaaaaaaaaaaaaaaaatgctgttttcccagcttgggcaacatggtaaaaccccatctctaccaaaaatacaaaaaattagctaggcatggtggtgcatgcctgtagttccagctacttggggggctgaggtgggaggatcatttgagcccaggaggtcgaggctgcagtaagccatgaatgcaccactgcccttcaacctggatgacaaagtgagaccttgtctcaaaaaaaagaaaaaactgttgttacatcaatattgattcagatagctgtatttaaaattcactaagccattgaagcctttcaaacaacttttccaaattcattgaagaggcagattctgacacattcattgaagatgctgactattggatccaaatgactccttcactgaactagcagccatccaggtgtctactctgcaccaggaaccacatcaggacacaagcacaaggataaaactcacttcccacctggaactttcattctaggggaatgacatgtctaacctgataagatccacacatccacatgataaggtaaaactcacttcctgcctgggaactttcattcgaggggaatgacatgtccaacgtgttaagatccacattggggtacaagatgctttctctaagaggaatcttcattcaacacaacgccaccaggcaccaagcaccatggatggacggcaaaaggggagtgagagcagctgccctcctggtgctcacggtggcgggtgggggggatgtggggaaggggcagctgtgcaccagggagctccgctgggaggcaggggagggagggatggagttgggggacggggagggggaagggggagggaagggggcgggggagggaggggggaggggggagagggaagggagggaaagcgggatgcagaggaagcgatgcctgtccaggcagtgtgcttctcagaaggagccatgggcccaggcacatgggagggagagttggggctgggattgaggagaggggaaggaagccacagggtgagcagggaccagagagccagattttataagttatataagaaactcagattttggccgggtgcagtggctcacacctgtaatcccagcacttggggaggccgaggcgggcggatcacaaggtcaggagatagagaccatcctggctaagacggtgaaaccccgtctctactaaaaaatacaaaaaatgagccgggcgtcgtggcggaggcctgtagccccagctattcgggaggctgaggcaggagaacggagttaacccgggaggcggagcttgtagtgagccgagatcgcgccactgcactccagaaaaaaaaagaaaaacaaacaaaaaaaaaaaccctcggattttagttagaagcagtggctcaccctgtaatcccagcattttgggaagccaaagtagcaggatcccttgaggtctggagttcaaaaccagcctgggcaacatagtgagattctgtctcttaaacaacaacaaaaaaaaaacaaaaaaaaagcagctttgattttaacatgtggtcactaggaagccagtgaagagatttgattggatttgccttttagaaagtgctccctgactgcagggagggtgtaactgaaacgcgggttagtcactcacttgcagactccgattaacaagagcgaggtgtggtatgaagacagtgatttatcccaaagctagcttaggggaagaaatacaggtgtcctatcttaagtgtcccgcttcacctttggagcagaaagacggcacgttgaaaaggcaggggaggaagtgagcagggccgggcgtggtctgcaggctagatctagtgctttatctactgggcggctgagctagagactgccggtgccttcatgggcaggactaggccgaaaactccccaggtaggacagagtcccatatctctcacgtctcttggtgggagggagttccgaggcaacctcctggagggtgggagttccgtagcaggcatgcatgctttggtttgtaaatcgactattagctcttgaggagagtcttggagcacaga

SEQ ID NO: 288 - DNA, 2300 bp, Homo sapien
tcatgctcatcgtctcatttaatcctcactcacgaggaagatgtatggtgtcactgcacctgtaagatgtgcttgcaaaaacagagttagggaggttgagaaatttgctcaagattacacaactgaggcaggagaatggggaacatgaggcgtgagagagcaaagggaataaaaatcactgggaaccggtaacccccctcacccccgagagtggccagggagagagaggctgcctgagggaaggaagctcggcaggacccgctgcagacccagggccaagggaagtcccgcgggaggaaacgcgggcgcggtggggctggctccaggcacgcgggccaagggcgggagggtcggacacgaagccacaaggctcctttccttcctcctccttcccgtctgccttcttctgcttctgcggcctgatctccgagtccctctgcctgcaggcggcggcagaacgtccgcatctgtccgcatctcagcgctgtcccccaaccgagtcgcgccgcgttttcctcttctgtcgggagagctcgtgctgggaaccgcggggcaggaggacggcccaagctactctcgatgtccttccccagcccacgcctgccccagccacagttcccctggttttcctgaggttctccagctgctcaatgatgggcaggttcatctacagcctggagcagccgcctcctcctcctcctcctcctcctcctcctcctccagaaacacccctttttccttctcctcattcttccttctcattctttctcctcctcactcttccttctcctcattcttccgtctcattctttctcctcctcattcttccttctcctcttcctcttccccttctctttctgttcttttcttcttcctcctcctcctccttttctctttatttttctcctcctcctcctcttctccctcttctttctccttatactcctcctctcctcttactgtacttttttttccttctgctttctctgccctcctcttcctcttcttcttcttcttcttctttttttttttttttttgtggctggagtgcagtggcgcaatctcggctcactgcaacctctacttcccaggttcaagcgattctcctgcctcagcctcagtagctgggattaaaggggtccaccgccaccattccctgctaatttttgtaattttagtagagacaggtttttgccatgttggacagtctagtgtcaaactcctgacctcagatgatccatccacctcggcctcccaagtgttgggattacaggcatgagtcaccgcgcctggtctctttctcctttttttttttttaaagaaaaattgaaatcatggttttctaaaaatccctcctagctctcagcttcaccgaaccacgtcctggtcattgacttgccgtgtgactgctgtgcttcccctgtttccatttccctccatttctccctccttcctccctctgtcacccatgcccggaggagcacgataagggaccaggccgacctgggttccaaccctgcctgctccctgtcctgttgacgctctaattccacttgcagccccactttcctcatttgcatagtgttctcccagtaacaacagcagtcataccaagttctagggttctttcgaggatagtgtgtattcaccgcagtgcatctctgatgcctggcacatcggctgtgctcaagtaatggcagctattgcattacagtgactatggagttaggggaccgcatatggcaaaatgctgatcactgttttgaatttggtttcattcctctaatctcaaatccagtgttttaaggacatgctaaatgctttgtcctggagagctatcttaagggacaaaatcgttttcccagcgtcatctgtgacacatcctgacagtagagagctgcttccaagaagcaatttgaagtgccattatcaggcagggacgggggctctaggggatttcggggtcagcagatatgaaatgaatgatttcatagggctgtcacagagctgtggtgggaatttcccatgagaccccgcccctggctgagtcaccgcactcctgtgtttgacctgaagtcctctcgagctgcagaagcctgaagaccaaggagtggaaagttctccggcagccctgagatctcaaggtctgtccatctgggggagtgggtgggggcactgagaaggggtgagattggaacttttgctccctttgcccatttctagactttttctcctaatatgtaataacttctcttcaatagccctttaaataaacatcaataacttagcctgaagagttt

SEQ ID NO: 289 - DNA, 2300 bp, Homo sapien
tttatcaaaaagggaataacatgctgagatggatgtgaagaaggaacctcatacactgttggcgagcatctcaattagtgcagccactatggaaaacaatatggaatcctcagaagattaacttctgagaaatcataagttctggaatcataactaccatatgatccagcaatcccactaccggtatataccaaaaagaaaggaagggccaggcacggtagctcacgcctataatcccagcactttgggaggccgaggcaggcagatcacttggggtcaggagttcaagaccagcctggccaacatagtaaaaccctgtctctactaaaaatacaaaaattagccaggcatggtggcacacacctgtagtctcagctactcgaaagactgaggcacgagaattgtttcaacacagaggcagaggttgcagtgagccaagatggtgccactgcacttcaggctaggcgacagagcaagatggagtctcaaaaaaaaaaaaaaagaaagaaaatcaatatatcaaagagatatttgcactcctatgcttattgtagcactgttcacaacagtcaaaatatggaatcaaccaaaatgttcatcaatggatgactggataaataaaatgtaaatatacacaatgaatactattcagccataaaaaataataaaatcctatttgcaacaacattgatggaactggaggtcattatgttaagtgaaacaagccaggcaaagaaagacaagcatcacatgatttcactcataaatgggaagttgaaaagtggatatcatgaagataagttggtggttaccagaggccaggaagggtagccaggagaaggggatgaacagggtgattaataggtacaaaaattggtagaagtgctgggcaaggtgtcaagagccccagcatcagaaagtggtcgacttgctggttggtaagaagaatttatcgacaacaatataggtttgaaaaaggaaagttttattagaacgctgcagaagagtgcagcctcagcaagagagaactgagcatgccgcggtggatttttcatgtcccttttcgaatgtctcattttttgcaaattcaatccaagttgcgttcatttagccaggatccttctaagctcattcaagaattttgggctttaactatttcctttgatttaacctggtaccaggtgccaactttagataatagggatatctaattacttctaaattcctcagataaggggcctgcttgatggtcaccaggtgatctgtgctctccttaagagggaataagacctagcgttggcagagttctgtagggtgactatagttaacagtaatctgttgtatattttaaaatgttattattgaagagagtaactggaatgttcccagtataaagacaaatgtttaaggtgatagagatctcatttaccctgatttaatcattacacattatatgaaagtatcaaaataccacatgtacccagaaaacacatacgtctcttacatatcaataaatacaacttgagattatgatgtaaatacatctgaccaacttggtacttattagacttatgtgcgcagcactgctctagtcctgtgggtgcagcagcatcaggatcgttaaagaaaacaaacaatgctgagaaaaaaactcacacccctgagacatccgggtgtgaataaatgcggcagagtcgcccgagatcgggagaccaggcgtgggggagaggtccgggaggcctggaccagagtcctaacagaccagaggcgaaacgggaaggcgcgccagaaaaggaacaacgcaaagggagcaggcgtgcacggagcgcgaactaaggaacccctctgacaaccccagtccctcggcagttccagagaccggctcctcacggagggtggcggtagagactgttaagccccgcgggcgccggggcaggccggactgtgccattcgtggggggtaccatgtgggaccgagccgcctcacccagggctgtccagctagaaactccccggtgccacccccgcctcagtccgaggtagactcggccggacgtgacgcagcgtgaggccaaggcggcgtgagtctgcgcagtgtggggctgagggaggccggacggcgcgcgtgcgtgctggcgtgcgttcattttcagcctggtgtggggtgagtggtacccaacgggccggggcgccgcgtccgcaggaagaggcgcggggtgcaggtcagcgccagcgggggcgcggcgcatgtgtgggccgtggcgctgggcggcgtgggggtgctggacggtgtccctgtg

SEQ ID NO: 290 - DNA, 2300 bp, Homo sapien
gtgaaaataaacttctgcttgaagcaaagggaatgacaaatagtttctgaagtccatgctaaatcctttgttatttttcttcaaacttgctaatatctggaaaagaacttgcttgataacatattggtaaccaattatagccagcatgttagcaagaaaccagcttcttttattttggtctttgcaaaatttgatcatttgctgatacctagcctgtctttggtctctgttcaaataaaatttcacttaaaactgtatattgtaattacagaaatataagaaaagaaatgcagttaaaaaaataggtacggtgaacttgggatgttcagtctcaacaaatgtgtgtacccactgcattcttacacatttataaaaggttgaacatttgttctggaagggaaaaaaagggcattttaacctcacctttcttcacccctgacagttgcctagaaaccagtcttgccctacctgtgttgcaggtgtacctcaagtcaccgacacatctcttttaaagctacagtctccattctgacttaagtttatgactaaccatctattcatatttttatcaggtaagagactggtttctttcaagcaatgatgaaatcctaataaagacttagcaagcactaatacagcaccattcacggttaaagagtcatctaatttgtacagggctatgatatacatataaatacacacacaaaattcccaataagcattcacgtcttgaacacataattttgcagtccgattccattcaaagccgtacttaagacactcagagcaaagaatcacgtttctaggagagaaggaagagttcagaacagcttagacgaatttttaaatactgatttcggcattaccatcgtcgctgtgagattaggcagagggagcggggctgaccgccagagaaccggtaccaaccaccgcaagcaatcgccgagcctcccaccccagctttcaagacaggatttacgggtacacggtgtgaacaagacaacgcaaccccctttttacaaataaaaaaaaaatcaaacaagcccccaggcccgaagacgctcatccccgccgggcaaccccgcgagcgcaggctgcgggacgaggaccttcatgctcgccgctcccgaacccccgtccgctcctgcggtcccggtgctgcggggacgtatcccgggcgctcgggtgcatggccccggccagccgaggggccgcgcgacgaccacagccggcgtggagaaggcggcgggcgccggcacttcgcggcgtccccaggcccgggctgcgccgccggggagggtcccgctctccacacctcaatggggagaagcccgcgagcgaccggccggcctctccctccatcccagagactccgcgtcgcggcgaccctccccgcgccctccacgcccccgccctcgcgtcggggagccgcctggatcccggcgcccggcgcggggccccctgagggaacggagcgctgcgtggccctccccaccccctcagcgcgccaggccccttaccccggaggagcggcggctgccccgcggcgccctcccgcgcatgtccgtcccggctggctcagcgccgcgggctcaggggcccggacatcgcgcaggcgcctcttgctggctcgcgctcccgctagcactctgcctcgcaccggaccgccgtcgccgcggctgccgccgccgcctctatatatagcataggccgccgggccgtgaggtcgccgcgtcccgccccgcctcctcccgcagccaatcagggcgcgcgccgcttaaaggggcgatgccgtggccgaggcgttgcgccgggcccaccgtggcgtatcgcggcgctgcagggagccggctttgtctcccggagaggcgtctccgggctgaccgcggccgcagctccgctcctctgcctgagccgtgcggcagccctgggagcctctcaacgccgagctttcctcagaagcccgcggcgacccgggcctcggccgctgttcctgcccgaactgagggcacatcgcgcttcgcgcgggatttcccataaattcaggctccgggcaagattgtgtgttttttcctctccgcgggccgccgctggccgtgtgggccgaagaagccctggagggggagaggggagccgctctcgactgggcttgcggcgtgggagggacagtgagggacacttagggactgtgtggggcagtgaaggatagtgtgggatgatgagggaccgtgtggaccggtgagcgactgtgtgggacagtgcgggacgatgagagacggtgtgggacggtgagggacagt

SEQ ID NO: 291 - DNA, 2300 bp, Homo sapien
gggctcctttcagatgaaacttgagctcctttaggtgcccattcagtaaatcctgtcccgtgaggtttgaaaagatgtaccctggcaagttctcacactcatcttttttttacactgataacagcatatgggtaagccacaaacataaatgacgccaaaatgggaggaaaatcgggacagattttctttggatcaaaaaacctagttagttggtaaggaactctgcaattagttgtgactcatttccatcatcctaaaataatactaaatgaatggctgtaagaagataggttaactgaattgttgacaaatggcataggcatgaaaatgacccaacagccccttgtaagccagaagagccatcagaaaggaagccagatttctctctgcaaaacgttcgtttgttttgcaagtgagagagggcaaagatacttcagattctttttcttttttttttccttttcgtgcttaaggccttgaattcaaaattaggcctttgaattaaattaaaaagaatgtaagtaaataatagtgggggaaaggcaaatcatttcatggggtgtagagttaatagttaacctgataataaggccagaatctcattccatatgttaaactaccccaattagctagtgatcagtgtctaactatcaggcattattgctgaagtgcaagcaggggctccaggaggctagaggtcagcgacaggtctctgggctctcccaacagaggaccagccagggaatttgttctagttaaaactagagggtttccgtctgtttgctttttttctgactttagtcactcttggtttgttatcatttgtattatttattttacggttaaactataagcctaagttgcatcactggcgccccgagaaacctcctcccacaggcccgctggggctttgtccttgggcatccgtggcctctccaaagccaaaagacgtcggggccagctcaggtcgcctgagtaaacacaaacctgggaagccgagggccccctaagtcagtagtgagggagctcctcctggaaacccacagcgaccctgaagggctcaacctcgagcaggacctttcctccatattccaacgcagtcagaggagccctgggttccccccgcgtagcctcaccgccccacgccggcccactctgtcccctcatcctcccttgctgtcctactctgtccctcgccatccctcacagtcccacactgtccctcaccgcccctcacagtacctcaccgtccactgtcccacactgtcccttgacatccttcattgtccctcaccgcccctcacagtgcctcactgtccactgtcccatactgtcccacactgtcccttgccatccttcactgtccgagtccctcacagtcccaaagtccctcactgtcccacagtccctcaccgtcccacactgtccctcactgtcctacacagtccctcactgtccctcatcgtcccgcactgtccctcaccgtcccacaccgtctctcatcgtcccgcactgtcccacacagtcgctcaccggtccacacggtccctcatcatcccacactatccttcactgccccacacagtccctaagtgtccctcactgtccctcccacgccgcaagcccagtcgagagcggctcccctctccccctccagggcttcttcggcccacacggccagcggcggcccgcggagaggaaaaaacacacaatcttgcccggagcctgaatttatgggaaatcccgcgcgaagcgcgatgtgccctcagttcgggcaggaacagcggccgaggcccgggtcgccgcgggcttctgaggaaagctcggcgttgagaggctcccagggctgccgcacggctcaggcagaggagcggagctgcggccgcggtcagcccggagacgcctctccgggagacaaagccggctccctgcagcgccgcgatacgccacggtgggcccggcgcaacgcctcggccacggcatcgcccctttaagcggcgcgcgccctgattggctgcgggaggaggcggggcgggacgcggcgacctcacggcccggcggcctatgctatatatagaggcggcggcggcagccgcggcgacggcggtccggtgcgaggcagagtgctagcgggagcgcgagccagcaagaggcgcctgcgcgatgtccgggcccctgagcccgcggcgctgagccagccgggacggacatgcgcgggagggcgccgcggggcagccgccgctcctccggggtaaggggcctggcgcgctgagggggtggggagggccacgcagcgctcc

SEQ ID NO: 292 - DNA, 2300 bp, Homo sapien
ataaattaaaataaaataaaatagcaattggctgggccgaaggtagtgagttatctcgattgattgcccacagtcagttacagatggaactccttcctctactctttccccaaccctcactgctgcacttgactagtcttgaaaaagaaacagatattggaacaatgtttaaaaatcaagggaaaagcctaatgagacattaggccttcattacaggacccgaatgaagaggctgggtcacccagtggttaggggctcgggctctgggagctgaaagtccacgtggcgcaaatggctctacttccacaagcctcggtcgcatctcctggaaaatgttgccgcttctcttcctctttccacacgtgcgctgctgtgggcgagggaacttctaaaggggccatgccgggcgagtgctgggcttggcagagaggaagaaggacgtcggtttttaccttacgcccgtctatgagaatgcaccactttgatcattcaagaaaattagctagtaaagttcatctgggccgggcgtggtggctcatgcatgtactcccagcactttgggagaccaaggcaggcggatcacctgaggtcaggagttcaagaccagcttggccaacatggtgaaaccccatctctactaaacatacaaaaattagccgggcgtggtggtgagcgcctgtaatcccagctactcgggaggctgaggcaggagaatcacttgagcccaggaggaggaggtggcagtgagctgagatggtgctgctgcactccagcctgggcaataagagtgaaactccgtctcaaagaaaaataataaataaaaaataaagttcttctgaaatctgaccttggataagggtcacgaacagcaatggtgtctttcaggaggggaggagggaaggcaattagaatcatgagtgtgggaagtcaagaataataaaatgcctgggagggcagtggggaggcaaaaagactcccaagtctagaagaacagaggcagagaagggacgggactggagcttttgaatggacacgccaagtgaaatgaaaaggcccgtctgggacaaacaaaggaagatctacagtgaaacctcgaaataatgagatccatggtcatacggtccttaggtacgtgtggaaggctgagttgggcgtgtctgaagcccaagcctgtccatagaagttcttatttgaaaggtaaacccctaatgtggccaagtcttccctaaaccaaaaatcccgtgctggtagcaggcaggttgctcctcaccagcagcggtaaaccgagagaaccctcctctcctctcaacactagaccgactcaaaatgtagctgaactcacaataaaacaaaataaaacaccggatccctgatggggtgggtgtcgtggacccgcagctggctggggtggtgcccctgcagcttccctggctcttgccatcgaagcacagagcctggctggaagaagctgcagtgtttggaggtaaatctgcccactgctgttggccgggtccccacagcatcgctcacagtttcctgccatgctctgtggccagggctgggctggccggtgccccgaggcgtggaatgagaacagagcagaaacagcagtgatccgatccctgcttttctgctgtaggctgatagctcagagatcggagagctgcctgccagggtgtggggaggcaggacccatctgtggtcaccacagggggcggctctcctcatggtgttctgtgcatggggacaaacacccgcatgcacacatgtggtcggctgtgtgtgagccatggggtcggccctgagctggaggggccctcggagggaggatgtgcccggtgtcaacattcgctccaggggcctgaaaggttacggggaaagtggaacaggcaggaagtggaaggggatgtaggcaggtggtcactgtgctgctgccgggggtcacaccaggaagggccctgcaggtggctgtgcaggacaggagggggacctcctcaaggggcccgccctgggaatcctgtcccattttgttggggtttaggtggaacaggttctgtgcccacgtccctggaatggccttggctaccttcatgtccttctaagaacggggccaccgcgtttggggcttctcctcccgcagaagggaactcaaaccctgtctctttccccaggtctcggaggaggctttggatacgtggtcggcggaatccactgggataaaacgggcttcgggagggccctggggggacagctccgagtcatttacctcttcactgcggtcaccctgagcgtcaccaccg

SEQ ID NO: 293 - DNA, 2300 bp, Homo sapien
ttccttccccaagttctgaagaaagagagatgggttcaaaatattacctatagttattgatacagttcggactatgggacatagattagtgggcaggggaagagcctaccctggagaagaggatcaaaaagagcagctagctcccaaaactaccagggcgctgaaccatgcatgccaggtttgttttttccactctccaaataagcagcttccctacctggggtggggtgacgactggccagaagatgtgccaaaggcctctctgtacatgagtgtagctgtctggagtggggtctctgctcttctgtatgccgtcgttcttgtcagatgtgtcacaggatgcctctgggttcagatgtggcgtggttggttgtggcacatggctctgcttcaggtcacaggatgactgtttctaggtcttggattttaggtgtctggtattggttttcctttttctggtacatgcccacctccttatgttaacatcctcactgtctaactactcttgttcttaacccgtgatgtattttcactcctgccagagaaattcagtctagtttggctttgtgtcttgacaggtccacagagagattgaacaggatcctaggggagatactctttggccattggtggttggaggtgatgaactgtttgcagaagtggatgcgtttaagagacagggtcgtcattgctgccctgatttctcctcacaaatggaaaactattaatgtatacaaaacaacgtgcacttagctgacggattgttttattcgcatactacagttggggcttcatttatagagggaagtggtgaggttccctccatgcgaccttccgtggtggctccccgacttctcctcccaacatgaacctcaaattgactgcaaagcatgggttaccaaagagaattccaccccttcctcatggttttttgttagcatgtgtggcggtaggggggtcttgcctaagaccttttttgtgttgttgtaaacaagaggcacagtgaccttggcttttcgtgctagggtgcgcctgctgggattccctaaagtaggggcatccactgagccgcacagcagcagaaatctagaagtaaatggacggggtggcacagaggtttctgaaatggccgtgaataaagaacaaggcgttgacgtcacacgccagtggatgctggggatgaaggttttagtacctcccgtgtatgtatttagtttttcaggttttacacagacatgagagtgggttgacatgagttcacagacatattcttcatacccctgaggctacttgtgctgtagattatatttggagactgttgacacctatggagtagtcattttcggccttatctagaagcacagctctgcttattttagactgattttgataattttgaagatttcatgtcacccttcccagctgacacatgtctttctaagaagtgtcatttcataagcactgtactttcctaaagataatacaatactcaggaaaacagtgatcctaagaaagagaagggaggtcatttgggtttgaagagcagggacacagaagtgtgctcccaagtgggagtatccctgcagtgggtgtgctgtggagctcggacagcacctttagagtgggcgggcaggtggcagtgggaaaagtgaggtcaggtggaagagaagtcattaaaccccttacctagctgtctaatgagcaaggaagcacttgcatatcatttccaaattatctgtagagaagagaaacctttctttaaatgcagaattggaatatatttgacaatcttctggtttaaattttttttagttaaatattgaagagttacaaaagaatatagcatttgtgtatggtataaaaacagccacacggtgaactgtcgccaccacgcagcttaagattgcacagactgggccgggcgcggtggctcacgcctgtaatcccagcactttgggaggccaaggcgggcggatcatgaggtcaggagatcgagaccatcctggctaacaaggtgaaaccccgtctctactaaaaatacaaaaaattagccgggcgcggtggcgggcgcctgtagtcccagctactcaggaggctgaggcaggagaatggcgtgaacccgggaagcggagcttgcagtgagccgagattgcgccactgcagtccgcagtccagcctgggcgacagagtgagactccgtctcaaaaaaaaaaaaagattgcacagactgtttcctctccggtgcaatcccctgtcctttccacgcaaagataaccactagactgggtattctgctataa

SEQ ID NO: 294 - DNA, 2300 bp, Homo sapien
ctgccaccttaccctgatgttccagagtcagcctttctcacatgctgcctttattgtgtaggcctcttttactggacctgttagatgtcacttggtatcaagcccacgttccgattgcatggtcctggcgttccacagcctggctcactccagattgcccgccccaagtctgtgtagactgtcccctgtaacccacctcccattctccacctctgaccttcacggagggcccggtcaccaagccacctcccacccctgcaatagttgcccaccccttgtgatctcgctgatgtcactgccttggcgaaggcattctgaactactacagaccactgcagtctagccttcttgggtcccttgctgcactgatgagctgcacctcacttctttatgcttggccagatgacatctcagaatgttctgtaatgacttcacacatacttatcttacgtgcaaaaatgaatcacagttcagtaaaggtccatggcaacctttattatcttcctagacccctctcagctaggtgctcagtaaatacctgaatacttgaagaatggattaagcggcaggaattctgattactgaggtggagtgtgccagtagttgaggtcctcatctcatacctgaactgtgtcagcagcctctttaactggtctgtccctaatctacacttaggccacactgccactggcacagtcctcatccagtcttttcatggaaagctccagcttcagcctttctgccagcctacaattaggaactcttccgtgcggcctgaagggctctctgcaaccggatccttgcctgcctctttcgtcttatctgctggcactccattctgcacaccctgtcctccttgcagttcccagaatgttccctgtgccttttcctggctgacttctgctggaagccctgctggagcccacctggcaggctcacactcttccttgtcacttcctctaagacatcagcaagcagagtaagttgcttcctcttcctagcttcacccaccaccctttgttcctctgctgcttttcttgcaggccctaggactggtttgtttacctgtctgccttcctgggcagactgcagctccttgagggcagggccatctttccgtgccgtctctcccggtgatatgctgtgtgcacacagcgtaggatgcctgttgatcatataaacgatacttttgtcaagtaacaaaggtcactcctcacactagaggagagcttgctgctttcttgtgccttgagagattttcccttcgaactgtatgaattatattgaaaattgacaatgatgagtcatatctcagcaagggtgaaattcaaaaacgcaaagcctccactactggagtaggaggttgcagactggtcttaaaaggctaagtctggcccttcactgaatccgcctggcgggtctcaaacacagggagtgggagggaccctctgcccggtgggcaggtgatttattggctgggaagcttccgcggtgatttagttgtgaagcggcggccggggaagtgcaggctaatgcctgggccgccagggagaggccgcccacaatcgcgggccggaagggaccgcggggggcgtcggggccagccccccgtttcgcagctgaggcggggttggggcggagggcgtgcggccggggcgcagccgacttcgtccatccggaacgtgggctggagacccagcagcctgggaagggccccagccctgtgggcgccctctccccacgcttgctgcggtagggaggaagtttctgtgctttaccgccttgatgttctcctgtccggaaggaggacacagattccagcgccgggtgccctggaggctccggcctcggggtgggggtcgggccgggggcggggccggggccggggcgcggggccccggctggcggacaggagggcggcggcaatccaggccgccttttgcagccgcccgcggccgcgccgggctctgcgcgccgcgctcctgcctcctcccccgtcagcggcggccccagccccgcgccccccgggccccgcgccgcgcggccccgccgcggtcacacgccgagccacccgcggccgcctccgccctgcgctttgtggagccggagcccagtgacaggcgacggcctcttgccgccccggaccccgggcgcttacctgtggctgctggggtcggccgcccgggaccaggctgggagccccgaggtgggggctcggagccaggagctgcccccaccggggcggggaggggtgctcgggaggcatgggacaaagtgaaagtctccgggctggggttagg

SEQ ID NO: 295 - DNA, 2300 bp, Homo sapien
taaagatgatttaggtagtgtccttgtccctgaaggacttagaatctaataagagaggtgcagttccccagagaggtacagtgagaggattccgggggctcctgcatttctgagctgctgccaggaaggaagtgtcttcagagtggagctggctggcatggtggtagtgtgggtgacttttccacgggagagagtgtgaaggagaggagatctggggtgtggccgctggggtacgctgcccctgaggggtaacaagagaaagggctgtctgtcttggtggcatggcatgtgaagccaactgtgagatgccagcaccaggaaagacaatgaagaggatatccacaaaggctggcgccaccattggaatccattatcacaggggaaggccattggattttggtaactcagggcatctaatgagaccaaaattagaatccacatttcttaacttgctgttacagtaaccgtttttatagtgtgctctatgtaacagtttcatgggctttcagagactgatgaatttattacatattattttgtgttgatttcttcaagtaaacattttccatatgaaagggttagatagtttgtttttttttaatatatacacttttgggaggaaattctttgctgctcatattcatattatttggctgctaggttctaattccattgcttttgtgtttagaaagtatttttctctagactgttggtagtaacagcagttttgggaatatgttgtctcacataccaataagggaaaatgttcttccagcctgtagatacttgtttcatgtgttaggtcaaaggaaaacgtatttaagtgtacttggcatttcttgtattttctaaattacattatcggcaggataagagtttattgaatcatagtttcagaatttagtttatttcatagcataaacgggagtgctatggaaatggaattgattctgcattcactgtaggaatcttgaggacactgtgtgttcttttcaacaggctttaatttcctgacattccattacatttctgggaaacagaattggcactgccctttcctgccctatcttgtcctttataattttggcgaggttcatggtcttccatttctttttctttttgtaactgattaataatctatagaatcacctcttagtttgtaagtggaaactaagcctgcacatccaaagctaggatttcttatatggatctgccttagtattttgaatcaggacctcaaatgagatttttggatgttcatgtgtttgtggcacgatgttgaatcttgaaccttcctgtctttctaattgttagaattagattcttcaagctagacttgattgggctagtattactttaggaaatgttttaatttattatttggggaatgttttatttattatttttagtttcttatctaaggaagattaagctgtttgcagaaaatacagttttctttagctaccctgctcacaataccatctacactgtgtctgtacctgtgtgacaaggccaagcactccataactttacccggattgtttggtctttttcaaaatgtttagagtttcaaaaagaaatttgtgaagttgcttctcttaagtagctactactatgtttttaaatgtgttgcagtatttctattagttgatcttgtgtgtagtcattcatatctgtcttttgattctatttcttggtgatcttgctttttaaaatcaccatttaccttaaaaaaaaaaaaaaaaagacaaaacttgctgttgtgctgacagagcagagagcatttaactgacgctcctccgtggcttggcttgctgagttcctgacagagcagggcatttaactgaagcctctccatggctgggcttgctcagttccctgctgttggctgtcttggatcccctttctaaggccccacttccctgcacactagcttggtgtgcagggagaagctgcagagtctgttggctgggctttatttacggaaacagcagggttgagattgattgcgtcgtggagagacagtgtgtggatgagggagggtcacagcacatgctcagtcctgtcagagtgaggggaagtttctgcgttctgcgtgaaggcttaggtcatagcacaagctcagtgaaagctctatgaggtctctgagactgcatgtgcctccattttgagttgttagtgtagaaaagggcagagttttagcagaaagtaaaggttcaggaatccagctagactcaccagagcccgtgttagtcatggatgatccattcagcccctgcaggtaggctatcttcccctgg

SEQ ID NO: 296 - DNA, 2300 bp, Homo sapien
gttttaaaatttcaatttaatttaatttttattttttgtggagacggagtctcactatattgcccgggctggtctcaaactcctgggctcaagtgattctcttgccttggcctcccaaagtgctggatttataggtgtgagccactgcacctggcccaatttggggttttgcattttagaaatatatgttaaaaacagattctgacaatacagtttgtttttgccgatttgcttgcctagaaagtcttgtttgctcttctgtagcttgtcagttaaattgtctgctttaaaaatttttgtattctttgtcccagttccatgtgctacttggcatactatttagtttttacactgcctttcaacctccccagaggtggattgtccatgaagcttaaaccaaagagaccctcacttgagtggccctcttgacattttgtatacaaattttcgtggtctttttcttaaagaaggccccccaacttgtataaacaacagatctacaaaacgttccttttctaaaatacaggactgctaagaggaaatgaaaaacaaaagtaaatgtggatttttagttttgtggtttaggtaaaagggatataaacagaatattgaatggatttgtgtgtgatgccagatttaatttatcatgataaccatcagtggtgcaccagatgttttgactgtatttagcttcatattaaattaagcatagccagtggcctacaaagtccatctgtactgctgccaaaggtagcactgaagacagtcagccgccttttatgtctgttaccactgctagctgctgtttccctcttgccatggtatttaagctttggaattgctcatgcaaaggtgagcctttgtattgaattggaatttgtattctgtaaatcgactgtactgaatgacaaggcttgcctttcagtagatagtctattcttatttttgcttacctataaaccagtggaaataaatacataagattagttaggggtttattgaggcttgaattctagaaagaggggaattactatattatacacaagtgccagttaaacatgtaccaatctgaagaagatctttctatacctgctactaatcatggaaaacaattaacttactggtttttgttatataaatacatattaagatctgaaaatctcagcagttagttttatttataatcagaaagacagatgttaacagtcactgaaaatctttatgttttaaatgaacgcaccttcacttttacttgacttctacttcatcagcataattggagaaccatagattctttccccatgagtgagggcaaaacatacatctgcagtgttcttagcatgaggatcattaagatggcagaccttgtagatcaaacaatttcctcccatacaccctcattctttcctagaaaagcattgagacagctctgaaattagacctggaaagcatgtgctaaggcaagaacaaatatcttgaaaattttatcataatgttgctttttaaagtcctaaatgtcctctaaaatgaaattcttttgtattaaccttctttcatatgctggctttcaccagactgcagaattgcctgatttgactttctaatgtaactgtaatgaatcttctgggaagctgaaacgattgaacacacatactctgcaactccattgtaaaatattcagtcagtactgtcgatgctgctgattaaaaaaggagaaaaaaaaaaaaaggaattgggagtgggagagaaaaatgaaacactccctaacacatattagggcttaaaaccaaacatattctctcagggatttcaacctttacaagacatcatgatgtgcagtaataccttgattaaatatattcagtaactccttaataaaaacatcaagctgggtgaaggtagggtctgctttgtaaagccagaattaggggtatatgattatgttcagttttgacacatttgacacatctgaaaaagcatggaaaaaaactggcccatttgcacaaacagacaaattgccctgtgcattatgcatgaggacccagtagagttaaagatttgccagcctatgaatgtgggacctacatacagtggagcccaaatgtttaatgctgggtctttcaaatgtgtgtcctttacatactttgggtcttatttagcagccagagaatcaagaggtatgctttttcatggtataagtaatttatcccaggtatttataattgtagcagtatgtgtttggcttatttatctgaaagaaattgaacaccagaatttaataattaaggatttattagtta

SEQ ID NO: 297 - DNA, 2300 bp, Homo sapien
aattacaaaagttagttgggtgtggcggcacacacctgtaatttcagctactcaggaggctgaggcaggagaatcgcttcaaccgaggaggtggaggttgcagtgagctgagatcgtgccactgcactccagcctgggcaacagagcgagactctgtctcaaaaaaaaaaaaaagaaaaaaaagaaagaatgctcctgtagatagagattttgatggaaagtgaagccatctaactgatatactttatccctcatcatttccaaacaggaagtcagatagtcctatccatatctagaatgttggaagcagtttattgaatttattaggttttaaaattcagttctcacattatcagatatataaagagatattaactagtttccccatttcataactccagcaaagaggatttttcttgctgaaagttactcagaaatgtgatggcaaggatctatggcttttttttttttttttaagatctcttgggtcatggtccaatagtatctgttagtccaaattattctttaaagaataattgaatgtgggccgggtgcggtggctcacgcctgtaattccagcactttgggaggctgaggcgggcggatcacctgaggtcaggagttcgagaccagcctgaccaacatggagaaaccccatctctactaaaaatacaaaattagctgggtgtggtggcgcatgcctgtaatctcagctactcgggaagctgaggcaggagaatcgcttgaactgaggaggcggaggtggcggtgagccgagatcgcgccattgcactccagcctgggcaacaagagtgaaactccctctcagaaaaaaaaaaaaaatgaataattcaatgtggaaattataatctgaatagattttccaaggagaaaattatcacttcttttgaaacagatgagtgaattattttgtgctacgttttctaccccttattttatacggaccttaactccttcgggaagagtgtatggtataaggacaccaataagcatttacagaatattaacaaaccaacaataggttgatgattcaccctggattcgtgccaggctctgtgaaagaactcaataaacatgatgtgcatttcaaaaactgctaatcataattgaaatttccaaacccctcaatcccataaattatatgaactagaatatgatcatttggcctgcccctactccctttacagcatgatagaccctgtgattatcaggctttcgggaagtgggacacaatacttcattcttcaaagaaaaagaggtgatgtttggtcttttcctctttttagattttttttcacacgtaccttatagagttgtacactgctctttctaaaatcccttctgtacctgtacagtctctcctttatgccttcatgacactttttattcttttcaaataagcagtgcgacttatcacttttatttttctttctgtaattcatcttttgtcatgtacactatttgaaaaatattacaagccgctcatcagaatttcgaaagagtccatatgagaatggtttacacccactctgtagcccgcagcaacatggatccgcgtcctaatgactgaaaaggccaattaagacccgggtaacagcaagatcaaccggacttccccccaccccacccgggacctgcccgcgccgccagcccggcccagcccggggggcgcggggggcggtactggagcgcggcgggcggcggaggagggccggcctcgcactctcacaaagacgcgcccgcggcgggagcccagcccaccgcctctggccgccgcctgcagcgcgagccctcgagccccgggccgcggcgttgtcaaggctcggcctctctccgccttcttctctgctcattttattaaaaagattaaaaaaaaaaaaaaaaaaaaaaaaaaaaggaaaaagagatcccgcctcctccgcctcccattggccgggcccccggccgcgtcacaccgcgctgtaccaatggaggggcgcgatactgcgaggtgggccgggcccgagcggggagtgggcggcgggtcggtgcagcagctccgccgcggctccgccaccatcgcggaggtgccgctgttcccacagacgctcgcgagcaaccctccgcgctccggagcctcctcagcctcccgcacaccccgagacgctcgccccgctgggcctcggtccccgcctcctcccccgtccttttcccctctctcgctccccacattgtctctgcctcattttctctcctagttgaggattaaaaaaaaaaaaaaatcaccatcatcctcaggg

SEQ ID NO: 298 - DNA, 2300 bp, Homo sapien
ttactcagaagagctttgctccttataatgaattcagcaattcctactgttggctggagttgggctctgtcttagaggggaaaagcagtggtgagtccacatagaatgctatttgtatttctagtaacagtgaaatggaggtgtgatgggggaggagatggtgcagaatacaaccctcagggcagtacagcaggagaaaagctggtgaatcagaaatgacttcattccactcggttctcttctgttctagctaagtttggtgcgaacgccattctgggggtgtcccttgccgtctgcaaagctggtgccgttgagaagggggtccccctgtaccgccacatcgctgacttggctggcaactctgaagtcatcctgccagtcccggtgagtggtttattggaacttcccaagcaaggagttgggggtttcagcttgctgttggggacccgagacctcctatgccttgatatcctaacacatgtgactctcccagcacagctctgccccttgttaagtgtgaccttgagcaggtaactcaacttgcctgtgccccaggtcctttatctgcaatggaggctcggggaggaaatgacagcagtactttccttgctaggctgtgagcattacctgacatagtcacaagtgtttctcctggtgatgatgaatttgcagttatcaaaatagacctggcgtgaactggttgcagtagcgcacacctgtagtcccagctaatcaagaggctgaggcaggaggatcacttaaacccaagagtttgagaccagcctctaggcaagaccagtatagtgaaaccctgtctctaaaaacatgagtcagagacctggtgagcatttcacagcaccctggcccctctggtgctcctcaagaagcaagtcttgggctcatctgtgagctagattgggatggtaggaccagaggggcttactgccctgtggggctctctggacccagtgccatgcttctctgctctgctctccccaggcgttcaatgtcatcaatggcggttctcatgctggcaacaagctggccatgcaggagttcatgatcctcccagtcggtgcagcaaacttcagggaagccatgcgcattggagcagaggtttaccacaacctgaagaatgtcatcaaggagaaatatgggaaagatgccaccaatgtgggggatgaaggcgggtttgctcccaacatcctggagaataaagaaggtaaaggcgctagggaaccgcccccccacccagccctgcagcgccagctccctctgttggggggtcgtccacacctgccactgtggaaatctattctttccacctgtagtttgtaaagatcaagacccttcaaacggttttaaggaggaaaaggggagcttcattttattttacttatttttttctttttttttttttttttgagatggagtctctgtcgcccaggctggagtgcagtggcgcaatctcggctcactacaacttccgcctcctgggctcaagtgatacctactagtttggggagccaagtgtctgtccgtctgtcctgctggcagggcagcttagccatggacagcagaccctgagcctgagctctcaacggcacagcctggcgggaggatcctgccatcccgggctgcctccactgggctttctcttggaccccgcttctgctctatttaaggcctgtgccttgggacagctgatctcagctgcttactgtaactgtatcttggccaggacagctgttcctgggcactaaatttgggagcatttgtcagtgagaagggctgctttcttggaaagagagctgaatttcccattttgtatgcaccaagaactctgacccatggtttcttgccccaaagcagaaaaaaagtaactgatgtcagaactactggttggggcctgaacacctgttgatctttgtgttacagtccctgtgtagcagctgttgaagggaagttttctctgtacctacctgttttccaaacctgttgtcaccatctcttcccaggcctggagctgctgaagactgctattgggaaagctggctacactgataaggtggtcatcggcatggacgtagcggcctccgagttcttcaggtctgggaagtatgacctggacttcaagtctcccgatgaccccagcaggtacatctcgcctgaccagctggctgacctgtacaagtccttcatcaaggactacccaggtgagtgttccccgagtgccatctccctttcctgccactgacctgcagcagggcagctggagcatctggctggctggtgatggc

SEQ ID NO: 299 - DNA, 2300 bp, Homo sapien
ttcggactacctgcagaaatcatgcctcccatcagaggatgaagatttgccatctttgcagttagccaagagtgagcagcagagcctgcctttcaagggctcagcctgcttgagtgaacagtgagctttgcttatttattgcctatgaaagccatgttcctgggtagcagtggtctacatagcacatacctgacagttctcttgggtgtaaagtcactttgggctccctgggtagactattaaccttttgttacaaaagcattgtctgagagtgccatctctgttgcattgttgggtgaatgcctgataaccatcaaagcaagcagaaggcagttttttgtctccccactgatttttgtcctccactttttttgcttataaaacaaacatcacagaattgattttgatattacacagttccaaagtcagattccatggtaggggagcaaaggctatgcagataagagtggccccaacccctcattctcccctctccctcgtagaaactgaacgtcacagaacaagagaagattgacaaactgatgatcgagatggatggaacagaaaataaatgtgagtggcctgaggtggcgtctttactggggaagatcatgaagtctcctgaagattttaaaacctttcaggaagaggcccatgatcttagtgatgagctacatgagcctgtggtctcttcccatttctttgctttactcttaagaaatcacacttttggccaggtgcggtggctcacgcctgtaatcccaacactttaggaggctgaggcaggtggatcacgaggtcaggagatcgagaccatcctggccaacgtggtgaaaccccgtctccactaaaaaatacaaaaaattagccaggcctggtggtgggcgcctgtagtcccagcaggagaatggtcccgggcggagcttgcagtaagccaagatcctgccgctgcactgcagcctgggcaatagagtgagactctgtctcaaaaaaaaagaaaaaaaaaaattttttttgaatatcaggtgcaaaaccaggtgacaatagcctgtcagtttggttactcagaagagctttgctccttataatgaattcagcaattcctactgttggctggagttgggctctgtcttagaggggaaaagcagtggtgagtccacatagaatgctatttgtatttctagtaacagtgaaatggaggtgtgatgggggaggagatggtgcagaatacaaccctcagggcagtacagcaggagaaaagctggtgaatcagaaatgacttcattccactcggttctcttctgttctagctaagtttggtgcgaacgccattctgggggtgtcccttgccgtctgcaaagctggtgccgttgagaagggggtccccctgtaccgccacatcgctgacttggctggcaactctgaagtcatcctgccagtcccggtgagtggtttattggaacttcccaagcaaggagttgggggtttcagcttgctgttggggacccgagacctcctatgccttgatatcctaacacatgtgactctcccagcacagctctgccccttgttaagtgtgaccttgagcaggtaactcaacttgcctgtgccccaggtcctttatctgcaatggaggctcggggaggaaatgacagcagtactttccttgctaggctgtgagcattacctgacatagtcacaagtgtttctcctggtgatgatgaatttgcagttatcaaaatagacctggcgtgaactggttgcagtagcgcacacctgtagtcccagctaatcaagaggctgaggcaggaggatcacttaaacccaagagtttgagaccagcctctaggcaagaccagtatagtgaaaccctgtctctaaaaacatgagtcagagacctggtgagcatttcacagcaccctggcccctctggtgctcctcaagaagcaagtcttgggctcatctgtgagctagattgggatggtaggaccagaggggcttactgccctgtggggctctctggacccagtgccatgcttctctgctctgctctccccaggcgttcaatgtcatcaatggcggttctcatgctggcaacaagctggccatgcaggagttcatgatcctcccagtcggtgcagcaaacttcagggaagccatgcgcattggagcagaggtttaccacaacctgaagaatgtcatcaaggagaaatatgggaaagatgccaccaatgtgggggatgaaggcgggtttgctcccaacatcctggagaataaagaaggtaaaggcgctagggaac

SEQ ID NO: 300 - DNA, 2300 bp, Homo sapien
tggctctcaggggtgtttgtggtagtgtccatggtgactaatttctcatgaactttggaattatttactataattctactgactttaacagtggagttcctgttaagtaaaatctggaaatctcagtatgtcaaacataaaagagctgctggaggtgaagtagggctggggacccagcaacccacccgactctgcaggttttatctcatttaccctcccttcggcccgtccctccgtaattcctgtggcgctcatcagatgggactggtttgaaaacccctgtctaaaaacactccgggccaggtgcagtggctcacacctgtaatcccagcactttgggaagctgaggtgtgtggatcacttgaggtcaggagttggagaccagtctagccaacatggtgaaaccctatctctactaaaagtacaaaaattggccgggcatggtggtgcacgcctgtagtcccagctacttgggagtctgagacatgagaatcgcttgaagctgggaggcagaggttgcagtgagcagagattgtgccactgcactccagcctgggcaacagagtgagactctgtctcaaaaaataaaaataacaaagctctctaggcccagtccaagcccagccacagcctccgtctattcttgaatctagtccctctcctccatgaattcattctgtacacgagggaaaaggaggagttcctttgttgtctctgtccctgactcgttggtttaggcctggcttttgtggcactctgtaattactccctgcccgaccagcccccagacaaaatgtcttgttaccgttctgtctgcaccaccccctgccagtctcccggacacctccacacataccttgttctctgtcccttcatacccctgcatagtgtgactcacacgatgagcaggatcccctgacttttttttaaccccctagagaaacataccaaactgttagtgagaattgacctctgaagctgtgtgcttgggtaactgcctgcctgttgcagtgatgccttgacaaagctgtgaaagacaccaaattgctcatacagcatgatgggatcagagttgattttctttgcatatttttttatatcaagcacatcatagataaaaataatgccttgttattaatatattagtttaaaatggaatgctgatttttggctgggtgcagtggctaacgcctgtaattccaacactttaggaggactttaggaggctgaggtgggcagatcccttgaggccaggagtttgagaccagcctgggcaacatggcaaagcccatctctataaaaaaaaaatataaaaattagccaggcatgatggtgcatgcctatagtcccagctgagtttggaggatcatttgagcccacgaggtggaggttgcagtgagctgagatcgtgacactgcattcctgccttggcaacagaatgagactctgtcttaaaaaataaaaattaaaaaattaaaaagtaatactgatttttattggattactttgagccagttctcagtacgtcagttttgttactttatagtctcatcaaaaattcattttgatccatcattagacgctttgctaaatgatttcggactacctgcagaaatcatgcctcccatcagaggatgaagatttgccatctttgcagttagccaagagtgagcagcagagcctgcctttcaagggctcagcctgcttgagtgaacagtgagctttgcttatttattgcctatgaaagccatgttcctgggtagcagtggtctacatagcacatacctgacagttctcttgggtgtaaagtcactttgggctccctgggtagactattaaccttttgttacaaaagcattgtctgagagtgccatctctgttgcattgttgggtgaatgcctgataaccatcaaagcaagcagaaggcagttttttgtctccccactgatttttgtcctccactttttttgcttataaaacaaacatcacagaattgattttgatattacacagttccaaagtcagattccatggtaggggagcaaaggctatgcagataagagtggccccaacccctcattctcccctctccctcgtagaaactgaacgtcacagaacaagagaagattgacaaactgatgatcgagatggatggaacagaaaataaatgtgagtggcctgaggtggcgtctttactggggaagatcatgaagtctcctgaagattttaaaacctttcaggaagaggcccatgatcttagtgatgagctacatgagcctgtggtctcttcccatttcttt

SEQ ID NO: 301 - DNA, 2300 bp, Homo sapien
tcagtaatccaagcgagttacaggtcgtagcagattcactctcccttgatcccggccacctgcagacaccatgcatgtgttacctacagtgcttcaaggtgtggtattctgatagctttggacagttattccccacctgcccaccaccaataaaacttctcaacaagcttacagcaagtgagaaataataactaaatgcaatgccgttgtgctgactacaagcaaatgtgaaccccacagcctgctaacaaagcctaaggagctatggaaacagggagggcatttggcagcctgtgaattttgaaaaagatttcaggacatctctagtaatcattaacattttagctacaatgtgaggtcgaagtgctggctcagaatgtggcgctgcagcctccaagaatcttgcaacggcagcagtccgggatcatgttcggcctctgatttcctgctagatttactggttctggccacagcagagtatctttatctctctaaccatttttatgtaaaataagattgtttggagccctttcagggccacgccttagaattgctctgagagtaccaagtgcctgatttcttagagtccttaccagtaggagatgttggctgttgatttagctgctgagtcatggggctggggatagtggttttcagtagccaaaaacgttagtgtgttgctggtgaaatcacaaactctgcttgcaaaattttactctttttttttttctttttgctgaatttaatcctaaagttcttgcttcttactcactggaaagcaaatactatggtctcaataggccttaatttttaaccaacgccatggaaacctgtctgtagctaagaggataaaaatgctaggggttaaggaagaaaagcaggttttgcagctgaccagaagaaataattaaattcaagtacatatttgaacacctctttacaaggaaatgaggaaaatcagatgttttagttctcttacagaccagcagtaatgttgaaaaatataaaagtagccgtaacagaaaacgaagtgatcatctcagccctcccttggagtggggggatatattgcggagctgagttttaatggctatcagttcttgatcagaaaagtgaaatcactccaactccttccgtattccacggaatatgacccgtcttgaactttgagaaattccccgggtctgtgtgaaattccagttccaaataattcacatgaatggttcacaagaatccaggtaggtttgatctagttccctagatgggaatgagagggatgtaaaatttgagaggcaacatgacatggactagagagagaatgaattaacactggggaagcacgtgggggcgcgccggacacctagaaggcactcaaaaagtatgaggtagaattaaaggaaagtgaaccttcctttggctgtctcggcctgattctcaccgcagcaaggagaaagggacagggtcaccttggcgggtgccaggcggagcccggccagacgggcgcggctggagggcagcgcgcaggcgcaggcggcgcacgtggccccggacacgcagcgctgcggcggggccagcgccccaaccccggagtggggccgaggcgcgcagcctctcaacgactcgacgccaacggggtctctcggatcgcggcgcgaggcaggaggggcggggcaggagggccgcggcaggcccgggccgccaaagttgtcagcaaggtcgagggccggacgtggggccccagagcgacgctgagtgcgtgcgggactcggagtacgtgacggagccccgagctctcatgcccgccacgccgccccgggccatcccccggagccccggctccgcacaccccagttcggctcaccggtcctatctggggccagagtttcgcccgcaccactacagggccgctggggagtcggggccccccagatctgcccgcctcaagtccgcgggacgtcacccccctttccacgctactgcagccgtcgcagtcccacccctttccgggaggtgagggaatgagtgacggctctcccgacgaatggcgaggcggagctgagggggcgtgccccggaggcgggaagtgggtggggctcgccttagctaggcaggaagtcggcgcgggcggcgcggacagtatctgtgggtacccggagcacggagatctcgccggctttacgttcacctcggtgtctgcagcaccctccgcttcctctcctaggcgacgagacccagtggctaggtaatgattggggaagggctgagcaacgggcaggcggcgcagggcttttctgggcttg

SEQ ID NO: 302 - DNA, 2300 bp, Homo sapien
cgtgacagcctgacattttagtctctgcctgcctgcagctccctgattctttctgggtctcccaattcagattcccaagaaaaaattcagatgactgagtttgtgttttcctgccagtttgatgtcaggggtcctgcctgggcttgtaaagggtcttggtctcctcagcagaggtggggccttgtgatttacaaggtggccctttccgcagggctgggagtcagcaggtgggcgtcactggtttagcaaggacagaagagtaggtttctcatttttgcaaagaaatggtccataagctggagattgaagcatttttcctccagttccctcactaaccagctgggtggcaatgataaatcacttccttttcctataaaatgaggggtctgaatagatgctaatgccatttgctacacaccaggcactgctccaactactgcaggcacatttattgccgaatccccacaaaggaggtgctatcactaactccttttaaagaaaggaggcggccaggtgcggcggctcacgcctgtaatcccagcactttgggagcacgaggcgggagaatcgcttgagtccaggagtttgaggccagcctaagcaacatggtgaaaacctgtatctacaaaaagtacaaaaattagcagggcgtagtggcatgcgactgtggtcccagctacttgggaagctgaggcaggaggattgcttgagtccaagagaagtgagctgaaatcgtatcattgcactccagcctggtgacagagagagaccctgtctcaaaaaagaaagaaagagagaaagagagaaagaaaagaaagagagaaaggaagaaagaaagagaaaaaagaaaaggaaggaaagctgaggcacagagcgctgagttgcccatggtcacacagttagcaggtggcacagatcctgtctagtttcagaatccttgtccttgaacatgctttgctctctctctgagattctttcagctcttgagctttagaaatggaagtttccagcaagttctttgcagcagctgatgttccctattaaatgacagtggggagtcttagaagtattcgggaggcctacgttcaccgctaacatccttgttgtgaaggcctgctgacgtttgccattccaggaccaagtggacaatgagttaagctaggccaggagggggttcagctccccataacaaggcaggggtggccctttgtgtccggcagcatggtagcccccccgcaggagctccggctaccctttgtgtttgaccttgtggaagggcatgggaaatgctggcctgtcagcaggcataaactcaaaagtttctccttcagctaatttcagggactgtctagccaagtgaatacacaggattaggtaatccatggatcctgcgagggcaattggctgattggcttaggtgtgcccaagagccctgcaggtgtcagaacaaatccatgtagaaatgcagacgcccacaccagcttgaatggcataaaggcacacattggaatgtggctcatgagctgggacccaggatcaaccactggtttaaggagaggaccgtgaaatgtccaaacatggaggccaggccacctccctggatgcctggctgagggcagccacatgtctgcagcggtggcttgtgtccatgactgagatgggcagggtttgcaggcagtggtgatcccatcagcagtccccagatctctaatgtcaggagaaagagcatgggaagtccgacgtccaggaaagtctttcatcctgcttctccctgccttgggccttttcccatttccgcggtcacctgtccacaatggctgcactgtgtggctcttcaggtgttcctaagacactgaacaaccaaacccatggactgaccggatatgaaattgacgtgggaggagatcaggcaggtgctggggctgcctggcgcaatgcacggagccagaagtgctgttatggggagggtgttattgttttagtgggtgcagcaaagggtggtttagccagctgggcagatcaattgtaaattgttatttacagtttctgagcctttaaaagaagagcttcgccggaatcagtcttcattacagatgtgcagcaccatgagggccctggtgcttctgctgtccctgttcctgctgggtggccaggcccagcatgtgtctgactggacctactcaggtgagcccctagcttctgcatgctcccccagttaccctcacacccttacaacaggacaagtgcccttcttcttcttcttttttttttttttagacaaagtcttgctctgttgccca

SEQ ID NO: 303 - DNA, 2300 bp, Homo sapien
ggaggccggaagcgacagtcagccatgaccacgccactgcactccagcctgggcaacacagcaacactttgtctcaaaaaaaaaaaaaaagagagagagagagaaaatacctacaacatagtcaggagcaggagcaggataaacataaataaggacctttcattctctcagtcttgtcatttacccacctgttaccacccatgggcaaacacattttcccccaggtatcctttttttttttttttttttttttgaaacaggttctcgctctatcacccaggctggagtgcagtggtgtgatcatgcctcactgcagcctcagcctcctgttttccagtgatcctcctacctcagcctcccaagtagctgggaccacgggggcatgccaccatgcccagctgatttttgtatttttggtagagatgaggtttcaccatgttgccctggctggtcttgaactcctgagctcaagcaatcctccacccactcagcctctcattgtgctgtgcttataggcatgaaccaccgcaccctggccttccccaggtatactatgtgtattctgctttgatcacttctcttaaaggtcatgttaattaaaaaacatgttaatgtttccatgttcccacatttcataattatcctttgaaacagaagtctggcattccaatcaattagttactcctaatttattcaatcattctctactttaaaaaaaaaatgctagtagaaatgattctgaaataagcacctttgtccaatattttattgacttatttaacactatttagtgtaattagaaataataactgtgtttttctgaaagtgtttaatttgttctttcccccaaatggacaattagtccaaatgcacaagaggaggcatatatgaagaacctaggaacacacagaaaggaacagcaaacactgggatctacttccggctggagggtgggaggagggagaggagcagcaaacaaacactgggaagtgggcttaatacctgggtgatgaaataatctgtacaacaaacccccgtggcacgagtttacctatgtaacaaaccttcacatataccctgaacctaaaataaaagttaaaaaaaaaaaaaaagccaggtgcggtggctcatgcctgtaagcccagcactttgggaggccaaggcaggcggatcactagaggtcaggagttctagaccagcctggccaacatggtgaaacctcatctctactaaaaacacacaaaaaaaggctgggtacggtggctcacgcctgtaatcccagcactttgggaggccgaggcgggcagatcatgaagtcaggagatccaggccatcctggctaacacggtgaaaccccgtctctactaaaaatacaaaaaaaaaattagccaggcatggtggcaggcacctgtggtcccagctactcaggaggctgagacaggagaatggcgtgaacccgggaggcagagcttgcagtgagctgagattgcgccaccgcactccagcctgggcgacaaagcgagactccacctcaaaaaaaaaaaaaaaaaaaaaaaaaagctgggtgtggcggcacgtgcctataatcccggctacttgggaagctaaggcaggagaatagcttgagcccaggaagccgaggttgcagtgagctgagattgcgccactgcactccagcctgggcaacaaaggaagaccctgtctcaaaaaaaaaagaggcatacatggaaaaatgacacagaaaaagcatcctagatccaggtcacagcctcactgggtctctgaaagtcctcatttctgcggaccaatgtcaggcaatgttttttctctctccttggtgcaactagggagctttcggcttggggcttggtgggtgcaaagacgaaattcgtgctgtgtatgatttgtgcactggcaacgtgtgtcttatcaacatttccaaggagaatttgctcctggggaaagtcagcagggtccagagagcaaaaggatcataaagccaggtaggcccaggggagaaacagccggtctttaggtggctggcgcagagcaggtgtcacttgggaggtagagcacacctgttctcccacctgaacaaggatggagaacaaagaggcgggaacccctccacccattccatccagggagggggtaagtgccaagactaggaacctgtcactgtccctctcccaccagctgtgcagacctgtggagggaggtgaaggccgtggaatgcttttagcaaggagcgggtagcgtgcttcctttttcttcaggataaccaggcctgggagagccat

SEQ ID NO: 304 - DNA, 2300 bp, Homo sapien
tggctgtgcttgcgacgccctgtcactggcaggaaccgggtactgcggcccgcagctcccgggatgatcccctctgggcctgagggcctggctcactgtccccgcttccccgggctgggccgtcaaggcggggactgggagtgtccgcgtcccccccagcgacccccggttttagttaccccctcgcccaaaggcagggagaagtggaagatctgggcctagatagaagcaggtgtcatgcacttgacatgactgatgactacaaactttggacgattatttttggggggaggatgggggacggagatgagtctcgctctgtcgcccaggctggagtgcagtggtgtgatctaggtgcgctgcaacctccgcctcccgggttccagctattctcctgcctcagcctcccaagtagctgggattacaggcgtctgccaccatgcctggctaatttttgtattttcggtaaagacagggtttcaccatgttggtcagactggtctcgaactcctgacctcaggtgatccacccaccttggcttccccaggtgctgggattacaggcgtgagccaccgcgcccggccggattcttctttgtgttggattgcacacctgtacccgtctcctcactcccccatcgttgatttcctctccccaccctacccctgcaattaaagtgcattttctttggaaactttttctagatctttgaaataattggaaacctctggtcttgctatgcgttagtcacaagtcagtgtgctaggacagtgatacgcagaagaaaaagacaggcagtagctggtgaaagggaatgctgagttctcccttgtgaatagggacccccccgaccccccaacacacacacacacacagacggccacgctgctaggcttctcacagtctcccaccctgagcaaccctggggatttgctgctaatgcaaggaacagtgcctaacacaggctcccagtctctgcttgtttaaagatgcatgagattcagaatcaatcactaaagtaactggatttacgccacagcaaatagaactgggagtatgttctgtaaagatgaaaacctgtgggacttgtgagactttggattttggccacttgcgctggtgtgccctgtggcagctgaatgagtgccaaacatggggggctgacagtggcctggccttgagatggccggacccggaccagcaggtgtgactcattttccctgccctgcctggaaaggggttcgaggtatttaccaccttcccagtagtgatgaatacacagaaagtaacatccctaggtcattctgagctccttaaaatggaaaataagaggccggacacgatggctcacgcctgtaatcccagcactttgggaggccaaggagggtggatcacttgaggtcaggagttcgagaccagcctggccaacatggcaaaaccccgtgtctactaaaaatataaaaattagccgagcgtggtagtgcacgcctgtaatcccagctactcaggaggtggaagcaggagaatcgcttgaactcgggaggcggaggttgtagtgagctgagatcatgccactgcactccagcctgggacaagagcgaaactccgtctcaaaaaaaaaaaaaaaaaaaaaaaaaaacagaaaatgagaaactttccccaaacagtattacacggtgacttgggcaaaactgactctccaccaagagacacttgactgtagttttcctggcagggagagcatctttgaggtctctagtggcccaatctgttgccctcagattacctggtgtcatgtagggtggaggacagctgttgtttgccatgcgttcctgacagaaataacccttccagtcattcaccatgagcctgactggtagagactttagcaatggggaaataccgtagactgttccatcaggacaatgctgggcctgcagtccccagggggcacccacttacttagccaaaccccagacgtttcatttaaaagcagaagtgaaaggaagaccaggttcctgaaagggttattctgacttaatctggctataaaaatgctattggctgttatttggcatggccaaagtgcacccagaatgtcttctctctccattcagtgcacgcgttactttggctaaaaggaggtgagcggcactctgcccttccagagcaagcatggagcaacaggatcagagcatgaaggaaggggtgagtgtgttgctcagggaaaggggccaagagcaggcttggctgccagggcctgtgcagccttcctggagagtcgctggggggctcctggt

SEQ ID NO: 305 - DNA, 2300 bp, Homo sapien
ggaggtcggtgtggcttcagggttggccccactgtgaccataagggttggccccgctgcgaccgtaaggagcatgtggagtggggagcgctgaagagctccgagtggaggactcactggagcagactcgggttttcaagcagccctgctgcttctgtgttgagaatggactgtaggggggagcaggagggggtggcagaggcggaggagggagcccatccagagacgtggtgacgtggcctggacacgggggcagtggcagaaggtggcagaagtacccagagtctggatctgttttgaagttagaggtcggcacggtggcagctcatgcctgtaatcccagcactttgagaggccgaggcaggaggattgcttgagttcaagagtttgagatcagcctgggcaacatagggagaccctgcatctattttaaacaaaaaaagagggctgcaggacttgctggggatcggatgtgggctatgggacaaagaaaggggtcaaaacagagccccaaggctttggcctgggcaacgagaaagctgttgtttccatgagctgagactgggaagggagcattggcctcaggggtcaagatccatcttctgtcttggatgtgagctgtttcagatgactttgagacctccatgtggaggtggggactgggcagaggatctagcagtcagggttcaggagaaggatctgggctccaccacacatctcccctacctccctgagctagttcaagtccctgggaagacctgggcagcctgggtggacgtggcgggagggtgcctatccactcaagtctgccctcgctgtccccacacagcacacggcactctctgagtaccggcccatcctctcccaggagcaccgcctgctgcgccactcctccatggcggacaagaagctggtgctcatcccgctcatcttcatcggcctcagggtctggagcaccgtgcggttcgtgctgaccctctgtggctccccggccgtgcagacgccggtgctggtggttctgcatgtaggtctgccctccctggcccttgtcgtccctgcccccagaggaggcacagcctgattccttcccgcagcacagtggctgcaccccagtgtcggccaaggcacagctgcagggaggagctcggccccactgtgctgtgccttcctctctgcctgagacaggaccttgaagagagaaggcagagtgggatcagtgtggtccggggtggtgaggtgctcaccagtgacctaggagtagccctaggagagttgactgatcttgggtccttcccagccaagaagacctggagccctgctgaaggcccattgccaaggtcatcccagatcagccatggcggggaggatggggggaggttctggggtacacagcacttcccagctaccccatgtgtgtgcatgtatgcatgtgtgtatgcatgtgtgtgtgtgtgtgtgtgtgtgtgtgtgtgtgtttctcagccatttctcttttttgggggggggtgcggggacagagtctggctttgtcacccaggttggagtgcagtggtgggatctcggctcactgcaacttccgcctcctgggttcaagcgattctcctgcctcagcctccgtgtcgctgggactacaggcgcccaccaccatgcccagctaatttttgtattttcagtagagacagggtttcaccttgttggccaggctgatcttcaactcctgacctcaagtgatccgcccacctcagcctcccaaagggctgggattacaggtgtgagccaccgcacccagcctagccgtttctcttaattgcaacagcgcgtgtgtttctgagaccaactccagccccatgctcacagctccttttctcccgacagggtatcgggaacacgtttcagggaggtgccaactgcatcatgttcgtcctctgcacccgcgccgtccgaactcggctcttctctctctgttgctgctgctgctcttctcagcctcccaccaagagcccggctggcactcccaaggctcccgcgccttccaagccaggagaatctcaggaatcccaagggaccccaggggaacttccaagcacctgagcttttgtcctttctagttctgtgcataggtgctgccttcctgggggtaggcacttctgtgagtccctgctgcaggggcagaagtgcatgtctgctgcaccagaagcccccgctattgatgctctcggctccattgggagagcagctgccaactcagcttcttctacctcctagatcctcaggcagcaagttccaccggtaccagcgtcc

SEQ ID NO: 306 - DNA, 2300 bp, Homo sapien
caggttgtggtggtgcacacctgtaatcccagctactcaggaggctgagacaggaaaatcgcttgaacccgggaggcagaggttgcagtgagccaagatcacgccactgcactccaacctgggcaacaagagcgagactcagtctcaaaaaaaaaaaaaaaaaaaaattagtggggcatggtgacatgcacctgaagtcctaactactggggaggccaaggtgggagaattcttaagcctaggaatttgagactgcagtgagctgtggttgtacctgcactccagcctcggcgacaagaccttgtctcaaaaaaaagttttggaagaatgtagagaaattgcgaccttcattgctagtgcaaatgtaaaatgatatgtacagtcactttggaaaacaccttggcagttcctcacaaggtgaaatataaagttgcgtatggcccagcaactccattcctaggtatacacataggagaattgaaaacatacacccacaaaaaaacttgtatgcaaattttcatagtggtattattcttaatagttaaaaagtgttaacaacccaaatgtccatcggctgatgaataatagctaagtaaaatgtggtatatcctgccgagcgcggtagctcatgcctgtaatcctagcactttgggaggccaaggcaggcagattgcctgagctcaggagttcaagaccagcctgggcaacacggtgaaaccccacctctactaaaatagaaaagaaattagccgggcgtggcggcgtgtgcctgtagtcccagctactcgggaggctgaggcaggagaactgcttgaagccgggaggcagaggttgcagtgagccgagatcatgccacggctctccagcctgggcgacagagggagactccgtctctagaaaaaaaaaaaaaaggtggtatatccatataatggaatattacggggcagtaaaaggaatgaagcactgcatatgctacgatgaaccttggaaacgtgctaagttaaaaaagtcagacataaaggccacagagcatatgagtctatttacaggaaatgtgcagaataagcaaatccacggtagaagagtggttgccagggctgtcggggagaactgagggctaacagctgagggataaggatttctttttgggagtaatgacaatgttgtagaattacataataatgatggttgcacaaacttgtgaacatactactgaattgttcggttaagagggccaattttatggtatgtgaattacatcttaattacaaagtttgaaatttttaaagaaaaagccatgccctgcctagcatttcattttttaaaaatcacacctagttagctatggtttttaaaaaatagcatgcttattttaagaaaaggtggaaacgccggcttccccaagtcaccaccaacttgtgaacacgtcgggatcacggctgaaggaatgaggatcatacccgagagctgtttctgttgctagtggaaagaatgcctctgatcctcacgcccttccactcacaacacacacagaagctggctgaaaagagggaaagtaatattagccctaaaaatgccagcccttcctctcacaggactggatgtcccagacacctggcaagagcaggggtgggcctggaggagcgtggagggacaggtgctgggacctgggggtgccctgaggtagggcttagggacctaggggcttaggggcgtggtgtgagggcgtgggcggggctcaggagcctcgggcaccgggtggagcttggaagcctcaggggcgtggcgggggcggggctcagggcccggggcaacgggacgaggaagggcacctgagccagggtcagggcccggaacacaggggtgtggcggggtgcgtgggcggagcggggcgcgtgggttaggctctaggcccaggtctctgggccctgtggacaggggatcggggcgcgtgggcggagctctaagtcccagtctcaacgcgggggcacacgggcggggggggggcgtgtgggcgggaagggcatgtgggccgggggacgtgtgtccggggctcggattgtgggcggggctcagggcctgggacggcgggacggggctgggagtgtaggcggggcttaaaggccggggtaccggggtggggcgcggcgcgtgggcggggctcagggcccgggatataggggcggggcgcagggcgtggacggggttcagggcccggggcccagatgggcgggggagcggccggacgcgggcggggcgggcgcctggacgcgagcctagggcgcctcggtgcccagacg

SEQ ID NO: 307 - DNA, 2300 bp, Homo sapien
agatcatcctgcagtaagatgggccctaaatccagtgacaagtgtctttatgggaagaagacacacagaggggaagacaaacacagggactggagtgatgtgtgtacaagccaaggaacaccaaggattgctggccactcccagaagctggagagaggcctgggacagattctccctctgatcctccagaaggaaccaaccctgcgcataccttgagtttggacttttggcctccagaactgtaagagaatacatttctgttgttttaagccaccaagcttgtggtcagttgttacggcagccagggaaatgaatgcagatgacattctgggtttcaaaattggaggagactaaagaaacgcttgctttggacttcaaccctgtgcctgttctctgcctctggctgcaagaagacaacttggtatttttcccggtttcagagttgaaattctttggctttggtctgcatatcatctatcacatcatctatggagaggaaactgagtcacagagcagagaagtgattgtcaaggtcacgtgaggaagcggtagaggccgaccacttgcccaagagggtgcaatgacaggtacagtgagaaaatcataggacaaagaatctgaagacccaaattctaatccaggcgctgcatcccacaggctaggtgaccttgggtgactaaggcccagccgtttctcacctttccattcttccattcatgaaatggaaggactgggttacatgctctgtggggtgccttccccactatgacaccccatgagtctgtggtcttcccccacctcagcctgggtgcagccaggaggaggagaaggaagacagcctgatcgaggctggccctcgtctctgtccgccagcacagcgcaggctgcacagcctcacctgtgtgccaaagtcctcgagggagggcgggtgagggcagccgcaaaacactgtgcccacgttggttgtggtgcactgcagcagtgtggctgtgtcccaagcaggatgcgggcagcagagcctcccctctcactccgtttagaaacaagtcacacactcctggtcttacttcagtaatgaaatgtacatggaattgatgcaattggtctttctgaacagtttatttagaaggggagttttagtctccccgctcaaacacacacacacacacacacacacacacttcctcctttattttcctttcttgggctctgagtttgtgataaactcaaaacctggaaatacctacattcctgaccaccttctacctctcagtatatctattctgcctaaccccttgtgggttatattagaatgcgctatcttaaccatatctgcatttaaagtgcttctctctcctggaattttctcaattaaatccctacctcaatcttaaagactattaactttcacagaagcaggaacgggaattttaagaatcacagacgtgtcaggacaaaattgacacttagtggcaatcttgaacatttcatgtgcctgacaattttttaaatggggttttcttgaaggaaaacaaaaatagagatttcccaaacggttgagaatttgccagtggatggagaggaattttcctcttctcttcaccccgggtctacctctgcccttcttgataaagcaacggtgtcaacttgtctggtgcaaagcagactgtcggctcatcacctctgctccttcctgggcatcaggctgcaattctcaaacttttgaacaagtcccgccttctccagaattaaggattaaagactctgcagagtctcaatcttctgtttttgtttttgttttgttttgttttttcaagaaaagcatcttcaggtgaacaaatctgggaggtggggcaaagctttggacctagttgtgtgagagcgtgggggagggaggaggctccgcggagaggtgtctctataggagtgagcatcttgcagtgtcaggggtttaaattcaaccggcggggggcgggtgcatggtgggggagaccatccctgcctcctgcagcattgactcccggcaccatttgggtgcagggacccagctgacacttcttatttcgggtcctgcctctcccgaagcagtctgaacttgccagcatccaggcaggacggcagcagctgagcagaggagagaggtaactttcagggaggggtgtgttggtttctggatgctagatcagctcattgacacgctccttggatagccagcagaaagatcccctttcctttgggttttaaaaagctttctcccctaagaagccggagtcctctgcctgcactttgcagaaactctg

SEQ ID NO: 308 - DNA, 2300 bp, Homo sapien
aaaaatcctcatgattagattgggcgcatttatataatccaggataatctctttatatcagggtgcacacacttaatcacatcttgcaaagtctcttttgccacaaggtaacagacactagttcaggtatcggggcccgtttttttgttgttgttttgttttgtttttttgaaacagagtctcacttggtcacccaggctggagtgcagtggcacaattatgcatccgtgacctcgtgctcaaacagccctcctgccttagcctctccagtagccgagactacagacacacacctgatttgctttttgtagtgacaaagccttactctgttgcccaggctggtcttgagctcctgggctcaagcaatcctcctgtctcagcctcccaaagtgattacaggtgtgagtcactgcaccaagctgggctttttttttttttttttgtggtggagtctcttgctgtcacccaggctggagtgcactggtgcaatctcggctcactgcaacctccacctcctgggttcaaggtgttctcctacctcagcctcccaagtagctgggattacaggcacccgccaccatgcccgacaaatttttttgtatttttagtagagacggggtttcaccatgttggccaggctggttttaaactcttgacctcaagtgatccacccacctcagcttcccaaagtgctaggattacagacacgagccactgagcctggttccagcgggacatctttagtcattgttctgcctaccacaaattataaatttgcaaattctcaaaccctcttgatgatccaggatttttatcacaatttttatgtttttcttgagacagactctcgctctgtggcccaagctggagtgcagtggcacaatcctcactgcaatctctgcctcctgggttcaagtgattttcctgcctcagcctcccgagtatctgggattacaggcgcctgccaccacgcctggcccatttttgtattttttagtagagacggggtttcaccgtgttggccaggctggtctcgaactcctgacctcaggtgatctgcccgcctcggcctcccaaagtgctgggattataggcatgagccactgcgctgggcccacaatttttcatcatagctgtattgagagaaaactcacctactatgcaacctactcattgaaagtgtgcaattcagtggtttttagtatattcacggagttttgcaaccatcaccacaatcaagtttacaatatttttcaccccgacaggaaaccctgtacccattagcagtcactccccattttccccccacccactaggccctaggcaatcactaatctattttctgtttctatggatttgcctattgcagacatttcatctaaatgaatcatacaatatatggccgtttgtggctaaatatgttatatatagacacaggcatatatgtgtgtctatgtaatgttttcagggttcattcatgttgtatcgtgtatcactgcttcattcctttttttttttttcttttgagacagagtctcgctctgttgctcaggctggagtgcagtggcctgatcttagctcactgcaacctccgcctcccgggctgattctcagccctcagcctcctgagtagctgggattacaggcatacgccaccatgcccagttaatttttgtatttttagtagagacagggtcttgtcatgcttgccaggctggtcttgaactcctggtgtcaagtgatctgcttgcctcagcctcccaaagtgctgggattataggcgtgagccacttcacctggctgcttcgttccttttcattgctaaatcatatttaattttatggatatacaccacattttgttgatccattcattgatgaacatttaggttgtttctgctttttactgttatgaataatgtagttatgaatatgtgtgtatatgtttttctatagatgtatgttttcatttttcttgggtgtatacccatgagtggaagaactgggttagctggtaattctttttttttgagacagtcttgctctgtcacccaggctggagtgcaatggcaagatctcggctcactgcaacctctgcctcctgtgttcaagcaattctcctgcctcagcctcccaagtcgctgggattacaggcatctgccactatccctagctaattttttttttttttttttttagtagaagcaaggtttcaccatgttggccagactggtctcaaactcctgacctcaggttatccacctgcctcagccccccaaagtactgggattacaggtgtga

SEQ ID NO: 309 - DNA, 2300 bp, Homo sapien
agacatggtttcaccatattggtcaggctggtctcgaactcccgacctcaggtgatccacccgcctcggcctctcaaagtgctgggattacaggcgtgagccaccgtgcctggctttttttttttttttttttgacacagtttcaccctgttgccctggctggagtgcaatggcgcgatcttggctcactgcaacctctgcatcctggattcaagcgattctcgtgcctcagccatctgagtagctaggactacaggcacgccaccacgcttggcttttttttttttttttgtattattagtagagatgggatttcatcatgttggccaggctggtctcgaactactgacctcaggggatccacctgcctcggcctcccaaagtgctgtgattacaggcatgagccactacgcctgacctggggctatttataagaagccctcaaggtagcagatcaccctctgatggccacatggagatctgggaaacgaacccccggtcatgcctctggacacctgcccacttctatctgtgccttcctgggccctggttttcagagctatgtgggtgcctgacacactcagggccacagaacatgggaagggctctaggccaagagtcccggcatcattcgagtctgctctggcccgctcctgccctaagccctcctgctcacttccagctgtggaggtagcccagagagtgcctggctccctggctcccccctctgccaggcccactcagtgtgacctaaatccttgccgaggcttggcagccctctgcgggcgcccggatggcctctggccttggtgacggtgaggcccagctcccctcagttcccagccttcccggaaccccttgcctaacatcctgtgtggtaatcatgcctgttggccccattcagtcctgccggccactgccaagttgccactgctagttccagacgctcccacctctaatggaaccatcgggaaataaaaagctgcagcacagtttctctctcaggtcagaatctcctcccagcactttgggaggccaacgtgggagaatcacttgggcccaggagttcgagaccagcctgggcaacaaagtgagaccccgtctctacaaaaagttgaaaaattagtcaggagtggtggcgaacatctgtgatcccagttacttgggaggctgaggcgggaggatcacttgagcctgggaggcggaggctgcagtgagctgtgatagcgccactgcactccagcatgggtgacagagcgagaccctgtctcaaaaaaaaaaaaaaaaaaaaaaaagaaaaaaagaaaagaaaagaaagaaaaaagaaaaagtggggagcaggttggggagcatggtgagggccacctactgcctgataatggtgggggacaggaaggggactgagtgctctgagaggcagctgatcccgttttctcacttaaatacctctcaccctacagagaagccctgattccatttgctgtctttcttagcaatgtcttagcaaaagtcttctatttgccacacgggtccaagcttccgcttactaagcacccaagtgccagacaaccccggaggcaggtactcccattgtccccactgtacagatgaagaaactgaactcagggtcacacaagtgataaggggtggcagagatctgaagctgtgcgcggaggcgtggccagcgtgtgcgctccgacttctaaatccctactctggatattgaagacgggaaagaccgagccgctcattctacagatggggaaaagcgaggcctgaggagtcccagagcgggtgccagatcgtagggagcagccagcaccccgggtcccctccacgacacaaccacgtccctcggccacttctgggtcccgcgcgcgtctcggacgcggcaggacagctctaggacgcacggccaccagggggccgaagggaagggcgggggcggaggctcggagctgacccaccgcctcgccccggaagctccgaggccccgccccggcggccgccagcggagggcgtggcctcgccggcgcccccgccccgcccccgcccccgccgcgcgcgcccccgccgcgcgcgcccccggcccgggccccagtcttgctgagcgcaaggcggtggaggcctgaggcctgaggcctggggcggggtggcggccgggctggccttggcctcgcgccttcccctgcggccgccgcgggctccgcgggcggtatcggagtgtcgtgcggcgcgtggccgcgtgacacgcgcacttgtcggagtgacgggccctgcggaagaggaggtgcggccca

SEQ ID NO: 310 - DNA, 2300 bp, Homo sapien
tgctgtgtcacagtgcttgaagtcaccattagaggtatattcctttgtgccgtatttcaaatgcagaaatgacagtggtcctgtgcaaatgggatttatttgttcatttagcagatatttatagagcgccttctgtatgccaggccttgttttggatactggaggtactgcggagaacaaaacaaacaaaagtccctgtcctcattggcacgcacactcttgggaaaaggaatggcagacaataggcaaaatgaatgtaattatcatacagtatattagaaagcgatgtactgtggggagaaataaagcaggagaggaggatgggggtgggcggtttacaattttagagtggtctgagtaagcctcactgagaagatgacattttagcaaagaaaaattagtgagggagtaaaccacgtggacctggtgggggacatgggggagttggccaggcggagagaacaagtgcaaaggccctgaggcaggaggctgggcggccagagcctagacaggcaggatggtaagagaagagatcaaagaggtaatgggtgggaggccagaatgtgtagactctgcagacatctgcacagaggaatggcatgatccagctggagctataaaaaggtcactctgactgccgtgttgaggctcagccatagagggtccaggtagacagaggaggccaattaggaagttcctgtagtaatccagacggagatgacggtggctggcactggagtggagtggtggaaggtggtgagaagcagttgtattctagataaattttgaagatagaaactacaggatttgctgacagatacgatgacctcaaggtttctgggtctgaacacctggaaagatagagttgtcatttactgataatggggaaagctacattggaagcagattgggagagaaatcagttcagttttgtacatattaagtctggcaaacatcccactcatgctctcagaatagcaattgactgcatgagtctggagtttaggggaagttcgggctgtaaataaagacttggacggataggcagttgtgtgctggtaatgtttaccaactgactctgtgaggggtggggttggtagtggggaacctgatttatagcctttgcctatatctgtggtgtaaatattctgacgttggccaacttcaaatacactataatagaatatcttcacctcatagatgcagtggatataaataatatcaagagcatagatattagtgaaatgtagtcagatgattaggaagtaatgagttttgagtatttattacctttctttttaatttaatggtttttttttttgagacagagtctcactctgtcacccaggctggagtgcagtggtgcaatctctgctcactgcagcctccgcctcctgggttcaagcaattattctgcctcagcctcccaagtagctgggattacaggcacccgccaccacacccagctaacttttgtatttttagtagaaacgggtttttgccatgttgcccaggctggtctcaatctcctgggctcaagtagtcctcccgtctcagtctcccaaagtgctgggattacaggacaggtgcctaaagatgggatgaggattctctgagatgagagaggaacaaggaccccagagcccgatctggaagcttttgtccccattctggcccttagggcagtgaatgcagatcagaggtcattgatagcaggcttgatttttatctgcattgatgggttcagcataaatggaccagaacaggaagattgcaaaaaacagacaaaaaacaacaaaaacaaaaaccttgggttggctattgtaaaaagactaggcacatcaccttgtgctttagtttcaaatgatctttagtttgaacttttgttttactcccacatgttctttttaaaaaattccaaactcatgggtcatgatttgaagaaaatttcccttcctcctgcctggcgcacagaaggtaacgtcaaaagctgggaaagggaacagggcagcagcagacattgacctttacctcccgctcctctctcccaccccttgtctgctgggcatagaggattagaactgcttcctcctgtggtttaccagaaaacgctctgcggctagagcttcagcacaggctgggtctgctgtgccgggtctgtatggggacagctgcacgcctcttccgcttgtgtgagaacaaaggccggaacctggattctgatccaaaccccctggcccccaccttctgggatgttagcagagccttttaactggtaagtctctcccaggatgactcgt

SEQ ID NO: 311 - DNA, 2300 bp, Homo sapien
ccggcaaggagaggagagggctggccggagagtcctggtctgtgccagagagtcaccctctgctgttccctcaccccagccgtcctagtgcacattgacaaccttcgctgggagggcgtgcctttcatcctgatgtctggcaaagccttggacgagagagtgggctacgctcggatcttgttcaagaaccaggcctgctgtgtgcagagcgaaaagcactgggccgcggcgcagagccagtgcctgccccggcagctcgtcttccacatcggccatggcgacctgggcagccctgccgtgctggtcagcaggaacctgttcaggccctccctgccctccagctggaaggaaatggagggaccacctgggctccgccttttcggcagccctctgtccgattactacgcctacagccctgtgcgggagcgggacgcccactccgtcctcttatcccatatcttccatggccggaagaatttcttcatcaccacagagaacttgctggcctcctggaacttctggacccctctgctggagagcctggcccataaggccccacgcctctaccctggaggagctgagaatggccgtctgttggactttgagttcagtagcggccggttgttcttttcccagcagcagccggagcagctggtgccagggccagggccggccccaatgcccagtgacttccaggtcctcagggccaagtaccgagagagcccgctggtctccgcctggtccgaggagctgatctctaagctggctaatgacatcgaggccaccgctgtgcgagccgtgcggcgctttggccagttccacctggcactgtcggggggctcgagccccgtggccctgttccagcagctggccacggcgcactatggcttcccctgggcccacacgcacctgtggctggttgacgagcgctgcgtcccactctcagacccggagtccaacttccagggcctgcaggcccacctgctgcagcacgtccggatcccctactacaacatccaccccatgcctgtgcacctgcagcagcggctctgcgccgaggaggaccagggcgcccagatctatgccagggagatctcagccctggtggccaacagcagcttcgacctggtgctgctgggcatgggtgccgacgggcacacagcctccctcttcccacagtcacccactggcctggatggcgagcagctggtcgtgctgaccacgagcccctcccagccacaccgccgcatgagccttagcctgcctctcatcaaccgcgccaagaaggtggcagtcctggtcatgggcaggatgaagcgtgagatcaccacgctggtgagccgggtgggccatgagcccaagaagtggcccatctcgggtgtcctgccgcactccggccagctggtgtggtacatggactacgacgccttcctgggatgagggcgcctgtgccccttgcccgcttcgctcctgtgctttccttcgcccgtgtcttccctcccttctcggccccgccacctgcccagcgtgccctggctctccagaaccttctatcccacagtcaggccccagagagggcaggacaagccttgtcccgatgcctttgaccggcagctctgtgtattggtggatagatgcagaaacaaggaagaaatggagtctgctcctgagaagcttcaaattcaggccaggagagaagtcttaagaaaagacctccagcagttacacattcatatcaaccagcacaacacgggatggcgcccaaactccggcgttcacaagaggagacgtgacgtggtgggctgaggttaatcagggaaggtttcctgggggaggtgatccttgaactggctcccggggaacattcagagcatgattggtagacagaagggtgcagaggcgcccaggggagtacattgccccgtgcaaagcaggggcattggggactgtcttgagaccctgagggggtcaagcccctccttccccagctgcccctccttctagaacctctgcacatctagcctctggccctcctcttcactgcctccacctgctcccgcttgccatccctgtctcctccatcctggctgtgcagtaggaattccaggctcctccctgtgtctttgctgttcttcagactccatttatagagaatgagggctgataacaggaatacagtggcaaagactagactgtggaaagggttccagaaatcttttttcttttttaattaaaaaaaatatttgcagagatgagctcttgctatgttgcccaggctggtctcaaactcctgggctcaa

SEQ ID NO: 312 - DNA, 2300 bp, Homo sapien
cagggccggccccaatgcccagtgacttccaggtcctcagggccaagtaccgagagagcccgctggtctccgcctggtccgaggagctgatctctaagctggctaatgacatcgaggccaccgctgtgcgagccgtgcggcgctttggccagttccacctggcactgtcggggggctcgagccccgtggccctgttccagcagctggccacggcgcactatggcttcccctgggcccacacgcacctgtggctggttgacgagcgctgcgtcccactctcagacccggagtccaacttccagggcctgcaggcccacctgctgcagcacgtccggatcccctactacaacatccaccccatgcctgtgcacctgcagcagcggctctgcgccgaggaggaccagggcgcccagatctatgccagggagatctcagccctggtggccaacagcagcttcgacctggtgctgctgggcatgggtgccgacgggcacacagcctccctcttcccacagtcacccactggcctggatggcgagcagctggtcgtgctgaccacgagcccctcccagccacaccgccgcatgagccttagcctgcctctcatcaaccgcgccaagaaggtggcagtcctggtcatgggcaggatgaagcgtgagatcaccacgctggtgagccgggtgggccatgagcccaagaagtggcccatctcgggtgtcctgccgcactccggccagctggtgtggtacatggactacgacgccttcctgggatgagggcgcctgtgccccttgcccgcttcgctcctgtgctttccttcgcccgtgtcttccctcccttctcggccccgccacctgcccagcgtgccctggctctccagaaccttctatcccacagtcaggccccagagagggcaggacaagccttgtcccgatgcctttgaccggcagctctgtgtattggtggatagatgcagaaacaaggaagaaatggagtctgctcctgagaagcttcaaattcaggccaggagagaagtcttaagaaaagacctccagcagttacacattcatatcaaccagcacaacacgggatggcgcccaaactccggcgttcacaagaggagacgtgacgtggtgggctgaggttaatcagggaaggtttcctgggggaggtgatccttgaactggctcccggggaacattcagagcatgattggtagacagaagggtgcagaggcgcccaggggagtacattgccccgtgcaaagcaggggcattggggactgtcttgagaccctgagggggtcaagcccctccttccccagctgcccctccttctagaacctctgcacatctagcctctggccctcctcttcactgcctccacctgctcccgcttgccatccctgtctcctccatcctggctgtgcagtaggaattccaggctcctccctgtgtctttgctgttcttcagactccatttatagagaatgagggctgataacaggaatacagtggcaaagactagactgtggaaagggttccagaaatcttttttcttttttaattaaaaaaaatatttgcagagatgagctcttgctatgttgcccaggctggtctcaaactcctgggctcaagcgatcctcccatctcagcctcccagagtgctgggattacaggtgtgagctactgcgcccagccccagaaatctcagtgctgtttggagctccatttctcatttgatgacttgctctgcgtggggaggtggggtctcattcccccaacttcctcagggaggacccctgccctccgctgctcctctgtcctgctagccttcctccaggaagcacactgggtgcagataatcaggacattccagagatccccaatttaagagggtcatttccatctcaggggactcccggatgggtgtttccgctctcaatagcccctcttgttttaccaggaaagatccagttaaatcacccactgaggtgacagctcattagcggggagagagatggagcatcgagtgacactgggccatccaggcggctctgctcccaccagacaggagctaggcctcactggcaggggggctgcccacagccttttcaggggctcgcttggcgggtgacggggccgcagccaggccttctctccctgccccttggtgaccccgtggcttcctgtctgctggcctctcctgctacttatcacttcaccacgaactctctgcctgagactggggaagtaagcgggtatcttctcagtgagcataggttggggactgtgatcttg

SEQ ID NO: 313 - DNA, 2300 bp, Homo sapien
ggagaaatgaacccatcagaggcagctgtgattttcagcaatgactgacgtgggctgcaccccatgggcctgtcccagaggctctcaccagtctcccaagtaaacaacagttctcaaactgcagagtggctggagggggtcatatgctcttttaaaattattattaccttttttttctttttttttgagatggagtctcgctctgttgcccaggctggagtgcagtggtgcgatgtcggctcactgcaacctctgcctcctgggttcaagagattctcctgcctcagcctcccgagtagctgggatcgcaggcacgtaccaccacacccagctaatttttgcattttcagtagagatggagtgttgccatgttggccaggctggtcctgaacttctttttttttttttttttttttttttgtgagacggagtctcgctctgtcacctgggctggagtgcagtggcgcaatctcggctcactgcaatctctgcctcccgggttcacaccattctcctgcctcagcctcccaagtagctgggacttacagatgcccgccaccacgcctggctaattttttatatttgtagtagtgacgggtttcatcgtgttagccaggatggtctccatctcctgacctcgtgatccgcccgcctcgacctcccaaagtgctgggattacaggtgtgagccaccaagcccagcctggtcctgaacttctgacctcaggtgatccacctgcctcagcctcccaaagcgctgggattacaggtgtgagccatcatgcccggccaattattattattattatttaatttttgtgcagagtctgtgtcttgctctgttgcccgggctgctcttgaactcctgggcttaagtgatctgcctgcctcagccacccaaagtgtggggattaagggcgtgagagccaccacctccagcctcaagtgatcttttaaatgggaagcacccctaagctgctggccatggctgcccacctgactagtctgggttcaacattcctaaaccgctggcacctggaaagtcagaatgcccactcaggcccgcccagcccagggcagttggttgagtctccgtaatcctattctgagttcaaacaaagctaaaccaaactgattttcagcaccgtaaaatgagagacatcaaactttgtaatctcacagttcaattgggttccaagctctggacagctggcctcgggccaggcactgtttcctcgcctttacagtgagtgtgtcattagtcccaccctcactgtactgggttatggtaaagacacagtaactacggaagccccgctatttgtttcggctcccccagaaaggctaactcctcaccgttttcaatggacactacacagcgaggggtggggaatgccaggagattttgctctcaaaacagcaaagtctttaaaatcttcccagtcccaagtgactgctctgttcggggaagggggaggaaaattccttgaacgagctagagccacaggacaagtccccagaggctgggacctgttcagggagcagccctgcggatgccaggtgcccgcgccctcagggtctcgaggtccgaggcccccgtccccgtgggcaccgaaacgcgagcggccgaaacagcgctgcaggaggctccctggacccccggcggctgcccactcgtccccgctgggcacttcagaggaggccggcgaggccttgctcggggttcctgggacaaccccactctccgcgaagatttctccttctcgtaagacccccgcccccactccagcctcccacggctgcaacccaggccctgcgccacgcgtttcccaaagacgcctccggagggacccgagcttcgggccggcaacaccagggcggcggctcgggagagggctgcggactaagggggcggagggggcggccgaaccagcgccgggctgacgcgccccgcgccccgcgccccgcgcccccggccttccctgcagtgctgagtggtccgtgcgcccgaggtcgggggcggggcggggcggggcggggcagggacggccccgcccaccggcgcttttctcttttttttcactttaaagccgtcggttgctttttctcctccgcacagaagtcgcgctcgggcagcctgcgcgctcgcagcaggaaccaggctccaggcgccggcgccggggccggggccgcggggaggaggcgacttcgctccctgcggcgggcgcggcccgggcgcccgagcctcctcggccttggagagcagcggcggcggcggcaccccgggcgcggtaggcggcg

SEQ ID NO: 314 - DNA, 2300 bp, Homo sapien
gcgtgactctctcccggcagccaaggctccaacagcctcccgcccaggcgcccccacaggctcctttagttccatttcttcaacgggagcctgccttgcccctggcctagttgatcctaggagcctgaccccaaaccaggctgccctccttggcctctctggtcccttccagaggccaaggaggttcttgatggcagaaagaaacttctctcttgaacgaggctcaaatcttctgctgccttatccttctccttgaatagaactcttcctggccagcactttgggaggccaagccgggtggatcacctgaggtcaggagttcaagaccagcctggccaacatggtgaaaccccgtctctactaaaaatacaaaaattagccaggcatggtggtgggtgcctgtaatcgtagctgaggcaggagaatcacctgaacccaggaggtggaggttgcagtgagccgagatcacgccactgcactccagcctgggcgacagagcaagactgcgtctcaaaaaaaaaaagaattcttcctgggctaccagtggagagggatcgggtagatgatgcagtgagatctctcccccaacccagagtccctgttctccctcctgaaggacccaggggatggtgaggccagagagggaacgaggcatcctagcatcggactttcctccccagatgtgctgttgagacccagagggcgaaaccctggcttctagttgaagggtgtgggcaggaaaaaggtggttggtcatctaagaaatcccgggggtcgggggatgagccccccttgctgtctgaatcgaggccttcccttgagaagaatgtagctggcggaggaggctcctggtgcctttcgtgccaagcgcacacagacccctgagttgagctgtccagctgcaccagaaggcccttttctgcagtgaattggtggtgcgtctgctggaggtagctgtgccagagacagggaggaggagctgggattggcatcctcagcagcctctgctgctacctggggctccacttcccctctgaaccgcaaggcaagggccatgcacctccctctgttttgaccaagcaaatgcccactgtcatggctgagtcctggttctgtggcaccatggccttccgccctgtggaaccctgatgaggtatttggtgggcatcagccatgtgtctgtacccaacacagatgagggtgatgcccatcccccaagcccacctctccacacagtcggccgcgtggacagacagaccctttcctttgtgacagctagccagggaacgggggatttcattctgcgccaaggctccagcctgcccgtgtcaggcatgacagagcccaggtgcaggctgctgggacatgctgatgtggtcgccttgccctccgggttaactttccccttcatcccacagtcctgctcaccggttgtttgtctttccgtccattaggcaatactgaacactgcgcagcttgcagaggtctcctggcagccctcattaggaattctgtctggccccgatcagaatactggagacgagaccacgagattgatgagtttgccttgggagtcggtaagaaggtgaagccaggggcgaacatgggtcagaaggtcactggagggatcaagactgtggacatgagggaccccacgtacaggcccctgaagcaggagctccagggtctggattactgcaagcccacccggctggatctgctactggacatgccccctgtgtcctatgatgtccagctgctgcattcatggaacaacaacgaccgatcgctcaatgtctttgtgaaggaggacgacaagctcatctttcaccggcatccggtggcccagagcacggacgctatcaggggcaaagtcgggtatacccgtgggctgcacgtgtggcagatcacgtgggccatgagacagcggggcacacacgccgtggtgggggtggcgacggcagacgcccccctgcactctgtcgggtacacaaccctcgtggggaataaccacgagtcctggggctgggacttggggcgcaaccggctctaccacgatggcaagaaccagccaagcaaaacatacccagcctttctggaaccagatgagacattcattgtccctgactccttcctggtagccctggacatggacgacgggactctgagcttcattgtggatggacagtacatgggagtggcttttcggggactcaagggcaaaaaactgtatcctgtagtgagtgccgtctggggccactgtgagatccgaatgcgctacttgaacggactcgatcgta

SEQ ID NO: 315 - DNA, 2300 bp, Homo sapien
gtaaatgcattatcaagcctaaggtccattcttctattttgtaacagctttactgagctataattcacataccttacaattcacccattaaagtatccaattcagtggcctcttgcgtggtgagatgtaggaaacaattttagaacattttcatcaccccaaaaagaaaccctatacccataagcagcctctctccattctgccatgccccacccgtagtgtttggtcttcagtaattgattttcgtatatttgagacacattggtgaatattaaagaactttaatccactttttactggtaggatggagttttgcgggttccttttagttttgggggctattttgctcacaaaggagtctcaaagtcaaggggagaccgtggatgaagcctcagatccattagtttcagggctttccatctgcagaacagcgtgggcggccccacgaaggtccaggtgtgctcactcctacctggtttcaggaaagagagcaaagaggggtctgctctggcgaagcgggcgagcagggccgcgcagccttccaacgctcagaagccttggaaggcatgagtttcagactcctgagatctgaagctgacggctcatctgagatgcagctgaatgaactcagcctcctttgtaggaaggcaaggctgggcgctctgggaacacaggatggaggtgcctgggaggctgcagctggaagcgctctgtaaccctggggcctgaggcagctctgcccaagttcccctggctgtgagagagccccatgtgcctggggcagttgcggggagaaggcccaggcagctctgggggatcagctgaaactgggctggcatttccagtttcctggggcctgagcttggcctgggccctcagcctcactgtcagacagaagcacagacacccggggtttctctgtctccatgtggcacagaaatgacaccttcaggccgtggggccagccaggcctgtcacgtatgattcaggacagggtttgccatgtcttcctttgcagcatggttagtggctaagggcatggacgctgggcccaggctgcctggattcagatcccagccctgaaccttggcacactgggtgtcccctctgtgcctgtgtgtcctcagttcttttttttttttttttggaccgagtcttgctctgtcgcccagctagagtgcagtggcgtgatctcagcccactgcaacctccatctcccaggttcaagcgattctcctgcctcagactcctgagtagctgggattacaggcacacaccaccacgcccaactaatttttgtatttttagtagagacggggtttcaccatgttggccaggctggtcttgaactcctggcctcaaatgatccacccaccttggcctcccaaaatgctgggattaccagcgtgaaccaccatgcccagctagtcttcagctttaaaacagaggtgagaatggtatctgagagcagctggtaacagaaaatgattcccttcctgaagctagtgctgggggtgcgtgccaggaagagctggctcccatgtgttccgaccgacaggccccaatggcagctgcttgcctggacaggcagagtcaccagtggggaagagcagggatcgcctgggttcgaatcctagctgcatctcctgccagcagggcgacccctggcaagtcatttagactctgtccctcagtttcctcatctgtaaaatggggatgaaggtaatggtgtctctgtgactattaagtcattcataagaaaccactgtgaggattaaatgagtgttagcagagggctcgcccaggtgcccagcccagggtgggctcctggtggcagctattcacatgctaaatttaaaatgaaaaagcattgcatttttcattgtttctttactgatttgagtgaatactaatcagtgataatattgctgctgtggttagcgctgtttgctgaacacccacccaagctgcgctgacctgcagtttctctgtctccccagccgagccgctgccgctcatggatttgtgccgtcgctcggtgcgcctggccctggggagggagcgcctgggggagatccacacgctgccgctgccggcttccctcaaggcctacctcctctaccagtgacgttcgccatcataccgccagcgcgacagccacctggtgccaactcactgagccgcctgccgctggggccgccgcaccctgcaccttggaccggcatccgtagccatggacagaggtccctggtcttccctcatcctccgtggctgcctccatgggacaaggaccgattcca

SEQ ID NO: 316 - DNA, 2300 bp, Homo sapien
ataggccaggtgcggtgactcacgcctgtaaccccagcactctgggaggctgaggtgggcggatcacgaggtcaggagtttgagaccagcctgaccaacatggtgaaaccctgtctctactaaaaatacaaaaattagcccagtgtggtggtgcatgcctgtaatcccagctactcaggaggctgaggcaggagaattgcttgaacccgggaggcagaggttgcagtgagacgagatcgtgccactgcactccagcctgggtgacagagcaagactccatctcaaaataaataaataaaaattaaaaaaaacatataataaaaataaaaaattatttatttttacttttttttttcttttgtagagacagggttttgccacgttatccaggctggtcttgagctactagactcaagtcatccactcttctcagcctcccaaagtgctgggatgacaggagtgggccactgtgctgggttttctttacttctttttctcagatatctcatgccctagtatggcttccccttctcctaggcctgggagcaatggctttaatagtaaccactgtatttgcattttggaggactgctcctaagagctgtttttatttaaagagtcccagcaatcaaatacagattggctggctagctcccacgtttccacacaattccctcctacttaagctctctatgtttacacacaggacatctaactgcttgttctggtcaaggtacagctttccggagctctgagagacggaagagaaagggttggtacgttctgcaggtgaatggtggtctgctgagagagagacagacagagagacatagtccaaggtaacaggaaagcttctggcactggtgcctgtgcagtcagtggtgtcactgccaggacaggaaatagaggtagagcaggtttgggggaggggaagaatgataagttcaatttgggacctttattcattagctccttgggcattactaggtggcaggtactgtgtcaggaacaactgtgaacaaaagaaataaggtccctgctctcctgaagcttacattcctgtatgggaaggacaacttaaataaatcaacaaactaactgcagaagccctggttctatagtcgtgtgacagactgcgctgcaaaggcggccaggaaagtctccatctgggggagacctggagattagaagatgtcaggttgagtatgacaatgacccagtgacataggctgagagaagcagtttggatatctaggtctgggctggagatgatcagaaaagaagcaaaaagcatactgcaaaatatacgcagcatatactactacttatagggagatcaaaaatccacataatgataatgattattaattatttgagacagagtctcgctttgtcgtccaggctggagtgcagtggcaagatcttggctcactgcagcccccgcctcccgggctcaagcgattatccagcctcagccacccaagtagctgggatgacaggggtgcgccgcctcgtccggctaacttttgtatttctagtagagacacggtttcgccgtcttggacaggttggtctgtaactcctggcttcaggcgatccgcccgcccgcctcggcctcccaaagtgttgagattgcaggcgtgagccaccgtgagggcctcactgattatctaaggctgtttagattatagatttttagattatgtttttgtttccctaaacggggtggtgagtacagaggtgtgagatgtaacacgtaatttgtacaccttttgcacacgtaaatatcacaaagtaaacttttaaaataaggcaaggcctagggcctcgcgaggcttctctgaggagcgaggaccagtcagtcacagccagtttccactgcctccacgctccggcctaggccagcccctctccccagtcattcgctcggggctggctccgccccagaactgcgcaacctccccgcccacatccgcgtcctaaccaatgagcgctcgaaatttgggtccacacccccgtcacgccccgccccagactcgcgcgcccgtgacgtcacggtccggcccccgccacgtgacggccgcgcgccgggctctagctccccgccgggctcgcgccgcagaggccggtgaggcgccggcggccacgccgcggaaggcgcgggccgagcagagccgggcgttggagcccgcgcgcgcatggaggcgttgccggcagccccctgagggcagcggggagacaagacccggcgacctcgcgcatccctcgagccgccacgcgctctcgccaccgggcggcga

SEQ ID NO: 317 - DNA, 2300 bp, Homo sapien
catgattccggtgtggacagaggaactggctgcaggagcaaaaaaacatttgccctcaatccatcactacccacaaagagtttacaatgttaacctcaaaaaaaaaaaagtgatcagaacactggaacatagtgtgtaattagatacaaatattttctgtttacttttttaaaactagtaatttagctgaaatcaataatgaaacacagtgactcttccccttgaatctcctcccaccaccaggtaatcagtttgcagttcagtgttaactattctccacttcccacaagcacataaggctttatttaagctttggatattatttaaaaatcaatctgcatgttgctttttctttttctttttctttttttttttttttttgagatggagtctcactctgttgccaggctggagtgcagtgacgcaacctcagctcgctgcaacctccgcctcctgggttcaagcaattctcctgccttagcctcccatgtagctgggactacaggcgcccaccaccacacccagctaatttttgtatttttagtggagaccaggtttcaccatgttggtcaggatggtctccagctcctgaccttgtgatccgcctgcctcggcctcccaaaatgctggaattacaggcgtgagccaccatgtgcccggcctgcatgttgcttttttgttgtcgtttttgttttttcagaaggagtctcctgtcaccaggctggaatgcagcggcacaatcttgactcgttgcaacctccgcctcccaggttcaagcgattcttgtgcctcagcttcccgagtagctgggattacaggtgtgcaccaccacgcccggctaatttttgtattttcagtagagatggggtttcaccatgttgcccaggctggtcttgaacttctgacctcaggtgatccgcccgcctcggcctcccaaagtgctggaattacaggtgtgagccaccgcgccctgcctgcatgttgctttttaaaaacaatgtatcatccatctatgccaataactccagatctggctttcttttcttttcttcctttctttctttccttctttccttccttctttcctttcttccttccttccttctttctctctctctctctttccttgcctttcctttcttttttgagaaggagtctcgcttttgtcgcccaggctggagtgcagtggcgcgatctcggctcactgcaagcttcgcctcccgggttcacgccattctcctgcctcagcctcccgagtagctgggactacaggcgcccgccaccacgcccggctaattttttgtatttttagtagagagggggtttcaccgtgttagccaggatggtctcgatctcctgacctcgtgatccgcccgcctcggcctctcaaagtgctgggattacaggcgtgagccaccgcgccctgcctggatctggcattctttctaatggttgcattatgttccgaactatggctgtcctatgatttattcaaccatgtccctatccgtggatgatcgtgtttctaaaaagctagtttttcaaccattagagcggctcaaggagctgctaaacagcactgggcgcataggctgggtttgactagacaggattagcgagggggaaaaagactaattacaagcagttgcgtactctggagatgctccccttagcagaagctcggtggactgtctgcagccagacctccgggcctggcggctggcgcgggaggcagaaggcggggctttcctacagggctccgtgccccgccctccccgcgccgccttccacctccggccgcgcgggggcgctccccggccggctctgtcgcttccgccgccgccccgcccacccgggctcacccctcgtcccgattggctgcgcgacgggagcgcgccgagtcagggggcgggcccgcgcccgctacaaagcggcgaaggtcacggcgcgaggaggcgcgcgtcgccgccccgcgtcccgcctgcggcccgcgcccccggcgtcaccgcctcctgcccgcctgcccgcctgcccgcctgcccgcctacccgcctacccgcctacccgcctacccccctgccggcctgccgtccttccacgcggagagccatggagggagtgagcgcgctgctggcccgctgccccacggccggcctggccggcggcctgggggtcacggcgtgcgccgcggccggcgtgttgctctaccggatcgcgcggaggtgagtgcatggttcggccccacgcggccctctgcgccgcccgccaggcccgcccccgcgccgccccggcccgctgcc

SEQ ID NO: 318 - DNA, 2300 bp, Homo sapien
tctgtccaagggaccaataacagctgctttacttcccaggctggattgaagagggtcctttaagccattgtttcactaagcaattgactggctcacccttcaccctatcctgggagggcatgaagccactgttgtaatctcaggggtgggctcacccaccacccccatactcttggtccaccaaagcctggaggtcgctgctgtcaacccagggctgagcaaggagggacttaggccctgggctgtctccccgagcctctcagtcatgcctgctgtaggggaggagagagtggcctccctctaccctctaaattccttggctgggctccacattaaatttacataaggcagattaacaagagaaaaaccatgtgtaactaagacctatgcatgggaatcccacaaaatacaagactggatgaaggctcagatgaataaagctcatataacatcctacaagggacaggaaacattccttcagaaaggaatagggcttgggtcaggtgtggtggttcacgcctgtaatcccagcactttgggagcctgaggcgggtggatcatgaggtcaggagttcaagaccagcctggtgaacatggcgaaaccccacctctactaaaaatacaaaaattagccaggcacggtggtgtgcacctatagtcccagctactcaggaggctgaggcaggagaattgcttgaacccaggaggctgaggctgtggtgagccaagatcacgccactgcactccagcctgggcaacagaacaagattcctcaaaataaacaaaacaaagaaacaaaacaacaaaaaacaaacaaaaaaacatgaaaatcagctgggtgtcgtggcgtgtgcctgtaatcccagctacttgggaggctgaggtaggagaattgcttgaacccaggatgcagagattgcagtgagccgagatggcaccactgcattccagcctggacaacagagcaagactgtctcaaaaaaaagaaaagaaaaaagaaaaagaaagaaaagaaaagaaaaaaaggaatagaggcttgggatcctggggaggtggtacacaagttaagggagagtgaggggagagagggtaaggtgaatgaagcttgtcttcttatgcggataaaatttctcaggtaagaaaagttagctctgagcagccctccgcctgatactaatactttaccaatggagattttccttttcttttctgtttttgagacagggtctcactttgtttcccaggctggagtgcagtggtgccatcatggatcactgcagcctccatttccctggctcaagccatcctcccacctcagcctcccgagtagctgggactacaaggtgtgcaccaccacgactggctaatttttaatttttttgtagagacgggggtttccctatgttgcccaggctggcttgaattcctgggctcaagtgatcctcccgcctcggcctcccaaattgctgggattgcaggagtgagccacagtgccaggcctggagattttctttatagatagaaatcattttacaaaaggacagcttttcagatctactcctgtgcctgcagtttctaagaataatcccttcaaaatatggcgaagaagtatattttggggtggcacacgctggtctcccatagtcacattttgggtgtgtgtcctgagccccaacactggtcacctcgcaatggcgcttggggtccctgggtgcctagagctgcaggttaccccctcttcttctcctgctctcagcctttctcccgctcctgctgaaattctttcctgcgtgaaggcggagcgcttaaaggcgcctaggacctttatttcgttgttttcctttgcataaaaagaaaacttgttttgtagaagggcaagcaaggtgcagcttccagaggcacctgggatgatgcccctctagcggtaggcgaactggggagtgtgggcggcgggggaaggcgaggccctggaggacctgttgtttttcctgttgcaagtgaaaaggaaacaaagtgggaagtggagtgtgcgggttggcggcaggcggggcgccccggcgcgccccgcctccctccctcgaggctcactcgcgcccagcgcagtcgctccgagcggccgcgagcagagccgcccagccctgccagctgcgccgggacggtaagcgatcgccgctggctgcgtcaggggaggtgggaagaggaccgcggccaggggctttgggagctgcggctgcgctcgggggcgcggggctggctggcgggcgtctctccggcacacacagcccgtgcgccctggccct

SEQ ID NO: 319 - DNA, 2300 bp, Homo sapien
acaggcgtgagctatcacacccggcccattgctgttgttttcttttagtgacaggatctcgcaatgttgcccaagttgtagtgccatggctactcacaggctcaatcatggctcactgcagcctcaaactcctgggcacaagtgatcctcccacctcagcctcccaagtagctgaaactataagcatgcacgtttctgttttaagccacaaagtttgaggtcatttgttacagcaaccacaggaggttaacactggttgagcatcccaaatctgaaatctacaacgttccaaaatccaaaatttttgagtgccatcatgatcaaatacaaagctccttggagcatttcagatgtcagatatttggatttggaatggtcagttggtaagcatataatgcaaatattccaaaatccaaactccaccccatttctggtcccaagcattttggataagggatacttaacccgtacagcatccctccaggaccaaaaatcccaaataggtctatccctttctgcatctcctcctcccccaccctactcctggcaccgcccactcttccggcattttctctaagtggaagcaatttcccccaatatgagtgaaacagaagccaaccgaaataccactttggaaatgccacacccttcactctgatcactccccctgtgctcagaatgtaataggaaggccgcgcatggtggctcacgcctttaatcctagcgctctgggaggccaaggtgggcagatcacctaaggtcaggagttcgagaccagcctggccaacatggcaaaacaccgtcactgctaaaaatactaaaaatagctggccatagtggcgcacatctgtaattccagctactcaggaggctgaggtgggagaatcgcttgaacctggaggcagaggttgcagtgggccgagatcacaccattgcactccagcctgggcgacaaagcgagactccgtctcaaaaaaaaaaaaaaaaaagaagaaaaaagaaagaaagtaataggaaaagggacccatttccaggagccctgacccttatccgaggtggtaaggttgtgacttctggggagggaggggagtttcacgcatatccagccagtgcagctggaaggggaactttcacaggccctagggactgtgctggccctcagggaggggagaatggccgttattttggtaggacccacagcaagtcacagtgtttagctgcaataaaaaaggggggggggcggggggttcctgggttttttattttttccatcttgaaactggcagcatttctgctatgattgccggggatttccaccaaccaaactaaagacaactcagtcttagcgttaactgtagggagagaggtggcgttttgccaccttcgctatttatgaaacactgtcaccggtaccaagatgacaatattttcctccctttcaaacaagccaggctctgccatcctccagtggatagggcccttccttgtctcctccatcccggggtactgcttctagaccatcttctctaacagctttgctgaaaaacacacttgtcccctggggagtagctgaagccaccctcctggctgaaagagcttttttttcttttttttttttttgaaatgtagtctcactctgttgcccaggctggagtgcagtggcacaatctcagcacactgcaacctccacctcccggattgaagcgattctcctgcctccacctcccaagtagctgggattacaggtgctcatcaccacgcccagctaattttttttttttgcatttttcgtagagacagatattcaccatgttggccaagatggtcttgaactcctgacctcaagtgatccgcccacctcggcctcccaaagtgctggaattacaggcgtgagccaccgcgcccagcctgaaagagccttctgaaggtcccacgttaaggaaacatttgctggggccccaaaccccaccatcaggcccacaccggcagctggcctcagggagggcgggaactgctctctacacaaaaatggttttgaaaataacccagccaaaggggaattgcttcatccgttgcacattcacttctccctttcactgtgcaatttaagtaaaacaagatgaagcaggaaccgactctcaccatccccactcccacctccatgaattccatcggacagttgtgcgaaagcgggctggctttcgcacaaccattggtggactgtctgtcctgtaagccccccaggggctgatgccctcccagtctgcctgccctgttcttagcacagcccctggcacccc

SEQ ID NO: 320 - DNA, 2300 bp, Homo sapien
gggacacagcgggcgggtcccggagtgacgggaagacgccagcctccgggcagcggcgcggggccggcgggggccggagggcaggcccgccgcgcgaggtgcaggcaagcggggctcggcggaggggcgcggcccggggcggggctgggactactggcaggcggggcggggcgccggctgggggcggggcgtcctcggggctggggcggggccggggccggcggcggcgcgggcaccgtcggcaaattctcacacccccagccgggagaagcgcccgagctcacacgggcggcggagagaggagtggacgctgcaaatcctccccgacccccgctgttctcgcccggaggcccaggacgctgccaggcggggcccttggggttcgcaccctgagccccagagcagccgcgggaccccgacggcgcgcgcacgctggctctggcctaggtttcaccttacaatcaataaatagaaagcgccacctgcaaagcaagggagggctggtcgtccaccaaactgctttccgctccccgctttgcaaggcatccgcagaaagggcggggtactggacccaggtcacagagccggagccagactcactcgagtaattggccagcccgggctctgggctcaaatccagcctgctggctgttccctagctgatgggcctttccatcgggggttcccttatatgtgagatttagaaaataaatgagtgtacctagcactttcactaatgcatctatccattacaacgggcggtgtgcgtgcagtaacaacaccgagacaatccttgtcccgcacttaaaaaaaactctgggcgctccagtgtttttgtttttgagacagggtcttgctctgttgccctggctggggtgcagtggtgcgatcatagctcactgtagcctctacctctctggctcaatcgatcctctcaccccagcctcccgtgtagctgagacctcaagtgcgcaccacctcactcagctaattttttaaaattttttgtagaggcgggggtctaactatgttgcctacgctggtctcgaactcctgggctcaagccatcctaccgcgtcagcctcccaaagtgctcggccaggcgctccagtttttatccaggcatctacactgtaagatagatgttgttctcccttggttgtaagtggggaagccgaagctaggcgggcagggactctcaccctcacgtactcacacaaacactgtctgcacagcctcttgggcagagctagcgctggcaccagtttagtttggtgctgaaaccatacccctcttgctctgcaagagcccatctccccttagaatattctttcgggtccacagcccaagacaaacctttgccacaggggaacgcagaggaggaagcggggtgcgagcaccagaatcagccctggcgtgtcccgcggggtggtagaaggtggtttgaagaacactccttggtggtcctaattgctgcacgtgaggtcaaggcagggccgcccatcccaggcagatgagctccaggagccttcctcgtgcctgagaagacggcaaggagaaaacactgccggctggaagccctcgagaatctcgaagaagcccagaatgaaaggaccaggcggccgggactcggagctccctagccagggcgcgcgcagccaggcctgacgcttccctccgccctcggcggcctctgcgtcctcccagcacccggcagccttgccaggggtcccggatgcccagagcaccccccaaggaggagagagaagagagggagtccaggatgagaagacggggggccagggtgggaggggacactcctcttccctggccgtccctagaagtcacacacagacattcactcaaaaagacacgcatgcagatgcgcacacacagacacaggcgcaatcatgtaaacggacacacagagaccacagacgctcgtgctcatacacgcgctctcgctcttcacaccctgcaccaggtgggcactcacccgcccgcaccctggctgtgctttcacagatcccgggagagggcggagcccgggccgggggctggagaccgcccccggccccgcccccacgccctcccatctctccctccttcctgccgtcccccgcctgagggaggggagcggtgcagcagacatccgagggcagctgggaccccctgactcagccgacgggtgagtcaggctccctgcaggccacaccggacccccccagggcggggatttccccaagatgagaaatcagccaccggaagtcacgccggaccttggacgggcagacagaggc

SEQ ID NO: 321 - DNA, 2300 bp, Homo sapien
gaccttggagggagaagacctcggggaattggataaggccatgcagcacatctcgtacctgaactcccggcagttccccacgcccggaattcgcagactcaaaatcaccagcacaatcaagtacgtcctgatttttaacagccggcctgttttgcccaatgacacttgtatatttaggtttttaagacagcctaaccccttctgtaaggaaaggtgagccatcgtgtgtaaccagaaagtgtggggcagagagctgagtgatatttacgcatcttgtttgcaagtgtgttcctggagtggccccggcaggtgttagtgggggcctctgtatcccacctccatgtgcctttgcacaggtgggctccaagatcggctcccaaagccctgacccttccccatttcttgctggcaggtgttttaacgaggccacctgcatttcggtccccccggtagatggctacgtgatggttttacagcccgaggagcccaagatcagcctgagtggcgtccaccattttgcccgagcagcttctgaatttgaaagctcagaaggggtgttccttttccctgagcttcgcatcatcagcaccatcacgagagaagtggagcctgaaggggacggggctgaggaccccacaggtaatgtgctctgtggggcgcgggctccctcgcctcggccggaaaccccattgtccccatgtacttggcggggctctttgtctctgtgggatttggggaggttttaatctttcgttggtgttctctcgggtgtgcttctggaatctgacccgtgagctggagctcatggtgatctctggaatcccatctggaggggtcttacatcttttcctggttgctgccaggctttgagatgtggcttgaggttgaggggttgagggcacttacgggagacactgcttgcacctgccaggctggccagcccatggaggcacaatgtccccacaattcttgctcaggacacatgaaactccccccctttttttttttttttgagatggagtctcactctgtcgcccaggctggagtgcaatggtgtcatcttggctaactgcagcatccacctcctgagttcaagcgattctcctgcctcagcctcccgaatagctgggattacagggacctgccacaacgcccggttaatttttgtatttttagtagagacgggctttcaccctgttggccaggctggtctcaaactcctgacctcaggtgatccacccgtcttggcctcccaaagtgctgggattacaggcgtgagccactgcgcccagccgtttcttgaaagcaactctcgcttgcttctgtcgttggtccttacgagagccatgtaggtttggggtgagccggcagggcatccagtgtgccccgccacgctgggccccactgcccctacttaatatttctggttgggcctcttttgcagttcaagaatcactggtgtccgaggagatcgtgcacgacctggatacctgtgaggtcacggtggagggagaggagctgaaccacgagcaggagagcctggaggtggacatggcccgcctgcagcagaagggcattgaagtgagcagctctgaactgggcatgaccttcacaggtaaggggagcgctgcagccacgcaggtgggccaggctgcaagaggggactttgagagctcttggctggctgctgcctgccatctgagaatgttgagttatcttagagggagatggggaaggagcacgttcgctgggatcattgttggctgcacgcatactcctgtctcctggacaggtaccggatgtgtagccactactctctaaagggggagggttgaggcgtgggatgacacgtcccccacagagggaagaatgcccctgtgcacattgcatttattcccatggctagaaagccaacttgtgtgaccccttggcctagctaacctgggtgtctaattgagcctgcctgtgctgacggctgcagccctgcccatgctcctgccctaagccacccggcaatcttccccctttcaacccctgcaggcgtggacaccatggccagctacgaggaggttttgcacctgctgcgctatcggaactggcatgccaggtccttgcttgaccggaagtttaagctcatctgctcagagctgaatggccgctacatcagcaacgaatttaaggtggaggtgagtacaaggctcccactgagcagggccaatagcagcagtgagtgagggcgctgatttgcagccctaatattcacaaacgccaacctcagagcattcatgatggcagctata

SEQ ID NO: 322 - DNA, 2300 bp, Homo sapien
ggctccctgctttttcagtcttacaggcagggtttgggaggccgcctcgtgactgtcatgtggatgaaccacgagacaggaaaagacttgtttctagatattctgtcctgattgacagtaaattttaaatagacgtctctcttttttttttgttttgagatggagtcccgctctgttgtctgggctggagtgcagtggcgcggtcttggctcactgcaacctccacctcctgggtgcaagcaattctcctgcttcagcctcccaagtagctgggactacaggcatgcaccaccatgcccagctaatatttatatttttagtagagacggggtttcgccatgttcgccaggctggtctcaaactctgacctcaggtgatccacccgcctcggcctcctgaagcgctgggattacaggcgtgagccaccatgcctggcaaatagccgtttcttagaaacctcaattcctagtcatgatttacagtgcctgatttctgtaccagaatgagacacattgctgaaaatttgtcccttttccttttcagtttaagaacaaggtttagtgtaacctgtttctggctctttgttgtcatctgtcaagggccattttctgggttttggttttcgttgtaacatctgcacttctcagcaatcctcaggaggaggcaggaaggatgggacttaacaccatagcatccttgaaataggccgttccatgcagggagtattttaagcctcccttttatcctccctgcctcgcttgtgtgggttcattccccagggcgtgccaggtagagaaaacagccatgtggaacccagccagctgagaaggcagtggctggagaggctggtggcgtaggaagtgtcaccatgcaccctggtgatgagaacagggtaggccaccttaccaggtagtggccagaggtgtggggaccctcaggggacctcttggcttcaggtgagacacccccaactctccctttctccaggccatgtgcatgatcataaacggtttaatttcttcattgcgcttccatgtagattgcaaggctaacaggacttggtatgaactaacccgcatgtccatccactgagctgccagcaccggtaacaccgtgttgagtgagaagtgagttgggcgatgctgggttgcacgcctgacttcgccttttctcccctgacccaaaggtggcgacctgcacatgacccagtttttccgaggcaatctggctggcttaactctccgttccgggaaactcgcggataagaaggtgatcgactgtctgtatacctgcaaggaggggctggacctgcaggtcctcgaagacagtggcagaggcgtgcaggtaacaccgagcgctcgactgcacaccactcatgggccccttagactacagccccggaggctggtgggatgagggagtgagtaatctgtgattgatacgtttactgttgggtaaaagagttgtgttcactggacttaaacgagcttttctttttcaagtcagcaattcaaatcgaacccaggccagtcccctttgtggaggcatctgtggtttcagctcctgcggttactggcttattcttctcctctctgtggctggtgtgatttcagatccaagcacaccccagccagttggtattgaccttggagggagaagacctcggggaattggataaggccatgcagcacatctcgtacctgaactcccggcagttccccacgcccggaattcgcagactcaaaatcaccagcacaatcaagtacgtcctgatttttaacagccggcctgttttgcccaatgacacttgtatatttaggtttttaagacagcctaaccccttctgtaaggaaaggtgagccatcgtgtgtaaccagaaagtgtggggcagagagctgagtgatatttacgcatcttgtttgcaagtgtgttcctggagtggccccggcaggtgttagtgggggcctctgtatcccacctccatgtgcctttgcacaggtgggctccaagatcggctcccaaagccctgacccttccccatttcttgctggcaggtgttttaacgaggccacctgcatttcggtccccccggtagatggctacgtgatggttttacagcccgaggagcccaagatcagcctgagtggcgtccaccattttgcccgagcagcttctgaatttgaaagctcagaaggggtgttccttttccctgagcttcgcatcatcagcaccatcacgagagaagtggagcctgaaggggacggggctgaggaccccacaggtaatgtgctctgtggggc

SEQ ID NO: 323 - DNA, 2300 bp, Homo sapien
ctgtctctactaaaaatacaaaattaaccaggcatggtggcacgcgcctgtagtccctgcttctcgggaggctgaggcaggagaatcacttgaacctgggaggtggaggttgcactgagccaagatcacatcattgcactccagcctgggcaaaaagaatgaaactccgtctcaaaaaaaaaaaaaaattagtcactgctggtggaagtaggctggctcgctgccacaatcctgagtgtgttgctgcacctcctgccagttaggaactgcagttgtagcagagagggctttggacaagacaacatagaacaggggtcgccatacctcaggacgtgggccagtactggtccgtggcctgttaggaaccaggccacacagcaggaggtcaacagcatgtgagcgagtgagcatttctgcccgagctccacctcctgtcacatcagcagcggtatcagattctcacaggagcgcgaaccctgttgtgaactgagcatgccagggatctaggttgtgcgctccttatgagaatcgactgcctgatgatctgaggtggggcattttcatcccaaaaccatcctcccacccccatctgtggagaaattgccttccatgaaatcagtccttggtgccaaaaaggctggggactgctggtgttctcaagtccagtgtcttctacaattagattgtaagctctagtcttttctagagctctagtcttttctccaccacttgctagccctttggcattgtgcaaatttaattttgttgagtctgtttctttttcttttgttttatttatttatttatttacttattttttgaggcagagtctcgctctgtcacccaggctggagtgcggtggcacaatctcggctcactgcaacctccacctccagggttcaagcgattctcgtgcctcagcctcccaagcagctgggattacaggcacgctccaccacacctggctaatttttgtatttttggtagagacggagtttcaccatgttggccaggatggtctttaactctgacctctggtgaccctcctgcctcagcctcccaaagtgctgggataggtgtgagccaccacacccggccctgagtctcagtttctacttagcacatctactaaagaagggtatgtgggcgagatggtgtcacataacccattgtgagggtcagaccgatggcactgggatgaggaggctcatggtgagcagaaggtgcagtgccccagtgagtctcttctctttttccacagtgtaatgttattgtttcccttgaaaaggtcagattttgaccaaagtccttgactgattcagaagcatgccctgaccattagcccttgaaacctacagttttttttatttgtagccaggtctgatgacaccctaattttcttgataactgagctggggtattggcaggtggcaacggcctgcctctcctgaactcttccatttgttgaatcaggaccaggtgatgccatggactccagcctattccctagaagtaggacagaattcgtttgaactctcagaatcaaaccatttcatgctttctctgtttcataccccttcttcccttggctctattttttttctggattttgctacaaaatatgtttcaactttataattggagagcaaacagacgtctggtattgtttatctcccttctgcctgtcttgtcccatattgtcaaaaaaaaacacccaagtctcttttattttagatgattggttttttgctttattcttaggatatggaagaatcgacccaaatccctcttttaactttctgttatctccacacttgaatgaaaagcagtgaatagcttgtttaatttttgacttcatcatatgaatttcatgaaacaaggtatcagaaacaggaaattttaaagtagggcagaattgggtaaacacacatacacactctctgtctctctctcacactgaaaacaagcagaaaaatatttttctccctccctttgtccagagcaactgttcatattcaggtgaacgacgtgaatgagtacgcgcccgtgttcaaggagaagtcctacaaagccacggtcatcgaggggaagcagtacgacagcattttgagggtggaggccgtggatgccgactgctcccctcagttcagccagatttgcagctacgaaatcatcactccagacgtgccctttactgttgacaaagatggtaagaatcgaggagccggcttttcagctaggtagacagtccctgctaaccccactgactttacaccccagcttctgtgcttcgtcagaac

SEQ ID NO: 324 - DNA, 2300 bp, Homo sapien
aagaagtacatattgttccatttcgcaggtgaggagattctgaaagttccataacctggccaaggtcgtttgcatttgcagaggccagcactgaagtccagtcccgtctgactagaccatctgggtccttcccactagaatacagtggggaggagaaaaggacactgatggattagtcagtcgacagcacaggcagcagattataaagctgaactgtttggttagagcagctcggggctggagagggagggctggcaggaggacttcctgaaggagacagcccagaagctccttgtaaggacctgaggcttgggtatgggtggaggaggaagtgtgatgttggccctgggaggggaatgaataagaagagacagtggcagacagcatgccctgaggtcagctgggtggaggatgggaagcccagcagagatgtctggacctgacgaggtggcagcagggaggcactcactgagtttataactccaggaggggcagaagcaatggcaacacccgtcaccaggggagaggatgactcaaagccttggctggaaggagtggtgggtgtggcttggagcctgcccgggccaggcaggtgctttgggaagggtccagccaaggagagtccggtcttcctccacgcaggggagggggagcaggggaaggaaggagagacattaacaagatggaatctgtaggctttggtgcaggacgcttacggggaacacggctcagggagttggattccagattgcttttgaagccttccccaggtcacatcacaccgctgttcccagccgttccaggtcttcctgttgactgtaggatcaagtccattcccccaatctgacctcagtctacgtttttgggctctttgcccactagtctcctaaataagtcctctgcgccccacaaaccagtctccacccagcctccagtgctgccagcctcctccacccccacctggagcagtgacattcatggatagctcctccagcggtctcgaaaaatgaacattttagggttccactttttgctgttggtgtccccctaatgcgaacatcctgtccttgagggctgattctttttacaatagttgtcccaacgggggaagtcatttcacctttctgacttagtttccttatctgcaaaatggagccagtagtgtctcatagggtacagtgcctgcacacacgcccatccacggctgttccaggcctttcctccactgcgggggggtgccaggggtccagaggcgaggaggagggggccgctggacgctgggaaattgggaggaccccaagatccctgtagggatccacggtagagggggagggcttctctgtcctctctatccattcggacctccgcatttctaagaaccagcatcgcaccatgtcactgagaaagagcgcgcacaccagccgccttttgaaagtcacaaatagattccttcagtgaattcaggacagactccccgggggcaggtcccggggcgggagccggtgtgggtagtgctgcgcggcccttaactgtttaccaggcgcgtttcgctgacctcgtctcctggaccccctttcgtgacccctctcaacacctctactggggagacgaggaccccgaggttctggggggcgacgcgacctgcccgaagtgacaagggtcctgggccgcactgctccgccggggtctgcgctcctcggcggagcgggtgggaaggatgagtcctcggggtggagaaggaggagcgggtccccgggtaccgctcacccggccttaggagcccgggagcgcgcgtagggacgcggagttgaggctctccatctgcggccagggaaagggatacagtcccccgggcccctcccggccgctcggaacccaccccaggcgcgtccccgcgggcgcgcgctccaggcggggccgacgggctcggaggcgcgcgcccgctgccgggtccgccgcgcgcgctccctccgctcctctcccccgcccctcccgggcccgcgcgctcccagggtccgccgcgcgcgcgcctcgcgtcgctccccatccccgcccctcccgccgccaccccgcccccggccgggtaccctcgccggacccgagagagagcgccgccgccatcttagttgctgccgctgccttcagcaagacgctgctctgaggcggggagggcgccgcgtcctgagcgcgcggcccagcgtcacggcggcggcggcggcggctcctccttggacccccggagctccccgcgccgcggagcagctagccccaggcccctagagccccgagagctccgagag

SEQ ID NO: 325 - DNA, 2300 bp, Homo sapien
ggtgcaggttgcactgagctcaccaagccgtctatctgccccacctgacgctggatctttttgacctatctctgtttctttaagggacagtaagggtgagaagataaagggatcaggattccagacactgaagagcttttgtttgtgtttttaatagaactgaacacattaaatttccccttttggcatcatcagtctatggactgaaaacatagttctgagattatacctttccgattttatgttttgcaaatctcgaaggtccctggaaatctacagggtacatcttttttcaccctctgagatgtgagctccataataataaaacctaactcagcaattcattgagttcatcactatttattgagtacctactctgatcgctggtatactagaagcacagaagccttcttcttgaagggaaaaagaaactcatgtatctagaaacaccaggctctatgtggcactttcatttatttgccacataaagcctggtatttctagatctatgtggcatcatttcatttaattctcacaactctaagaagtacatattgttccatttcgcaggtgaggagattctgaaagttccataacctggccaaggtcgtttgcatttgcagaggccagcactgaagtccagtcccgtctgactagaccatctgggtccttcccactagaatacagtggggaggagaaaaggacactgatggattagtcagtcgacagcacaggcagcagattataaagctgaactgtttggttagagcagctcggggctggagagggagggctggcaggaggacttcctgaaggagacagcccagaagctccttgtaaggacctgaggcttgggtatgggtggaggaggaagtgtgatgttggccctgggaggggaatgaataagaagagacagtggcagacagcatgccctgaggtcagctgggtggaggatgggaagcccagcagagatgtctggacctgacgaggtggcagcagggaggcactcactgagtttataactccaggaggggcagaagcaatggcaacacccgtcaccaggggagaggatgactcaaagccttggctggaaggagtggtgggtgtggcttggagcctgcccgggccaggcaggtgctttgggaagggtccagccaaggagagtccggtcttcctccacgcaggggagggggagcaggggaaggaaggagagacattaacaagatggaatctgtaggctttggtgcaggacgcttacggggaacacggctcagggagttggattccagattgcttttgaagccttccccaggtcacatcacaccgctgttcccagccgttccaggtcttcctgttgactgtaggatcaagtccattcccccaatctgacctcagtctacgtttttgggctctttgcccactagtctcctaaataagtcctctgcgccccacaaaccagtctccacccagcctccagtgctgccagcctcctccacccccacctggagcagtgacattcatggatagctcctccagcggtctcgaaaaatgaacattttagggttccactttttgctgttggtgtccccctaatgcgaacatcctgtccttgagggctgattctttttacaatagttgtcccaacgggggaagtcatttcacctttctgacttagtttccttatctgcaaaatggagccagtagtgtctcatagggtacagtgcctgcacacacgcccatccacggctgttccaggcctttcctccactgcgggggggtgccaggggtccagaggcgaggaggagggggccgctggacgctgggaaattgggaggaccccaagatccctgtagggatccacggtagagggggagggcttctctgtcctctctatccattcggacctccgcatttctaagaaccagcatcgcaccatgtcactgagaaagagcgcgcacaccagccgccttttgaaagtcacaaatagattccttcagtgaattcaggacagactccccgggggcaggtcccggggcgggagccggtgtgggtagtgctgcgcggcccttaactgtttaccaggcgcgtttcgctgacctcgtctcctggaccccctttcgtgacccctctcaacacctctactggggagacgaggaccccgaggttctggggggcgacgcgacctgcccgaagtgacaagggtcctgggccgcactgctccgccggggtctgcgctcctcggcggagcgggtgggaaggatgagtcctcggggtggagaaggaggagcgggtccccgggt

SEQ ID NO: 326 - DNA, 2300 bp, Homo sapien
gtgtgggcagtgaatgggggcgtaaggagagcctaaaggagagactgcttgaagggttattgcaggagtcaaggtgatagctggtggcaggttaaactgggaaagaggggtagagatggtaggaggtggagagattaaggacaccatttagaattggaaacaacatggactggaaatgaagaataaaggaaagagtggtgtcaacggtacaatttaagtgtctggtgtaagcaactgggtagagagtggtgccagttactgaaggtggggacactgtaggagaaacccacttggggaccaatttttttttttttttttttttcagacagagtttcgctcttgttgcccaggctggagtgcaatggcgcaatctcggctcactgcaccctcgcctcccgggttcaagcgattttcctgcctcagtctcctgagtagctgggattacaggcatgcgccaccacgcccggctaatttttgtatttttagtagagacggggtttcttcatgttggtcaggctggtctccaactcccgacctcaggtgatctgtctgccttggcctcccaaagtgctgagattacaggcatgagccactgcgcccggccggggacctattaagtatgaaaaagtgtgagcaggccgggtgcggtgtctcaggcctgtaatcctagcattttgggaggccgaggcgggcagaccacttggggtcagaagttggagaccagcctggccaacatagagaaaacccgtctctactaaaaatacaaaaattagccggggcgcatgccggtaatcccatctactcaggaggctgaggcaggagaatcgcttgaacccgggaagcggaggttgcggtgagccaagatcgcgccactgcacctgagcctgggcgacagagcgagactccctctcaaaaacaaaaaaaccccccaaatgagtaaagagtaatgtggatattatattataaacgaacaaacaaaaaaggacttcgtattctttttgcatagggaaggggaagaaatgtggagtggaagaggatggtacagaaaaggtgtaaaaagaaaggctgtgggaggagtagggtaggagggcttctgaactggggttagtgtcacactgtgtaactgataatttaaactgctgaaaatgagaccacacttaaagatacaggtccctttaaaaggaaggcggatgttaaaagcaatttgcattttacctaaaatgggctgcttctccctgtaccctctccaaatacagccagactttctgtagaaacattttaatcatgggcacccttcccccgaaaaatccactcactaccagtacacacgaccttctgagtttaatggacctacggaggcccatccctgggctctctgggctaggttaatcccaggttaggccccaagctcagaggtagcaacgttcccagctcaacgacgcaggaagaccacgcctctaaatgttctgcaacctcgtccatttcagaattttccggggttctgggtaaactggcctcaccaaggattctgccccgtcttgttgctcccgtttttaaacacagaccggtgtgtgggagaggccattatttttccggaacactgtgctcctggagcagatagggacacgcagagtggctttaccgcagcgccagcttcagccttacccggctcctcctccaggccaccgcctcctcctcgcgcccaacccgccttccctgctcacccccggcccgctcctcccctttgctctcagcgcggactcggccactcactaccggcgccgtgttccacccgcccaccgcatggccccgtccctatgtcgctggtctcgcccccttccaggagggcccaatgagcgttcacatgcgccacaaggccccgccccgcaccgcgcagccccgcccacaggctgagttaaccaattcgcggccccgggccccgccccgcccgcaggccccgccccggcgcccggccccacgcgcccgcctccctccggggcgttgccgccgccgcgcctcagcagcccgcgcggagccagatgccgccccctccgccggtccctcccccggcggcctggcgcctccctccctccccaccgcggtgactctcggagcgggaggcggaggctgaggcggccgctcctgctgctgctactgccgccgccgcagcggctgctcgggctgagcacgccccggaacaggccgccgcgcgctgcgcgccggacccgctgcccctgccggcccggccgggtcgggcggcccaggtaagcgccgaggccgggccgcgcctgcaccgcccg

SEQ ID NO: 327 - DNA, 2300 bp, Homo sapien
ggaatgtaggtgcccgccaccacgctcagctgatttttgtacttttagtagagatgaggtttcaccatgttggccaggctggtctcaaactcctgacctcaggtgatccgcctgcctcagcctcccaaaatgctgggattacaggtgtaagctatcgtgcctagcctttaccttttttttttttttttttgagatggagtctcactctgtcgccaggctggagtgcagtggcacgatctcggctcactgcaacctccgcttcccaggttgaagagattctcctgcctcggcctcccaagtagctgggattacaggcacgcactaccacgcccagctaatttttgtatttttaggagagacgggtttcaccatattggccaggatggtctcgatctcttgccctcgtgatctgcctgcctcggcctcccaaagtgctgggattacaggcgtgagccaccgcacccggcctttaccttttctttatacaccagcatccagcacaatcttggacagacaaaaagtgccgaataaacaactggtagatgaataatgagaattgattgcttcttctttagcattcaaatctttttttttaaaattttttttgagacggagtctcgctctgtcgtccaggatggagtgcagtggcgcgatctcggctcactgcaacctcagcctcctgggttcaagcaattctcctgcctcagcctctccagtagctgggactacaggcatgcgtcaccacatctggctaatttttgtatttttagtagagatggggtttcaccatgttgtccaggcgagtcttgaactcctgacctctggtgatccacttgcctcagtctcccaaagtgatgggattacaggcgtgagtcaccgcgcccagctcaaatcttattctctatttagcacttatttctgcctttaattatatatgattttattataatacgttatctcctctgactaaactctggagaacagaatatgagtctgattcctctctcagctttctcagtacctaatacagaatagaacgtcgataatttggtcacgtatataaaggctcaacatattttaaggagctaaagctattctgaatacatttcagtaaaaatgggtgcattttaaaagccttaacctggtactacattagttgagatttatccccgaaagattaactcgttggcaccacctagtagtcactaaatgtggtgcacttttcacttttacgaaactacagaaaccgctctcagacactatatctggagcggagggtcctcattcatgctcacctgtctcttagtactctgatctctgcacagtgccgaccggtctcaaattgcacaaacctccagttcttgacgttccgagtgtcataaacttgaggaaaatgaaattattcatcaggactacaaaaggctcaaagttcaaaccacctcggggtggagatgctggaaaaaaggaaaccattaacaagtaattttatttgctatatataaacttgccctaaggcagtccagataacttccacttgagcagcctgagacatcaagggcgggggcactttccccctcgactgcgcctaccgcagcctttctgagtttcttcctagcgaggccgagagggtctttgaggaaaatcccgcatccggacacgccttgagggatggcgtcaaacccagaggcttggaaaaggtaagggcggagagcacgcctcttccttgaaagtgaggagggtttggcccagaaccaacaggactgggtgaagaatcagctccggccaccgcagcaaatcccaccccacgcgggaacttgaagtccggcacgtaggtcccgcggcggccgggctccaacaggccccaattgccaccagaggtagccgtaaacccatggtccccgaaactccttccgggcctacctgacaaaaactgggacaacctccttaggcccccgggattccccctgtgccgcctgaccgcccgccagtcccagagtttagggccaggggccccgcctacctgagggcactggcctggcggaccgcgccgggggagcacttccgctggacgcacgcacttccggccccctggaaccaatgagagtgcgaccgagatgttccactcgctggcgtccgggccgctggtgatctccggtagcactcgggccggcggacagtgagggcgcggtaagctccccgcaaggagcccctgagaaactggtcgctttttgtcctagatataggggagtccaggatggtgtggtggagtctttagagtcgaatatgacccgaggcaagct

SEQ ID NO: 328 - DNA, 2300 bp, Homo sapien
gtcttctctaaggtgggctagaaaaatggtttcatattcaaattgtaactctgaaaaacaactgatggtaataaagagattccataatcagacagaactaagtgaaacaattagttttggtagagttctgtggtaatcatagttagaagtttatcctgggtagctgaaatataactaacttcagactccaggcctgtcggtggcttgtgccaatcaccacaacactttgaggggccaaggccagaggatcgcttgagcccaggagttcaaggctgcagtgagctatgatcacaccactgcactccagcctgggcaacacagctcttgttttttaacaagacattgttacttaaaaaaaaactgccctgatgaaacaattctaccatgaacactgatgttgttctgtggactacttcaggaagatggactaagaacatcattaaatagttccaaccagtttctgggtaattttatttttaattttttgttatgagggtcttgctatgttgcccagcctgggctcaaatgatcctcccaccgcgggctctcaaagtgctgggtttacaggtgtcacaccgcgacagccaagggtaacttttttttatttttatttttgagatggagtctcgaactgtcgccccggctggagtgcaatggcgcgatctcggctcactgtaacctccgcctccaggattcaagcgattctcctgcctcagcctcccgagtagctgagattacaggcgcccaccaccacgcccagctaattttttgtatttttagtagagacggggtttcactatgttggccaggctggtctcgaactcctgacctcgtgatccgcctgcctcggcctcccaaagtgctgggattacaggcgtgagccaccgcgcccgtccaagggtaactttttaagagctgccctacagctcattacctccttctcaaggagcatgagtgtcaaaccacctccagcaaagtagatgtagtcttttacagatttggaaagaaggatttaggaggaaagggaagtcgttcggaatgaaggatttcctcctctgacgcccagccgtcccccgttaagcctaaaggtgccagacctcaagactcttctagaaagagatttttcctttccaaggtgaatccatctgttccgaaggtcagaagctattttaccgaagttttccgttccactgaaaaaattaagggtcaatcaaagctccttgccccaaacctgaatatgagcttgcctcgggtcatattcgactctaaagactccaccacaccatcctggactcccctatatctaggacaaaaagcgaccagtttctcaggggctccttgcggggagcttaccgcgccctcactgtccgccggcccgagtgctaccggagatcaccagcggcccggacgccagcgagtggaacatctcggtcgcactctcattggttccagggggccggaagtgcgtgcgtccagcggaagtgctcccccggcgcggtccgccaggccagtgccctcaggtaggcggggcccctggccctaaactctgggactggcgggcggtcaggcggcacagggggaatcccgggggcctaaggaggttgtcccagtttttgtcaggtaggcccggaaggagtttcggggaccatgggtttacggctacctctggtggcaattggggcctgttggagcccggccgccgcgggacctacgtgccggacttcaagttcccgcgtggggtgggatttgctgcggtggccggagctgattcttcacccagtcctgttggttctgggccaaaccctcctcactttcaaggaagaggcgtgctctccgcccttaccttttccaagcctctgggtttgacgccatccctcaaggcgtgtccggatgcgggattttcctcaaagaccctctcggcctcgctaggaagaaactcagaaaggctgcggtaggcgcagtcgagggggaaagtgcccccgcccttgatgtctcaggctgctcaagtggaagttatctggactgccttagggcaagtttatatatagcaaataaaattacttgttaatggtttccttttttccagcatctccaccccgaggtggtttgaactttgagccttttgtagtcctgatgaataatttcattttcctcaagtttatgacactcggaacgtcaagaactggaggtttgtgcaatttgagaccggtcggcactgtgcagagatcagagtactaagagacaggtgagcatgaatgaggaccctccgctccagatatagtgtctgagagcggtttctg

SEQ ID NO: 329 - DNA, 2300 bp, Homo sapien
tacacccagctcaaataatttttttaaagtatattttccagttttgttttgtatggcactgactctgtcactgtgaattccattttacccaaaacattgacacttccacacatatttatgaatcaaaattgaaagataattgcattaataggtacttttatttttttcttcttttgttttgttttgttttgtttttttaagacggagttgctctgtcacccaggctgcagtgcagcgtcgtgatcttggctcactgcagcattcacctcctgagttcaagcgattctcatgcctcagcctcctgagtagctaagattacaggcatggaccaccacgcctggttaatttttgtatttttagtagagatggggtttcaccatgttggccgggctggttttgaattcctgaccttaagtgatctgcccgccttggcctcccaaagtgctgggattacaggcatgagccactgcacccggccgacttttgcaaaggaaattctttgaatctgaagtgtcttgcaaggtagaggctattgcaaccatttcaactagtgtgtcaacagtcttctctaaggtgggctagaaaaatggtttcatattcaaattgtaactctgaaaaacaactgatggtaataaagagattccataatcagacagaactaagtgaaacaattagttttggtagagttctgtggtaatcatagttagaagtttatcctgggtagctgaaatataactaacttcagactccaggcctgtcggtggcttgtgccaatcaccacaacactttgaggggccaaggccagaggatcgcttgagcccaggagttcaaggctgcagtgagctatgatcacaccactgcactccagcctgggcaacacagctcttgttttttaacaagacattgttacttaaaaaaaaactgccctgatgaaacaattctaccatgaacactgatgttgttctgtggactacttcaggaagatggactaagaacatcattaaatagttccaaccagtttctgggtaattttatttttaattttttgttatgagggtcttgctatgttgcccagcctgggctcaaatgatcctcccaccgcgggctctcaaagtgctgggtttacaggtgtcacaccgcgacagccaagggtaacttttttttatttttatttttgagatggagtctcgaactgtcgccccggctggagtgcaatggcgcgatctcggctcactgtaacctccgcctccaggattcaagcgattctcctgcctcagcctcccgagtagctgagattacaggcgcccaccaccacgcccagctaattttttgtatttttagtagagacggggtttcactatgttggccaggctggtctcgaactcctgacctcgtgatccgcctgcctcggcctcccaaagtgctgggattacaggcgtgagccaccgcgcccgtccaagggtaactttttaagagctgccctacagctcattacctccttctcaaggagcatgagtgtcaaaccacctccagcaaagtagatgtagtcttttacagatttggaaagaaggatttaggaggaaagggaagtcgttcggaatgaaggatttcctcctctgacgcccagccgtcccccgttaagcctaaaggtgccagacctcaagactcttctagaaagagatttttcctttccaaggtgaatccatctgttccgaaggtcagaagctattttaccgaagttttccgttccactgaaaaaattaagggtcaatcaaagctccttgccccaaacctgaatatgagcttgcctcgggtcatattcgactctaaagactccaccacaccatcctggactcccctatatctaggacaaaaagcgaccagtttctcaggggctccttgcggggagcttaccgcgccctcactgtccgccggcccgagtgctaccggagatcaccagcggcccggacgccagcgagtggaacatctcggtcgcactctcattggttccagggggccggaagtgcgtgcgtccagcggaagtgctcccccggcgcggtccgccaggccagtgccctcaggtaggcggggcccctggccctaaactctgggactggcgggcggtcaggcggcacagggggaatcccgggggcctaaggaggttgtcccagtttttgtcaggtaggcccggaaggagtttcggggaccatgggtttacggctacctctggtggcaattggggcctgttggagcccggccgccgcgggacctacgtgccggacttcaagttcccgcgtggg

SEQ ID NO: 330 - DNA, 2300 bp, Homo sapien
gagaaattggaggctagtgactgtgatcaccagcagaactcacctactctagaaaggcctggaaggaagaggaagtggactgaaacacaagattctagtcaaaagaaatccctagagccaaaaacaaaaggtttgtatgttttagcaggacccacggactagagttgataagattctgtagctgagcaaacccctgtgtatttttttttttttagatggagtctcgctctatcacccaggctggagtgcagtggcatgatctcagctcactgcaagctctgcctcctgggttcatgccattctcctgcctcagcctcctgagcagctgggactacaggtgcctgccaccacgcctgtctaatttgtttgtatttttagtagagacggggttgcaccatgttagccaggatggtcttgatctcctgacctcatgatccgcccacctcggcctcccaaagtgctgggattacaggcgtgagccacagcgcctgggccttattttttttgttttatagagatggggtctcactattttggccaggttggtcttgaactcctggccccaagcagtcctcctgccttggcctcccaaagtgttaggattacaggtgtcagccactatgcctggcctttattttcattttatattgcatacttgtgggtgtctggaaaatgccccttgttagttgcatgaagtgaaggagaataaaaggcacttggagcttatttctcctgcagtggtctctaatctttgaggtgtcctgggtctcttttgggaatctgattctcataaaataaaagctcataaaaactgtgaactgtcattctttttttttttttgagacagagttttgctcttgttgcccaggctggagtgcgatggcacaatctcggcttactgcaacctctgcctcccgagttcaagtgattctcctgcctcagcctctcaagtatctggggttacaggcgtgcgccaccacacccggctaattttgtatttttagtagaaacggtatttcaccatgttggtcaggctggtctcaaactcctgacctcaagtgatctacccgcctcggcctcccagagtgctgggattacaggctagagccaccgcactcggcctaagccctcatccttgaaaagcacatacgtatcttcattttgatacagtgggttattagaaaagtaaacccctttccacttggaggaggtagaggggaagaaaaagcataccccaaagctctgttttattcttcccagctgtgccaaaggtcaagctgctgtgtggggcagatttattggagtcctttgctgttcccaatttgtggaagagtgaagacatcacccaaatcgtggccaactatgggctcatatgtgttactcgggctggaaatgatgctcagaagtttatctatgaatcggatgtgctgtggaaacaccggagcaacattcacgtggtgaatgaatggatcgctaatgacatctcatccacaaaaatccggagagccctcagaaggggccagagcattcgctacttggtaccagatcttgtccaagaatacattgaaaagcataatttgtacagctctgagagtgaagacaggaatgctggggtcatcctggcccctttgcagagaaacactgcagaagctaagacataggaattctacagcatgatatttcagacttcccatttggggatctgaaacaatctgggagttaataactggggaaagaagttgtgatctgttgcctaaactaaagcttaaaagtttagtaaaaatcgtctgggcacagtggctcacgcctgtaatcccagcactttgggaggctgaggcaggtggatcacggggtcaagagatcgagaccatcctggccaatatggtgaaaccccatctctactaaaaatacaaaaattagctgtgtgtggtggcacgtgcctgtagtcccagctacttgggaggctgaggcaggagaatcacttgaccccaggtggtggaggttgcagtgagccaagattgcaccattgcactccagcctggcgacagagcaagactctgtctcaaaaaaaaaaaaaaatttagtaaaaatcaatggtaagctaaaataagtttttgtttgtttatttgtttttgagatggagtctctactaaaaatacaaaaaattagccaggcatggtgccgcataactataatcccagctacttgggaggctgaggcaggagaatcgcttgaacccgggaggcacaggttccagtgagccaaggttgtgccactgcactccagcctgggcaaaaaag

SEQ ID NO: 331 - DNA, 2300 bp, Homo sapien
attgacatataaatcttgagctggacacagtggcttacacctgtaatcccagcactttgggaggccaaggttggagggttgcttgagcctaggagtttgagaccaaccgccggcaacacagggatactccatctctataaaaaattaaaaaaattagtcaggcatggtggcacatgcctgtagttgtagctacttagaaggctgaggcaggaagatcacttgaactcaggaggttgaggctacagtgaaccatgatcataccactgcactccagcctaggcaacagagcaagactctatctcaaaaaatagtcagtctgggtgtggtggctcatgcctgtaattccagcactttgggaagcttaggtgggtggatcttttaaggttgggagttcgagacctacctggccaacatggtgaaactccacctcttctaaaatatataaaaattagccaggcatggtggcaggtacctgtaatcccagctactcaggaggctgaggcaggagagttgcttgaacccaagaggcggaggttgcagtgagccaagattgcaccattgcactccagcctaggcgacagagtgagagtctgtctcaaaaaataaaatagaataaaataaaataaaaagaataaatgaaaaaataaataccgcgggtgcggtggctcacacctataatcccagcactttgggaggctgaggcaggcgaatcacgaggtcaggagctcaagaccagcctagccaacatgatgaaacccccatctccactaaaaatacaaaaaattagttgggcatggtgatgggcacctgtgatcccagctactcgggaggctgaggcaggagaatcacttgaacctgggaggcggaggttgcagtgagccgagatggaaccactgccctccagcccggggcgatagagtgagactccctctctgccgggcgcagtggctcaggcctgtaatcccagcactttgggaggccaaggcgggcggatcacaaggtcatgagatcgagaccatcctggctaacacggtgaaaccccgtctctaataaaaatataaaaagttagccgggcgtgttggcgggcgcctgtagtcccagctactcgggaggctgaggcaggagaatggcgtgaaccccggaggcggagcttgcagtgagccgagatctctccactgcactccagcctgggcacagagcgagactccgtctcaaaaaaaaaaaaaaaaagaaaaaagaaagagtgagactctgtctcaaaagaaaaaaaataaaaataaaatcaataagtcagtcttggagccagcatatctaggcggtgtttgtggctaatgttgtaggttagcccatattcccaccccttctcctttgcttttctctgctctgaggctaaatgctgcagactagaatccccaggcccccttgcagttagaagtggcattgatacagttttggctaatgaaatgtacacagaaacctgctgggtaatttcttttcttttttccaactatccagacttataggagatggggaggtttgtgctgcagggatactgacctttggtgctttccctcttccctaccttgaatgtggatgtcctggctgggaacccagctgccagctcatgaccaggaggtaacaagcaggaataaaaggccaccagagtcacagagacgaagctgcggcgttaccgaggtgcgaatcactgtgattcctaggtgcgaatcatcaccagcaatcacttctctcaggactccttgttaagaaaaataaactcctatttattgagaccatgagagttacgttgagaggtatattgttattgaagctgacaatattcaatgccatgagtttgaagatcatccctgggtcattaacatataagcagggaagaaaatgtggcccgaaacagtctgggacatgagaaagcagtaggagaggaagccccaaggaaagggggaagctgccgcgcggtgggcagagccaggagcaccgggctgaggcggccgggagcgcagcggcttctaggggtgagtgggacccacgcggccccacctgctcctcccgcgcgcggccccacccccctgccccgccccgcctggtttataggtcccggcccgagcctccggccgcccgccgggtttgtcccgcgatccccgaccatgcccgccgacctcagcggtacttggaccctgctcagcagcgacaacttcgagggctacatgctggccctaggtaaggcggaggggaggcggcggcggcgcgaggctcgccgtgggtctcgggatcaggcgaaggcg

SEQ ID NO: 332 - DNA, 2300 bp, Homo sapien
aattgataaacaaaatgcgctacagcaatacagtgatacatttggcattaaagaaatgaagtacagatatatgctacaatatgcgtgaaccttgaaaacatatgctaagtgaaggaagccaaaccccaaaggccacacggtgtattgctccactgatgtgaaatgtccagaataggcaaattcaccaagacagaaggtagttatcctgcaggagtcttttttttttgtgacggagtctcgctctgttgcccaggctggagtgcagtggcacgatctcggctccttgcaacttctgcctcccgggttcaagcaattctttgcctcagactcccaagtagctgggattacaggtgcccgccaccacgcccttctaatttttgtattttgtatttcaccatcttggccaggctggtcttaaactccggacctcttgatccacccgccttggcctcccaaagggctgggattacaggcgtgagccactgcgcccagcccgggagtgactgttaatggctttgagggtttctttttgggatgatgaaaatgttctgaaattggacagtgaggatgactgaactgtgaacataataaaaccactgtacaccttaattgggtgaattgtatggtatgtaaattagatggcaataatgaggttaaaaaaagtaaacttttaacatcaatgtcaccaggggttcaagttctggcttacacagaattcctttcctggagagcagataatatgcaaagccagcagtgatttatttttactcacaaattccttacatatttttactcacaaattccttacatatctagtagtcaggttcctattttaagcatgtagcaaatacattgtaactcttaattctggaatgcagtctttatggcttagtgagccatccaatccacttatagtcttcgtcagcggcaaaatctggaatttcatggtactgttactttgatcgctcaacttagatttatattttataaatatatatatacatacatatatatatattttttgagatggagtcgcgctctgtcgcccaggctggagtgcagtggcgcgatctcggctcactgcaagctccgcctcccgggttcacgccattctcctgcctcagcctcccgagtagccgggactacaggcgcccgccgccacatctggctgattttttgtattttttagtagagacggggtttcaccgtgttagccaggatggtctcgatctcctgacctcgtgatccgcccgcctcggcctcccaaagtgctgggattacaggcgtgagccaccgcgcccggccaaatatttgtattcttgtgcaccggaggatggttttcccccactgactccaaacgtcttccttgcatttgctgtgtacaattcagtgatttgggtctctcatccatttatactttcaaattttaccaatactttttgaacacacttaaaaaaaaaaaaacccaggaagtatctctaaaaggccaaggtaaaataaaatgaatgggagttcttgtgttcgagttttcttccaactgggctttcctggaggaggtggaagagtgtgtggcagatgtttcagaaaatgagcgctcaatacggtagatcacgctcccggggtcaaggagacgttttccgttttcttttccctcgcttaggcggcgggcgcgcacagtccagtgggagcgatgaggtgtttctaggcccccaagtcacagaaaagcaggcgattgggaacaacggaggcgcggcgggcccccgggccgcgggccagcgccaccttctggtggatcttccccgacgcgagtctgggagtcgtccctccccttgccagcctacctggctcaggcccgccgcgcccgcagccccagcgcggtcgccgtggcaacgccccgcccagccgccagcctccctttgcccctccccacgtccggcgcggctgcgcgggacggggtgggacggaggcggggagaggacgcaggcgagaggaactcggcggcgcggcgcccgcggcctattggctgccacgtcccggcgccagaagccccgcctccctgacgggggtcacgtgatccctttcaaagatggccgccctgttgttttgatgaataatacttggtggggcgagggggaaagagtaggggtggaggggtaggaggatttactcttccagcgagagctacgcgcatcccatcctccccctcccccctacccgggctccggcgtggaggcggggcgtggccggcctgctttgggaggggaggggcttcccttacagtgctgggctctgccaggacg

SEQ ID NO: 333 - DNA, 2300 bp, Homo sapien
tggacagtgaggatgactgaactgtgaacataataaaaccactgtacaccttaattgggtgaattgtatggtatgtaaattagatggcaataatgaggttaaaaaaagtaaacttttaacatcaatgtcaccaggggttcaagttctggcttacacagaattcctttcctggagagcagataatatgcaaagccagcagtgatttatttttactcacaaattccttacatatttttactcacaaattccttacatatctagtagtcaggttcctattttaagcatgtagcaaatacattgtaactcttaattctggaatgcagtctttatggcttagtgagccatccaatccacttatagtcttcgtcagcggcaaaatctggaatttcatggtactgttactttgatcgctcaacttagatttatattttataaatatatatatacatacatatatatatattttttgagatggagtcgcgctctgtcgcccaggctggagtgcagtggcgcgatctcggctcactgcaagctccgcctcccgggttcacgccattctcctgcctcagcctcccgagtagccgggactacaggcgcccgccgccacatctggctgattttttgtattttttagtagagacggggtttcaccgtgttagccaggatggtctcgatctcctgacctcgtgatccgcccgcctcggcctcccaaagtgctgggattacaggcgtgagccaccgcgcccggccaaatatttgtattcttgtgcaccggaggatggttttcccccactgactccaaacgtcttccttgcatttgctgtgtacaattcagtgatttgggtctctcatccatttatactttcaaattttaccaatactttttgaacacacttaaaaaaaaaaaaacccaggaagtatctctaaaaggccaaggtaaaataaaatgaatgggagttcttgtgttcgagttttcttccaactgggctttcctggaggaggtggaagagtgtgtggcagatgtttcagaaaatgagcgctcaatacggtagatcacgctcccggggtcaaggagacgttttccgttttcttttccctcgcttaggcggcgggcgcgcacagtccagtgggagcgatgaggtgtttctaggcccccaagtcacagaaaagcaggcgattgggaacaacggaggcgcggcgggcccccgggccgcgggccagcgccaccttctggtggatcttccccgacgcgagtctgggagtcgtccctccccttgccagcctacctggctcaggcccgccgcgcccgcagccccagcgcggtcgccgtggcaacgccccgcccagccgccagcctccctttgcccctccccacgtccggcgcggctgcgcgggacggggtgggacggaggcggggagaggacgcaggcgagaggaactcggcggcgcggcgcccgcggcctattggctgccacgtcccggcgccagaagccccgcctccctgacgggggtcacgtgatccctttcaaagatggccgccctgttgttttgatgaataatacttggtggggcgagggggaaagagtaggggtggaggggtaggaggatttactcttccagcgagagctacgcgcatcccatcctccccctcccccctacccgggctccggcgtggaggcggggcgtggccggcctgctttgggaggggaggggcttcccttacagtgctgggctctgccaggacggctgtggggtcgccttacctcggggtatccactctgcagtcgaccagttcccgccaggagcaaagggtaggaaggagagcaggatctgctgtaggaacgcagctaccgcgccactatcacgaagaaacagcaggctcggggcacgagacgaactggagaccgcgctgcctagctgggtaacctgggaagcagagggtaataagtggcgccttaagacaaccctgtagcagcagcagtggcggccaaaggaggctgctcagggaacaagcggctgtagtagtctgtggggcgactggagtgaccgaagccaaggcagtttagtgcctctcgtgttcttattttttaacctctgactatgcaattctgaaacctcccccattcgggggaccagacagcctgatagacaccttccactctccttcctcccgccgtggtctcgagaacagaaggatctctccttaacgcctttcaccattaagaggaaagcgatggaggagctgagcgctgatgaggtgaggaggttgggggacaccttgagggattagttggcaactc

SEQ ID NO: 334 - DNA, 2300 bp, Homo sapien
gcagtgagccaagactgtgccattgcactccagtctgggtgacagagcgagactccgtctcaatatagatagatagatagatagatagatagatagatagatagatagatagatagaaaggaggaaatattggaacatttaattgaattttttaacaggttatagatgcttggtaatcaagaacatattagttgctgagatgtgcagaatttaattgagtagagcaacgactcctggagagttcttcaacaggctccaaatgtatgggttttgttgaattactgggttttgttgaattactgggggtcctgtcagagtattagagttcaccaaactcctcttacttctggagaattcagctgtattactttatggttagacttgtcaaagaacaggtcaacactctggctgaattctagacttttatatgcaaaaaagcttttccctggggaaggaatgaaatttggacattcagttctagcaccttatttgacatacttcccactcttagattctcttaaacttatatttctgattttgttttttttcttatagatatttatccccattttacaaggcctggctcttgctgccaaagagtgctccctcgacagtgactactttaaataccccctcatggtaaaactttgttctttttctttaactcattcaatagatgtttttctttcagattattttgacatatacttttctttcaggtccatgagatcaaccttgttttcaaatttaaaacatgaaatcactgtgttggccatgcagagtgtttggtgtgcagtgagatgcatcagtgaagacagttagcagcctggtacatcttccacctatccaagtcctagacaggagttaaatgcacttattacaatgtactttgtatagcttatgaaaaagataacttatctcctagcaatgagcataccatagttgggatgaaattttgttacttaaaaaaaaaaaacctattaaaaatgcaaataaaaaaggcaaagctgtacatactaagaaaatgaatacaattttatctttatgtgtttactttgtgcagaaaatctcagtgtagctctcttgttcaccctccctgtttcctaaggtcatatttacttgggaagtagaaatctgcttagctctttaacgcacttagagcaggcatacattgtggacagaagcttcagctagattcccatggggaggcttgaatgttgtgaaaatgctgaaactagaatgaaaattagaagctcctttctgttctgaattcgcttatttgaaattttgggagaaaagtattttgaagtgttactgaatattttcgttgcagaagtgtaaaggaaaaaatatcaaaatgaaattagtttattctatgtataaattaagtcttatgtaaattgagaccatggttgtttttcttactgtatttatttcttttacttattccactgattggattccattataccatgaattcattactgacgatctgttctgtgctagacactggtgatacagaagctaggaagacaaggtccctctcctcaaggcactcataatctactgcaaaaataagagctacagcgcaacagttgaacagatactgtgataaatgttaaaacagagctgtacacaaagggtgtatttatctatttaaaaaattcaaacctgtcatggcactaaaaggctacaagaatgctgggaaattagaaggtgaaaccagaattcctactttaaaaaataattttaagtggatttatgccagagctctttccattgtacatgttattggggctcctggtaaaattatttgaatccttatgtattgttctccctgtggcagataaaaggaagtggaataatctgattgtttgagttcagtgatgaaatattttagtgaacactaattatcaccatattatgtagatgttccttcatgggactgttggcttttgggttgtggtgtgaattagcttgatgtttcagtgaggagcttttagcatctgatatcaccaaaatgtccttttgttcaaaagacagaggcctccattgtggtagacagtgatttcattttgtgccattattgatgcttgcataataacgaggacacagtgagtgagagggtacaataatgagaggcaggaagcggaagactgttgaagctaaaatcagaaatcattgtgatcattctctaggtcagtggatcctgctgtgccatacgttggaatcaccttggaatcagctggggatctttaaaggtgtttctgcctggctccccaccccagaccttgtgattt

SEQ ID NO: 335 - DNA, 2300 bp, Homo sapien
attctttttagattgtgctccattgagagctcaagcaatacagccacccaggttttcgtaactctccatggcgctcaccacagtatttacgcaaggaggtccacgctatgatgaagtggtgtctactgttgaattgatgagttcctctttattaacctactatagtttcattttactcttagccgtcaggaagctaagagctgagttctgtgctcagtggcaacatatttccttgactatggatttttaaaatattgtttttctggccgggcgcggtggctcattcctgtaatcccagcactttgagaggctgagacaggtggatcacctgaggtcaggagttcaagaccaacctgaccaacatagtgaaacaccgtctctactaaaaatacaaaaattagccgggcgtggtggcaggcacctgtaatcccagctactcgggaggctgaggcaggagaatcgcttgaacctgggaggcggaggttgcagagatttgacatcgtgccactgagctcagcctgggcgagagtaaaactctgtctcaaaacaaaacaaaaaaatttttctttctaggcatgcctctcattcaaacagcttttaaaaagtctcttgcttgtttcattattatgaattttacgcctattttaaagctatacggtttcactgctgtatgctttagtgtaagctatgtcaaatccttttgcaggtaggtggagcttaaattctataaaatgagacgtgatcaataaaagcggatgaagagtctgaggacttgagtggtggtggagattttccagaattattagtgtagaaaattaatttcgatgttttagtgcatatgcttgtacataataccttttactcacaataatactgtatttaattcaggggaagacatgtgattttactttcaatgtctgctagtaaataaaaataattcacaaccttataaagtaatagtgctcggcctgggcctgataattgaatatattatcactgaagattatattttgttaagtactgaattgaacagtttctgaacagtgagatttttctttccagctgaatctaaatctgattttaaagaaatcactgctcgtgcttttgtgtcctccgggtttctaacttccactctccctccttcaagggcatctcccagaagggggctgggctcgttaactcagggacggtgcaaagcgtttgttcctctcctcacagcccttccgcggtctcccaaggagacaagtggaatgcccaccaagtcatgcttttccattactcattccgccttctctcccgaggtggcgcgtgggaggtgttttgctcgggttctgtaagaataggccaggcagcttcccgcgggatgcgctcatcccctctcggggttccgctcccaccgcgccgcgttcggccggttccgcctgcgagatgttttccgacggacaatgattccactctcggcgcctcccatgttgatcccagctcctctgcgggcgtcaggacccctgggccccgccccgctccactcagtcaatcttttgtccccgtataaggcggattatcggggtggctgggggcggctgattccgacgaatgcccttgggggtcacccgggagggaactccgggctccggctttggccagcccgcacccctggttgagccggcccgagggccaccagggggcgctcgatgttcctgcagccccccgcagcagccccactccccggctcaccctacgattggctggccgccccgagctctgtgctgtgattggtcacagcccgtgtccgtcgcgggcgccggggcggatacgaggtgacgcgcagaggcccagctcggggcggtgtcccgcgccggcgactgcgggcggagtttcgcgagggccgaagcggggcagtgtgacggcagcggtcctgggaggcgcccgcgcgcgtcggagcagctccccgtcctccgcagccgtcaccgccggccgtcgccgcgccctggcctcccgcactcgcgcactcctgtccgccgcccaccgcccacctcccacctcgatgcggtgccgggctgctgcgtgatggggctgcggagcggcgccctgcggctcgcggcggccgctgctcgcgctgaggtgcgtcggtgcccggccccccgcgcccccgcgcgccgcggctcctgttgacccggtccgcccgtcggtctgcagcgcggctgaggtaaggcggcggggctggccgcggttggcgccgcggtcgcggggttggggagggggccgcttccgcggggaggagcggccgggccggggtccgg

SEQ ID NO: 336 - DNA, 2300 bp, Homo sapien
tgtacataataccttttactcacaataatactgtatttaattcaggggaagacatgtgattttactttcaatgtctgctagtaaataaaaataattcacaaccttataaagtaatagtgctcggcctgggcctgataattgaatatattatcactgaagattatattttgttaagtactgaattgaacagtttctgaacagtgagatttttctttccagctgaatctaaatctgattttaaagaaatcactgctcgtgcttttgtgtcctccgggtttctaacttccactctccctccttcaagggcatctcccagaagggggctgggctcgttaactcagggacggtgcaaagcgtttgttcctctcctcacagcccttccgcggtctcccaaggagacaagtggaatgcccaccaagtcatgcttttccattactcattccgccttctctcccgaggtggcgcgtgggaggtgttttgctcgggttctgtaagaataggccaggcagcttcccgcgggatgcgctcatcccctctcggggttccgctcccaccgcgccgcgttcggccggttccgcctgcgagatgttttccgacggacaatgattccactctcggcgcctcccatgttgatcccagctcctctgcgggcgtcaggacccctgggccccgccccgctccactcagtcaatcttttgtccccgtataaggcggattatcggggtggctgggggcggctgattccgacgaatgcccttgggggtcacccgggagggaactccgggctccggctttggccagcccgcacccctggttgagccggcccgagggccaccagggggcgctcgatgttcctgcagccccccgcagcagccccactccccggctcaccctacgattggctggccgccccgagctctgtgctgtgattggtcacagcccgtgtccgtcgcgggcgccggggcggatacgaggtgacgcgcagaggcccagctcggggcggtgtcccgcgccggcgactgcgggcggagtttcgcgagggccgaagcggggcagtgtgacggcagcggtcctgggaggcgcccgcgcgcgtcggagcagctccccgtcctccgcagccgtcaccgccggccgtcgccgcgccctggcctcccgcactcgcgcactcctgtccgccgcccaccgcccacctcccacctcgatgcggtgccgggctgctgcgtgatggggctgcggagcggcgccctgcggctcgcggcggccgctgctcgcgctgaggtgcgtcggtgcccggccccccgcgcccccgcgcgccgcggctcctgttgacccggtccgcccgtcggtctgcagcgcggctgaggtaaggcggcggggctggccgcggttggcgccgcggtcgcggggttggggagggggccgcttccgcggggaggagcggccgggccggggtccgggcggggtctgaggggaggtagcgcgggacgggcgccgggtgcgggagcctcgccctcgggggaggggacccctccctaggccagcagcgagtcccgggccggcgtccagcggtcggctggggcccccgcagtgccctgcaccggccctccgtttcccccgcgctgccaggccccggctgtgcccagcgctctccagacccgccgctgcctggccgttccctgggctccgcgcacgttgcagcccggggggcggctgtgcttcgtttgaagccatcgtttctcattttccctctcccctttcctcctttgtggtgggcatcgggcttcggctgggaatgtggttatgccctttgccagatggcgataggaaaggtcatcgcttggcgctgggggagccgagggctcgaggcctggaaagaggggtgcgataggaagggagggggcttgttggatgctggccaggtgtgaggaaggctggtgtggtctcggcattcagccgactgggattactcgggcagccatattgggaggatgatctgacaaatcctttaggagccaagtccagttgttggaaggcaccgagtgacagccctggcagctttcagggtgactggccagaccagaagccaagttgtgggggttgggaggctgcttgagcaagctagtcattgttcatgcaacacaaaacattcccgcccctaacgccagaatggagcttccagatccctttttttttttttccttgattgctaaatgagcttccaaggtaaactgccttcaagattccattcttgttggggtgaaattccgtgtttctctattcatcttctgcgtccagtgcgg

SEQ ID NO: 337 - DNA, 2300 bp, Homo sapien
ttctgtttcatacaactctgtttaaggactattggatcaaagactaaaagcccaaagaacagtccagctattgcaagtatcctaggtatgtggtagtaaggacatggattgaggtaatatcagtgggaatgagaggaagggagggatagaataaagcaactttatatcttagaagtttccatatggtattttgtgaataatgttggtaataatacaaggtttcaaagagtagtgacaaagatgactccaacatttatggtatcggggcctgggagaatactgttgatagggaagattggcagagattgctagtttaggggagaagataatggttttttggacatgaggagagttaagatgatggctgtatttcagagggaactcggggaggttgcaatgtgttttatgtcttgctttttctgaatgtgtcattcattctcttggcatagtactcaactagtgaatataagtcatgctccattgattgggaaggttaataaatgctaagttttcatttgatacatgtgatcataaaaatatttgatatttaaataaagaaccatcagtttaaaataaaatggcaaacagactagaaaaaacattgtagcaaatagaaaaagattaatataaaaatatgtaaacatttaaaaaacaaaaaaatcagtaaactaggcaaaggacttaaacagataattctcacaactgggaaatgtatgtcattcatttcatcaacatttactgagctcttatgtcaggtactgttgtaagtgctagcaaacgagacaggagatctctgagcattctggtggtagagtgagagacagacagtgtgagagatggacaatagacatgctccagaaaacaagaatttcaaatagcgatgatgctattaagaaaattaggggccagacagccgggtgcggtggctcatgcctgtaatcccagcactttgggaggctgaggcgggtggatcacgaggtcaggagatcgagaccatcctggctaacatggtgaaaccccatctctactaaaaaaaaaatacaaaaaattagccaggcgtggtggcaggcgcctgtagccccagctactcaggaggctgaggcaggagaatggcgtgaacctgggaggcggagtttgcagtgagccgagatcgcgccactgcactccatccagcctcctgggtgatggagtgagactccgtctcaaaaaaaaaaaaaaaaaaaaaaaaaaaagaaaagaaaattaggggccagacgtggtggctcacacctataatcccagcactttgggaggctgagtcaggagtttgagaacagactgggcaacataacaagactttgtctctacaaataaaataaaatattagttgggtgtgttggtgtgtgcctgtagtcgcagctgttttggaggctgaggtgggaggatcacttgagcccaggagttcaaggttacagtgagctatgattgtgccactgtacagtagcctggacgggtagggcattgaggtagagagtgactttggtttttatgttatttatttatcctgttctcgggaacacatcggttatggtgttgtgtagttggaggttagcattcctaattatctggaaaaaatattggtcagatttaagttctgttgtggttcctgataattggattcgtaattacttttcttttttagatttttcctttgtttggttattcttgaaaaagattttatattggatagagtgtagagtttttcctaactagaaaaattggttgttttttttttctttctttttttttttgagacggagtctcactctgtgacccaggctggagtgcagtggtgcgatctcagctcactgcaacctccacctcctgggttcaagtgattctcctgcctcagcctcctgaatagctgggattacaggtgtgtgccaccacacctggttaatttttgtatttttaatagagacggggtttcaccgtgttggctaggctggtcttgatctcctgacctcaagtgatccacccatctcggcctcccaaagtgctgggattacaggcgtgagccaccgcacgcggccggttgtttcttacagaagttacttacttggattcttttcacacagtagtgttggctttgttctgttgggagggaaactattcctctaaaaaatgttcacatttttcctattacttcattcagtagtgaaatgtaatgatttgactctgccatgagtcagtggcatatctgagggatctttgaagttaaaggaaattggccaggcgcagtgactcacgcttataatccc

SEQ ID NO: 338 - DNA, 2300 bp, Homo sapien
gggcgtggctagagtggtgaggtcatccacagcggcctgagcagcaagccttcttgtctgtgttacagtgggcctagtgaatgtgggttcgtctgccaataaaatcttccatcagtttgaatgcaatgagttgttttagtgtttctgtcctagaaaaataagcatgcttaataagagttttattaaagtgaatgcattgtcctttaaaccctaagatacttatgttgctcgattgcaaataacataaaaaatatcaaataccttctgtagctaaattaagatttagatctgttttccttgcaactgatagtataattaacacattaatgccctttacaactgtattcctacgtggagtaagaaaacagacccttccctctcttacgtgaaatttcattcaaactctattccaaagtcattatcctcatcacaatagctaatattcactgagagtttattttgtgttagtcactgttctgagagtttttgtgtaatttaatctttacctttataccatagattaagataatccctgtgttagctgagatgactgaagcatagagcaattaaagtcactcatcaggctgggcgcagtggctcatacctgtcccggcactctgggaggccgaggcaggtggatcacttgaggtcaggagtttgtgaccagcctggccaacatggtgaaatcccatctgagacacgagaattgcttgaacccaggatgggggggttgcagtgagttgagattgtgccactgcactccagcctgggcaagaaagcgagactcccatctcaaaaaaaataaaaaagtaataataaaaataaagttactcatcagtgttacaagaggcagagataggacttaagctcagagaaatttagctctggtattcaggatattcactactacatgaaactgtctctcattctcttgctaaccatgtctgctctctaaagtaagagaggaaaggagaacttcaaagatggaacaagcaaacacaaaatatgccatcttctttttcatgttggtataaatataagcaagcatgtatctgataaactttgatcagctgctgtgcacaaggattgtgcctgacaactggggaatgcagatgaatctcagatgctcccagtgagcttcgaattacgataggggaaataaaatgcatacataaacaccagtcatgcaaagatgaacatgagaaaatattcactaaatgcagtgggagtggagaaagggaaagttatttctattaatggaaagctattttaagttactttttgttggggaggatagttgggtggagaaaggggataggaagctccctgaaggatgtagtataagcaagaaaaggtgtgtcaaacttggcattgtgcctggcacataggccatagtcagtacatgcatggatgtgctggaagggccttccaggcagggttgcagcctgggccagtccttggcacagctgaggagagagcaggtgaaaggagcagcaggtgagtgagtgagccagaatagtaagtgtgggaaggacaacaggggccaagatcagttgaggcaaagtatggaagatcttgaatacctgaagctgggaaaagttactttagaattaaaaacaacataggggatcccctgttttttgttgcaagagtcctgcatagtaaaatacccagcagatactggacactcagcagcagtaaaattgggccaggcatagtggctcatgcctgtaatccagcactttgggagctgaggcagaaggatcagttcagcacatgagttcaagaccagtctgggaaacatagtgagatactgtctctacaaaaaattgttttaaattagccaggcatggtggtgcatgtctgtagtcctagctactccggaggctgaggcaggaggattgcttgagcccgggagggtgaggccgcatgagccttgtttgcgtgctacagagcaagaccttgcctcaaaaaaaaaaaaaaaaacccaaaatacgtactaaagttctgattgaagcaaaaatgtgtattttcttgtaatcttttcctaatcttgcttggctttagattgcagtggagatcactgaatcatttgtggattacatcaaaaccaagcctattgtatttgaagtctttgggcattatcagcagcacccacttcatctgcaaggacaggagcttaacaggtttggaccagataagcaaacatttttgatggtattgttttgatttttagtttctcaattgctggaaaggaagaaatcttttgagggattaagataactaaataagtattctat

SEQ ID NO: 339 - DNA, 2300 bp, Homo sapien
ataaaataaaataaaataaagtaataaaataagacaagaagtaagaaacaatagggggccttatctacaaactctctggtcttctatttgcagattttgataatcactctgttcctaaatctttctgctttgcatgtaacttcccataactgtcaggggactaggcatttctttgcatagtaaatttattctgtatgttcagtgatcttgttttgatttttctttatttctgtcctttttcctcattgcctattcgccaaattcccaccccaccctgtgctcactctccaccctctgtattccccatcttcatctgccttcagaccatgagagaaagattgagctgattcggtttctcgtgtctggctatgtgaatgtgcatatgttggacacattttctgagcacgccagtgtgcttgcatcctccgctattgccaccttccaggatgaggctgacccattgccgccttttctctttctgccagttcccagctgccagagcgagagggtacccaaacgagatggttagtagctgaattagctccaccttagatgtagaaccatcctcaggcgcttgtcctgaagcctggctctctgcatatgaaacactgacatttccctttgcaacttgagctgaatgtagagctcagcacattttcaaggttgtatcacattttcttcctagagatttgggaagcagcttctctacatgtgcctctttcacatcaccatcgcagtgggggaggcctttgcatttgtttttatggattctttgcaatagtatttttaattttgaagattttactagtagttggtttgttagaatacttctggttttgctttctgacccttagatgactgccaggatcacttaccctattttctttctgactagcatcaccaactcatgtgaaactcagctgggctgaatactgctgatagggtacacgtgtgaatagtgctaaatgattcataaagctcctttatgtacattatgttagtggatcttcatgattgcttttcaagatagtaggctaaatattagggtctacagtttataaatgaggagacagactcccagaggttaagcagcttaactaaagtcacatagcatcagtacagttaagaatatggagtttaaatctggccgggtatggtggctcgcacctgtaatcccagcatttgggaggctgagtcggacagattgcttgagctcaggagttagagaccagcctgggcaacatggcgaaaccctgtctctacaaaaaaatgcaaaaattagccgggcgcggtggtgcacgcctttggtctcagctactcaggaagctgaggtgggaggatggtttgagcccagagggcagaggttgcagtgagccgagatcacgccataaaaaagaaaaaaaagcatatggaatttaaatctgaagaaaatgtgtgacataagatcatttacagaatcctgtatttataaatgataccagtagttggtttccaactttgtcctcacattggtatcacctgggaaactttacccctcatggaggaagaactttgtctttcccttagagattgtgatttaattgatctgggatgtgtcctggactttaaggtccccaggtgctcctatgtgcagggaggtttgggaaccactggggtggaggatgggtcttttcttcaggacatcagctttgattgagcccctgtgacgtgaggctttccaagcattgtctctcccacgttagtcccatgctttacgtgtcacacaatctgagattctggaattggaaggtttcatgagcacatttattctacacaaaagctgttttctcatcattagagacagtttgttgagaaaaaagatactgatttctttattttccttgttctctgaatgtagagataactaataacttacaaagtttatattggtgtttctctgggtcttttgcattgaaatctttcctctgactcttgctgcctttcccaagtatgtctttaaagactgacattagagaagcttgtatttttgctgagtagtcttggaccagattttgacatactctaaaaacttttaaaagttccagccaccaagttaaacacgatgagcaaaaccagccttggccagagcatgagcaagtatgacctcctggtttggtttgagatcagtgaactggagcctacaggagagtaagtccaacttaataaatttttaaataaggcaaaatgtttcaaattaggaaatgcaattttgaatcttcttgtatttgggttcatgaatcattgtcactgtcaaattccag

SEQ ID NO: 340 - DNA, 2300 bp, Homo sapien
tattcctgggttctgtttactcaaaaaatcacatgactcattgcagcttcagctttagtagcctaatcaccattgtttgaagaatgtgtgatttttaagaaaatgtcacctcttgtttttgtagttgtggacagagtgtaatagtggttaatagcccagacccaagacccagcctgtcggttcaaatccctgtgctgccacttacttcctctatgtccttggagaaactctctttgcctcagtttcctcacctatcaggagaaacaacatttacctcagataaaaataaatgcatctctaaggagtactacctactcttgcacatattatccattgggtggctgttgaaataattggtggagctaaaatccttcagttctcacaactgggactcgctttccaaatacgttcgtgtatagactctagtcacagtactctgcctgcacttcatcagcacctaccctgtctgctttcagctggatcattgcatccagccggctgtcatcaccaaggatgtgtgcatggtcttctactcccgagatgccaagatctcaccaccacgctctctgcgtagcctctttggcagcggctactcaaagtcaccagattcgtaagtttttcacacaagttagcttccagtgtgtttgttcagtacaacagaatcattagtccttaagtattctcggcttactgtctcacggttagtttacagtttatgaaccattttggtaactgacacctggaatgtactgacttgcatgctgacatttaataaaatgttgatggatggacgagttatgagggaaggaaggaatattacattgtgaacacgtctaaaacaattttgcaaagactaaatttgcaaagacttttaaatgtcatcatcattatttctaacagagtaccattgaaattttcttctttttaagatttgttatgcatatttaaggcatacaaaatatgtcaggaataatacagtgaaggccatacacagtggctcatgtctgtaatcccagcacgttgggaggctgaggacagagaattgcttaagcctaggagtttgagaccagcctgggcaacacagaccccatctccacagaaaattttaaaattacccaggtgtggtgacacacacctgtagtcccagctactcaggaggctgaggtgggaggatcacttgagcttgggaggttgaggttgcagtgagccatgatagagccactgcactccagcctgggtgaaacagtgagaccctgtctcaaaatttaaaaaaaagaaaagaaaaaggaaaaaaaaaaaaaagaaagaaacaatacaatgaatacctgtgtatcaccgcccagcttaaaaataagtgttactaatacaatagaaggtattatacctcctactactcacaatccccagaagttgttgattatcatttcattctagtcattgtttccctcatatcgtctctcttatagtaagaaaagacaaatttttagttttcacatttatattttaaattttctagtttatcattcaattttattcaccctattgaaataaagtgtttaaaagatagagatgaggtggggcatggtggcttatgcctataatctcagcactttttgatgccaaggtggaaggatcacttgaggccaggagttcaagaccagcctgggcaacataaggagaccctatctctacaaaaaaacttaaaaattagctgggtatagtggtgtatgcctgaagtcccaactactcaggaggctgaggcagaaggatcacattagtccaggagttcgaggctgcagtaagttgtgattacatcactgcactccagcctgggtgacacagggaaaccctatctataaaaaaattaaattgagatgaaagcggactcctctaggaaaaggtatgctacttaggttcaaaataagaaaagagcggtgacaaataagaaatgcctggaattatatttgagtccctgcagagaagacactattttaagtagcagaaattgaaattttcctgtttttgtgctttaagagattaaacaattgttttattttcttcaaataggaatcgagtcactggcatttacgaactcagcttatgcaaaatgtcagacacaggtagtccaggtaagctcttgtggattgaggaggtgatagttatctttgtgtatgtttcaagtatcctgtatttaggctgggcacggtggcacacacctgtaatcccagcgctttgggaggccaaggcgggtggatcacctgagtccaggagttcaagagcagcctgaccaacatggtgaa

SEQ ID NO: 341 - DNA, 2300 bp, Homo sapien
cacacacacacaaaagaaatgaaaacaacaatttgtacatgagttcaaaacagaattatttatttcccaaactagaaacaatccaaatgtctatcaacagataaatggataagcaaatgatgacacaattgcattaatggaataccactcagcaatgaaaaggaacaaaccactcatacctacaacacagatgagcctcagaaacgtgatgctaagtgaaagaagccagaccaaaaaaattatatgctattattccatttctatgaaatttctggaaaaggcaaaaaccatgcaaagtagatcagaggttggctgggggtgagagcagagactgactacaaataggcccaagggaacgttttggggtgatggaagttttctataagtggattatggtgatggctacacaacagtataaattaaaggtcatccaaatgtgtacttacaatgtttgaattgtatgacatgtaaattatctcattaaatctgtattttaaaaaaagaactgtgctgtgaagtttgacatattttaaagtaggatgtcttagccgggcatggtgttgcatgcctgtagtcctagctactcaggaagttgaggctagaagattgctcgacctcaggagttcaaggctgcagtaagctatggtcatgccactgcactccagcctgggcaacagagcaaagacctggtctttataaaaattaaaaaccggccgggcacagtggctcacacctctaatcccagaactttgggaggctgaggtgggtggatcacttgaggttaggagttcgagaccagcctggccaacatggtgaaaccctgtctctactaaaaataaaaacattagctgggcatggtggcacacacctgtagtcccagctacttgggaggctgaggcaggagaatcgcttgaacctgggaggtggaggttgcagtgagcccagatcgcgccactgccctccagcctggagacacagccagactccatctcaacaatgacatcaaaaaaaggccgggcacggtggctcacgccggtaatctcagcactttgggaggccaaggcgggcggatcacgaggtcaggagtttgagaccagcctggccaagatggtgaaaccccatctctactaaaaatacaaaaattagctgggcgtggtggcgggcgcctgtaatcccagctacttgggaggctgaggcaggaaaattgcttgaacccgggaggcggaaggtgcagtgagctgagatcacaccactgcattccagcccgggcgacagtgcgagactccgtctcaaaaaaaacaaaaaaaatctaaaactcaaacttctgaataacaatttcctcctagcaagaagggactcagtaagataagaagcgctgcttggctactttgcaaatgtctggcttaagatggctggttttttgtatctgcctctgcatttaacctggtccatctcgcgggtcacatagcctctacaaaatgagaaggggttcaataccgttaactccgggcctgggtaaaagactcaagtcctgaccccatcatactccaaccaatacataccccgcctgcgctgtctgcgcctgggtctcttcaaccgcagtgagcggtcgcacggctccacatcagggtcgccctgaggctcagccttccccggccccattccgagtgcgcacaggactgaacgagcacgcccggtccctgctccggagcggaggacacgacgcggacccgcacggtgcaccgcagtgacctgaggaaggagcgacgggcgctcgcgccaaaggcgtccgagtgcctggtaaactgtaaagcgcggtcctgcgtgagttgctatggctacagctgcgccaggcggacggcctgcaggaccgaggtgcagctgggacgagcggaaagctctgcgcgtgggcggggagcccggagcctcgccggggcaatgtcatctaggtgctcggcgctccactgatccggcccccgggggtgggcgggcacgtttgcctcggatggtctaacaggcgtcggggagagccaatggtgtggcttcatggctccacccccttccattcgattggccggcgccgaaaagccgggcgtgagcggccgcagtttctggagggagccgctgcgggtctttccctcactcgtcctccgcgcgtcgccgctcttcggttctgctctgtccgccgccatggcccagtgagtgactcgccaggggcagcccggctcggcctcagcgggcggggaactctttgggggtcgagatctccctcgttctctccgacgcctcccaccctgggg

SEQ ID NO: 342 - DNA, 2300 bp, Homo sapien
gaaactcggaaaccagcctaataatcaaatctggtctctatcacttcccagtagtttagccttgggcagagttctttcacctgtttcctcatgtaaaatggggctaacagcacctacttttgagggcagatgagatattaaatgagtgcctagagcgaggacaagtgcaaagtgctcagtgtcatggcaacattgccagcgggcatccctggccttgcttcacgctgtagtgcaacactgacatctagtggccagattatagggctacttcttcatcaagtaagtttcaaccaaatattaatatatccttttttcattattttttttagagacagtgtctccctctgtcaccctggctggaaaacagtggggcaatcacggctcaccatagccttgaactgggctcaagtgatcctcctgccttggtctccctaagtgttgggattacaggcttgaaccaccacacccagttccattttctgtaatgaatacctcaaccctcgacctatttctcagacctttttttttgagacagagtctcgctctgttgcccaggctggagtgctatggtgcgatctcagctcactgcaaccttcacctcccgggttcaagcaatcctcctgccttagcctcccaagtgctaggattacaagcatgtgccaccatgtctggctaatttttgtattttttggtagagacagggtttcatcatgttggccaggctggtcttgaactcctcacctcaagtgatctacctgcctcggcctcccaaagtgcaggaattacaggtatgagccactgctcctagcctctgaggctcttaagtgcctctgtattgcacacatgtcactggaatactgttctttaatcctgggaagcaactgctttaaaatgagggaacacacaggtacaaagcacaggaacttcctgggacgaattgttacaatttctttagctcttatgtgaggcaattgtttaaaacctgacacctgccctgtgaagttggaactactgtccccagttgataaataagggacatgaagcttggccacgtcctgtgacttgcttggggtcaccaggctcaagggagggagctgggctttgcagccacagtgtgctctaaatggggctgctcaccaaccagcgaccggccttctctcctgctgcaggcttggtctcactctggatggcctgccctgcccagccccatgctgcccattaggggaatccgtcagaggcttgccctgcttgggcaggaggactgtccaggtagactgggatgcccacagagagcagtggacagaggcgagaagtgcctgtcatttccagatgccacccactgagcagatgcagaggaaagtcctcagaaggctgattcctccaaaaagctttgatctgggtttcagcccctggcaagcttagggaacttgagggacgtccctgggaaaggaagacaaggagtggctttatgtgctttccttcgttctgaaagtagcacctgcttgtgacaaatgcagaatacagaaatataggcaataaaaaataataaaacaaaaacctagaaatacaggcagggcatggtggctcacacctgtaattccagcactttgggaggctgaggtgggatgattgtttgaagccaggagtttgataccagcctgggcaacatagtgagacctggtctctacaaaaaataaaaattagccaggtgcgctgatgcaggcttgtggtcccagctacttgggaggctgaagtgggaggatcacctgagcccaggaggtggaggttacagtgagtcttggtggtgccactgcactccagcctgggcggcagagtgagaccctgcctctcaaaaaactacaataaaaacaaaccaaaattgggtttgatggtctcacttcatcgttaacataaaggaaaaacagtaacacttgtgtcagaactatactcctgccaatggcaacaacgcagttcctgttccactcgctgaatgaggtcacgggtcgttcactcattgtagtctttgtgacgctattgttggtgatagaatgataaagttgatggtcgattttgcaagatacacctgaggtacaggtgcatggagctcctgataatgtgtactgcgttacatgatctgtaaatcgtgggctacgcatcctctacacccgactggaacacgctttgcacctatgcgcacacgtgtttcgcggagagtggtgctcagcgttgtgccaggcgctgaatcaggctctggggtgcagcagtgacctcggtggtcatgtccccgcgtcgcccggcca

SEQ ID NO: 343 - DNA, 2300 bp, Homo sapien
taggattacaagcatgtgccaccatgtctggctaatttttgtattttttggtagagacagggtttcatcatgttggccaggctggtcttgaactcctcacctcaagtgatctacctgcctcggcctcccaaagtgcaggaattacaggtatgagccactgctcctagcctctgaggctcttaagtgcctctgtattgcacacatgtcactggaatactgttctttaatcctgggaagcaactgctttaaaatgagggaacacacaggtacaaagcacaggaacttcctgggacgaattgttacaatttctttagctcttatgtgaggcaattgtttaaaacctgacacctgccctgtgaagttggaactactgtccccagttgataaataagggacatgaagcttggccacgtcctgtgacttgcttggggtcaccaggctcaagggagggagctgggctttgcagccacagtgtgctctaaatggggctgctcaccaaccagcgaccggccttctctcctgctgcaggcttggtctcactctggatggcctgccctgcccagccccatgctgcccattaggggaatccgtcagaggcttgccctgcttgggcaggaggactgtccaggtagactgggatgcccacagagagcagtggacagaggcgagaagtgcctgtcatttccagatgccacccactgagcagatgcagaggaaagtcctcagaaggctgattcctccaaaaagctttgatctgggtttcagcccctggcaagcttagggaacttgagggacgtccctgggaaaggaagacaaggagtggctttatgtgctttccttcgttctgaaagtagcacctgcttgtgacaaatgcagaatacagaaatataggcaataaaaaataataaaacaaaaacctagaaatacaggcagggcatggtggctcacacctgtaattccagcactttgggaggctgaggtgggatgattgtttgaagccaggagtttgataccagcctgggcaacatagtgagacctggtctctacaaaaaataaaaattagccaggtgcgctgatgcaggcttgtggtcccagctacttgggaggctgaagtgggaggatcacctgagcccaggaggtggaggttacagtgagtcttggtggtgccactgcactccagcctgggcggcagagtgagaccctgcctctcaaaaaactacaataaaaacaaaccaaaattgggtttgatggtctcacttcatcgttaacataaaggaaaaacagtaacacttgtgtcagaactatactcctgccaatggcaacaacgcagttcctgttccactcgctgaatgaggtcacgggtcgttcactcattgtagtctttgtgacgctattgttggtgatagaatgataaagttgatggtcgattttgcaagatacacctgaggtacaggtgcatggagctcctgataatgtgtactgcgttacatgatctgtaaatcgtgggctacgcatcctctacacccgactggaacacgctttgcacctatgcgcacacgtgtttcgcggagagtggtgctcagcgttgtgccaggcgctgaatcaggctctggggtgcagcagtgacctcggtggtcatgtccccgcgtcgcccggccacctccgcagagcaagctgagcagggggctggctggaggccgacggcggaatcccctcaacggagcgccgccagggggcgcgcgaggcagggcggagctgcgtactttgtccgcccgcgcggcccgtcgctcgcgccgcggcgggaaaatccgacctggccgcgcaccaccgccccttctcggccctcctgcgtttgcccagggtcggcccgcagtgatggaggaggaggcggagaccgaggagcagcagcgattctcttaccaacaggtacaggaaaacgggggtcgggctgggctggggcaggacggcgtcgagtttctggacagaaaagtacccggcagcccccggcggcttctcatcggcaccccgcccccgggcgccccccgcggctgcgcatgcgttggcttaactgccgcgggtggtgctgggaggcggtttccgcggcaacgcggctggaccctggcctgcgctggctggggaggaagcggttctaggggagcgtgcgggcgccggggtccggcggcgagaggccaccttctggccttgcgatgaatcctcggtttccccttctcagatggggttttcgtgagggtacaacgtcggcattagacattccaggtgacgcccgtacgcggtgggcg

SEQ ID NO: 344 - DNA, 2300 bp, Homo sapien
tgaatgtctcatctgcaaatataactcaaaatttttagtgtcatttgtgggaattattttggtacagaaataaaagatgggccaggtgcggtggctcatgcctataatcccagcactttgggaggccgaggcgggcggatcacgaggtcaggagatcgagaccatcctggctaacacagtgaaaccccatctctactaaaaatacaaaaaaatcagccgggcgtggtggtgggcacctgtagtcccagctactcaggaggctgaggcaggagaatggtgtgaacctgggaggcggagtttgcagtgagctgagatcgagccactgcactccagtctgggcaacagagtgactccatctcaaacaaaaaaaaacaaaaaacaaaataaataaaagatgaagcaacatacgatgtataagcctctggccagcaggccatgctgatcttacctaggattttaacataagcaaaaagactgtgacaaattcaagattgagatttccctgctgaaggtgtaaaccaggactttggaaaactgaaaacaaacatgttcacttctagaaagtgccggcagttttgggttgcgttacctcaatttatagccttgccttggatgctggtcatctgtagcaggtttgggtggatgtttcagattttactcggtgtctcgttgggcaaaggggtctgtgcatttgtctgtgtgattcagcaatgagggcctgtgaggaagaaccagcaggtggcacagagagggactccatggtctgcactctcagcagtggtgccagcctcaggaggagagagagccctgggagctggccaagggcagggccgggcactgcttcccaaactgactgtgccctgcagtaacagcacatctcacacctgacacacacaatgcgaatcattatttatccttactacgggtgatgcacactaattttaatttcattcgaaaggaaagtactggcctatgacccacaagtgggtggtcaggagcagtttagaaaacactggaccaggccgggcgcggtggctcacgcttgtaatcccagcactttgggaggccaaggcgggcagatcatgaggtcaggaaattgagaccagcctggctaacatggtgaaactctgtctctactaaaaatacagaaaattagctgggcatggtggccagcgcctgtagtcccaggtacttggaggctgaggcaggagaattgcttgaacccgggagatggagattgcagtgagccaagatcatgccactgtactccagcgtgggtgacagagcgagactccatccaaaaacaaaaagaaaacactggtccaggctgggggcagtggctcacacctgtaattccagcactttgggaggccgaggtgggtggatcacctgaggtcgggagttcgagaccagcatgaccaacatggagaatctccgtctctactaaaaatacaaaattagccaggcgtggtggcacatgcccgtaatcccagctactcgagaggctgaggcaggagaatcacttgaacccgggagccagaggttgcggtgagccgagatcacaccattgcactccagcctgggcaacaagagcgagactccatctcaaaaaaagaaaacactggaccatcaagagttcgagaccagcctggccaacgtggtgaaaccctgtccctacaaaaaatacaaaaattagccaggcatggtggcgggtgcctgtaatcccagctactcgggaggctgaggcaggagaatcacttgaacccaggaggcggaggttgcagtgagttgagcgcgccattgcaccccagcctgggtgggccagagcccggctgccccagggccagcagtgcctgggtgcttgttggaaatgcagctctcaactcctccctgccccagtgcatcaggacctgcctgcaaagtgatccgtctgcacttcagtttgagaaggcctggcctagaggacagtgggtctggcatgctgggctgagaggcagtactgggagcgattcttggggcctccttgccgacaattgggtgaaaccagcggatacgatcgtagcgtctctgagcccccattgcctccttgtttctctgcccatagtagaagaatgtctctgaaattactggatgagtttcagtcatactttcacatgggcacaatttcacattcaagctccttatcctaggctaattttatattatgttaaatcacttgtttttgttctcacggcttcctgcctgctataggcataattacgaggaagcagaacttctccagaagcaagcgcacatgcgtt

SEQ ID NO: 345 - DNA, 2300 bp, Homo sapien
tcaccgcaacctcagcctcccggtttcaagtgattctcctgcctcagcctcccgagtagctgggattgcaggcatgcgccaccatgcccggctaacattgtatttttagtagagatggagtttctccatgttggtcaggctgctctcgaactcccgacctcaggtgatctgcccgcctcggcctcccaaagtgttgggattacagaagtgagccacagcgcccggcccatattattcttattgagttaatctctgcccatccccacagtgccatgggcacatttagggacttgccaatggatgaatgcgaagaaacttggaaattaatttttagacatcagttcagttccattcattgagtgcctactatatgctagggactttggtaggccttgaaataaaaacattcaagactcaatccctactcccacgcccaggccaaacacacttacaattacagtattatggggataggactcggataagtgtgcaggtctattgggagaacataaaagggggcattttgaagagaagaggcttctacaaaacgtcattattttacactggttgaattgttagatttttttaattgttagattttaaattaaatattggacgggagcagtggctcacacctgtaatcccaacactttaggaggccaaggcaggaggatcccttgagcccaggaggttgaggctgcagtgaactatgattatgccactgcactccagcctgggcgacagagcgagaccttgtctaaaaataagataagaaaataaaaaatgaaattatatgaaaaaggatacatacattagagttaaccgccagctcctattatagttgtgttttgatcaatatagactgcttaaaagggatgacttaatgaataattcctcctactaaacgctgttttaaatgtctaaacttttcttgagataatatccaatttcctctcccacgttttttttgtttgtttttgcttttgtttttgtttttgcttgagacgaagtcttgctcctgacgcccaggctggagtgcaatggtgcgatctgggccgactgcaacctccgcctcccgggttcaagcgattcacctgcctcagcctcccaagagctgggactacaggcgtgcgccatcacgcccggctaatttttgtatttttagtagagatagggtttcaccatgctggccaggctggtctcaaactactgacctcagatcatctgtccgcctcggcctcctaaagtgctgagattacaggggtgagccaccgcccccggggcccttgcccacgtttttataaacaaaatatgaggtgggaggattgcttgagcccaggagatcaaaactgcagtgagccatcatcgcgccactgcactccagcctgggagacagagcgaaacgctgtctcaaaaaaagaaaaaagaaacaaggaaggaaagtgtcccccgaatgaataaatatgagcagataattacttctagtttacataaaatgccctcttttaagagaggaactttttgatcatttttattactattcttttaatcttagatgtttatttttcaggaggaaaaaaacaaacttttccatagtagcagtattaaaacaaagatgaatatgttgtcaagaggcatctgaacaatctccaacagtgccgagtcgcatttcccctttcctctccgatgcatttgagactttaatgcttactatatttatttaagcgttttgttctgagaccccaaactaatttgcacagttgaagcaggaaatagaatgggtggaaacatgcgggtgtctgtattagcattatgcatctcatatgcgaataggaatgctctaaaaattcaatacagtatacatgcgtgtgcatcgtcatgcaaaataagtctctattggccttatatttgaacgcgcgaatgcagctcctaaaagttaaaaacaactcctaggctgaatcgcgcgatagaacgaaagcggctttaaacccagagactacagtttccggcatgcttcgacgccacacgtgattagcggcaactagaactacatttcccggcgtgccctggtctcacgtgtgatttgctgcggaacgaactacatctcccggcaggctgcggaagggggtcgagtagaaggaccgccgctccggcctcccgcgacttctcgaaggtgggcaggtcccaccttgtggaggatggaggtgaccggggacgccggggtaccagaatctggcgagatccggactctaaagccgtgtctgctgcgccgcaactacagccgcgaacagcacggcgtg

SEQ ID NO: 346 - DNA, 2300 bp, Homo sapien
acagacacccgcatgtttccacccattctatttcctgcttcaactgtgcaaattagtttggggtctcagaacaaaacgcttaaataaatatagtaagcattaaagtctcaaatgcatcggagaggaaaggggaaatgcgactcggcactgttggagattgttcagatgcctcttgacaacatattcatctttgttttaatactgctactatggaaaagtttgtttttttcctcctgaaaaataaacatctaagattaaaagaatagtaataaaaatgatcaaaaagttcctctcttaaaagagggcattttatgtaaactagaagtaattatctgctcatatttattcattcgggggacactttccttccttgtttcttttttctttttttgagacagcgtttcgctctgtctcccaggctggagtgcagtggcgcgatgatggctcactgcagttttgatctcctgggctcaagcaatcctcccacctcatattttgtttataaaaacgtgggcaagggccccgggggcggtggctcacccctgtaatctcagcactttaggaggccgaggcggacagatgatctgaggtcagtagtttgagaccagcctggccagcatggtgaaaccctatctctactaaaaatacaaaaattagccgggcgtgatggcgcacgcctgtagtcccagctcttgggaggctgaggcaggtgaatcgcttgaacccgggaggcggaggttgcagtcggcccagatcgcaccattgcactccagcctgggcgtcaggagcaagacttcgtctcaagcaaaaacaaaaacaaaagcaaaaacaaacaaaaaaaacgtgggagaggaaattggatattatctcaagaaaagtttagacatttaaaacagcgtttagtaggaggaattattcattaagtcatcccttttaagcagtctatattgatcaaaacacaactataataggagctggcggttaactctaatgtatgtatcctttttcatataatttcattttttattttcttatcttatttttagacaaggtctcgctctgtcgcccaggctggagtgcagtggcataatcatagttcactgcagcctcaacctcctgggctcaagggatcctcctgccttggcctcctaaagtgttgggattacaggtgtgagccactgctcccgtccaatatttaatttaaaatctaacaattaaaaaaatctaacaattcaaccagtgtaaaataatgacgttttgtagaagcctcttctcttcaaaatgcccccttttatgttctcccaatagacctgcacacttatccgagtcctatccccataatactgtaattgtaagtgtgtttggcctgggcgtgggagtagggattgagtcttgaatgtttttatttcaaggcctaccaaagtccctagcatatagtaggcactcaatgaatggaactgaactgatgtctaaaaattaatttccaagtttcttcgcattcatccattggcaagtccctaaatgtgcccatggcactgtggggatgggcagagattaactcaataagaataatatgggccgggcgctgtggctcacttctgtaatcccaacactttgggaggccgaggcgggcagatcacctgaggtcgggagttcgagagcagcctgaccaacatggagaaactccatctctactaaaaatacaatgttagccgggcatggtggcgcatgcctgcaatcccagctactcgggaggctgaggcaggagaatcacttgaaaccgggaggctgaggttgcggtgagccgatatcgcgccattgcactccagcctaggcaacaagtgcgaaactccgtctcaaaaaaaaaaagcaaaaccagaataatacacatataacaacgcaaagaagatatagacttgggatcttcctggaaagcagagtcttaacggaaactatgcaaggtgacccggacacccgggctccacccctctgccccagtcccctacatcgacaggctctgttccggctaccttagtctgggcgggagggcgagagcgagggcgcctgggagaaacctcgcccagcggcggttgattagtcaggcctcagaaagatggcgtcctcggagcaggcagagcagccgagccaggtaaggggagtgggactgccccgctgtgcggcggagaccccggctggagggggcgctcagcatacggctgggagccgggtagggaccccgagtctccgaagctggggaccccgacctcttgccccctcctgagccccgcccctccccaggt

SEQ ID NO: 347 - DNA, 2300 bp, Homo sapien
taccagtaccgcgagcactaccactgccttgaccctgagtgtaactaccaggtacggccacagccagatgggctccgcctctccgccaccagcacagcatggaggcgcttagaagtcggcaggcggggacggcagtggggggggttagttctagttgcaccacccaaacttgacttgagcaggtagagggcccgcaaaaccaccagcctgcccacattccccgattcctgccgacagagcagctcctacgattgggggccagtgacctcccagtggtgatcattccagtcccctttgactgagagcctcccacgtgcccagggccatgccagccagcctatgagccttgcctaattgactctttgcagtggccttagaaggttagcattactgccccatcttaaagatgataaaattgtggctcagccagagtgccactgtgcccaaggctgcccgccagtgagcgcggggctggtgagtggggggagagtcagggcagcctgcgtggggtggctccctctggcttgccagggatcccagcctgccttagtccagaggtgcactgggcgggatgagctgtcagcatcagagcccctgccctcaaggcctggcccaatgcatcatctgtgctcctggggatggccactgggcacctaggggagcatcggggaagaatctatggtcctagaacctttgggatggttccctccaagggctgatgtgcctgccactggccttggacaatctgggctgccttgaccccaagcagggttctttctagggagacctgaggccagcacctggcccaggtgctcttggcatatgggaggaagggcggagggggagctcaggctcctgcccacgtggcgctgtctcctggcagaggttcacgagtaagcaggacgtgatccgccactacaacatgcacaagaagcgcgacaactccctgcagcacggcttcatgcgtttcagcccgctggacgactgcagcgtctactaccacggctgccacctcaatgggaagagcacccactatcactgcatgcaggtgcctcccgcacccgggcccactgggcagctgcaggactggcccaggccctcccggctctgagccccccactcccagaggcagggctgccccatgggcagggaccccagttgatcaggagcctctctttcccctggcccagcacagggatggccagcgagccaggagggtcctgggggttcaggcttgggcagcgtctggtgggccagggtggggccttccccatggccatacttggtgtggatgaaattcagtgagctgtttatacagatggacatttttcaggctttaacaccaagagcagcattgcaaatgattcctgaggaggtttttgtttaattctttgttttaatgccacgcagagtctgggctttttcaaggtgtcagggccaggaggagcgactttgggttgcaaatagcagccctatgcctcccccggtatttgtcaggagttgttatggcctctgtgaacaacctgggccacgaggagaggggggccaccctctgggctctgagatggtgcagacactggcacggcccagcctacgagagtgttcggattccacgggtttttactcaatatggcaacgttgccttcctggcccagctggggtggggtgggagggccccgtgcccagggactgtccactaagcaaatccctgggctaaaggtgacctccagggtccagcccctgtccacccactgagggttttagaggtagggccatggattggaactcaaaatccaactcctgcaggatgcagctccctcccctgggccaaaaagtgccctgagtctccggagatgccctgatcctcagcacagacggagccaggctccagcagcacttggtccctctgtggaggcctgaggggctgttggaggctttctactctgcttcctacatcaacatcccgaggcctccagtttgaagtcagaggtgccaaagcttccctgagcagggaagtcagtggccccagccacacacagtggtgtcgacctcggcccaggagcacctggcctccgttcgcctgaccaccatcccgtcctgtgcaggtgggctgtaacaaggtgtacacgagcacgtctgacgtgatgacccacgagaacttccacaagaagaatacccagctcattaacgacggcttccagcgcttccgagccaccgaagactgtggcacagccgactgccagttctacggacagaagaccacgcacttccactgcaggtaagcgggagcctggtggggg

SEQ ID NO: 348 - DNA, 2300 bp, Homo sapien
cactcctccctagctgggccccccaaccctgtgtagcttgaggtcaggacagcggctgacccgccagccccgccccaggggaacagctgtcttttggtttcttgagtccctctgtgcaccctgggtgccaggtggctgcctgtgactgtcctctcctcccctagccgggtcccaggccctccccggagcccacagcctctccttccacatcccgccaggtgtcctcccctccccaggcccagtcctgcccctctagacccccatcccaggtgtctctgaggatcccagacctggcaggttcgcctgggaggagaccccccagccacgccttcccttggctgtgtagtcagcctggggtcctgccgccccaagtgtgcccacgtggctggcttgcacatgagcagagagaacatggtgtccccgggggccgtgcaggtctcagtctcgcgggtgcacctaaccctgatgcagggcatggcacacgggaggcatgtagcacacgggcagtgaaggggcaggtgtgcgtgtgcactggggtcacggctcggccatggggtggggcatgtgcggaagaggtgggtccgcaagaacagctcagaattagcctgggactgaccgccttctccctcattccgagagacccagggcaggggttcagggggttgtgtacctgtatgtctgcagaggcaggaaggcggctagggatgggagctggtgagcccgagtgtgagcgcaagagtctgtgaggtgtgtgagtgtgtggtgtctgtgagtctgtatgagtgtgtgtgttgtgtctgggtatgtgtgttttatgtgagagtctgcatgtgactgtgtgggggtgagcaagtatatgagttttatgtgactgcgtgtctggatgtatgtgagagtgtgtgtgattgtgtgtgtgattgtgagcacatgactgggtgtgtagagtgtgtgtgattgcatgtgtgttgtgtgtgactgtgtgcatgtgaccgtgtgtgggtttatgtatgtgatggcatgtgtgtgcatatgactgtgcgtatgtgcgggtgagagtgtgtaataaggcatgtgtgtattgtatgtgattgtatgcacgtgattgggtgtgtgggtgtgaaagtatgagaatgcacatgtgtgttgtatgtgattgtgagcatgtgactgtgtgtgggggtgggtgggtgtcaatgtatgtgtgtgttgtatgtgattgtgagcatgtgactgtgtgtgggggtgggtgggtgtcaatgtatgtgtgtgttttatgtgattgcatgtgactgtgcgtggggatatgagagtgtatgagaatgcatgtgtgtgttgtgactgtgtgtaggtgtgtgagtgtatgcgaatgcatgtgtgcgttgtatgtcattgtgtgcatgtaactgtgtagggtgtgtgtgagaatgcgtgtgtgttataggtgattgtgagaatgtgggtgtgtgagagtgtatgagaatgcatgtgtgtgttgtatgtgattgtgtgcatgtaattaactgggtttatgtgagtgtgtatgtgatggcgtatgagtgcatgcgactgtgggtgtgtgagagtgtatgagaatgcatatgtgtgttgtatgtgattgcatgtgactgtgtaagagtgtatgagaatgcatgtgtgtgttgtatgtgattgtgtacatgtgactgtgggtgtgtgtgtgagaatggatgtgtgtgttgtgaatgcatgtgactgtgggtgagagtatgagaatgcatgtgtatgttttgtgtgtgtgtgcatgtgactgtgtaggtgtgtttgagaatgcatgtgtgtgttgtatgtgatcgtgtgaatgtgaccgtgtgtgtgtttgagaatgcatgtgtgtgttgtatgtgattgtgtgaatgtgaccgtgttgggtgtgtgtgtttgagaatgcatgtgtgtgttgtatgtgatcgtgtgaatgtcactgtgtgtgtgtttgagaatgcatgtgtgtgttgtatgtgattgtgtgcatgtgaccgtgtgtgtgtgtgtgagaatgcatgtgtgtgttgtatgggatcatgtgcatgtgactgtgtgtgggtttgtgtgtgtgagtgtgtgttgatatgtgagaatgtgtgtgtatgtcactgtggggaggtggctccaggcttcctggtgtgcccggggtggccacagtaaggaggctgcactcaggccctgcccggactcctgccctccccgggtggcccaaccttgtgtgactgcaagtgactggaggaggccagggggttggaggacgtgtccaggtcctatgt

SEQ ID NO: 349 - DNA, 2300 bp, Homo sapien
gaagacccttctctggcagtgggcctggctgggctagagtcaccctgtctcgtctgggccaagtgagccatccgtactggccactggctacaagggaaggatctggctgggacggccaggcactgtgtctatcaggggacggttatctgtgcgtatgagtcaagtccacctcagggatgcggcccctgggtggacccaggtattgccattcccgcctgggtaggcctctcatcgggtttcctggcatgtggaaagttggcagggggtgatcattagagtgaagccccttctgaccatggagccggggggccctgccctcagccttcccgcctatgtggagactctgacacgcccattcctcccgtgagggccatggagaggcacattttgttttgtacacagtgagtgtgagccgagcccctgctgctgtggccactgcgctgtccccaagccccaccacagggtctggcccacagaaggagctcactaaatggacggacagacagacagttccatgtggctgcgctgtgtgtgcacgcgtgtgtgtgcgtgtgtgtgtgtccaccctcgccagcctttgtggcaggtcccaggctgtgtggtgggtgggcttgccgtatgcccccccaggaccctcggtgccctatcagggacagagtttgggctatgcggccgcgagggaggtcgctggctctcaagtcgcctcatgagggcttccttccggctgtgtgtgtcgggctgtcacattcggggattaggtgctgtgaccggcgcttcggggcgttccgtgagggacctaagcgatcccaccctgcacctgctggagctcctgggggctgggaagtgggctggccaggccttccggggctgcagaggctggccgaggctggggagcaaggtcctaggatagggacaagtggccctaggaagtgccatgaggaactccacttggatggctctgactgaggcttggggaagggagtggcaacaggaaatggacagagaggccaagagggggctggcaagggctggagaagaccctgaggcagggaggagactgaggaacacggaggccttcgggagggtcctgagtggctgggagaaaaggagatctctgctctctgctgagcagggttggagtcaggtagggcccagggacctggcctggcagaggagccgccaggggctgacgtgctcgggtgggagggtgccagccaagtgctgccgggacagtgaggcaagaggctggcacaagctggtccctggctctctgtgactcctccccaggaacgtgtggtaaggcaggacgctcccaagcggaacaagctgccaggaatgccacgctgtcccttgacagcctgaccgcatagccggctccttaacctccctgggcctcagtttccttgtgtgtcaaagggcacaccccctcccagggcccagcaagcctaggaaatgcctccaggacctgggcgccccttgtagttgaagaggcattcattcattcatttgttcatttacagactagttcttgaactacctactctgtgccaggcaccctgccaggctcagaaagtagagtgattctcaagcatggccacggagctcatagactagtgggggagatagacacatgccaggcagtctcagggcagtttgatggcactgtggtcaatgggggaggcctgcagcttgggggatgcagggctgttcgggagggtgggttgttcttggccttgcacgcctctgacctccgtgctctcctccatccctgcagctgagggcacccggtgcacggacccgcctgcaggcaagcccgccatggcgcccaaacgcaagggtggcctgaagctgaacgccatctgcgccaagctgagccgccaggtggtggtggagaagcgagctgacgccggctcccacacggagggcagcccatcgcagccccgggaccaagagcgcagtggccctgagtctggggcagcccgggccccccgcagcgaggaagacaagagacgggcagtgatcgagaagtgggtgaacggggagtacagcgaggagccggcacccacacccgtgttggggcggattgcccgcgagggcctggagctgcctcccgagggtgtctacatggtgcagccccaggggtgcagcgatgaggaagaccacgcggaggagccctccaaggacggcggtgccctggaggagaaggattcggacggggcagcctccaaggaggacagcggccccagcaccaggcaggcttcaggtgggtgcctggccttcgaagggaggctgaaggccag

SEQ ID NO: 350 - DNA, 2300 bp, Homo sapien
gccctgctcccctcccctcatctgaaggcagtgtggcccctcctgaaagaggagcgctgggagaggcgaggagggcagcagggtaggtgaagaagggacggagaaccaggtccttccttagcaaggctgcccaaggccctgctcaccccaccgtctctttccttgaggccctctgggccggatgcgtcacttaagtcaccaacatataaggactctcaaaatatatggctgcagcagggacatctggggatgtcccatggtgcacggttcatggaggggagaaccctcaaactgccttctctggcagaaaagaaagaggagcacgggcagcacaaagcgcctggctggccatgggctggcaggaaatgaggttccacgttgaaggggacaggcctggagacggcgtggggcggggggggggggggtggcggggaggggaggaggagccgggatgggcctcagactccctggttgagggtgcctgtgctctactgagcgcccttcctagggcagcggccagaggggcaaggcagggaggaagcgcaagtgatggccgggatcatgggtcgggggctgtggggaaagtggggcgccgatctccattcgtctggctgcggggcggatggcccaactttgagggaggagtgggcagaaagaccggaagaccggggaggctctgggaggacacttggacccgttttaagggcaaaaccaaagcaacgccgaggaaaccccactgcgtgtcccaggccggcgctcctggggcccagggccggggacgcgcggggtgcgggggcgcgcgggcctgactgcgccctgccccgcctcgccccgcgctcctgttcctccagctccagaagccgccagtgctgtgaggggaacacgaaatccctgtgctaccccaggagccccgagcccgcaggcagcgggcaggggagcagggaagcgcgcggcctggcgggcgcggccccgcggcgcctcacacctgcgcccgccctcgcggaaaagttagcgcggccgcgcgggtcgtggggcaggcgcgcgcggcggccgtcggtcgcgctcgcggggcccgagcggccgctggcagcatgcgagcgcgcgcgcggccgccggcggccggcaagagtgggcgcgtgcccgcgggcgccttactcgggccgcgttccccgccccgcgccgggtcccctcccgccagccctgagcgcaagtccccgcctcctcctcccggagccagaggtttggggaatcgcagagccaatggagccggccgccctgccagtgcggcgcgggcgcgcgcggcgggggcgcgcggcgggggcgcgagcgagcgcgagcccattcactccggcaccgggcggcgggcggcgggcgggcgcaccgggcggcggcggcggcggcggcggcggcggcggcggcggggccgcgctctgctctttcacctgccggggccggcgcgggccgggccgaggaggcggcgccgcggccgccctgccaatcaccgcggcgcctggcagcgcccccggccgcgcccgcccgcccgctccctcctgccaaactgttaccctgagtgttaccggcaggagcaatgacatcagggctttaaaacaacttgttattcggggagtaatcagttgcaattaggcattaattaagtattatgaaagttgattatttaagtgaattcggctttcgactctccgactatggtgagtaccgggcgcgggcgggggaggcccgggggccgcggtctcgggcggcgacccgggcgcggggcgcggtcggcgggacgggggcgcccctgggcctcgcggatcccccggccagggcccccaagccggggccgcgccggccgagagttgctgccttagttggagaaactcaggcggcgcggacccgcgggcgcgtgcggggccgagcgtgagaagcgggcggcgcggaggagaaagtttctccgccgcggcctcggcgcccgcccgggacgggccgctcctgcggggcgggggacaagcagggcgggcggccggggtcccgcgagacgctaaccccgtgtttcttctctcccggtcttcccctggtggcgttctgcgaagagtttgggaccaaggagaagagaatggatcttggaacaggtaccggccggtgggaacgcaggggcggctctttcacttttctttcgcttcttttacggaagttcttatttttagcccaatgaggtggcggcggggccgggtgggggccgggagggtcgggcggctgcctcccggcgtcccggcctcgggatcggcgacttctgaggc

SEQ ID NO: 351 - DNA, 2300 bp, Homo sapien
ccaagctgctaaccccttctttacgctgccccaggagtggactcagccgtgagccaataaggtagaagagctaccttgccacttctcaggttactgcccctcactgtgcctcagtttctccttctgtaggatgacaagattgggcttgagatctctggggctgtgcatcctgctaagtcaccaggcacaagggtcttagagatggtgggtgagccctcaacccctgagagctgagaatgccttggatggtgggggcggcaatggagagtaaccaatcagtggtctttgagggatgttaattatcgttgtgttgctgcttccagtcaattattgggataaggaggggggaaaacaaaatgaacccgaaacatgtgtctaatgtctaaatctggctttcctgtgtggacagatcctgaatggacccccagaactattccaggaagtgaggagctggttttttgagctggtttcttccccagtccatctaacacaagcaaatatcactgagtatctaaggagtgtgggatggctcagcttcctctcccaaatttgttggctttattagggcacagggcaaatcctggcctcctcagggccagagggccatcatgtctccagtctgtgtccatatgcttctggacaattaacttccagtttaaggcaggacatgggaatgcatcccggaagatgcttgtcttagacaatcatcatacagggttttgggtcgtttctctggtcctgagaggctttcctgacaccttgcagattaggctccaaatactaccagcctgcaacaatgtttaccagcctgtggcattgcctcttagtttaatgcattctgttgagcagggcttgaagctgtgggtcatactttgaatttatattcatttattccacaaatcattgatctatttcgtttactgttatggtcagtttctcacttatctcatcatctgggtgttttcagtttctttcatgcctctcgatatttccatcccacgcttatgctgaagggaaaagcagctcaggcctggaatgaggggtgcgcttgctgagaaaggcaagaccagagctacagggcctcagcactgaagctgactactaggctcagctggtgtggccacctcaaaccaactgggaaatgggaagtctgggtatgggagaaaagggggtttcttcaataaagtatgaaagtgcccctcaaaaggcccttcccccccatctgggggcaaggggattatctctcgcaagacactgctttgttttgttttgtcagaaatgaggtctagctatgttgcccaagctggtctcgaactcctgggctcaaccgatgctcctgcctcggcctcccaaagtgctgggattacaggcgtaaaccaccatgccggcccccaagacactttttagcctattgccttggtttattttcttcatggatactttcactctctgaaataacattatccacttgttttaatgtgtattatctgccccccccccagcccctccatgtaaggttcattctgcacggcctatcttgctcacttaaggatttatttcttgcacaatagattgaatgaaaaactcccttgcaaagaataagtgcaaagcagatatcaaacagtgagaacatttcgttcctttgggttccacagttctaacattctaacttgcaaaaaagagccagttcttctgtcgaaagtgggaaccgaactcgggctctctcggggttcagaacaggtggaaagtaacccccccccccatcccttctctcttttcccctagcctcaactcaactcagctgggggggggtgtagaagcctctggacctgcaaaagggggccgagcgctcagatgctcctccgcaggccgtgcgactcgccgcgcgcacacgctgagctcagcccgggcggtgggtgggaaggatccgggaggggcaggtctgggggtgtgagggtggagcggagcccggccccgcgatccggcccgggttttgcatgccacccactcgcccgcccggccgcggagaattccataatcacagcgggcgagagcggagactgggagcgaaaaatccgggatccggcaactttgggcagcgcatgcgcgcccgcggcgctccatcccaaacacacacacatttttcccccggacttggaaagtcacccaaagccgccccaagtgcaggtaagagactcggcgctccctccgccgcggcccccccacgtcccccagctccgcgggcctcccggggcgcctccccgtctctccccctgtcccggtgcaccccccccaccccc

SEQ ID NO: 352 - DNA, 2300 bp, Homo sapien
taattattgaagtgtctggtctgcagaaatctaagagatggtttagatatagttgttttcatatgtgtgtgtatgtgtgtgtgtgcatatatatatatatatatattttttttttttttttaaataagagacagggtcttgttctattgcctaggttgaagtacaatgttgcaatcatagctcattataacattgagctcctgggctcaagggatcctcctgtctcagcctcctgagtagctgggattataggtacaagacaccataccaagctagtttttaaactttttttttttttttaccccgagacagagtctcactcttgttgcccaggctggagtgcaatgacgcaatcttggctcactgcaacctccacctctcctgcttcagcctcccgagtagctgggattacaagtgcccgccaccatgcctggctaatctgtatttttagtagagatgaggtttcaccatgttgatcaggctggtcttaaactcctgacctcaggtgatccagccgcctcagcctcccgtactgctgggattacaggcgtgagccaccatgcccagccttaaatattttttatagagatgagatcatgcatgttgcccaggctgttcttaaactcctgggctcaagtgatcctcctgccttggcctcccgaagtgctgggattacaggtgtgaaccactgtgcccggcctgttttcacattttaaagtcgggttcactgatggaaatgcctctcggggtgggacggggaatgtcagcggcgggacagtggggaggataagaacacccagggcctgggcatgggaggataaggcagcaaagctcagtgttggaggtgacagggagtggtggagaatcctgggaacccgcagccaccaggtccctctaagtggagcagcctcgcttagctggagctgatcctatcttgcagggaggcaggcctgtgtagccaaatctggttttccacgagaacctggttatataagaactcctgcttttaaaatgttgttggttaatttaaaaaatagttcaaacaccctgcaggccgagtcaaacatgtccaagggctgtatttgacccttgggccagaatttgcaagctggaacccagcagttctcaactgggatttttgcctctcaggagacacttagcaacatctggagacctttttggttgtcatgactcaggggatcctaccagcatctggtgggcggaggccagggggcctgctgaacaccctgcaccgtacctcctctcctgcacttggcaaagcatgatcggcctggaatgcctacgctgcctgggctgagtctgacctgaaaggtggtcaggcagggagcactctccggttctctgtggttcctgaggctgagccaaggtatttgacctcaaaataggaaatggctcaaaagacgaaaccatctggtggcattgaagctgggacagggagtcagggccaggtgccccttgcagaaatctgaatttctgtgacttaattttaaaaaatgggccagtcgtggtggctcactcctgtaatcccagcactttaacaggccaaggcgggcagatcatttgaggtcgggagttcgagaccagcctggctaacatggtgaaacccatctctactaaaaatacaaaaaaattagttgggcatggtggtgcacacctgtaatcccagctacttgggaggctgaggcaagaagatcacttgaacccaggaggcggaggttgcagtgagctgagactgtaccactacactccagcctggccacagagtgagactccatctcaaaaaaaaaaaaaaaaaaaaaagaatcttgatgtccacatagtctcaaaaaggactccaagtgggaggactgtgaaattcagccaatggacatttcccaacccaggacttgcatctgacctccccaagcttccgttccccacctgtggaaaaggggtcactcatggtcccttcagcagggtgttgggaggattttgcttccttaggaggaaggctgacctctgtcttctctctggaaggttcaggaacagagtcgcctgcctcaactgctgcactgaggaccactccctccccaccatccccaggaccagagacccctccagcgggagtgccacctgctgcttcctcccaggtgtgggctgcaggaccagctgcccaggaatggctttctcgggacctcctgcaccggccttccgacgcactggccaaagcacgtctatggctgcatcctctgcccatggtttcctccaaagagtctggtccccaagaagtatcggtagac

SEQ ID NO: 353 - DNA, 2300 bp, Homo sapien
cctgagctcagatatcaagtaaggagacactgcaccattattcctctgcagaaactgagctgagggagaccagaagtctctgccctcatggagtttatgggcatagatattaaaaggccgcccagctcagatgctgcctcctccaggcagtcctcctgagaatccccccttctctgtgcagtagacctgcttctatcattgccaacactgactcataatgtgcccactcacacaccatatcctgctggacctggagtctctggggtgaggcagtcacacccacaggcttgcctcagggcctggcacacagtaggtactcagtaagtgctgaatgaagtgaataaatggtgctgaggagttgcaaagactgactgacagccctcacttgcacaggcccattatgggctcacgagaccatgtgactctaaaatttacagaagcaagatatttttgtattctttttccttttttttttttttttgacggaggctcgctctggcacccaggctggagtgcagtgacgcaatctcggctcactgcaacttccgcctcccaggttcaagcgattcccctgcctcagcctctgaagtagctgagactacttggtaaaggcggggtttcaccttgttggccaggctggtcttgagcttctgacctcaagtgatccacccacctcggcccccagagtagctgggactacaggcatgcaccactacacccaggtaatttttgtactttttgtagaagatggggtttcaccatgttgcccaggctggtctggaattcccaggctcaagccatcctcccgcctcggtgtcccaatgtgttgagatgataggaatgagccactgtgccagcattcttgttacttaaatttcactccaggggtcctgcaaggggacaaccagccgcacagtttggctcacagttttttttttcttgtcttttcctcacctccacttcccctttccatttctttgtgctcccttccttgacccagtccagagtttttcctgagtggggctgtggtctggagtgggggaaggaattttgggaactaccctgctcctcctctttctcttcctctctgtggtcgcccttctctgacagccccgtcacccttctcaggccccaccgcaaagcttagacttgggttcttcttatgtggctgaatgagggcagcctgggaggggcagagggacccattggtttgacatctttgaagtccgccttgtaccggaatgagctagaccagctctcacatctagtctcagaaatggccacatgcctttggcttagtcatttaccttctctaagcctcaactgcctcatctgtaaaatgggaattttatgtctcataaacccagccttggctgggcttggtggctcacgcctgtaatcccagcactttgggaggccaagatgagcggatcacttgaggccaggagttcaacaccagcctggccaacatggtgaaaccccatctctactaaaaatacaaaaattagacgggcgtgttggcgtctgcctgtaattccagctacttgggaggctgaggcacaagaattgcttgaacccgggaggtggaggttgcagtgagccaagatcaggccattgcactccagcctgggtgactgaatgagactgtgtctcaacaacaaaaaatagcccagccttatgagacactggtgagcatcaaaggagataaagtgtgaacaaatatttgtcaactctcaagggacattaggacgcaagctcttattctgtctgactaggtttgaccttccccaaatccccaaatgctccccagcctggagggcttccttggtgggggctgagcttccagagccagacccaagctccgtgttggtgtcgaccttggtctcgtttcccatccctcttccacaagcccaccttctaggaggttcatggtgtcctatttgctgtgaacagggactgacctataattgcaggctattaactgtattttcctctctcatttgcatacatgaattttgccctacttccagaaagcaaattacaggctggaaatcagaatatttcagaaaggggtgatggggttggagcggagtgatcgctacataatgaagtgtccgatgctaaggtcaaggctgggccaggaaagcgtccactgtgggcccatgttcatccaggtaatgggttcggggggtctgggaggtggcagagggacctcccaggctgggcttctctctaaaggccaaggcaggtggccctggctcctgcaccacaggacgtggcccagggagacaggtggtagc

SEQ ID NO: 354 - DNA, 2300 bp, Homo sapien
aataaataaagtattttgtgtaaacacttgtaactgtatttcattgagtgtgatacatgtatatacaaagaaacataaatagttgccagttaaactatgacacatcatcatcaactggaactggaactgaaatcacatactgacttcagcaatgtgaaacattggccggtcgcggtggctcacgcctgtaatcccagcactttgggaggccgaggcgggcggatcacgaggtcaggagattgagaccatcctggctaacacggtgaaaccccgtctctattaaaaacacaaaaaaattagccgggcgtggtggcgggcgcctgtggtcccagctactcagtaggctgaggcaggagaatagagtgaacccgggaggcggagcgtgcagtgagccgagatagcgccactgcagtccagcctgggcaaaagagcgagactccatctcaaaaaaaagaaaaaagaaaaaaaaaagaaatgtgaaacaaaggccgggcgtggtggcactttgggaggccgaggtgggcggatcacctgaggtcaggagtttgagaccagcctggccaacaggggttaaaaatacaaaaattagccgggcatggtggtgcatgcctgtagacccaactactcaggaggctgaggcaggagaattgcttgaaccggggaggcggaggttgcagtgagctgagattgtgccactgcactccaccttaggcaacagagggagtctgaaaaaaaggaagagaaaagaaagagagagagagagaaagagagagaggtagggaggaaggaaggtgggaagggagggaagggggggaaagggagggaagggaggaaaggaagggaaggaaaggaaagaaaggaaagaaaagatagaaaagaaaggtggctcgtgcctgtaatcccagcactttggggagctgaggcaggcggatcacttgaggccatgagttcgagatcagcctggccaacatggccaaaccctgtctctactaaaaatacaaaaattagccgggcatggtgtctttgcacgcctataatcccagctatcccttgaacctaggagttggaagtggcagtgagctgcagattgcgccactgcactccagcctgggggacaagagcgagactccgtctcaaaaaaaaaaaaaaaaaaagtgaaacaaaaagtgtgccttaaaatagatgaagtactgtattattattattattaaagggctggagccagaacaagttagcattttgtgcctcgagattcaaatcccaggtctaccatttattccttgggtgacatttttttggggggaggggctggaggacagggtctcactctgtcgcctagactggagtgaagtggcgcgatctcggctcaccgcaacctccgcctaccgcgttcaagcaattctcctgcttcaggctcccgagtagatgggactacaggcgcgcgccactaccgcccggctaatccttgcgtcactttaagcaagacacttgatctctctgtgcctcagtttcctcacccgcagaatgaatatcaatagctcctgctacacaaaactgtttgggctattaaatatgtgaatactcagaaagtacctggcacaaagtagccttatcattgctattatttagaacaaagttattgtttccaggtttggaggtgggctggcggagggaggagaagacgcactaggttgcctttcagaaaaggggtccaggccttatcctgcctcccaggtggactcggcccgggatcccgagccccgccccctccaggccccgccccgccccgccctcgctggccgagactctgtgctactctcgcgcgctttgaaagtgcgcgagctccgaccgagacctgggccggcggttggtcggccgaaaccatctgctacgttacgtggggggaggtcagctcctatacagccacacttttttcaatcttcagcttttcaggcctaggtcctggttttattttagctttcagagcttctctgtaggcttgaatttccaggaggcagcccgagtccctggggagagggtcatcgtggctctcgtcggtgccttccacctctggacaggcaaccggtgggagaggacgccggtgggcggggggaggaggcggccctagcgccattttgtgggagcgaagcggtggctgggctgcgcttgggtccgtcgctgcttcggtgtccctgtcgggcttcccagcagcggcctagcgggtgagtcgcggagccttctcactgaggacgccgtaggtgcctcggcttctgcattggggcggcccgaggcagacgcag

SEQ ID NO: 355 - DNA, 2300 bp, Homo sapien
tgagatggagtctcgctgtgtcccaggctggagtgcagtagcacaatcttggctcattgcagcctccaggttcaagcgattctcctgcctcagccttccaggtagctgggattacaggcacgcaacaccatgcccagctaagttttgtatttttagtagagatgaggtttaactccaaaataattctttttcctgatcttttgcatgtgatttactatttgatttttctctttctctttgtttgtaaaacataattattctctccagtgtttttaaatatgtgtaaagctgtattaatatttttatctccttttctgggcacttggggcacactttcgatcagtatcacgttcttcagttctgggaaattttcttgcattattattattgctatgtatgtattttttgagacaaaatcttactctgtcacccaggctggagttcaatggcatgaacatggctcactgcaaccttgagacctcctgggctcaagcgattgtcccatctcagcctgccaagtagctgggactaaaggtgcatgccaccatgcctggctaatttaaaaaaattttttttttttttagagacaaggtcttgctatgttgcccaagctggtcttgaactcccggtctcaggcgacccacctgcctcagcctcccagcctcctgggattatgggcaggagtcactacacccagccagagtcccggtctctaaaagaaaataggccaggcatggtggctcacgcctgtaatcccagcactttgggaggctgaggcgggtggatcacctgtggttgggagttcgagaccagcctgaccaacatggagaaactccgtctctactaaaaatacaaaactagccggacgtggtggcgcatgcctgtaatcccagctactcgggaggctgaggcaggagaattgctcgaaccccggaggcagaggtttggtggctcacacctgtaatcccagcactttgcgaggctgaggcaggtgcatcgctttggctcaggagttcaagaccagcctgggcaacacagggagacccccatctctacaaaaaacaaaaacaaatataaaggggataaaaaaaaaaaaaagacaagacatgaatccatgaggacagagtgtggaagaggaagcagcagcctcaaagttctggaagctggaagaacagataaacaggtgtgaaataactgcctggaaagcaacttctttttttttttttttttttttgaggtggagtctcactctgtcgtccaggctggagtgcagtggtgcgatctcggatcactgcaacctccgcctcccaggctcaagcaattctcctgcctcagcctcccgagtagctgggattataagtgcgcgctgccacacctggatgatttttgtatttttagtagagatgggatttcaccatgttggtcaggctggtctcaaactcccaacctcgtgatccacccaccttggcctcccaaagtgctgggattacaggtataagccaccgagcccagccaaaagcgacttctaagcctgcaagggaatcgggaattggtggcaccaggtccttctgacagggtttaagaaattagccagcctgaggctgggcacggtggctcacacctgtaatcccagcactttgggaggctaaggcaggtggatcacctgagggcaggagttcaagaccagcctgaccaacatggagaaaccccatccctaccaaaaataaaaaattagccaggtgtggtggtgctcgcctgtaatcccagctacttgggaggctgaggtgggaggattgcttgaacacaggaagtagaggctgcagtgagctatgattgcagcactgcactgaagccggggcaacagaacaagatccaaaaaaaagggaggggtgaggggcagagccaggatttgtttccaggctgttgttacctaggtccgactcctggctcccagagcagcctgtcctgcctgcctggaactctgagcaggctggagtcatggagtcgattcccagaatcccagagtcagggaggctgggggcaggggcaggtcactggacaaacagatcaaaggtgagaccagcgtagggctgcagaccaggccaggccagctggacgggcacaccatgaggtaggtgggcgcccacagcctccctgcagggtgtggggtgggagcacaggcctgggccctcaccgcccctgccctgcccataggctgctgaccctcctgggccttctgtgtggctcggtggccacccccttgggcccgaagtggcctgaacctgtgttcgggcgcctgg

SEQ ID NO: 356 - DNA, 2300 bp, Homo sapien
tttttcatgtgaggacccacatgctggagcagctttgtccagcttatagaggggatgggatggacctggccctccactttcccccatgcagtgtcctggaatgccagggccactgtctatggtcagtccttcaccacctaaaagcaagctgatccacaaggcacctggctgcatccaggcctgtcatctacggccaccatcctcagcttcagagcttatgatctggctcagggaacacagacaagtactgccatctacagccaccatcctcagcttcagagcttatgatctggcttagggaacacagacaagtacacgggcagttacaacccagaggcagaaatgtcttggaggaagtacaggcaatgtaggcaaacaccttgacccaagtacaggattgaacccaatcaagcctgtagcactggacacactgattgactctgtcttatccactacgtggacatttcaagaataatcttcgttcctggaacaagtccatggaagctgttgcctagcaatgttttttattttttagagacagtcttgctatgttgcccaggctggtctcgaactcctgggctcaagcggtcctcctgcctcggcctcccaaaattctagtattatcagcctgagcccctgtgcccagctgcctagcaattttttttttttttttttgagacggagtttcactatcgttgcccaggctagagtgcagtggcgcaatctcagctcactgcaacctccaactcccgggttcaagcgattctcctgcctcagcctcccgagtagctgggactgcaggcgcgcactaccatgcccagctaatttttgtatttttagtacagacggggtttcaccatgttggccaggatcgtcttgatctcttgacctcgtgatccgcccgcctccgcctccgcctcccacagtgctgggattaccggggtgaaccatcacgcccaggcacctagcaattctttagcggtcttggtttacctcccctttagaaggagcttaaaagcaagcaaggcacattgttgcctaggcttgaggcttgctctcacccataaacaacgctgttactctgctctggggacgacacaggaaacgttccccacctccaggtggaggctgcaaaacgtgtcaaaaccatccctgacataatgtcaagagtagcttatactagtttcatcttccttccttggcattcgaactgcgtgtggaacaattagcatttaatatttggtaattagcatgcttaatgtgattctgagaagttctttgacattctcataaaaacagcacattcccacccacccttcaaagagcaagacccagtttgtcaagaaaaattgcgtgccagtcttttctggtgctgaatatgtatgttctgggcctcttcctggacactgctggtaaatttagaaactcgtttagaaaagcacttctctcgtattcaacagcctataggctcatggcgcagaatctaagggaaaatggctaaatccagcttgtgaattcgcgggctgtgatgattctttccaagtaaataaaaaccctcggttcgccccgacgagccacataatctgttcaaatccaacaaggaaccagattttggacgcaaagaaggatacgttctactcgccccgtgcaacaacgtaaaccactgtagccacccgctcccgtgtctccagcccaaaggctgactctccagtccgcacgtcgcagcgctcttgccctccacaccaagcccgagtcccgcagcccctcgaggccctcggtgcctcccaaccccgagaaggaagcgggggccggtggtgcaccgccccggctgcttggggcggaggaaggacccggaccccttccgccggcccagcccgccccggaacccgacccggccgcccggccccggccgggccccacgtggcccctggagcgggccgcactaccctgctgccgccgacggacggcgcgccacagccactctgcgccgctctgcgagccggtggccaatgagcgccaggcgaggccgctttgccattggcgagcgcgggctccgcccccgccggcaggccccgccccgcgcccgggttaggttgcggcgcgggcggcgggcggagctggtcccgttgtgctgcggcgccgcgcggcctgcagtcccgggcccgcgccccgcgccgcccgcccgcccgccatggagcccggccccgacggccccgccgcctccggccccgccgccatccgcgagggctggttccgcgagacctgcagcctgtggcccggccaggccctgtcactgcagg

SEQ ID NO: 357 - DNA, 2300 bp, Homo sapien
aaggctttcaccgtgttggccagcatggtctcgatctcctgacctcgtgatccgcctgcctcagcctcccaaagtgctgggattgcaggcgtgagccaccgcacccggccggctctggatttttctagaagtcaccataacccccggagcacactcacctgcccacagacagctgaagatggttgcctgaacaggatggcaacctgccagagctgtggcggcaacaaaataaaagtcaggaatcagctttcttcaggaagaattttaatggtttaaaaatatgtatgtacaaaagcagcaccagcatttggtgcttccggtccacaggcgccacgtgtcttccaggactatctctgtggccagttgtacctgaagcctctgcagagagtacaaaaacaacagttatttcttccgggctggttggatgttctcagatggtttacaaaatggtgcaaatcttaatcatgcagaacagaggaagaatggtttgctcaggggccccagagaactcggcggcccaccagagttggctgagctgagcagcatcttgagaaggcagacctgtttttcctgccctcgggcaagtcccctgacctcagggtcggcttaattattaggattttatgtttttaacaaaaacatttggctgggtgcagtggctcacacctgtaatcccagtactctgggaggccaaggcgggaggatcaattgaggccaggagtttgagaccagcctggccaacatggcaaaaccccatctctactaaaaatacaaaaacaggccgggcgcggtggctcacgcctgtaaccccagcactgtgggaggccgaggcgggcggatcacaaggtcaggagatcgagaccatcctggctaacatggtgaaaccccgtctctactaaaaaatacaaaaaattagccgggcatcatggcgggcgcctgtggtcccagctactcgagaggctgaggcaggagaatggcgtgaacccgggaggcgcagcttgcagtgagcagagatcgtgccactgcactccagcctgggcgacagaccgagactccatctcaaagaagaaaaaaaaaaaaaacattagccgggcatgatggcaggcacctgtaatcccagctactcgggaggctgaggtgagagacttgcttgaacccaggaggtggaggttgcagtgagctgagattgtgccactgcactccagcctgggtgacagaatgagactctcacaaaacaaaaccaaaccaagccaaaccactcttcaacaacaaggataacccacatgtgcttactttttcctcattcctaataggctggtccaggaaaatttcacaactatttacacctattttccctgaggtgaccccaggacacacggtaactagagagccaggaacaaggggaatctgagtcctggggtgcagtgcctggctctgtgatgtatggcacagagcaaatcacctcccgcccttgttttccgagtggcgtgagggacctggctgtgggaggttctctgagtcatcctggttgaagacccctggacactcgctccccagctactccccacggaccacaccacgcagggcaggtgctttctcactgggctccctgggccacaccgccgtccaccacatacctgtctgactttccagttggaaaggacatgcttttgtttcccaccgactgtttaatttttttggctgcaatgcatttctgaaaagaaaagaaaccgtttaagctgggtgggcaccttgaccacaagatacacagaaaaacacacctgagctcaggtggccaaagattctagcagcacaggagtgactttagatcccctgagagaggatgtttctgtgtctctgaaggcaaggccgccaggatgcgctgcaagaggaacaggagcaccccaaagcagccctgcccccgcgcctgtggaagctacagccacgctgtttccctggcaccagcaccaacacccacgaggggtgaatgcaggcttgtgctggccccaaagggggtgcttttggcctgcagctatagttcccatggtagcaaacacagaataataccctttaaagccacatgccagcttttacagcctcgttttatgagttgctggggtagctgatcagtactgtctgcccttgggaagaaatgaggtgaggaaaaagatatgcaaaggaatggactcctggatgggcctgtcttctcagcagaggaggaggtcagaaacaggcgccaccagcgtgctaaaatcctccaggagcagttcttaccttgccagacggggtctgtttatttg

SEQ ID NO: 358 - DNA, 2300 bp, Homo sapien
caggaggcggaggttgcagtgagcagagatggcaccactgcactccaacctgggcaacagagcaagactccactcaaaaaaataatacatacatacataaaataaatttcaggcatcaattaagacctcatgttctagagccagaccatggtgggtttagatccttggtctgcttgtattcactgcaagcctctgaaagactgtcacaacctctgtaggcctcagtttcctcctctgtaagatggtgagagtaataccacctcataggctatgaggacatgctgagaattcactgatccagcacattgatattgaaatgctactgtgtgctgttgcagacacaacaccttatacataagagagtgtatgaaaaattagccttagccattggtattaatatcactgttactggccgggtgcgtgcggtggctcacacctgtaatcccagcactttgggaagccaaggcgggtggaccacttgaggtcaggagttcaagaccagcctggccaatatggtgaaacctggtctctgctaaaaatacaaaaattagctgggcatggtggcacgtgcctgtaatcccagctactcaggaggctgaggcaggagaatcgcttgaacacaggaggtggaggttgcagtgagcagagatcacaccactgtactccagcctgggcaaaagagcgagactctgtctccagaaaaaaaaaaaaaatcactgttaactgttgctctcttgcttgcatcttgatgtcacagatgatcatggtcattagtgatcgttttttgtctgtccctgcaggaacctagtgctgaagacagtaaaaagggtccattgacagttgcacagaaaaaagcccagaacatcatggagtcctttgaaaatccatttaggatggtgagtagtagttttgtcagggctgacaggatatgcagagatgcctacagctgtacatgcttttacctgggaaggaagcctctgaagccagtgtgtcggctgccctggtgtcctggcaaagacgctgacaaggcaccagcaaccccccatctgagcgcttctgccccgtggctctagattccgttcccggcagcgtttcacacagccatttccttcctccagtttctgccctcactgggacaccgtgctcccgtctctcaggcagcgaagttcgatccatcaaccaaaatctatgaagtaagtggacttgtcacctgttctaaaagagactttttttttttttttttttttttgagatggagtctcgctttgtcacccaggctggagtgcagaggcacaatcttgactcactgcaacctccacctcccaggttcaagcagttctgcctcagcctcccaagtagctgggattacaggcacctgctgtcatgcccggctaatttttgtagagatggggtttcaccatgttgaccaggctggtctcgaactcctgacctcaggtgatccacccgccttggcctcccaaagtgctgggactacagacgtgagctactgcgcctggccctaaaagagactttctaagaaaaggggatttcttaattattcataccaggtttctgttttagacaagcctatctcatctgtgaatcccgtgaaaatgaatgcaaaagccctttattttctagcattgtttctagggaaagggtccagaacttcagtgagattcttaaaagcacttgggctgggcatggtggctcacgcctgtaatcccagcactttgagaggccgaggcgggcggatcatgaggtcaggagatcgaaaccatcctggctaacatggtgaaaccccgtctctactaaaaatacaaaaaattagccaggcgtcgtggcaggcgcctgtagtcccagctactcggggggctgaggcaggagaatcgcttgaacctggggggcggagcttgcagtgagccgaggttgcgccactgcgctccaacctgcgcgacagagcgaactctagccaaaaaagaaaaagaaaagcacttggaaactttgtaagaaacaaatcttcatttgcggtttttaaattgaggtttaatctatatgtagtaaagtacacaaatattaaatatacagcttgatgcatttttatagatgtctgttactttaaggctcttaaaggtgacagctttaattttaaaacactctatcttacttatctggcttgtttttaccagcattatgagtaagaatgagagcacacctcccctagaccctcttgagatgttccccagagccagaacgtgaactgttgttcgcagcctccttcctccctttaggaagcgtct

SEQ ID NO: 359 - DNA, 2300 bp, Homo sapien
gctgggattacaggcgtgatccaccatgcccagctgcatatatctaatcttgattagaacattggcttcagccaggtgaggtggctcaggcctgtaatcccagcattttggggagctgaggcaggaggatcacttgagcccaggagattgagaccagcctggggaacatagtgaaaccccgtctctacaaaaaataccaaagtttagctgggcgtggtggcacgctgtagtcccaactacttgggaggctgaggtgggaggattgctggagcatgggaggcggaagttgcagtgagccaagatcacaccactgcactacagatgggacagcggagactaccttctaatttcagtgttctaataaactagaggcagagttaatttctgagcatgagtggcctgctaccagtgtactgcatgactttggttctgttttcaggtctttcatggtgctgattcagacatagaatggctacagaaagactttgggttgtatgtagtaaacatgtttgatactcatcaggcagcacgccttcttaacctgggcaggcactcactcgatcatctcctgaaactctactgcaacgtggactcaaacaagcaatatcagctggctgattggagaatacggtcagtttgctcttactgaggaaatgtgggtggcagaagaaagtgattattcattaacctgtcgtccagagagacctgggtttgagccctaccacgctcattgagatgaatggcatcaggcttttcgccaggcatcttcagcagcgtaaaagtggtaggaaattttttaatgctaaggtggactttatgatgggctgatgcagttacactgtgttccatggaaatagtggttgaaaaagaggtgccgcaccagtatttgcccatgctggtcttttgtttgaaactgggatctttctaccagatgattttgtgtgtgtgtaagatcttctgtagggatgattgtgtgtgtgtgtgtgtgtgcaagatgaccttccataggtgggaaagaattctaagggacactgttgtttagctttacactgagcgtttttttgtggcataaggtagcagttttgccccacttcctgcaggccttgctcagcttggtcgttttccgcttggttgctacctctccgaggttgcacctgtcataggaaggtgctactgagctttttcaggaattccacatgccagaatgccagaatttctttttttctttttttttttttgagatgcagtttcactgttgcccaggctggagtgcaatggcgcgatctcggctcaccacaacctctgcctcccgggttcaagcaattctcctgcctcagcctcctgagtagctaggattacaggcgtgcaccaccacgcccagctaattttgtatttccagtagagacgaggtttctccatgttggtcagactggtctcaaactcctgacctcaggtgatcctcccgcctccgcctcccaaagtgctgggattacaggcgtgagccaccgcgcctggcccagaatgccagaatttctaaatataaaagtaaaattacatttggactgataaaatccaaataaaagataaaaattgataaaatctaaaaaccactccctgttacggagcccttaccctgtgccaagctctgggctaagtgcttcaaggatgtggtcctgtgtagtcctcacaacagcctatgaagtacctggttcccatttcacaagttaggtgggtcagcccaaagaggttaaggaacttgtccaaggacagacatctggagctgagatttgaactcaggacaccagtggccccttttctactgcctcttgtgtgtgtccagagtagctgacagtgcccttattttaaccaccgcattaccctgcctccaattctacccagctgttaaaataatggtttatcatgttaaaatgcaggaaatgttggcataactgcagtattgactatgaaaggatctttcatattggaagggtctaaggaagtcccagcacccaaggaatagacaaattgaattgctgtccttgggggcaatcagtaaaacattgtcctctgcaattccagccctctgcccgaggagatgctcagctacgcccgggatgacacccattacctgctatatatctatgacaaaatgaggctggagatgtgggagcgcggcaacgggcagccggtgcagctgcaggtggtgtggcaacggagcagggacatctgcctcaaggtacacctcagccgcagtcacacagaccgcgacacttgggctctgtgtctggccaggttctagt

SEQ ID NO: 360 - DNA, 2300 bp, Homo sapien
tgagcaaataatgcattaattacttggcatgacatactaatgacctttattgatcaactttgtaaaatttttatttttttattgacaaaaattgtataggcgatcatttacatggttatgtctcaataaacctatattataagtcaaaaatgcatttaatacacctcacttaccaaatagcttaactgaacctgctttaaatgtgctcagaaaacttccattagtctacagttgggcaaaatcttacacaaagcctatttttataatacagtgttgaatattcatctcatgtaattcaagtagcattgaatacacttctgaaagtgaaaaacaggttgtggccgggcacagtagctcatgcctgtaatcctagcattttgggaggccaaggcaggtggatcacttgaggtcaagagttcaagaccagcttggtcaacatagtgaaaccccatctctactaaaaaatacaaaaattagctgggcgtggtggcgtgcacctgtagtcccagatactcgggaggctgaggcatgagaattgcttgaacccaggaggcgaagactgcagcaagctgagattggaccactgcactccagcctgggcaacagagtgagactccctctcaaaaaaaaaaaaaagaaaaacagggccaggcacagtggcttacgcctgtaatcctagcactttgggaggtcgaggcaggcagctcacaaggtcaagagatcgagaccatcctggccaacctggtgaaaccctgtctctactaaaaatacaaaaattagctgggcgtggtggtgcatgcctgtagtcccaattacttgggaggctgaggcaggagaatcgcttgaacccgggaggcaggttgcaattagctgagatcacgccattacacttcagcctggcaacagagcaagactctgtctcaaaaaagaaaaaagaaaaacaggtggtaagtgtacttgaaatatggattctactaaatgcaaatcactttcacatcattgtaaactcaaaaacttacaagtcaaactgtcatacattggggaccatctatatatttattacatacaacttgatgttttgatacatacattgatctgttcttatatatgtatattttcttacacaaatgtctctgaataccaatctctttaaaatgttaggtaattaggtggggcacggtggctcacgcctataatcccagcattttgggaggctcaggtgggcggatcacttgaggtcaggagttcgagaccagcctggccaaccgggtgaaaccccatctctactaaaaataaaaaattagccaggtatggtggtgcacacctgtaatcccagctactcgggaggctgaggcaggagaatcgcttgaaccctggaggcagaggttgcagtgagcccaattcagaactgtaaagagttgcagtgaggcaagattgcgccactgcactccagcctgggtgacagagtgatactccatgttaaataaataaaatgttaggtagttaactctgctaacctcaaaaggaaaaatgcttaaccagtacctcttctactcttagggtattttactggatgaagcctcaggtgtaaacaagaatcaacagcctgtcctccctgccggcttgcaggtccccaaaacggtagtgtccagctggaaccgtaaggtgagggcttttcagattaactagagctcttgatgtcagcttcataacagagattttgctcattctaacatgcatttctgttctaatttattagagaactggccactgtctcctttagtttgttctcataaacatacacaaactaattacaccctcttcttctctttctggagacctctacatgcacatacattcttaaatgaatgaatgacctttgcgatgttcttgtctcctcagaagtcataaattggaatttacttttctaattcatcaagttgctgtgttataaagtatttgtattcattgatcataggcagcagaatatggcaaaaaagcaaaatctgaaactttccggctgcttcatgcaaaaaatatcatccgacctcagctcaagtttcgagagaagattgacaattccaacacaccatttcttcctaaaatcttcatcaaacccaatgctcagaaacctctccctcaaggtaaatagtgcatactttgcctgtgtttgagtctcactttatttgatgcaaaaaccaggaagggtgtacaggtctctcttctttgttcaaagggagcccaccctcctttgttcaaagggagcccagttcagctattccagaggctgaagtgggagg

SEQ ID NO: 361 - DNA, 2300 bp, Homo sapien
ttcggtgcctccctcacaagagctcttccaggagttcacttcacaaatgtgtactgagttcccactctgtgttaaccagaatggttccagcgatgtctgcaggaaacaacgtctgcttggaggagttcagagggtactggagggaggaagcacagttggagctagacgctttcttcaggagcttacctgtaaagggcaagagagagatgatggcagttggaaggagatgtgggagccagtgttttttccttttctcttttagttgggaaagatgtcagtgtacttgtaggctgttaggaatgaaccaatagagagggaaaagatagatccagggggcaggggaggtgtaattaattacaggagtcaagaccaaatgggtgaggggaacacagaaccagccagagcttgggaggaggtgactttaaatatgaggctgggccgggcacagtggttcctgcctgtaatcccagtgaggtgggaggacggcttcagcccaggagttcgagaccaggttggtaagatgcagtctaaaaaaaataagccaggcgctggtggcgcacacctgtaatcccagcacttcgggaggccaaagcaggtggatcacttgaggtcaggagttcaagaccagcctggccaacatggtgaaaccccatctctactaaaaatacaaaaaaaaaaaaaaaattagccgggcattgtggcacacgcctgtaatcccagctacttgaacctaggaagcggaggttgcagtgagctgagattgcaccactgcactccagcctgggcagcagagtgagactctgtctcaaaaaaaaaaaataaacagggcaggcacggtggctccgcctgtaatcccagcactctgggaggtcgaggcgggaggatcacaaggtgaggagttcgagaccagcctggccaatatggtgaaaccccgtttctactaaaaatacgaaaaaaattagccgagcgtggtggtgcacgcctgtaatcccagctactcgggaggctgaggcaagagaattcgttgaacccgggaggcgggaggttgcagtgagccaagattgcgtcactgcactccagcctgggcaacagagtgagactccatctcaaaaaaaataaaaataaaaataggctgcacgctgatgactcgtatctgtaatcccagcactttgggagagcaagagtgaaactttgtcccaaaaacatggttttttttgtttgtttgtgacaaggtctcactctgttgcccaggctggaatgcagtggttcgatctcggctcactgtaacctccacctcccgggctcaagcctcagcctcccgagtagctgggattacaggcatgtgccaccacgcccgactaatttttgtgtttttagtatagacagagtttcaccatgttggccaggctggtctccaactcccgacctcaggtgatccacccgcctcggcctcctaaagtgctgggattacaggtgtgagtcacggcgcccagcctcaaaaacataaccttaaaaagaaatttttgagacagggtttcatcctgtcaccccggctggagtgcagtggagcctccacctcctcggctcaagcaaccatcccacctcagcctcccgagcagctgggactacagatgcgcaccaccactcccggtaatcccggtttgtttgttttttaaatttttaaataaacacgaggataagcggggatcgtggccctcgcctggggtccctgctacttcgcaggctaaggtgggaggatctcttgagcccaagagttcgaaaccagattgggcaaacctcgtgtcaaaaatatatgtgatagtcaggtcctccaggccgcaccctagatcacagggttgttgggatgatacaatatgaggtaaaagaacgtgaaattcacaccagagcgctcgaaagtgccaccctaatcgcaggcttcccaacctaatcgcaggcttcccaacctaatcgcaggtgccccaccctaaacgcaggcttcccaacctaatcgcaggcgccccaccccaatcgcaggctccccacactataatcagacgccccgcccgccgcttcgacctggcgcatgcgtggtgcgcacgcgtcccgtctcctcggccgacaagctctcgcgagacgagccgtgcaggctgaaaaaatggcgccacccagtacccgggagcccagggtcctgtcggcgaccagcgcaaccaaatccgacggagagatggtgctgccaggcttcccggacgccgacagctttgtgaaggtgagttcgcggggcctcgggggtaccaggagtc

SEQ ID NO: 362 - DNA, 2300 bp, Homo sapien
gattaatgcaaagagtacaatgccaagcatttcaagcagcacttggaatacagtagcagtcagtaaatgtgggctaatctcattacaaagaatggaggcaaagggaaaagtaagggagaagccatatagcaatcaataaagaagtaactctcaactgtcacccacaaaaaattgggtttggggtaggtaagtccatacagacctatctgtaccaggtacatggtttatgctgtcattgagagacaaaggtcaagatggaaagatggtatcttaaaaatgtattccaaaagcccatctcctttcttgcgtgtggctgaaaattttgctagctccttcacattgcctcttgagaataagaggaaataccagaagggcttcagtgtcccctaacaatttgtggtcctcttaggagggctgttttgaggagggaatgtcatgggggcttgtttctctgcttccagatgcttcctgaaacttggagagtggcagctgaatctacagggcatcaatgagagcacaatccccaaagtgctgcagtactacagcgccgccacagagcacgaccgcagctggtacaaggtgatcagaagcaggccacctgtgagacccagcaccctggctggctcgtgtcctcctgtgtgctcgtggttacagctgagcttctgcggagctaggctgatgctgtgaacttactccttgagtccctggagcctatctataagaggcccagggagcctgcatttccccctacaagtttaattaatacagaaagattattggagaaatacttgttacaccattattatgtgtatgtggtgttggggattgctgctgtcttacagactctgagctgcttgttttcctgggagcatctggacacatggttaatctctggagtgacatcttcccttaggtcatctgttcttgttcagcgtttttctgatttgcatccttgcctgctcctcagctaagaacttaactttctttgtttttattggaaagatccaagtaacatcctgttatgttacaggaaacttttgaaagagataaacagaattagaaaatatataaaagatgtgattgatggaggggtgatttttggaagtgtatatctttggtgagaatatactttcttatttctttttgagaggctttctggtaactacttggtgtggcagatgtcattgacatctttccagtatttccttggcttgccaatactttgtgaattaatctctctgaaatctaaacttgtatctgaggactgcagaagcacttataatacagatcttacctttgtttaggcatgcttcattctggtttgaaaaatgtccattttgtcataagagtaatactctctctaggacagcttgcatgtccaaagctggaaaatacatccggtaaacactattaactggaagcttattaatcagagttgtattctaaccagagttactttcattcattaagcttttaggaagtaagcaaatcacaagaaaaaagttggtttcaggaactttagttttagtttttaaaagcttttcctaatgtgggtcccttttgttttatgatgtattctaccatcaacgtcatggccctgtatgcatgccaggactgtttgtcttgttcaccttgaccccaggtcattgccaggcacatagcagatacacaagagatattcagtgaataaatgaaggtatgggaaaactgaaacctgggtcattgtagaattcttactcatcaagtaaaggttagttgtgatcaatctattctccttagttgagaaaacggatacacctgtgttcaaggtttttggcaaggcatacaaacgaatttcccaattattcagaaagttcagctattaatgggtcacgtagtgtcctactatcactgcaaagttaccatgcctggaagcaaactctgcctcacactcgctaaaccaagtggtggtacgctgtagagtcattgccgctcagaaccccagagagagtagtattcctttatccaaataagcaccagcggttcttccttcaagcattgagcactggttctctgtcaggccgtgggctaggtgttgggaccaggcagatgggtgagattctttctctgtcaggctcctatgctcttcatgtcttcctttgtccactatctggtgacctgtcaaaactttgctcccttgaaatattgtgatgactgctgcttgcccccacttctgcttgccatttctgctctcccctaaatgtacactttatacccagtgcagctctgctttctgggtgaaagtgccagccctgtgcctg

SEQ ID NO: 363 - DNA, 2300 bp, Homo sapien
gggatgctatacatcagtggtccccaatctttttggcactagggactggtttcgtggaagacaatttttctatggaccagggtgggggtggggagatgggggatggttttgaggtaaaactgttccacctcagatcttcaggcagtacttagattctcacaaggagcacgcaacctagatccctcacatgtgcagttcacaacagggttcacactcctgtgaggatctaatgctgccaccgatctgacaggaggcagagctcaggcggtaatgctcactcacctgccactcacctcctgctgtatggccctattcctaacaggccatggacaagtacaggtctgcagcctggggattagggacccctgctatacatgactgtatggtacatagcacttctgtggcatgtggtttaagctcagtgtcatttgatggccaggagatccacttgaaaatccctatttttagcagaccttgtaggatgccaatatttggggccagagtctcgttactaaaatgaatgctatggagctaaggctgtggtgcccagctgggctagacatttgcaaaaagagagcagactggcagacagtgccaattctcaacagaatcttttgattagaatgccaagttgctataagggtatcagtaacatcctcaccctttagcaggcaaaggaggctgggtatgtgagaaaacaaactctgatccacctgatcctccactgctttttgattctgagaaaaaaaaaaattgttcagtaactccagctgcctgaacagaaattactttctgaggagctagaagccctgactggaaaagagctctgggggattatggcatgggaggagagctgtcaggcatcaggcttatgtgggaaggacccacgctgactacaacagtacaagtaactgcctgagtggctccataacatggaaacagcaatcgtatgttccaaagacagagttactgttttaaggacagaggaacctttgtatagattcttagtgaaaagcttattttaaggatgtttgctgaaactccatgtttttcacatttcttttcaaaagagcattgtccttcatatatagtacatgaaaaattacaatattcatgttttttagatacaaagtcatatacaaatagaggaggaataatttcaaattgcaaaccataccagcaaagaaagagggaaatgagactctagatatggatttattaggtgacagggattcttttctctatattttaatatattttccaagttttgaaccacgggctaaggatgggcctgttctctgtcctgcctagaaactgacagaagcatgggtgaccaatcccagacatgcttggcactgctgagttttcatctctgttgtaatcttctgacacctccttgcaaaatatcaagtgttatatgctaatactggccctctctttgttgaaggagaaagcatgtaaaaagacaactgtccaaaccctgtggctacaaagtctttttttggcttcctaagagatttactctattcttctatttctagaacttttctaagttggaagatttcaaatgtgagatagtgttagatccaggttgagtaaggattttataaaatactaaataatgatcagagatgggaataatcagcctagataaaagcatattcagcaggatgtcaaaatataccagatcctcatataaacagcatggattacattaacaggcctccctgggtgagtagcgtctctttcgcctaccttacgctcaccccatggttatataaccttttgaacggaatttggaaattcttctgaccctgtcctgcttgctgatagagttgagccagtggctggcaggggcataatctaataggcgaaactggaaacacacaaattcacagtcctcttgtcttagcccagagactgtacaggcaaggaaagaaagactcgccccatctccctcctcccctcctctggcctaagttgccgctgacttcacccaacaggcacctgaccctcccagatgagctgggaggggctaaagcctggtgcagccatggtaggggtggaggtacaggcagcaaacaatatttaagatgctgacttgtggagcattcgggcttggaaggaaagctataggctacccattcagctcccctgtcagagactcaagctttgagaaaggctagcaaagagcaaggaaagagagaaaacaacaaagtggcgaggccctcagagtgaaagcgtaaggttcagtcagcctgctgcagctttgcagacctcagctgggcatctccagactc

SEQ ID NO: 364 - DNA, 2300 bp, Homo sapien
tcccccatgtaaacagagacatataagaaatgcataaatatttttgtaaatggttgtattatacttacattgttgcacaacttgtaatttttaaactagttgtgaaccttttccttcttagcaaatattcatctaattaccactatttattgttattattattatttgagacaggatctttctctgctgcccaggctgcagtgcagtggagatcacagatgactgcaaccttgaagtcatagactcaagtgattctcgtgcctcagccttccaagtagctgggactacaggcatgtgctaccacacacagctaatttttaaatttcttttgtagagacaagggtctcactatgttgctcaggctggtctggaactcctggcctcaagcaatcctgcctcggcctcccaaagtgctgggattccagggatgagccaccatgctaggctctaaattataattattaatggctatgtatttttcttattatgaatgcatctttttttttttttttttttttttttgagatggagtctcgcactgtcaccccagctggagcgcagtggcgcgatctcggctcactgcaacctccgcctgctggcttcaagggattttcctatctcagcctcctgagtagctggcattacaggcacctgccaccacgcctacctttttttttttttttttgtatttttagtaaagacggggtttcactatgttggtcaagctggtctcaaactcctgacctcatgatccgcccgcctcggcctcccaaagtgctgggattacaggtgtgagccaccgcgcccaaacgaatgcatcatattttattggactcctactttgaaatatttaggaattttcagtgtttactatgacaaatagcactgtgattaaaaaaaaatgtagtcaaatccacttttgctgttgatttttttttttttaatctgtagagacatcgtctcgctatgttgcccaggctggtctggaactcctggcctcaagcgatcctcctgctttggcctcccaaagtgcgtgggccaccgtgaccagcagttatttattttctttggttgtgtgtgtgtgtgtgtgtgtgtgtgtgtgtgtgtgtgtgtatgtatgtattgagacggagcttgctctgttgcccaggctagagtgcagtggcacgatctcggtgcatgcaaccttcacctcccgggttcaggcgatactcgtgcctcagcctcccgagtatctgggattacaggcgtgagccaccatgcccagctaatttttgtattttcagtagagacggggggtgcgggtgggggaatttcaccatgttgaccaggctggtctcgactcctgacctacggtgatccgcctgcctcggtctcccaaagtgctggaattatgggcgtgagccaccgcgccgggccagctattgattttttgaaaggatttttaaaaaataatgttgctttgaaaatttttatttatgactagctcttttggttaaaacttggctatggtttctctggagtgatcctgagttggataattttgggaaagttagagaatctaattaaaaacattttcaaatgcttattaattgtaacaaaagagatatcacaggatccataaagagcgctagcccgaaacgtcttttgatgcagtaattcctgggcaccggcatcgctcacattctcctctcagaattacaccgggaggggtcgcgaacctctgctagccgctctcgctgcgatccggagatacccagacaccggactccttgagttcacagcccggatgcagaagggaatcctagcagcgccgtaccggatgtgtgagtggaagtgactgaggtgaactcacgaccgattggttctcccgagtggacccaagcctgttttcacctgccactggccgcgtggtttgtctatttgaacagtccccgccccctggagaagccgggtcctgaagcttctcttcttcattactattggcctgtttttcagtccatcttctccctatacctgtcgattggtcctcagggctgggaaccctccttccctcgctcccggcttagaggacagcggggaaggcgggcggtggggcagggggcctgaagcggcggtaccggtgctggcggcggcagctgaggccttggccgaagccgcgcggtgagtctagggcctggcacgacccctctagggcggcgtaatgtccagacccacggccagcctgcccgtgggggggccaggggaagccgcccgtctgggacgtggggtccccacattgccggccccacgacctgggc

SEQ ID NO: 365 - DNA, 2300 bp, Homo sapien
gtcttctcctgggctcaagcgatccacctgccttgtcctcccaaagtgttgggattacaggtgtgagccaccacatctggtctttttaattttttagagcggagatctcactttgttgcccaggctggtctctaacctgagctcaagagatcctcccgccgggtgcggtggctcacacctgtaatcccagtactttgggaggctgaggcaggcggatcacgaggtcaggagatagagaccatcctggctgacacggtaaaaccttgtctctactaaaaatacaaaataattagccgggcgtggtggcgggcgcctgtagtcacagctactcgggaggctgaggcaggagaatggtgtgaaccctggaggcggagcttgcagtgagccgagattgtgtcactgcaccccagcctgggcaacagagcaagactccgtctcaaaaaaacctcctgagtagctgggactacaggcacacattatcacccccagctccacctctttagtttgcactgggtaccacaaattatgtagtcagtcctgtgtgcatctatgttgcatgtgtattataatttcactgatgtaaatgatgtgtagcatacagtttacaaatactaaaatatacagtacaggactctattgtaaactccatatagccagttctcacagtatgctttctttgatgttgtgtagcttccctatggtcccaattgatcaatgagcatagttcagacatgaatgttggttgatattttatgttaggagtaagaggaaagtgaaacaatcaaaagagatatgtcagaacttcactagtttgtcaaggctacaagcgacttatttgttcaactggataataatttgccaatgctgaacgaatatttcctcaaagttttggtgcattcacttacacactttttttctctcttttttttcttttttgagacggagtctcgctctactgcccaggctggagtgcagtggcgtgatcttggctcactgcagcctctgcctccagggttcaagcaattctcctgcctcagcctcccgagtagctgtgattacaggaatgcaccaccacccccggctaattttttttttttttttgagatggagtctcactctgttgcccaggctggagcccattggcatgatcttggctcactgcaacctccatctcccgggttcaagcaattctcctgccccagcctcccgagtagctgggattacaggtgcctgccaccacgcacggctaatttttgtatttttagtagagacagggtttcgctatgttggccaggctgatgtcgaactcctgacatcaagtgatccgcctgcctcggccttccaaagtgctgggattacaggcgtgagccaccgcaccctccaacacttttaagtttaaccagtaatatgaacattttctccgccactttcttaagtctagacgacttagcagttattaagcatttgctgatttgcgtggtgtaaattctcccaccatgggcagatttcaagctgctgaaggatgtcactgaatgaaaagctgataagaggtgagcagtagcacatcatagagtatttccacggtgcagatatgatagacgtcagaatgtatgcacacagcaggcgctcaataaatgcttgtagcatgaataaattaatgaatcctacttcgtgaatgaaagtgcgcccggtaagtcctaaagcaacacgccttcgagttcttatgatgctaagagaggctgattgcagttagtctggaagtagctgcggggcgcagtgcaggcaggaaaagggctggatgccgggtcaccgcccggccccagctcctggcccgtccccgctcccggtccattcccgccccggccccgccccctcccgccccaccaccggtctggccccgcccctcagccccgccccacccctcaccgcccttctccccgcctctgaccccgcccctcctctgactcggccctgcccgccccgcctctgaccaggcccccgccccccacccctcaccgcccttctccccgcctctggctcggccccgccccctcccgccctccagcccaccctccggtccagcccgcgccgccggcacctgtttccgggcgggcctccagaggccggcgcacaagatggcggctctggcggcctaaagaaggcggccgcggctcagccgtgggctctaacgcggggctgggggccggagacagacttcgcccaggtgacgggtagtaggggcggcgccgcttggcctcgtggggtgtaagacccacttgctgttgcccccggaccttgcc

SEQ ID NO: 366 - DNA, 2300 bp, Homo sapien
ggccagctaggcaacatgaagcaggacccctttgaaggtggtgagaatttcatcaaggacctatatcaaacccactaaatctatttcccagcagagtggcagctgtatccccaggcatggactgagggtggcacagcaccatggggcacaccaatgggatggccggtggatttgtcagactgagaggaacagtgctggagccttggagaactttgaggaggctcctagaagcagccttaaaacaaacggaaaataatcaagccattctcccagccaagaaaaccctttgctctcagctgggcttgggaacacactttgtgtctctctattgctcccttaaaaacaaatcttttccttgttctccctcctcccaccctctcacatggctcctcattctctgccctccctctaggatatggcaaatgggactagaagtttgcagggtggtgccaagtctggtcctctgtactcatatcagatttggcctctggtcctgggacagcaattttcacaccctctacttctcgggagagatctcctgtctctttctccccttacagctcacagtggcacccttcaccccaggaactgcccccaactctaatgtctttaaggccagatggagccattgggagtcttctgacagacttggccaacctggcaatggctctcttgagaccttgagcacatggggagtgagtgccagggcagggacactggctcaggccatttgcttctgcatagataagctctcagggcacccagagtcataaataccaatgcgtctagttgacagccagtcagtgggtacagcttccagccagggactgtacagcagagagacagagcaggagcagcaggtgaacagcacaggagatccactcagcaccctgacatttagaggtgcgtctcacccagttttcctcttttaaaaataagggctggggatggggaggggctgctgtgggttcagcatcagtgtgttggctggccgggtttgttatatttcattcataactctcccatattcttctctctcccataagccggaaacctcctgaaggcaaggattgtgtctcaccattgccctatcttcccaggtccttggtcggcacacacccaggacaaatgacaagctcatggctcaccctcacacagcatggcaatggcctccctcctttctggcttccgtcactgacatccctccaccctgcagctgggggctggcagctggcccccttttgaggggtcccacttcactctccctgggcaacaccaatgccaatgctctctgagccctgatggagagaaatgggccagggtactggcctgcccccctcccccaggctctttctccttgtggccctttggctaggggtgtcaggcaggtcatgtgctagagctggagggatgcccggtcccaggggctggtatggctccgggttctggtgccagaggggtaaatgaagaacaaacgaggaagggacggcgccaggagcctgggcttggcagctccctccggagggcgcccggggatgcccgcgagtgtccaggaggctggtgacctgccaaggctgggcgggctggctggagaggagcgggagcgcgggcccgggagagacttgggtatcaggaaactcggaggcggggctggggggtggtgcctggcccggaccgtctgcaggggcggggaccgacccccaggggtcgctgcgccttgcgcttcccccgcccgcgggcgccagggccgggctgaaccaccgcgcggatcggcagggggagcggcggcgaagacagcgccagacagcgggtcccagagaccgcagcgcgcggcgtggcgcagggtctcgccggccactgattcaaggcgcggcggcgcggagcccgagaggcgccagggattgggcggcagcgcggctccggagcctggctcggacacccccgcgacccgtggtaggagcccggacccaaacaaaggcgggcggcgaataaaaggcggcggcggagcggagtgctcgggttgcgagctgaggactgggattcgcgcgcagcttcccgcggtctgcttgccctggagcggagggggagccccagcctcctgcggctccgagaagcttccccctgcgacttccgcgaggagacgagtctgcgcagcgtggtggccgccgccccccgaccctctgcgcactctctcccgcgccggcggctcagcctagccccgttcggccggccgaggtgagtgcacggccgcggggcgccatccgggcttggtctcggggctgggggatgcattgctagga

SEQ ID NO: 367 - DNA, 2300 bp, Homo sapien
tcctccttcctgcagatgttgcaccctgagtgcaaggagctgcccgagcccaacctgctcccggggcagctgtcccacggggcagtgggcgtcagggagggccgcgtgcagtggatctccatggctttcgagtcggtgagcccaggcagcctcactgggtgccatgctgcgtacttgcccggggtgtgccacctctgatcccagccctcttcccagatcgggggggagatgctgaggcccagagaggtggagtgacttgcctgaggtcacatagttagtgggtgtcagtgtcgagtgtgaaaccagaccgcctaactgcagagctctgccctttcttccccatgggcggcctgccagttcccttccacccacctttccccttccctccctctccaccaactgggggtccacggtattttttagtctctggtctgtaggggccggtggaagtccaggatgcccccctctgccactgtgggaggccaggttggggccccagaccctggcagcctcccttagggtggccaggagtccggccatcccccgtacctccctgctgcctgtcacctctggacgctcgctgggctctgcccaaggaggcataggcacacatgtgtgcacatacccacacatgcacacactcctgacctgggcactgtggggactctcggccctggcacatggctctcccaagcttggcaagtccgtccctgctgcctccgtgcagagacctgggctcaatcgttgctgggatcctggtgtgctctgtgtccctgagcaagttactcgtcccctctggcctcatctgtagaagagcccctctggcaggtgtggagataagaacacatgggaaagtctggggactaagaatcaatgtgacggcttaactggggaggtgattctcctctggccccccaccctgacttccttcccactatttatttgtgttactcattgcacaaccaacaaaaccagccatgaaccaggagggcctcagagccctcagcgagcccccaggcaaatgcagacaccagttcaaagccccagatgggtctttttaggttatgttttttttgctgtggtaaaatatacataaggtaaaattgaccatcttaaccggtttttttgtttgtttgtttgttttgagtcagagtctctgtcccccaggctggagtgcagtggcacgatcttggctcactgcaacctccacctcccgggttcaagcacttctcccacctcagcctccccagtagctgggactacaggtgcacaccatcacacctagctaatttttttaatttttattttttggtagagacggggtttcaccatattggccaggcgggtctcgaactcctgacctcaggtgatccacccacctcggcctcccaaagtgctgggattacaggcatgagccactgcatctggcctgaaccatttttaagcatacgactctgtggcattaagtatgttcacactgttatgcaaccattaccatcatctacttgcagaactttgtctttccaaactgaagctctgtccctagtaaacactaactccccctctccccctcccacagccactggcacccaccattctactttctccatgaatttgacaactctgggggcctcatgtgaatggaatcatatggtgtttgtcctttggtgactgtttcttttttttttttttttttttttaatggagtttcactctgtcacccaggctggagtgcagttgcgcaatcttggctccctgcaacctccgcctcccaggttcaagtgattctcctgcctcagcctcccaagtagctgggattacaagtgtgcgccaccacacctggctaattttttgtattttcagtagagacagggtttcaccatgttggccaggctggtctcgaactcctgatctcaggtgatccgcctgcctcagcctcccaaagtgcggggattataggcgtgagccactgcgcccagccggtgactggctcattttactcagtgcaaggttcaccatgttgcagcaagtgtcagaactcacctccctctgcagactgaagccccaggcagttccagggaggagagaagtccccactcaggctcaccacacggcaaggtgcccgcttccaagctgaccccaccagcactcagacacgcatgcacacacacacgcagacctactatgaactggcttgtgctcagcaagagcagaattgatgagcagataccttaagaatcttttagagcagggtgagtgcctatttctctcattcatcatccatgagcacctctcgggac

SEQ ID NO: 368 - DNA, 2300 bp, Homo sapien
tctctgctaaaaatacaaaaattagccaggtgtggtggcatgtgcctgtagtcccagctactcaggaggctgagacagaattgcttgaacccgggagatggaggttgcagtgagctgagatggagctactgcactcctgcctgggcgacagagcaagactccatctccaaaaaaaaaaaaaaaaggtcaattttatgttataggaactatgtttcaataaaaacatttttttttaggccaggtgcagtggctcacgcttgtaatcccagtactttgggaggctgaggtgggtggatcacttgaggtcaggccttcaagaccagcctggccaacatgatgaaacctcgtctctactaaaaatacaaaaattagactggcatggtggtgggcacctagctactcgggaggcggaggcaggagaatcgcttgaacccgggcagtggaggttgcagtgagctgagatcacgccattgcactccaccctgggtgaaagagtgagactccgtctcaaaacaaacaaaataaacaaaaaacaagctttttttttttttgttttttttagtggatgcatggaaaggatccttttggctgctccatggggaatcagcaactaactagccaggagcctggaatcatgaagcacagcagaaagtgccatgggcacccgtgcaaaagaccaagcagcagtgatgggaagcacccagtcagctcccccacggggcttcatggagaggagggaaagaaggaacagggaggaccccaggcctgagcctgtgggtggaagttgccactactggtcaagagggagcagactaggcttgggccggaacagcttctgcttcacgtttgttagattccacgtgttggggtggtcattagggcggttctcctccaggcacttgtaagctagagggatgtgcaagcggggtggagcaggtatttgattgctgatcccagaggtgctggaactagccgcaccagggtggccaacaacattcaaggtagtggctgccccaccagcctgagtcctggatggagaagacacaagcaaagccccctgtggctcaggacagctgtcagcaggtgaggaacacgcctttgttgttgcgagcccctgcaatctcaaggtggttgtggttgtgagaggtgacagcgtgctggcagtcctcacagccctcgctcgcttgctctcggcgcctcctctgcctggattcccactttggcggcacttgaggagcccttcagcccaccgctgcactgtgggagcccctttctgggctggccaaggccggagccggctccctcagcttgcagggaggtgtggaaggagaggcgcgagcgagaacccgggctgcgcgtggcgcttgcgggccagctggagttccgggtgggcatgggcttggcgggccccgcactcggagcagcaggccggccctgccggccccgggcaatgaggggcttagcacccgggccagcggctgtggagggtgtactgggtcccccagcagtgccagcccaccgtggggcagggctcgggacctgcagccctccatgcctgagccttcccccacctccgtgggttcctgtgcagcccgagcctcccccacgagcgccgccccctgctccatggcgcccagtcccatcgaccacccaagggctgaggagtgcgagcgcatggtgcgggactggcaggcagctccacctgcagccccggtgtgggacccactgggtgtagccagctgggctcctgagtctggtggggaggaggagaacctttatgtctagctcagggattgtaaatacaccaatcagcatcctgtgtctagctcagggtttgtgaatgcaccgatcgacactctgtatctagctactctggtggggccttggagaacctttgtgtggacactctgtatctagctaatctggtggggacgtggagaacctttatgtctagctcagggattgtaaatgcaccaatcagtgccctgtcaaaacagaccactcggctctaccaatcagcaggatgtgggtggggccagataagagaataaaagcaggctgcccgagccagcagtggcaacccgctcgggtccccttccacactgtggaagctttgttcttttgctctttgtaataaatcttgctactgcttactttttgggtccacactggttttatgagctgtaacactcaccacgaaggtctgcaggttcactcctgagccagcgagaccacgagcccaccgggaggaacgaacaactccagacgtgctgccttaagagctgtaacactcaccgtga

SEQ ID NO: 369 - DNA, 2300 bp, Homo sapien
cagctattgtgtgacttggggatgaggagggacttattaaaagaaactctatcaagcaaggagatgacataggggcttggggaaggaaactttctccacctccttttcccatccgtggccctcagttttctcatctataaaatgggggtaatcattgtgccaggccatacaaacaggacagacgtccaaatcccctgaggaaggggacaagggcattctgaattgtaaggaggcaggcagatgtcaccgcggcagccggactgtctcttgcatcccagtcggcttcagctgggccatcacagccttgagtaagtggacaccgagtgcccaagatgcctggacgagggagagccagtgaggaggagacggggccactctgggtgatcaggaagactacagctctcagacctacggatggggagttcccatgggctaggccctggagagccaaggcggtggtgggaacaggccaggcactggggaaggggacaggtggcaggacccagacccaagtctccaggcccaccagcccctaacctcctcatatgcagcctctcctccctgcccaacccacagtcaggcccttgagagctttcacagagcccagagcacacagtgagtcctcagtcaatcttactgagtgaacctcattgaacacagcacttctccttccttattaacatttttttggccacatctttatgatgtggggatttacaccggcccctttggcaaagaggaaactgaggccaaaaaaggcttaacagcttctcccagaccacatcgcagaacggcaggaagacagaggaaaatgccaggccctgaagtcacatcacctgcccaggcagatgcccacagctctctggggagctaggcccagtgtcctcacctctccagccctccctccggccctggccccatcggacacctgatgctccccgaaaggtgcacctcacccagtcccctcttctggccccggggcctggcactcgaggccccagatccaattacagctccccccaccctctctcttacacacacaactccccacattgttgccggcggaaagttatctggcccctggaagctgcctgcctgcgaggctgactcactcacctggagtgggccccagagtccagggtatagctgatccctgggaaaaagcaggagccagttctggagccctacagagggtgtggccagaaggccgtggattgggagcaagggctgcgagagctggaattttcagggctggaggcgggggaatggggggtgagggggggcctgagctttcatcagtctgtttgccaccgcctaacccaagcaatgcccatccccagctggacctgatgaggaaagagtgagggctgtctgcaggcaggtcttgtttccatcctgactcagcaggcaacccctgcaggccccgcagggagttggagggatgggggtgaggggtcttgggtgccagagaggatgactgggcagcctgggaaggccctgagcaccagccaaagctgcccccaacgctccctcaccgctagtcgggtccccactgggcatctcaccaccccggggaggggcagcccctccagacaagggagctcaggaggaaggcaggaataggtgaggccaggcctgggaccccaaggaacccacggggattcagacggcccaaggcccagagctggaagagctgatgaaagaaaaggctcgcagcctccctcccagacgcatcccaggcccccgccagacagaccctcaggaagctgggaggcgggaatgtgggggtcctctggtgctacttcctggctaaatgggacccaggagttctctctccttgccagtcgcctctcaaggcctcccgccagaccaagatagcagagagacgtgctctttggagaccgcctctagggcttcgctggcgtgaaagtttgccgcgccaggtctccgggtcccctcgctctctgacgcccctctgtgcagcgctcgcccgccgaccccatctcccctccccgccgcagcgagcggtccaggcgtcggctacctgggtcaccgtctccgtccatcgctgcggagggcggtcgcgagaggaggagccggagcgctgcgggctgcgcgagtcccggggcggcgagtcccggcgctgtccgcgtctgtgtcggtcccggcgaccgcgcctcttaaaggcccccgacccgacccgccccgccccgcctctggccccgcgcccggccgccccgcagtcccagcagtctgctcgaggcccggggctgcgggttcctcagcggaccgaggaggct

SEQ ID NO: 370 - DNA, 2300 bp, Homo sapien
aaggggacaggtggcaggacccagacccaagtctccaggcccaccagcccctaacctcctcatatgcagcctctcctccctgcccaacccacagtcaggcccttgagagctttcacagagcccagagcacacagtgagtcctcagtcaatcttactgagtgaacctcattgaacacagcacttctccttccttattaacatttttttggccacatctttatgatgtggggatttacaccggcccctttggcaaagaggaaactgaggccaaaaaaggcttaacagcttctcccagaccacatcgcagaacggcaggaagacagaggaaaatgccaggccctgaagtcacatcacctgcccaggcagatgcccacagctctctggggagctaggcccagtgtcctcacctctccagccctccctccggccctggccccatcggacacctgatgctccccgaaaggtgcacctcacccagtcccctcttctggccccggggcctggcactcgaggccccagatccaattacagctccccccaccctctctcttacacacacaactccccacattgttgccggcggaaagttatctggcccctggaagctgcctgcctgcgaggctgactcactcacctggagtgggccccagagtccagggtatagctgatccctgggaaaaagcaggagccagttctggagccctacagagggtgtggccagaaggccgtggattgggagcaagggctgcgagagctggaattttcagggctggaggcgggggaatggggggtgagggggggcctgagctttcatcagtctgtttgccaccgcctaacccaagcaatgcccatccccagctggacctgatgaggaaagagtgagggctgtctgcaggcaggtcttgtttccatcctgactcagcaggcaacccctgcaggccccgcagggagttggagggatgggggtgaggggtcttgggtgccagagaggatgactgggcagcctgggaaggccctgagcaccagccaaagctgcccccaacgctccctcaccgctagtcgggtccccactgggcatctcaccaccccggggaggggcagcccctccagacaagggagctcaggaggaaggcaggaataggtgaggccaggcctgggaccccaaggaacccacggggattcagacggcccaaggcccagagctggaagagctgatgaaagaaaaggctcgcagcctccctcccagacgcatcccaggcccccgccagacagaccctcaggaagctgggaggcgggaatgtgggggtcctctggtgctacttcctggctaaatgggacccaggagttctctctccttgccagtcgcctctcaaggcctcccgccagaccaagatagcagagagacgtgctctttggagaccgcctctagggcttcgctggcgtgaaagtttgccgcgccaggtctccgggtcccctcgctctctgacgcccctctgtgcagcgctcgcccgccgaccccatctcccctccccgccgcagcgagcggtccaggcgtcggctacctgggtcaccgtctccgtccatcgctgcggagggcggtcgcgagaggaggagccggagcgctgcgggctgcgcgagtcccggggcggcgagtcccggcgctgtccgcgtctgtgtcggtcccggcgaccgcgcctcttaaaggcccccgacccgacccgccccgccccgcctctggccccgcgcccggccgccccgcagtcccagcagtctgctcgaggcccggggctgcgggttcctcagcggaccgaggaggctgggaaaggtcaggagtcgttttttttccaactggggaggggtccgatttggggcatctcgcagctcgctcctgggggactgctgggaggaggcggctaggggaggcacggagaggctgggtcaggccgagggtgaggggcgggtggcccaggcggagtcggagtataggaggtgccttccgccccaccccccacaccaggtaattttcctacgacgcggtgggggtgcgtccctggcccagcgctgcgcggggcggggcgcggggcgcgggggcggggcctggcgggccggggcggggcctcgctttccaggcaagcgcaggtccaggcggtgcagcttgggcggcccaacggatcgtgccgcggcggccgagcgcaggtgaccggcaggagggggcgcggggggcgctggggagggggcgcggctgggcgggggctgccgggaaggctcctgggttccgggtcgcgccgcagttgccgagg

SEQ ID NO: 371 - DNA, 2300 bp, Homo sapien
atcttaagagcagaataagaggccgggcgcggtggctcatgcgtgtaatcccagcactttgggaggccaaggcgggcagatcacctgaggccaggagtttgagaccagcctggccaacatggtgaaactgtgtctctattaaaaatacaaaaaattagctgggcgtggtggcgggcaccggtaatcccagctactcgggaggctgaggcaggagaatcgcttgaacccaggaggtggaggttgcagtgagccgagatcgcaccattgcactccagcttgggcaacagagcgagactccatctaaaaaaaaaaaaaaaattagccaggtgtggtggcacatgcctgtaatcccagctacttgggaggctgaacttgggaggtggaggttacagtgagccaagattgtgtcactgtactccagcctgggtgacagagtgaaactccgtctcaaaaaaaaaaaaaaaaaaaaaagagtatagtaagaataagaaacaccactcttggcctcagtttgcccatctgaaaaatgtgtgcactaacagtagctacctctttgggttactgtgagagaagtaaaggtgttaaaccatccaaagtacccggctcatactaagtgctcaatacatgttcctggtgtcatgactgtgtactggaggcatgccagacccggcctgtaccccaccttcagcgcacgggttgtgcaggaggttcctgtgcaggctccgtaagaagtagaagatcttccagtcggccacgggctggtcccagtcctcagtgatgaagccctctcgcaggcacttgcgtttccagagggtcacgaggtcgatgaggtcccgccagaggctgcagaccaggcggcagttcagcagcagctggcgggcgggcacgtgcgtgaacagctccagcaggatgttctcgggcagctcgttgatgttccccacagccatggcttgtggcttctggacaccctcctgtagctgttgaaaagctatgctgcaggcctcatccctgctctgccatttatctcgggagagcatggtgcctctcccagcctgtttccttctctgtaaatggatgccttacctccaggggtcactggggcggtccaaggagcttgggacacatcaggtactttaataaaaggtgagctctgatttttttctctggcctctcacaatagaggtggaaggcactgcccaaggtcaaaaataagggcagagggggaagaagcccggatcttctttgattccagggccagcctttttcagtaggccagtctttaatggggatataatgcgcagccgggcagagcaccccaggcctccggtgccgtcaccatcctctctcccatcctcagaacatgatgggaggaggaggctaattatcactgcctcccgcggaggtccaaagggctccagccaccttctcaagatctcagaggacatgatctcctgcctaggtgggagtggcaagagggtgggcgacagggaagggcccttcctatctccccacccccactcccacccccagccccgcggctgggctccgccagccccaagtccgccagcgcgcctgcagcctccccttcccacgctgtgccttaaaatgccccccaaagtctgggctcggacccctgtacatcgatggcgaccccagcccccgttcgcagccgcgcagcgcagcccgggcaagctcggcggcctgggcctggtcggtgccaggcctccctcggcaactgcggcgcgacccggaacccaggagccttcccggcagcccccgcccagccgcgccccctccccagcgccccccgcgccccctcctgccggtcacctgcgctcggccgccgcggcacgatccgttgggccgcccaagctgcaccgcctggacctgcgcttgcctggaaagcgaggccccgccccggcccgccaggccccgcccccgcgccccgcgccccgccccgcgcagcgctgggccagggacgcacccccaccgcgtcgtaggaaaattacctggtgtggggggtggggcggaaggcacctcctatactccgactccgcctgggccacccgcccctcaccctcggcctgacccagcctctccgtgcctcccctagccgcctcctcccagcagtcccccaggagcgagctgcgagatgccccaaatcggacccctccccagttggaaaaaaaacgactcctgacctttcccagcctcctcggtccgctgaggaacccgcagccccgggcctcgagcagactgctgggactgcggggcggccgggcgcggggccagaggcgggg

SEQ ID NO: 372 - DNA, 2300 bp, Homo sapien
tgctctgacagctggacacatgagccctggatgagtatggtagggggtttgaagaatcccctgtccacctcccaaatccaggcccggccccctctggcttggagagcattccaagcccccaccccacccctagaactgccattcccaagacctctgtctcccagccaaccacccttggaacttgcctcttgtcctgctggaaagatagcagtgttctcctgacttcgccctactgcatgcagccaaataaaaggtgtgcccagtctaacctgtgccctgtggtttctggaaggaaaggcagactttaggtggtcctgcctggacctgcagatggtacaatggcatggcttctgtctaaggtacagaggggttggcatttcaggaaccaggccatcacagaaacaggttcatgggcagacccctcagtgagctgcaggtatctcacctggcagccgtccagtactgctggcttcctctggaggcccagccacaggctggggttggggtgtgtggacatctctgggcagctcttgagtccaccttgtgccagatcagcagtgccacccaggctctgcctcctggtgttactctttgccaacagctttacggacattggatgaagccgaagcatttagaatggtgcctggcacacagttggtgcgtgatatggttaagctttgtgtccccacccacatctcatcttgaatggtaatcctgggtgtttagggagagacctggtgggaagtgattggattatgggagcggttttcccccatgctgttctcatgatagtgagtgagttctcacgagatctgatggttttacaagtgacggtttccccggctccctcctgccgccatgtgaagaaggtcgttgcttccccttcaccttccaccaccatgattgtaagttccttttttcttttcttttcttttttttttttttttttttgagatggagtctcgctctgtcgcccaggctggagtgcagtggcgcaatctcagctcactgcaagctctgcctcccaggttcgcgccattcacctgcctcagcctctggagtagctgagactacaggcgcccaccaccatgcccggctaattttgtttgtatttttagtagagatggagtttcaccatgttggccagggtggtctcaatctcctgacctcgtgatccacccacctcgacctcccaaagtgctgagattacaggcgtgagccaccgcgcccagcgattgtttcttgaggcttccccagccatatggaactataagtcaattaaacctctttccttttataaatcacccagtctcgggtatttctttatagcagtgtgaacatggactataatccagtgctcaataagtactcctcacatttagctatctcagtcaagggtgagctagataagggctttggccagggcaggatcaccacccaccagcccatggcaaactgcaaaaggacggccttccacggagaacatgtagccctgactgcaattaatgtgtcctgggccagtccccttgtgcagtacacagcctgcacaacccttggtggttgcctgaacaaggtgcttgctaaatatttgttgactgatggaagaaattcatgaacttaatcctgataaaaaacctcagaggttttttattttttgagacaaggtctggctctgtcgcccaggctgcagtgcagtggtacagtctccactcactgcagcctcccaggttcaagcgattctcccacctcagcctccggaggagctgggattatagacctgtgccaccacgcccggctaatttttgtatatttagtagagacagggtttttgccatgttggccaggctggtctcgaactcctgacctcaagcgatcctccccacctcggcctcccaaagtgctgggatcacaggcgttagccacctcctagcacctcaggttttttacctttgagtctatgaagcctgcggaggtcacgccctagggaaagaaggagcccactgggtgtcaggtcctgcctctagggaggggaccgcgggtcaagggtggagccctgggccgcataaggaaggaactagtgcggaggtccggggagcggccgcgcgttcgggagcttcggccctgcgtaggaggcgggtgcaggtgtgggtgctgagccgcccgccgcctggagggggagacagcttcaggacacgcaggccgcagcgagggcccgggccctggggatcccaggttcgtcttcccgcggcgagggttaggggccgggccgagagggacggcagcggggtccggggcggggg

SEQ ID NO: 373 - DNA, 2300 bp, Homo sapien
gggcatccgggcccctggggagcttgttaaagggccagtgccctgctgtgcaccccacctcgatcaggttgctctaggcagcagggcagctgtgattaatgggctcctgggggattctgatgcagatttcctaggactgcatttgaagaaatgttttgctgacattcctagcttaatgggttacttacaggttactttttctctccccattagaagtctggaaatgcaggtttgaaggcatcagggggcggggggagggatccaggtcttctataatgagctgtaaacgataaacaagtctggctagatctgtgtccaaacagacggatgggactaacaagctcttacgtccctggaggtcacagacaaagtcctcttggcttctggtcctgacttgttgcccactaactccgtagctgcttctcagatcttagttttctcacttgtaaaataagggggctgtaaataagtggaagccctggtgtcagaagaggcatcagagctgggtttgtattcccactgtgtgattttggcgaattagagaacgtttctgggcctgtttaaccatctgtaaagtggggctataaaatggagacttagctgctagggttaatgagagaattaacggaatcagtgtttgacacataagaagtgctcgatgttagtcattattttttattattttagtaatatcatctctgagggcccttacaggacttccagaccgagtccacgcccctgggggacttgggagcagtaaaatgtagtggcaggaggcacctcggccatcgcccaccccaccagctgggagactcgggcaggttattcacccttctgcacctcgcttgacttatctgtataaagagaacagtcacagtaactgcctcatggagttactcccaggactgagataatccacggacacacttagcccagtgcccagcactcggctggagctccaaaaaggtcagctattgttatgaagcgtagggcggggagggttcatcctcttgggcggtcaggccaggctgcatttaggtacccggtgggggcggagcaggggcgacgccggtgcacgccctcttttttttatttttaaaatttcacccgggccttgacaaccggtacaatcctgtcctcccctgttcccgcccccgagccagaggattcgcttttgcgtgggcagctgcagggatggtgactcgggctagctcagatgtggctgccgttagtccccagctgcgcgctcccccgtccctccccagccctcttccggcgcctgctaaagcgagagaaatgccctcgggggaagatatgtagcgatccaatggaacgtggagatcaacgttgtgttttcttcgcgcccacccgaagttgaagggaggtggcgcggcgggtctcagcccctcccggacgccgaggcccggcccccgcccctcggagacccgcccccgcatgcggaaccgccctctgcgaggcccggtttgggccgtgcgggaatgggcgtggcctgggcggggcgggcgctaggacccaccggagcgccgtgaacgtcaccgagcggcgccgaggccccgggttgagcgggaggcgcgatcggtccggtcggtggctccccgcggcggggccgggcccgatctcgggcgggaaccgagcgcagagccggtactgggggaggggagagggggcgggattcccgccgggagggatccggcgtagcagggggcggagtcttattccaaccccgcttcgctttccgcatgtcccgctttgcgctcccggccctgggcatcccgctgtttccctctgcgtccgcggccctgcccttttcgggggcacagctgtggtctttccaccccgcgagacagcggggcgagggggcgcgggcggccagtggatagaggctgatgcccccaagcacggacgccagcgtgggggtggaggttcttccagctgccctgagcctgtgcgaagcgggaggtccttccccagttcccacagactgtggggagggaagagacggtggaagcgagcgggttctgggctcctgggtctctggaactaccctctgcccttgccccaacactcaggtagcgggaaggatgaccacgctcacacgacaagacctcaactttggccaaggtagggaggctggacctgcgggcccgggggcgggggcgtctgggccggcgggcttcctcgagcgcgccaccggcttgtgcccccctgcagtggtggccgatgtgctctgcgagttcctggaggtggctgtgcatctcatcctctacgtgcgcgaggtc

SEQ ID NO: 374 - DNA, 2300 bp, Homo sapien
agagggctggggctgggagctcatggagggagggcctgacttgagccccaatgcccctcacactgtgtcctgaaggccatcccacaggagtcacttggctctcagtttccccaccccaggccccagtctgaagggctcctttgcaaggagttgccccctatgactgccactgcctgtcaccaatgcaaaagctgcttaagcagcctccagagagggaaaggaaagacccttgcttttcccaagttctgcaatgagtcagtctcaaggagccacggaactctgtgtataagccagtgagttgcttggccagctctgtgtggaaatggcatgatgtgtgcaggatccccatatcttgagaatggttgctgtgcccagaatgtgctgccaagtgcaccagttcctaaaacaaaatcatccatccctttggatggatgattttacatcacaattttacaaaatgcatcgcatttttacaaaatgaagatattctctgggaacagtccaaacctctgtggtgattcccacactttgctgggcatccgggcccctggggagcttgttaaagggccagtgccctgctgtgcaccccacctcgatcaggttgctctaggcagcagggcagctgtgattaatgggctcctgggggattctgatgcagatttcctaggactgcatttgaagaaatgttttgctgacattcctagcttaatgggttacttacaggttactttttctctccccattagaagtctggaaatgcaggtttgaaggcatcagggggcggggggagggatccaggtcttctataatgagctgtaaacgataaacaagtctggctagatctgtgtccaaacagacggatgggactaacaagctcttacgtccctggaggtcacagacaaagtcctcttggcttctggtcctgacttgttgcccactaactccgtagctgcttctcagatcttagttttctcacttgtaaaataagggggctgtaaataagtggaagccctggtgtcagaagaggcatcagagctgggtttgtattcccactgtgtgattttggcgaattagagaacgtttctgggcctgtttaaccatctgtaaagtggggctataaaatggagacttagctgctagggttaatgagagaattaacggaatcagtgtttgacacataagaagtgctcgatgttagtcattattttttattattttagtaatatcatctctgagggcccttacaggacttccagaccgagtccacgcccctgggggacttgggagcagtaaaatgtagtggcaggaggcacctcggccatcgcccaccccaccagctgggagactcgggcaggttattcacccttctgcacctcgcttgacttatctgtataaagagaacagtcacagtaactgcctcatggagttactcccaggactgagataatccacggacacacttagcccagtgcccagcactcggctggagctccaaaaaggtcagctattgttatgaagcgtagggcggggagggttcatcctcttgggcggtcaggccaggctgcatttaggtacccggtgggggcggagcaggggcgacgccggtgcacgccctcttttttttatttttaaaatttcacccgggccttgacaaccggtacaatcctgtcctcccctgttcccgcccccgagccagaggattcgcttttgcgtgggcagctgcagggatggtgactcgggctagctcagatgtggctgccgttagtccccagctgcgcgctcccccgtccctccccagccctcttccggcgcctgctaaagcgagagaaatgccctcgggggaagatatgtagcgatccaatggaacgtggagatcaacgttgtgttttcttcgcgcccacccgaagttgaagggaggtggcgcggcgggtctcagcccctcccggacgccgaggcccggcccccgcccctcggagacccgcccccgcatgcggaaccgccctctgcgaggcccggtttgggccgtgcgggaatgggcgtggcctgggcggggcgggcgctaggacccaccggagcgccgtgaacgtcaccgagcggcgccgaggccccgggttgagcgggaggcgcgatcggtccggtcggtggctccccgcggcggggccgggcccgatctcgggcgggaaccgagcgcagagccggtactgggggaggggagagggggcgggattcccgccgggagggatccggcgtagcagggggcggagtcttattccaaccccgcttcgctttccgcatgtccc

SEQ ID NO: 375 - DNA, 2300 bp, Homo sapien
catgaataatccaccctttgtttagcacatcatcaggaaataaccataaaaatgggcaaccagcaacccttggtgctgtgctgtctatggagtagtcattctttttattcctctactgtcttaataaactttttactctatggactcgccctgaattatttcttgtgcgagatccaagaaccctctcctgaggtctgggtcaggacccctttcctgtaacaacatggtcctatcccagctccctgtctgatgtcacctcactctgttccagactgactcttctccaccaaacacaccaagcacactcccgctccaggacctttgcagtggctcttctgcttgcaagtcttctccccacaaccacgtggctcattacctccttttctttgccaaaagaactgccccagcaaagaggcctttcctaataactttatgtaaaacaacacctcgtcccttcatgctttgtctgtaatgtgctttacttttcttcatagcactaatcaccacctgacatcatttatatttatttgttcacttatcttctgtctccttcactagaatctgagctccatgggggcagggattcttgtccatgttgtttactactgtacctccggtgccggcacatagtaggtgttcaataggtatttatgggatggatgactcaaacctttcagtgaataaacagttcagtgttctcatcaatccatcctggtgcccaccaagctaataatatcacggtaacaatggcagctaattttacaggagcatttcctatgggccagaccttagaaacgttatctccttacacagggcactgcattcacgcctagaacactgaaatttaggtataatcatgagctcagaggtcaggcgacttgctcgaggtcataggggacggcatcagaagaggaacacagacatttagcctgacggcagaactgtgttctaaaacctcaaagtcataatttgccacacgctggagaaagaaaacagtcgaaatggaagccacctggcgagctcagggcgccaggtgggagcgctgcttcccacatatgggagtccggccccatcgctctttgatctttgcagcgtccgtggccccaccgaccccgtcgtgagttatgggaggcacgggacccataacccagcattctcagactcccagggtcgtcaggacacggcgccccgcgcggtgatggatgagccggccccagcgctggctttgtccgggttgggccggtctgagaagcttcaggccggctttggacggggcgtggcgagagccgcgccgcgtgtgagtgtgtgtgtgtgtgtgtttgtgtgtgtgtgtattggggcggttgtctttctcccttccctaccgggaaagagggcacaggtgcgccgtcagcgccccaggtgagctggtagcactttgaagaccctttgtacccctacatccaggagcgacctctcggagaaccccgcctgcccactctgcgcactttctgcggctacaaaggccccgccgttccccgtcccgcctcccccgccctgggcatttcttccgtcccttttgacagtctaggcggaataatccttttgtggccccgggcccctgccctgacagacgcggccgcagctgagcgcgcagcctcgctccattgttggggtccaccgaggaccgcccgccgcggccctttgtcgcccgccctgcgcggggccgctccagaggcgccacaactgccggagcccctcccgtcccacgcgccctgggccgcgccgaggcggctcttacgcaccgggaggagtgggcctgcctcgcccggtgcccgcacggctgctgggctgcgcccgcctttgtctgcctcctttgtctgccccgcgccctcgcggcggcggcgcctaggcctctggggagctggcccagaactcagagcgcagctggcgagggcgcgctggccgggtgcgcgccgggcccggccccggggctgcccctcggctgggggcagtcgagcccgccacccgccgcccctcctctgtcccctccccgcgctcccgcccccttccctcctgcccgcccactcccccttccttccagtcccgctcagcccgggcacatcctccggctgcccgcgcacctctccacgccggccccgttccgcggctcgccctcggctgcgctcggctcccgcgggcgctcggccccgagcccctcctccccctacccgccggccggacaggtaaggcacggcctcggcccgcccctggctccgcccctcccgccccacctggctgcgagcccggacaaaggtggg

SEQ ID NO: 376 - DNA, 2300 bp, Homo sapien
tgagctggctttgctgcagaaggcagggggtagagatggtatgaagggccgggttcaccaaagtagggcctgtctgccaggtcggatttcgagcaggagcctggatgggggatgtcgtggggatatccagccgttcttgcctctaaagagaaaggttccagttgccagccctggctgtggctgaaataagaactcagccaggggagcctggaacctgccagctgggaggtttccctcttctgaagttgccctcattaagacactcaggccacgtcactgccagactcctggagtggtgtgtcacatgttatgaccacctagacagtggtcagggggcttgggcaagcacacagcaggtccaggagccagcaagacaatcccctcagaggaaaggaagtggcctgtgagctggtgccgctattaaaggcatcaagccaagactgaggttcagaattgggggtgagtcaccggacgccttctgatgggtgatcagttgttggcaacaccagctcagccacactgatctcattttgaaaaaaagtgacccattggccctgattgttttagctgattttaggacaagcaaagaggaggagagagagaaagagaagagtgcttgcaagggtgtggacgcctgtatgggcacgaggaggtgaaggtgacaggaagtgtgatgggggaagaggctgtggtggtggggttactctgaagtgtctctaagccttgactttgagatccatttctgtggagccccctgtccccaccccatcccaggtctgtagactcccctcccctcccctcccttcctccacagggtgtgtgaaccagcaccaagcggcaccccacaatttccacacacatccctataggtagggactagcaccatccctgttttgtgacaggaacactgaggctcagagaggtgcattcctttgtccgagatcactcccagagccccagtgtacccgactccagatgcatagtactgaaccggttccagacaccagtgtgtcactgggctgggaggtgggcagcgtggagggagcatatagggcaggggagaccaccgggcggagaggatggcccagggagcacccagctgaggaaagcaagaaagacttggcgggaaaccccagccctctctcatctcataccccggccccgaaggcggctgagacccttgacgagcggacggagaaaagccaaaagccggcggtggggagcaggagggacagagcgggagaccacaggcgaaagaccagcgccgtcgggggagccaggctgagtaccttcctgggcacagatgggacggcgcggggccaccggcggtgctggttccgggcgcactcagcgaccccggccacacaccccagcctcctgggcggcctcgaaaggggctggagggcacgcccgccagctctgcccggggctcagggagtcttcgaagacttcttccaacggtggcggactggggccccctgcctgagagaccacccggagactcagagacagagagacaaagggagactgggtcagggagagagaaggctagtgccgaggagagtaggtgcgagccgggaccccagagggcggcgagggcgcgcgcgaggccgagtgtcagagcgtggaaaagtgggcgtccagcggtaggtggacggatggggagcccgggagcagagccagggtccgtgggcagacgcggcgaggagaggaggcggcggaaggactggcggatagacgggtccgagggctgggaaggaggcagcatcctcacttccagcctcgggaccccgcgcaccccgcccctgggcgcgccaggtagcccacctttgtccgggctcgcagccaggtggggcgggaggggcggagccaggggcgggccgaggccgtgccttacctgtccggccggcgggtagggggaggaggggctcggggccgagcgcccgcgggagccgagcgcagccgagggcgagccgcggaacggggccggcgtggagaggtgcgcgggcagccggaggatgtgcccgggctgagcgggactggaaggaagggggagtgggcgggcaggagggaagggggcgggagcgcggggaggggacagaggaggggcggcgggtggcgggctcgactgcccccagccgaggggcagccccggggccgggcccggcgcgcacccggccagcgcgccctcgccagctgcgctctgagttctgggccagctccccagaggcctaggcgccgccgccgcgagggcgcggggcagacaaaggaggcagacaaaggcgggcgcagcccagcag

SEQ ID NO: 377 - DNA, 2300 bp, Homo sapien
gatcatcctcctgaatcaggaagttctaccttgtatctgacctaaatttctcctactttaagttctgagtagaaatggaacagttcagcgccctccaagcacatttcttactcgactctgacgcatccggtaggagctaagagcctagactctgaagccaggtctgcctgagatcaggtcctgcctccaccactagggtgtggccctgggcaagttctctttctgtgcctcggttttcccctctgtaaagcaaggagactggtcccatcccatctaccctcagtgtcgttgcagagacttggttagtggggcgcttggagctcagctggcagggccatgagcagtcattgttctggttaatctcagccacctgctgaggccaactcagtgtcctccagcctggacacaggtgactccaggagaggcatcgcttgcctaccgctcctgcctctgccctgtttgtctcagtgctcccctagcccttcccaccttccttaacgtttcccccacatccgctgggagctagctagccccctgctggcccaggcttccccctccccgtgcccattcagtctcggagtagacatgtcccctcagctccagtcaggtggctcctcccagccttgcctggccctaagccagggaacttggcttctaagctctccatgtgacccgactgcctctagggacatgccgagtgccacaaatgcagtggtgacagcagggttctttggcaggaaggcaatggagcttcaacaccccttctcgtgcaaacagctgaggctggcttccctgtgaggcctgagaaccccccaagagggcagaggtcagtcagggtcccccggcttcgactttcagcctcccactcctggagttacctgtgtcagctttcaggggaggatgctgggacctttgaggacagctagagggcacgcgtggggtgtggacccgtcctgctgggctccggctccgccagctccagggctgcagccaggcctcctgggagagttgatatggtgaggaggaggtggggaacggagaaggtttgcgggctaggccctgctctgctaatgactggctgtgaaacctcaggccaggctgggcgtggtggctcacacctgtaatcccagcactttgggaggctgggcaggcagatcacttgagatcaggagttggagaccaacctgggcaatatggagaaaccccatctctatcaaaaatacaaaaattagccaggtgtggtggcgcatgcctgtaatcccagttactcaggaggctgaggtgggagaatcacttgaaccctggaggcagaggttgcagtgagccaagattgagcccctgcactccagccctgctggagctgaatccagaccctgctactcatgagctgtgcatccttgcgtgagtcacctaacctctctgtgcttcagtttccttccctgtagatgagactgaaggagcacccacttcccagagctcttgcagtagttagacgaaataacacttgtgacacagctcctctgggacccagcacacagcaggtgctccattaatggggtgatgactaattgtcaccacacaggatgcactcacttgtgtgtgataagcagtgattcccacctcccagcttcctcaaaggccactgcaatgattctcagcctcatgacatttctccctactcaaacttcacctcctccaggaagccttccatggttaatcctactagttcctatttgttatacttacatatctggctgcgcccagccaatctggacttggacttgctggaatgttgctttacagggagaatccttggactgtctccccagcgacactgcaagttcttccaagacattttcctccgagttcccatcccccaacctcccaagaagggtaggaagcaggaatgggggctgaaccaagggcttgtcacacagtgcctgctgcctcctagtttgcagcataaaacgtgggttctactgtagactgccacgaggtggcaagcagatatagcccccgtgctccccaccctgtgtctcaggccgagccttggtccgaggtcccagctccctgatgaagaaggcagagctctccgaagcccaggtgctggatgcagccatggaggaatcctccaccagcctggcgcccaccatgttctttctcaccacctttgaggcagcacctgccacagaagagtccctgatcctgcccgtcacctccctgcggccccaggtaaggggtccccaaacagcctcggatctggaagggtccttgagcccatgtcatggaaagccctctta

SEQ ID NO: 378 - DNA, 2300 bp, Homo sapien
cgctgggattataggcgtgagccaccgtgcccggcctctcttggtacatttgttgcttgacaaaccaatagtgatgtattattattactaactgaagtcaacgtaagttatagttcactgtgcggtgcattctgtgggttttgacaaatgcatgccatgtcccaccattacgtgtcacacagaatatgttcaccgccccgaccgccctgagtcttctctgttctccttccgtgttcattcctcccctcttccgggttcgtgtcttttaagctcattggggctgccgtgaggaagctgggttgtagggcagaataatgaaggcaggagggagctggctggccccgagcgtgcaggggaaggaaggggagggcacgggcccttcgcgcctctgaccccccttgcctccactcgcccagggctgcgctgctatgccaaattccaccggaaccgcagggttacacggaggaaagggcgctgtgtggagcccgagacggccaacggcgaccagggatccttcatcaacgtctagcggccccgcgggactggggactgagcccaggaggtttgcacaagccgggcgatttgtttgtaactagcagtgggagatcaagttggggaacagatggctgaggctgcagactcaggcccaggacactcaaccccaggaggggagccgctcggcgaatgagctgggtgggtgcccaggagccggcccgcagcacctgcacacacgaagtccggacccacgcagcctccatcccgcgtgtcttgctctccgcgatggcaatgccgagagtgccctctactgtccgactccagcactgcaacagcttcaagttcaaaaccaagaggcgtttttgagagtggaaaagaaatttaaacttcccgaaagaaggtccaccatcaggagatgaatatggaacatctcctatgtaccaggcactgtgctaagtgctggaatacattatctcattgaattatcacaacgaccttttcaagtaggcattatcaccatgcgacaggttgaggaccgtgaggcacgctggagttatttgactcgacttgcccagggtcccaggtcagtgctcctcaaacctgaacatgctaagagtcacctggaggtccagttaaaaatgtacatctggccgggcgcggcggctcacgcttgtaatcccagcactttgggaggccaaggcgggtggctcacctgaggtcaggagttcgagaccagcctggccaacatggggaaaccccgtctctattaaaaatacaaaaattaggccaggcgcggtggtgcacacctgtaatcccagctactcggaggctgaggcaccagaatcgcttgaacttgggaggcagaggttgcagtgagcagagatcgtgccactgcactccagcctgggggacaagagtgaaactccatctcaaaaaaaaaaaaaaaaaaaagcacatctgactcagtgggctctgtgctctaacaagctcccagggaacgcgaggctgctggcccagggacccactgagaggtcctgggaagtacatggcagagcaaggacatgaacctgggccaaggctgtccagctccaaggcccacgttcttgctgctccacagccaagaatttcttccagattctctaaggcttttggcaagagaggctcacaccctggtattcccttcctctgtggctggaataacttgactgttctctgccttccctggataaaggtgtatcatgtttaaaaacaaaacaaaatacaacttaagcacatacttgcttgcaggaataagttgggcaggttgatccctgtggtctagtagctgatatcctgggataagaagtgtttggggaaaagaatcatgttggcctttatgtccctgtggtcctgatcatccagtcctggacaggcactttacagttttctggagcacttcccccccaggggttctgatgcaagcatggaatccaaaaaaaccccacacatattgcccatgtttacccactttgcatactgtttagtgatttccaggaccacaaaaccatccctggaaccccaccccacatttttgcagcagagcccactgggaagttgaggctcacctgaaattgaggtgctatctgaagctaactgcccctaacaggccagactcacaatgcccacccaggacatctgtcccagcagatctggcttcaggggtcacttcaggagaaccatttaaatccccccacttggcatctcactcctggccaaccctctgttccagggcgaaccaggttgcaaatgacaaaagactttcctgg

SEQ ID NO: 379 - DNA, 2300 bp, Homo sapien
cgcctgaaatcccagcactttgggaggccgaggcgggcagatcacctgaggtcaggagtttgagaccagcctggccaacgtggcaaaaccctatcgctactaaaaatacaaaaatcagccgggcatgttggcacccacctgtagtctcagccactcaggaggctgaggcaggagaatcacttaaacccgggagacggaggttgcagtgagctgagatcgcgccactgcactccagcctgggtgacagagccagactccatctcaaaaaaaaaaaagataataataacataatattctaatattgactgcttactgagaaattactctcttctaagtactttactaataacaataattaattaccaataatgaactaataataataatagcaaccagtcctaaatcaaactggatgtagccatttggctggtctctaatttacccctagactggggggatctgtgcctcctaagagggcattaagttaggcctatgggccctgcagccctgcaaaactctcctcatccatccagagaaaccctttctttgcatctggagagactatgggtcttggtattatctaaggactcacccaggcagttttgtaggttcccacctggtttcccccaccctaggaataagaccaagtgctcaggtgtaccctgaaggtttccatacctaggtgacactaaacaaaagctggtgttctctaaaggaaagttgatgttaggaagggacctggaggtagagcggattaatgttcttgttgcggtggggggatgtggtggtcaacaatctttaagggaggtgccaggtgaggcaggagacagccctttctttcctcatgtacaattgggggaggaatttcttatggtttttcagctagagttttctaaaacttttggtatgctgattaaagtgggctcccaccaatttggctcctcaggtgttgctttttgtttgtttgtttttcccagacaaggtctcaccctgtcgtccaggctggagtgtagtggcgtgatctcggctcactgcagcctccccggttcaagcaattctcgtgcctcagcctcctgagtagctgggactgcaggtgcacaccaccatgccctgctaattttggtatttttagtagagacggggtttcaccatgttggccaggctggtctcgaactactgagttcaggtgatccaccctccttggcctcccaaagtgctgggataacaggggtgagccactgcgcccagcctcatcttgtgttggtaataacaatagcttgtgtgtcctgcccatttactaagtgccgggcactgttctctcctagaacaaaccgtagttagactcctctgagtcctcatcttgactaggcctcggccttggacctctgtgtcttcctgtccttgctgggcctgagcctgcataataaaccagtttcagcaagagtcctgctaagttagcaagaactcccccatccttgatgtctcctcctaggaatcttccattcctgctccctcattctgctctggctataaatccctccttggtccttgttgtattcggtgttgagcccaaactctcactccatggcaataaccctacagcaagtcttgaacagtactggtttaacaacagtcccaataacgttttctttaacaacagcagttagctcatttaatcctcataaggatcatatgaggtaggtagcctaaatagcccatttacacagggaagtgggaaggagagagggtgcccccaaggatgagacacaagctgttgccacatcagcactttgcgcctggacggtcccccagttgtcctggctgcaggcagtccgaacagtccgcttcctggaatattagccaggcaggatacgccctgggcgacagaaactccaactttcgccagcggcccccaagtactgcctgggcggtggcgggagtctggagcttggctgaaggcgcgagctgccgacgccgtctcctagcaaccaagcggcggtcacgtgacccgctccagcccgtttcacgtggtcttgagctgcgctggggttggagtggccgcaacgggcggggcggggcggggccgggcaagtttgttccccgagttcggagcctaggagccccccgcggctgcggcgcaggtgccctcggcctgagtcgggatggagctgcctgctgtgaacctgaaggtggcgacgggctggggggagggtcccctttgcgggaggaagtgggacatttgcattttcccggaaggtgggaggaaggaccggagttttggggaaagagggatggtaggg

SEQ ID NO: 380 - DNA, 2300 bp, Homo sapien
aggaggggggtcttgggagagtgaggtcaggaagaggcctggctggtgcccctggctaagatggggcccccacagctcggtcctggggacatcccttctcaggctgctgaggctttaagaaagccacagagggccgggcgtggtggctcacgcttgtaatcccagaactttgagaggccaaggtgggtggatcacctgtggtcaagagttcaagaccagcctggccaatgtggtgaaactgcgtctctacaaaaatacaaaaattagccaggcatgatggcgggtgcctgtaatcccagctactcgggaggctgcagcaggagaatcacttgtacccaggaggcggaggttgtagtgagccgagatggcaccactgtgctctagcctgagccacagagcaagactctgtctcaaaaaaaaaaaaaaaaaaaaaaaagaaagccacagagctgggccagccaagaaggggagcagcccaagaacaaatgtagattcttgaattcacatcccagtttcttcgtgttccagctgtgtgaccatgaggcaagttgcttgacctctctgagctttagttcccatccacaaaggcagtaacttttatggcccactctacctgccaggccctgcgcccagagcctcccggtacctcatccatccccacaaggactctgtgcctgtggagtgggcttgggggctggggaggagctccaaggcccctctccatgttcccagagcagcttacctttagccgtggctctatggggtcctgctttcaccccagcccactgcccccaccacctctttgctcaagccagaaatcaaggagtcccccttgattcttttctttttttttccctttattacctgactcttccaagcccgctggctccatctctgaagtttatctgaatcttctctttacccacctgctaccccgatcccaccaccgtcatctctctcctgggaccccctcaacagcctcctaaatatctctctgcttccctctgtccagctccaagacccccctactccaagagcccccggggctgcccatggcttcacccagggagacagagctggcagaagaccctggaagtcttagctccctcccgctgctggggccctgtcccctccctggctccgaggcctggagagcttcgcctgtcccacctgagtgccagccacccaagtcatgactgtctctcctctctttagagcaacgaagattccggaggagcctgggcatcggcctgagtggtagacatgaccagtgggtgcccgggtgccaggtggagaggggagggcctgctgccacaccctccccaggggcagtgctagaccaggagccctgccgagtccagaccaacctggccagccctggtccccgcctgggcctagctctgaaggacacgactggccaactggtcaattcaagcttctggcaacagagcaacctgcagtccctggccaggaggcgccaagggaaggcccgagagtttgccatccagcagagcaacctgagcatcaacgagaccagcagcccccacctctgcccagagcctgggggaagctctgggccccacaagcttccctggggtcctctcctatcccaagagccactggctcgcccatcttcctgcctgaggcagtccgggctgccggccccaggcacccctagcggggacttcaggcccactgaagcctttgcccctctcgatgggcatacacagccaggcctcagatcctggggtggtctggggagctggaggtccaggctggtgggggaacctctcaccctggaggacctggctgtccccagtcagaaccagactcaggccccatcccgtgctgccgtccaccagctgctggcttctgtacattgcctggcgcaggaggcagcccgactcaggtgccaggctccccaggaaccccccggtgctgtgcagcaggacctctggaccggcggcggccagccattctccgcccacccccagcccagccagcctgtccttgcttcctcggatgggaggaggagacgccttcgaggccacagggaaactgcggctttcttggagaccccggctagtctctcagactcttgggcacaaagcaagctaatgtcacctgagaccactttggggacacggaccaaggattcccttaatcctgagcaggggctccctcctgcccaccccctagggtcaggggacagctgctccccctggtctcaagatggcagggcacagaggggtgaccccagtctccctcgaggggtgggaagcagggggaccgacccctgt

SEQ ID NO: 381 - DNA, 2300 bp, Homo sapien
ttcagtgtacccctgcaacttcaggggaattcaattcaccgtgacctttcagaatgtgggggcactgctcacatgcctgccccacaacccccaggccctccctctccagcccatcctctggcctttggacttcagggcacagttcatatctcctggcagctctcccggggcaccctcctgggcctagatgagtcccaggtctgctgctatttggagtttggggaaatgatcttcccctgggctcagctttcttatctttataagtgagtgcaggcagaagtactggtgtggttgtaggggtggcctctggagtctgggatccctgagcctggggaccagctccacctctgatcagctgcttgggctcccagccaccccgggagcatgatgaggccagccagtgaagcaggtggagcactagctcggttagccagacgtggtggcacgcacctgtaatcccagctgctcgggaggctgaggcgggagaatcacttgaacccaggaggcagaggttgcagtgagctaagattgtcccactgcactccagcctgggtcacagagccagaccctgtctcaaaaaaaaaaaaaaaaaaaaaaaagcatcagcccagtcagcccagtctcagctgctcactgaggtcactcagagaaccccagaaaaagtctggaagcccagactgtaccctgaccattaagtcagaatctagcagaatctagggtgggaccctggtgggcatcggtacctcttgaagcccccagtgattccagcatgcagccgctgtggggggcagcagcgtggaacgctagcccagcgtctggcctgtggcgagcaccctttcagcccatctctttcacagcggccagggtagggtagcccctgcttggccaccctgcacagcctgagggtgaggctgggtgggtcactcacctgccccttctctagctccttcttccagggcctgcagcagcggatgctgcagcgcagcctgagatggtggcacttgagggcactgggcccagatgccacatcaagctgcaccaagaccccctcggctctggagccactgagcagcagcacactccaagactctctggagaaggtgagaggtaggagggtggggaggggctggggcaggtaggggtggatgggtggagattgtgggaaggggacagggtaggggaccaaggactccacatctccttccccaggttcccagggcccccaccctcccggacactctccaggggagccttctgtgggcagctgggcagcggcagcaggggcagtgccttctgctctggcaggcacgggcccagcagttccagggcacagccaggtggtaccagcatacccgccagaggcggtagggatccctccccatccgcccgccactctatggacttactgtttcccggccccttctcccttccacccttggccttcacagcagcagccccttggggtctgcacctcagggggcttcagttcctcctgtcttcctgccccgtcctactgagagggtgtcggggagtggtgaggcactctacagagtcactgttcctcttggagattttgcagctgaggttccttcatttattcatttatagcacaatgcataagagttggtctccctgggttctaatcccagctttgcccctcattggctgtgtgatcttgggcaagttgcataacttctctgtgccctatttgcctatctgtaaaatggggttaatagtactggctccagtggggcaatggcgaggcacggcacatacattccccaatgccgtgtgtggcacgttgtgagtgctcagtccatagcaatgtttatggctagtggttgagcacaggacttggcagtgggggtctagaatcccaccctatccccaccactcatcatcgtgaccctgggagaggtgcttggcccctccagtccccagcaacccaccctcccataatggaaacagaagagtcacccagagcctcctgctgctggggagaggaagagaaaggagggtggggcagggctggcctgggatttgggggacagtggccatcctcagggtggaccctccctttcccagcatcttcctcagctggagccgctgggcaacagcccaatgggcctggagagagctggcttcccaccgggcctgggatcggacctgcagggctgtgctgggcctgtggcgtcagcggctgctgcagtcacggctggtggagtggtgggcccaggagcggggctggcggctggcacgagatgccctatgccactggcactcctgttggcagggtgagt

SEQ ID NO: 382 - DNA, 2300 bp, Homo sapien
ccaagatggtctcgatctcctgacctcgtgatccgccagtccgggcctcccaaattgctgggattacaggcgtgagccactgcgcccggcccaaaaatctaattttcaatttttctgtaaaaactagaagttctggaaacactggctcagtgttcctgccggggaatgattgggctgcataagcagctgtctccagcggacaggacatgactttctagaaccaccacagccctgcctgccagctcattaatgcgatatgtcggtgtagtgggcagcctccaagacagcatcctgtgttcgtgtcctgggcaatgccccgccttgaatacaggctgggtttactaatttgcttttaacagacagaatttggcagaagcaatgggatgtcacttctgatatcaggttataaagagactggttggggccgggtgcggtggctcacgcttgtaatcccagcactttggaaggccgaggcgggttgatcacttgaggtcaggagttcgagaccagcctggccaacatggtgaaaccccatctccactaaaaatacaaaaattagccaggtgtggtggcaggcgcctgtaatcccagctacgaggggagctgaggcaggagaattgcttgaacccagggggtggaggttgcagtgagccaagatcgcaccactgcatgcctgggcaacacagcgagatcgtctcaaaaaaaaaaaaaaaaaaaaaagactggttgggccatgcaacagctctttttgcccagaggccaagacccagagagcaagcctgccttgggaccatccctcctcccttcactggccacattcctcagggcttctaacacactgcaccctcagccagcctctgcaaatccagtccttcccactgccctattttgctgaccccttcccacgcctcaacctctctcgccactgctctgcccgctgagccctcctcacctcctcctgggaccctccctgactaactctgctggcccctaagggcaccatgactctgcccacttctctcccaactcagggctccgaccagtgactcctagaggccaggtgaggataaggatgaagataaaggtgatgacatagggactacattatccccattttacagatgtgtaagctgagactcagggaggttaactaggttgtttaagtttcacacagtcagggtatggaagagcagggattcaaactcaagactacagagtccaagcccccaggttctgctctgccacctgactcctgggtgtgccctgtgggggtctcatcaccagaatttgctacgggatgggagggtatggggggtggtgaggcactctgcagagtcactgtccctcttggaaatttcacagctgaggtctattcatttgctcattcatagcacaatgtgtaagagttggtcagcctgttttctttgaacccagctaggtcagtgtcacagctcagcggacctctctgatcaactgcatttgttagctatggctgtgtaacaaattacccaagtacttattagttttaaaccacagatgtttgttatctcacagtttctatgggtcaggagtccagatgtagcttagcctctgcctcaagttctcccatgcggttacagtcaagttgttggccagggctgcagtctgggtctcagacagaccctggccctgccctcacccgcagtgcccccgaccaagtctccactcaccctgccaacaggagtgccagtggcatagggcatctcgtgccagccgccagccccgctcctgggcccaccactccaccagccgtgactgcagcagccgctgacgccacaggcccagcacagccctgcaggtccgatcccaggcccggtgggaagccagctctctccaggcccattgggctgttgcccagcggctccagctgaggaagatgctgggaaagggagggtccaccctgaggatggccactgtcccccaaatcccaggccagccctgccccaccctcctttctcttcctctccccagcagcaggaggctctgggtgactcttctgtttccattatgggagggtgggttgctggggactggaggggccaagcacctctcccagggtcacgatgatgagtggtggggatagggtgggattctagacccccactgccaagtcctgtgctcaaccactagccataaacattgctatggactgagcactcacaacgtgccacacacggcattggggaatgtatgtgccgtgcctcgccattgccccactggagccagtactattaaccccattttacagataggcaaatagg

SEQ ID NO: 383 - DNA, 2300 bp, Homo sapien
ttgcctgagcccaggagttcaaggccagcctgggcaacatagcgagactccatctcttaaaaaaacaaaaaacacacctgtaatcccagcactttgggaggccgaggtgggtggatcacctgaggccaggagtttgagaccagcctggccaacatggtgaaatcccgactctactaaaaatataaaaattagccaggtttggtggcgggcgcctgtaatcccagctactctggaggctgaggcaggagaatcgcttgaacccggaaggcagaggttgcagtgaaccaagattgtgccatagcactccagcctgggcgacaaaagcaaaactccatctcaaaaaaaaaaacaaaaacaaaaaacagaaacaagtaatcagagccaccagggcacagacaggccaacagagggcatagggtcatctggcagtctggttaagaaaataagacaaacacttaaaaacaaacaaaacacttgcacagcaatgggcaaacacacagtagtgaatgggtgtgtggtgacatggcacaacagaggaaagcccaggtgaggttcatttctttcagactgtccaccactaaccctgtgtacctaaccatttggggtcttagactcttttgacaatctgattaaatgcactgctcccttcccctgaaatacacacacaggtgcacagactacacggggatacatccaaagacaaggagttgattccagactaagaaccctgggccaaagctttctccctctagggctgctctctttcattctgacctcaaactccagattctcagtggggatggctgtggggagtgaggaacgggggcgggggggaggagtaacagcaagagcagccagttggctttcctccagcgtttaagggcgcacctcgttaattgcttgctggaacagaacctagagtaggaggaagctgaaccacctgtaaaccctctgattttcaaagacttattgcattcctagtatatgccacgcatgtgccatatttgtaagccaactcccacgatttatccgttatcagctggactcccatagcaccctgggttgtaactgtgggtgaaaaggcctgtctcctttctctttccccagttccctgagacaggaccggtgtcctgcctggggtatccccagagtttggcacacggtgatagccaacattcactgagcgccaaagggccaggtgctgccactctctcaaaataagcctctgccacttactgaacaactagtctgcgccaagcactgggatactaagcctacgactcccagaaaggtcccggcggacccccgtgcgcagcgggacgcagtgggcgccagggaccgcagtgccccgggcccagcgctcttctccaggtgatcgccggggaggcaggtttaaaaggcaggagccggaagccgtctcggcgcccaggtggccgagaatccagtcaccaggtcactgagtcaccgatgggggcgaggacacgggcctgggccggtcagaggggcgggatcgtcacccctggctcaggggcccctccgtccaggcagggagccaaagtcagtcttcgcttgagggttggcggtcgctggaagtggtagccattgggagttacactaatcccgcgaagggtgcgcaagggaggcggcagccccccccaagaagagaggcaggccggcctccagcgctccccgcccacaagcacgtccttgcccccgggaggttgtttgccggctccaggatctccctcccggcgaccccggcctcgccgtcactcaccctccagtcccgggtgactcagaacgctcggccgccggccgcaccactgtggccgctgcaggggcggggaacgcagtgaaggggcgcggcgcaggtgtcaggttgctggagaggcgggcctacagggcggaaaccaccggcgcgggtgaccggaagccccgcccccaacatggccgtgcccacaggtctcgttggaggccgtgcctttatcgtcatgtgacgcgagtcctcgccccacccgtctgcagccactcctggtctcagtcccagagctcgagagggccacgtgaccgtcccggggccagtcacgtgaggcgcagatcctggctgggagggggttggtagaggggtccagagtggcagtaaaggaggaagatggcggggtgcagggggtctctgtgctgctgctgcaggtggtgctgctgctgcggtgagcgtgagacccgcacccccgaggagctggtaagaagccggcggagtcggcctggggagggggcggttgctaagggactgagagaggcgt

SEQ ID NO: 384 - DNA, 2300 bp, Homo sapien
gtaaaaacaccagaccttgttttggggttaaggtgagaaaagggcttgctaaacagtctctttcctagaaggaagttctcttacccactcactccctgggacagaaggtcaaagagcatctctggttggaatcataatgcttcggcctgaagtgaccaggccactcactactttagttgcccaagcagtatcaaaggagctcacctcatagtctttccttggaagaatctcatcctcctcctcctgtgtttctccaaggatggtctagaaaaacagatccgcagagggagccttttttagtggttaggagtggaaggaggcagaagtatttactgaaatcagtggctagcttctaaatcatctggagccattatcaaataggaaccagccctcaaaaaaaacctttcaggggtgagggaccatgtgggtgaggatctacagccatcagctgagctcttcatttccactgatagtctccaaataaccaccctcctcttcaggacacctcaaagatgtccaacgccagctgaaaaggggggtaaaaatgcaggttccatttgacagtgtgacgtatctgaaatcagaaaggacttgtcaactctgggaacacaactcaagttttcccaggatgctttgcagggggaagctggactgtcagtgacccagaaagggtgagggatagagtgagaaaggactggagaagctaaaacagcagcatgataagcacaaagtcctgtgaggaagctcattctgaaaacgcttgtttcattccaaactcttttcagatggaaataaaaggaaacatgggtgggatttactggagctggcctggattctccctcagattccaggaggggttatgagaaaagaccccagacttaggcacgtgaagcagggtagacgcttcgagagccctggctgcggtccccaggccccacccgctgccacctgcgggcccagattggcccggccccacccccggcaacgcctctctcagtcccttagcaaccgccccctccccaggccgactccgccggcttcttaccagctcctcgggggtgcgggtctcacgctcaccgcagcagcagcaccacctgcagcagcagcacagagaccccctgcaccccgccatcttcctcctttactgccactctggacccctctaccaaccccctcccagccaggatctgcgcctcacgtgactggccccgggacggtcacgtggccctctcgagctctgggactgagaccaggagtggctgcagacgggtggggcgaggactcgcgtcacatgacgataaaggcacggcctccaacgagacctgtgggcacggccatgttgggggcggggcttccggtcacccgcgccggtggtttccgccctgtaggcccgcctctccagcaacctgacacctgcgccgcgccccttcactgcgttccccgcccctgcagcggccacagtggtgcggccggcggccgagcgttctgagtcacccgggactggagggtgagtgacggcgaggccggggtcgccgggagggagatcctggagccggcaaacaacctcccgggggcaaggacgtgcttgtgggcggggagcgctggaggccggcctgcctctcttcttggggggggctgccgcctcccttgcgcacccttcgcgggattagtgtaactcccaatggctaccacttccagcgaccgccaaccctcaagcgaagactgactttggctccctgcctggacggaggggcccctgagccaggggtgacgatcccgcccctctgaccggcccaggcccgtgtcctcgcccccatcggtgactcagtgacctggtgactggattctcggccacctgggcgccgagacggcttccggctcctgccttttaaacctgcctccccggcgatcacctggagaagagcgctgggcccggggcactgcggtccctggcgcccactgcgtcccgctgcgcacgggggtccgccgggacctttctgggagtcgtaggcttagtatcccagtgcttggcgcagactagttgttcagtaagtggcagaggcttattttgagagagtggcagcacctggccctttggcgctcagtgaatgttggctatcaccgtgtgccaaactctggggataccccaggcaggacaccggtcctgtctcagggaactggggaaagagaaaggagacaggccttttcacccacagttacaacccagggtgctatgggagtccagctgataacggataaatcgtgggagttggcttacaaatatggcacatgcgtggcat

SEQ ID NO: 385 - DNA, 2300 bp, Homo sapien
cctaacgctgacactaaattctacagcatgaagaatttatggaagagtgagactctgtcaaaaaaaagaaaaggttgtggaaaattacctaatgatacaaaaagtataataaagggggtgagtgggacaggttaaaatagatgatttagtggaatctcatttttgttacttaaaaaaagcatgtatcatgtatataaaagcatgggtaaggatgtagaaagatacttagtaaggtgttaacagtcatcttttaatgaatggagttataggcttttctctaccttctttattacgtttaagaatttaatgataaaaagtcacgcatgttgtttcaccccagcagtgttggctttactaaaaacacatactctaagaatcccatacatgaaaggtggaacttaatcaagaacatgtcagagagaagctgcttgagcaagaaaatatctgaaaagcaagctctcctagaagagaagcaaggcctccttaacagtttataagcacacacctgttaggggcacatactgcctgccagtgcctttcactctaagtctctctgtaagctgtaaaagcaaacagtttaatggcaaatacatactctatccaggttaaggtgccacagatttataaacgtgtaaaaacaccagaccttgttttggggttaaggtgagaaaagggcttgctaaacagtctctttcctagaaggaagttctcttacccactcactccctgggacagaaggtcaaagagcatctctggttggaatcataatgcttcggcctgaagtgaccaggccactcactactttagttgcccaagcagtatcaaaggagctcacctcatagtctttccttggaagaatctcatcctcctcctcctgtgtttctccaaggatggtctagaaaaacagatccgcagagggagccttttttagtggttaggagtggaaggaggcagaagtatttactgaaatcagtggctagcttctaaatcatctggagccattatcaaataggaaccagccctcaaaaaaaacctttcaggggtgagggaccatgtgggtgaggatctacagccatcagctgagctcttcatttccactgatagtctccaaataaccaccctcctcttcaggacacctcaaagatgtccaacgccagctgaaaaggggggtaaaaatgcaggttccatttgacagtgtgacgtatctgaaatcagaaaggacttgtcaactctgggaacacaactcaagttttcccaggatgctttgcagggggaagctggactgtcagtgacccagaaagggtgagggatagagtgagaaaggactggagaagctaaaacagcagcatgataagcacaaagtcctgtgaggaagctcattctgaaaacgcttgtttcattccaaactcttttcagatggaaataaaaggaaacatgggtgggatttactggagctggcctggattctccctcagattccaggaggggttatgagaaaagaccccagacttaggcacgtgaagcagggtagacgcttcgagagccctggctgcggtccccaggccccacccgctgccacctgcgggcccagattggcccggccccacccccggcaacgcctctctcagtcccttagcaaccgccccctccccaggccgactccgccggcttcttaccagctcctcgggggtgcgggtctcacgctcaccgcagcagcagcaccacctgcagcagcagcacagagaccccctgcaccccgccatcttcctcctttactgccactctggacccctctaccaaccccctcccagccaggatctgcgcctcacgtgactggccccgggacggtcacgtggccctctcgagctctgggactgagaccaggagtggctgcagacgggtggggcgaggactcgcgtcacatgacgataaaggcacggcctccaacgagacctgtgggcacggccatgttgggggcggggcttccggtcacccgcgccggtggtttccgccctgtaggcccgcctctccagcaacctgacacctgcgccgcgccccttcactgcgttccccgcccctgcagcggccacagtggtgcggccggcggccgagcgttctgagtcacccgggactggagggtgagtgacggcgaggccggggtcgccgggagggagatcctggagccggcaaacaacctcccgggggcaaggacgtgcttgtgggcggggagcgctggaggccggcctgcctctcttcttggggggggctgccgcctcccttgcgcacccttcgcgggatta

SEQ ID NO: 386 - DNA, 2300 bp, Homo sapien
gcatggtggtgggcgcctgtaatcccatctactcgggaggctggggcagaagaaccgcttgaacctagggtggggtggaggttgcagtgagctgagatcgagccattgcactccaacctgggcactaagagtgagactccatctcaaatttaaaaaaaagaaaaaaaaagaaatagaacaaaacacagcagtggatacagtgctttttggttcattcaaagcagtcccatcagagtagcatattaaactatacaaacggctccaaatggcaaaatctagacagtagaaaatcccaggtcctaattatgttgtcaaataacttacaaaaaaaaaaaaaagatgaaggaagaagctacagattaaaagagatttaacagatttatcaaacaaataaaaaaggacttttggaacctaattcaaataaagttaaaatacatatgacatttacaagaaaactggaaaatctggacagtagatatttgatatcaagaaattcctaattttttagatgtggtaatagtattgggttatgctttttaaaagtccttatccattagagatgcatatagaattatgggtgaaataatatgatgtacagaatttctttcaaaataacatgggaagggcggccaggtatggtagatcatgactgtaatcccagaactttgggaggctgacatgggaggatcgctggtgtcaaggagttcgagaacagcctgggcaacatagggagactgtctttactttaaaacacacacacacacacacacacacacacacacacacacacacaaacacacacacacatacaataaaaaataataatatgagaaaggagaagtggataacgaaagcacagacaaaagaagactgggcttgagctaaatcactgtggaagctgtgtgatgaggacaaggggtttcaacagattattctgtttttgcatatagttgaaatccttcataataaaagttaaacaaaaaagtgctacaaatcctaacgctgacactaaattctacagcatgaagaatttatggaagagtgagactctgtcaaaaaaaagaaaaggttgtggaaaattacctaatgatacaaaaagtataataaagggggtgagtgggacaggttaaaatagatgatttagtggaatctcatttttgttacttaaaaaaagcatgtatcatgtatataaaagcatgggtaaggatgtagaaagatacttagtaaggtgttaacagtcatcttttaatgaatggagttataggcttttctctaccttctttattacgtttaagaatttaatgataaaaagtcacgcatgttgtttcaccccagcagtgttggctttactaaaaacacatactctaagaatcccatacatgaaaggtggaacttaatcaagaacatgtcagagagaagctgcttgagcaagaaaatatctgaaaagcaagctctcctagaagagaagcaaggcctccttaacagtttataagcacacacctgttaggggcacatactgcctgccagtgcctttcactctaagtctctctgtaagctgtaaaagcaaacagtttaatggcaaatacatactctatccaggttaaggtgccacagatttataaacgtgtaaaaacaccagaccttgttttggggttaaggtgagaaaagggcttgctaaacagtctctttcctagaaggaagttctcttacccactcactccctgggacagaaggtcaaagagcatctctggttggaatcataatgcttcggcctgaagtgaccaggccactcactactttagttgcccaagcagtatcaaaggagctcacctcatagtctttccttggaagaatctcatcctcctcctcctgtgtttctccaaggatggtctagaaaaacagatccgcagagggagccttttttagtggttaggagtggaaggaggcagaagtatttactgaaatcagtggctagcttctaaatcatctggagccattatcaaataggaaccagccctcaaaaaaaacctttcaggggtgagggaccatgtgggtgaggatctacagccatcagctgagctcttcatttccactgatagtctccaaataaccaccctcctcttcaggacacctcaaagatgtccaacgccagctgaaaaggggggtaaaaatgcaggttccatttgacagtgtgacgtatctgaaatcagaaaggacttgtcaactctgggaacacaactcaagttttcccaggatgctttgcagggggaagctggactgtcagtgacccagaaagggtg

SEQ ID NO: 387 - DNA, 2300 bp, Homo sapien
agcttctaaggagtggattaaaacacattcggtgtagaaatagatcaggagagcagccaacacacacagacttggtaagtgcacaaaaaagctacagccccaggggcatggggaaggtgaaggagctcccttggggcatctgaaagatggggaatgggggtttaattggggaatgcagctaagaggtaaggtggcagctctctacgtgaaataggctaggatacagacatcagcgtcagacctggggatccagtcctggttccgccacttaggcacctagtggccttgggcaagtggcatagcctctcgggctcagttctgttcccttgtaagcaaggacaatgctatctaccacctggggatggtgatcaaaataaaatcatttccataaagttctcagcacagtgctaggcatgctacaagcaaccaataaagacaactatgatggccatcttgcagggactcagcactgcacacttgttatgtgttgacacgttctcagctcacttgggctccacaacaatcctgcaaggtaggcagggaagatttctactttattcattcatttatttatttattttttgagaccgagtcccactctgttgcccaggctagagtgcagtggtgcgatcttggttcactacaacctccgcctcccaaggtcaagcaattcttttacctcagcctccctagtagcggggattacaggcacatgccaccacacccagctaatttttatatttttagtagagacagagttttgccatgttggtagggctggtctcaaactcctggcctcaggtgatccacccaccttagcctcccaaagtgctgggattatacgtgtgagccactgcacccggccggtttttaacattctttctcattttacacacaaggaaagtaaggctgcgaagaggtatgcaactggtttgttttgggctacagtactggtctctcagcccttcaaatttagagttttcccccagtatacgttgcattgaatggtaatggctaacactgagttcagtgcttagcaaacaggccattcattaaacatagacagacttgctgcctgttatttcccttttgggggccagggaaattgtgaccttggtggctcggtcacttgccacttgccacgtcctcagggaaggatgtagaaggcattgagggaaactgactatacctccttcacccccacctcccttcctccatcggtcaagttgccacgggcacaagcccaggaagggcagggggatgttaacaaacttcagacacgaagagtctgagcatctataaacagcaacggaagaaatgaaattggctgcgtcctctaagcctgtccccgcagcatgctggaggagggtcgcgggggacatggaagaggaggagctttggagagaggatgcttgtgctcccccgccttttcttgctatttctatttgggggttggattcctgggagcttcatcacatttggttctcagctgactttatatactaaaaaataacttcctttcgcctgaccatggagagggactgccaggggtgaaggcagccctgtctgaggccagaggtctgcccacgtggcggatgaggcaggtgtgaggccagcttgagcatctggatccatttgtctcgggctgctggctgcctgccatttcctcctctccacccttatttggaggccctgacagctgagccacaaacaaaccaggggagctgggcaccagccaagcgtcaccctctgtttccccgcacgggtaccagcgtcgaggagaaagaatcctgaggcacggcggtgagataaccaaggactcttttttactcttctcacacctttgaagtgggagcctcttgagtcaaatcagtaagaatgcggctcttgcagctgagggtctggggggctgttggggctgcccaaggcagagaggggctgtgacaagccctgcgggatgataactttaaaagggcatctcctgctggcttctcacttggcagctttatcactgcaagtgacagaatggggagggttctgtctctcctgcgtgcttggagagctggggggctataaaaagaggcggcactgggcagctgggagacagggacagacgtaggccaagagaggggaaccagagaggaaccagaggggagagacagagcagcaagcagtggattgctccttgacgacgccagcatgagctccttctccaccaccaccgtgagcttcctccttttactggcattccagctcctaggtcagaccagagctaatcccatgtacaatgccgtgtccaa

SEQ ID NO: 388 - DNA, 2300 bp, Homo sapien
gccttttgatactcttactgtggcatgctcatgtgcacgcacacacacacacacacacacacacacacacacaaaactaccccagccccccagaacatttccagcactggtgtctttacacagcccttacccacccacctccatttatatttcatctgcaaaatgctcatctgagccacttcccattctttctcctgcacacacagtcaccactagaattgcacatcccccacagcacagctcccagagccttcatagatgacacgggattcacctaagcttgctttttgtagaaacaccttgtgatcaccctggcagtgattatgagcttcaggtctggaatcagactgctggctagactaatcagactggttagaatccaggatttatcatgtgtcaattgtgtgacttttggaaagtagattaattcatgaacaccatttcctcctctgaagtgaggaataataaccgtgcttttctcacctcaggggcagatgctattttttaggcaagatctgcttagaggtcccagtttcttattgctgcccttctctgctgtaactcttctcccctcatagacagctccactcctccagcctgctgcttgttgacaccaattctctggaaggggagtgacatcagtcatatatgctttaggggggtatttaagctgctatgactcttctcaggggcatttctctccaaagtctcacttctaatcaccaggccacctgctaatgataattagatcatgggtggtcagatgaaggaggcactgggagaggggaaatccccatatctctggtatcccagcaaatagataaccatcattccagccatccttttgttttctttctttctttctttctttctttccttctttctttctttcttttttcgctctctgtcaaccaggctggagtgcagtggcgtgatctcagctcactgcaacctccacctcctgggttcaagtgattctccttcctcagcctcccgagtagctgggactacaggcgcctgccaccatgcccagctaatttttggtaattttagtagagacggggtttcaccgtggtctcgatctcctgacctcgtgatccgaccgcctcggcctctcaaagtgctgggattacaggcgtgaaccaccatgcccagcctatccttttgttttccatcctgtgttggcttggtgggggagaggaggtgttgacacgtggaggacacacatataaggcattcttgggtgacttcgtcatcactggaccctatctctcaaaattccagcgaaatctgctcttccctttaaggagtgaaagaagggtcagcattccagaagttcctggtcatacccaggcttttaatgaattgccactggggaatcagcatcccgttgctgtaaggactataagatggcggattgtgagagcatagggaaaggtctcggaggtctcttgtccttgctccacgcaggtctttctggcctgaaaatcccgttgaagagagcagctcttgagagtttgctccaagttccctcggggtgatcagcaccacggacagcggccagggcgcccccgaggacccgcaggcaggcagggtgcacagcggcgagcaggtgctgcgctacgtgcgggccagggaactcgcgcggggaggggagaggcgccgcgggtggcggggtcttggccggggctgttttcgctgtgagtcaccccgtgctccccgcgctcacgtcggtcctcggaaagccggggtcctccctgccttttccagcaacggtggggtggggaggcaggaagaaagcgccaacctaggacacctggacatttgcaggaaaggaagaagcgggagacggggacttgtctgtgtctccagcgcgttcctgccccccggcccgacccggcccatttctatacaaggtcggctctgcccggtctccacctcccacgtcgcaggcgcggaggggctcattcccgggccctgatctcagaggcccggaatgtggctgataaatcagagataaccctgcatggcagggcaggcccgacactcagctccaggataaaaggccacggtgtcccgaggagccaggaggagcaccccgcaggctgagggcaggtgggaagcaaacccggacgcatcgcagcagcagcagcagcagcagaagcagcagcagcagcctccgcagtccctccagagacatggatccccagacagcaccttcccgggcgctcctgctcctgctcttcttgcatctggctttcctgggaggtcgttcccacccgctgggcagccccggttca

SEQ ID NO: 389 - DNA, 2300 bp, Homo sapien
accgcctccaagtggctcccaagacgcagctggatgagacggtgctgtgggtggtgcacgtctctggccccattaacccccaggtgctcaaaagcaaagcagccaaggagctcaaggcgctgcaggacttggcacggaaggaaatgctggagctcttggacatgccagcggcggagctgcttcaagaccaccagctcctctgggctcagctcttcagcccaggtgagtcctggccagcgcttggtccaccctagatatgtccctcccaagtctgcagaggtgacactgaaggtgatggtggggtggttgaaacttgggcttggcgtttcaccagtggttgaatctgctcaactgcttagtgtctgtgcgacctttggattcgtcgcctaatctctctgggcctgtatttaataacaataacgcctacctcagaaggtttttatgagactgtagtggacaattgagtgtaaaggtcaattctttctgttacttgttttggtagatggggcctgatgtgagcagagtgaagtgttttagagtcagtttgcagaggtgaaaccagcaggtggatcccctgattctttgctcagcaccgcagtcggcctggtgacagacgtgggcttcttgacataacccctgctaggctgaggtgcgtcctggcagttgtggctgcaactggttcacagggaggttggagaatcccttttagcaggttgagatgctcccgcccgatgaaaactctcctctcgttgactgttaaagaaaagaaaatcctgttctggatgagagaggggttttggtttccagggttccaattgtctgaacctttgtgtttggttgctcagagagttgagttcattcagcaagtatctattgaatgcttctgccagggctgttctatgcatgggggggtgcagatgggaaccagagttcctgttctcatggtgcttgcttaaattctggttgggaggaagacagacattagaaaagtgaaaattaaaattaaaataaggcatctttttaggctagaatgtgctggctgggcgcggtggctcacgctgtaatcccagcactttgggaggctgaggcaggtggatcacctgaggtcaggagttcaagccaacctggccaacgtggcgaaaccttgtctctactaaaaatacaaaacttaacctgacctcatgatccgtccaccttggcctcccaaagtgctgggattacaggcgtgagccaccgcgcccggcgagaggatggtcatcttcacagaaacaaagttgtgtgtgtgtatgtttttaaatcttagggctgttgaatccatcagtagcaaaggggcccagcacgtgtttattcagcaagtgtctattgaatgcttctgccagggctgttttaggcatgggtggtggcctgcacctgtagtcccagctactcaaaggctgagacgggagaatcacttgaacccgggaggcggaggctgtagtaacctgagatcgttccactgcactcaagcctgggcaacacagtgagactctgtctcaataaacaaataaatacatacatacataaagctacaagactggagagagaaaggacagagaggagaagtggcctgagactggcctcagcactggtgactgatctggcgcaggatgtctgaccatagggttggtgccaagtcctggctaagtctgtgttcctctgggctctggcaccaggccccgctgctttttaacaggattctagatttcaggcccacaggctcaagttggtcgtgtaaacaagacaggctgactttcttctatactttagggagatgggcaccactgtctttatcattaaggcacaacacctcactcttctgctgcccttggtctttatttcgtatgctctgcctcccagctgtccttcccccttaacatgccgctttcatggtgttgcaggagtggaaatgaagaagatcactgacacccacacgccgtctggcctcaccgtgaacctgacgctctattacatgctctcctgctcgccagccccactgctcagcccctccctgagccacagggagcgagaccagatggagtcgacgctcaactatgaagatcactgcttcagcgggcacgccaccatgcacgccgagaacctgtggccggggcggctgtcctccgtccagcagatcctgcagctctctgacctgtggaggctgaccctccagaagcgtggctgcaaggggctggtgaaggtgggtgccccaggcatcctgcaggggatggtgctcagctttggggggctgcagttcacagaga

SEQ ID NO: 390 - DNA, 2300 bp, Homo sapien
actaaaaacacaaaaattagccaggtgtgttggctgtaatcctagcttcttgggaggctgaggcatgacaactgcttgaacctaggaggcagaggttgcagtgagctgagattgcaccactgccctttagcctgggggacaaagtgtgactctgtctcaaaaaaataaaaaataaaaaaaaataaaaaaaataaaaaaaataaaaatggtaagcagactgtaggaccacctggacagttccttctaaagggcactggcctcagcaaacatttctgtgtctgctcacagcccaccagaggccacctcaaatgaccgtttaatttccaacaactgggaagcactgtctggctttggaatgtactgaaaccaaagtggaaacaatcacccattgtctgcctctgtgcttatattgaatttttttcccaaaatacaaagcaatatttatcttttgcatcgatgattcacaatttaaagccattttcaaagtatgagacgttagtgtcttatgttatttaataagttaaaacttaggactgacatcaagaagacgatttggtgtagtggagacattgatggcccttggctggatttgtgtccacgtgtggtgtgcatgcagctagacaggtctgttaacaaaatatttttggggaagtctagtttctggtggttagtttttattttattttttatttttttagacggagtctcgctctgttgcccaggctggagtgcagtggcgcgatctcggctcactgcaacctctgcctccctggttcaagcgattctcgtgcctcagtctctcaagtagctgggattacaggcgcccaccaccacgcccagctaatttttgcatttttatttttttatttttatttatttatttttttttttttgagacagagtctccctctgtcacccaggctggagtgcagtggcgcgatcttggctcactgcaagcaccgcctcccgggttcacgccattctcctgcctcagcctcccgagtagctgggactacaggcgcctgccaccacgcctggctaattttttatatttttagtagagacagggtttcaccgtgttagccaggatggtctcgatctcctgatctcgtgatctggcggcctcggcctcccaaaatgctgggattacaggcgtgagccaccgtgcccagcctaatttttgtatttttagtagagacaggttttcaccatgttggtcaggctggtttcgaactcctgacctcaagtgatttgcccatctcagcctcctaaagtgctggaattacagacgtgagccaccactcctggcctctggtggttccccttcccctcctcctcccttttcctttcttcttctttcttcctcttcttctctctcctttttttttcctccactttttcgtattgttccaagtgtttttttgcagtgaggatagtctttttttttttttttttttttgagacagagtctcactctgtcgcccaggctggagtgcagtggcgtgatctcggctcactgcaagcctgcaacctccgcctcacgggttcaagcagttctcctacctcagcctcctgaggagcagggattacaggcatgcgccaccacgcccggctagtttttgtatttttagtagagatggggtttcaccatgttggtcaggctggtctcaaactgctgacctcgtgatccgcccgccttggcctcccaaagtgctgggattacaggcgtgagccaccgcgcgcggcgagaggatggtcatttttacagaaacaaagttgttgtgtgtgtgtgtgtgtatgtttttaaattttggggctgttgaatccatcagtagcaaaggggcccaacacgtgttcggtttggctggctcgatgtttttttcacgagtgaattggatgcttccagtcctccccagacccctgcacttaactccactggacttcactcttccggcctgggaacgagtggtcccgcccccggcagcttttgtcccgccctcgccgtggctccgcccccttctctccggcctgctctctctcctccctccgccctcccgttttccatctgtcgtaaaagacacggcgacgcttgaccgccggcgtcgtttgacggctggaggccaccgagaagaaggaggaagcaggggtggcggctgctgcggcggttgcggcgggggccggggtgggcgccgcggtccgggccgggcagtgaggcgcgggcggccgggccggtgggctgggcggcgggcccggcggccgccctcgcacccttgcccgcgcctggcggcccgatgtggctg

SEQ ID NO: 391 - DNA, 2300 bp, Homo sapien
ttttggtttgtttgttttttttgaggcaggttctgactctcttgcccaggctggagtgcagcggtgtgatcatggctcactgcaacctccacctcccgggctcaagtgatcctccccagtcagcctcctgaatagctgggactacaggcacatgccaccatgcccagctaatttttgtttttttagtaaagaaggggtttcaccatgttgcccaggctggtcttgaattcctgggctcaagcaatctggctgtcttggcctcccaaagtactgggattacaggcatgaaccaccgcacccagctcatctgaatgctgttgatttattaatatcttttcccagcacagacgcatagcctgctctttgtcgtccattgacattcgtgacattccttctctcccacccctttgccccctgcagggaaccccctgccagcctagggttacacctgccacccactcctctggagcctaatcagctgggagaaggctcctgggtccctgtctaaggtcttttttttctttttttttttttttgagacagagtttcgctctgtcgcctaggctggagtgcagtggttcaatcttggctcactgcaaactcagtctcctgggttcaagtgattctactgcctcagcctcctgagtagctgggattacaggcgcgcgccaccacgcctggctaatttttgtattttagtagagacagagtttcaccatgttggtcaagctggtcttgaactcctgaccttgtgatccgctcgcctcagcctcccaaagtgctgggattacaggtgtgagccaccgtgcccggcctctgtctgaggtttcttccaaggaaggaaggatttttgttcagaggtggctgcccctgtctgacatctggtccaggagcccttactctagagaccgttgagttgtttgttgggctttgggtatctgtgaagaggccctaaaaactttcatcgattcgtttactcatttaacaattaatctctctagggtgtggtggctcagcctgtaatcccagcactttgggaggccaaggcgggtggatcatctgagggtgggagttcaagaccagcctgaccaacatggagaaaccccacctctactaaaaatacaaaattagctgggcatggtggcacatgcctgtaatcccagctactcgggaggctgaggcaggagaattgcttgaacccgggaggcggaggttgccgtgaccccagatctcgccgttgcactccagcctgggcaacaagagtgaaactctgtctcaaaaaaaaggtagaaaaattagccagggatggtggctcaggcctgtgatcccacctacttgggaggctgagatgggaggatcgcttgagcccgggaggtcgaggctgcagcaagcggtgatcacgccactgcactccagcctgggcaactgaaagcaaccttgtctcaaaaaaatgaaaaaaaaaaaacaaaaaacaaaaaaacctcagaagcaagactttccttggctcagaggtttgcctcccagggacacaaagggagatcaagtgattgccttttggggagagtggagacgggcttcctgcatttccagtgcctgggtgggccacgtaggggtgtccgtgtctctgaacgcatccgtgcccaccctcaccccttgggttttgggaaggactaatgaaatcatgaaaactgacttccttggggcttgacctggggctgctctaagtgcgctacaggtaacgccattaacccgtgcaagacccaatgaacagacgctatcataagccccacttttcaggcgagcaaacaggggctcgtggctatcgatgccatggagccttggcccagaacctggggtctagaaatcgtggcctctctctcctctcaccgccctctttctggtcggagtgaaccccccagagaagggagggagacggcagggcctgacggaagccccgggagctgcacagagaggcggagggagctgccctaataaggagaggcccggacttgggcatatctgcagaaaaacccttccccactaggcaggcgcgggggagggcgtggaggggcggggtggtgccgcccccggggcgggcccagtgcgtggcagcgggacctgcggccccgtcgcgaagtttccagccctgcgagcgccgccgggtcggccgatcgtcccccatacctcggccatgcggcccctgctgctactggccctgctgggctggctgctgctggccgaagcgaagggcgacgccaagccggagggtgagggagcgaaggccgggggcgggagcgcgg

SEQ ID NO: 392 - DNA, 2300 bp, Homo sapien
tgctgagctgatctccagaagccaggaactggactagcccgtgcattctgggggctggctgatgcttgtgctccagtgacagggccagacctcggaccccagctgactctggccctggaacaagttttcagtgctctgtaacaaatgactgtggctcagaataacacccgtgtgttatctcctggtttctgtgggtcaggaatctgggcccagtttagctgggtcattgaggtgtcagctggggttggggtctcatctgaggcccaggattccattccaaactcacttggttgttgcagaattcattcccctgcagctgtagaacttaacttgcttcttcaaggccagcaagagacagaatctctcttcagtatcctcctttagccaggcgcagtggttcatgcctataatcccaacactttgggaggctgaggcaggaggatcgcttgagtccaggggtttaagaccagcctgggcaacatagtgagacctcatctctacaaagaataaaattagtggctgggtgcatggctcacgcctgtaatcccagcactttgggaggccgaggtgggcagatcacctgaggtcaggagttcgagaccagcctggccaacatgatgaaaccccatctctactaaaaatacaaaaaaaaaaaaaaattagccaggcatggtggcgcacgcctgtaatcccagctactcgggaggctgaggcaggagaatcacttgaactcaggcggtggaggttgcagtgagctgaaatgacgccattgcactccagcctgggcaacagagtgagactccgtcacacacacacaaaaataaaaataataaaaataaaattagttgggcgtgatggtgcgtgcctgtagtcccagctacacgggagggtgaggtgggaggatcacttaggcctggaaggttgaggctgcagtgagctgaagttgcgccactgcgctcttacctgtgcaacagagggataccctgtctcaaaaaataaggtctttctgcagatgactcacctagtaggtcaggcccccccaggataatctcccttttgattaacccaaagtcaactgattaggagccttaattgtatctgcaaagcctgttcagttttgtcatgtaatgtggtccggtcacattcccgggtgtaggagaggggagtagacagagcctgggggccatcctagaattctgcctaaacattcacctcggtcacctccaggacaaccgcatccagggtggctacgagaacgtgccgactattgacatccacatgaaccagatcggctttgagcgggagtggcacaaattcctgctggagtacattgcgcccatgacggagaagctctaccccggctactacaccagggtgggcaagcctggggcatagccaggatgcggggacagttgggtggggtgtcagtggagtggctgggactggtgggggtagggtgggaggtggagaaactgggaggggccgaggtggagtgagggtgtggggagcgtgggaggggcaagggtggggcatgaggtagagggactgaggggtggggatggggttgggaagagcaggggtggggtgggaagtggtagagaagctgggaggggtggagaggagtagggagcctgggaggggcaggggtgagtgggagtggaaagcctagaggggcgggggggcaggggtgagggagtggagagactggaaggggcaggagttggtggggaggtcgaggccagtgtggggcagggggatggggtgggaggggtagggtggagtggggggcttgggtggaagggccaggggtgggtgggggctggagagtctggcaaggggaggggctggggaaggggttgggttggagtacgggtggaggaacatcccagcttatgggagaggcctggatatttggtccccaggcaggagtgaggtctcaccgcacacaccccctccatctagtagcgtgtgggaagacagggtgctgggctgggactctagggccggctagttggcctctagcctgagctggagtctcactcagcctcatgagtagctgggattacaggcacctgccaccatgcctggctaatttttgtattttttgtagagacagggtttcaccatgttggccaggctggtctcaaattcctgacctcaagtaatccgcccacctctgcctccaaaagtgctgggattacaggcatgagccaccgtgcctggccgacctcagctcttttgaatctttcttccttgtcattaaccctgcctcagtggctcctataccagcccaccaaaaa

SEQ ID NO: 393 - DNA, 2300 bp, Homo sapien
taaaaatacaaaaattagccaggcatggtggtgcacgcctgtaatcccagctagtggggagactgaggcgggagaattgcctgaggcggaggttgcggtgagccaagatggtgccactgagctccagtctgggcaacagagtgagagcgagactctttctcaaaaaaaaagaaaaaaaaaaaaaaagaggaaatggaatttatagttcctgccctcagagaatggaagtggaatttagagttcctctccttagggagtccagagattgtggaggaggaaacaatccgacccagtaccaggcagctagcagctgaggccccaaggcacgctacatcccagacagggccctgtctacaccctgaggctgagtctgcgtgtggccccacagtccacagtcagacccgcggggcactaggctactcagagggcagtgtgggcaggacagctccctttggccatcgtcatgagactgataaaccagtcacttctatatcagagtactgatttgcctcttgaggttgtttgtggcaataaattgaggttgttctaccatggttatagagcagcaccatcccacagaattacagtttgacccacaaatgcaagctacttatgtaattttaaattttctagtagcgacatttttaaaaagaaacaggtgcaattaatcttagtaatgtatttaacccaaatgacccaaaatattatcacttcaacatgtagtcagcatataaatagtaatgggctaatagccctgcactgtggcaggtacctgtaacccggcattttgggaagccgaggcaggagaagattgcttgactccaggagtccaggagttcaggacaccagcctgggtaacaaagtgaaatgcttccccatgtctacaaaagataaatactaggcatggctgcagcatctgtggtcagctacttgggaggctgagtgaggtgggaggattacttgagcccaggagttcgaggctgcagtgagccgtgattgcaccactgcactccagcttgagtgagagtgagactctggctcaaagatagattttttttttcttttttgagacggagtctctgttgcccaggctggagtgcagtggcatgatctcggctcactgcaacctccaccgcccgtgttcaagcgattctcctgcctcttcctcccgagtgcactatcatgcctggctaatttttgtatttttagtacagacggggtttcaccatgttggccaggctggtcttgaactcccgatgcacccgcctcgccctcctaaaatgctggaattacaggcttgagccaccgcgcccggtcgatatttttttttcctaaaaattgagatagtttaacagccttttttgtcctaagtcttatagcgcatctccgtttgcactggctcaggactcgagagccacacgtggctagtgcctactgttctggcgcgctcaggcttggagccttctctgcggaggccaagtcctgcaagggatctgtttgctgcggtttcctagtagtgtctgccgcatcactggggcccggtgatctgggtaaccatgtgagcttgggtaacctctcctctccctctcctgggactgctgtggacgttaaatacagcggtggatgttagagacgcagttcagtcactggcattgattcgccgttgttgctgctcttctttcctcaaaggcgactgaagggcagcaggcccatgctcgcttctgtctgcccgatgagtcacttcaccctaggcctggccctctagagaacactcctctaagattacagaatgcaaatctggattccagagctggcagaggccccagggtcaggctctaggacaaccggcgaaaaagcgggaacctctactccacgcccttggtttttcgccccttgacagcttgaggctccgccccgctttgccccgcccccccagctccggccgacgcccaccggaactacagcccccatgatgcagtgggagtccgagcctctgcgtcgtccgcttgggacgcgccggcggaggagtggcgcgcggaggagtggcgcgctgagacgccgctcgaagcgccgagtcgcggggcagcagaggcgtaaggagtaggcggggcgagccggctgggctcagggtccaccagctcacccgggtcgaggggcaatctgaggcgactggtgacgcgcttatccacttccctcctcccgcctccccctggggtggcgctcgctggtgacgtagtgagtgtgatggccgccgcgaggccgggaaggtgaaggtgagagggcgagcaagccggggtggc

SEQ ID NO: 394 - DNA, 2300 bp, Homo sapien
caggagatcgagaccatcctggctaacgtggtgaaaccccgtgtctactaaaaatacaaaaaattagccgggtgtgatggtggcaggcgcctgtagtcccagctacgcgggaggctaaggcaggagaacggcgtgaacccgggaggtggagcttgcagtgagctgagattgtgccactgtactccagcctgggcaagagagtgagattccgtctcacaaaaaataattaaacaaataaagggtaataagattgataatatggcaatatgggatgataaaacatgcagttgcagtcagtaggccagagtccaaattatttatttttttcgagatggagttttgctcttgtcacccaggctggagtgcagtggcacaatctcggctcactgcaacctccacctccagggttcaagcaattctgcctcagcctcccgagtagctgggattacaggcacccgccaccacacctggctaatttttgtatttttaatagagatggggtttcaccatgttggccaggctggtcttgaactcctgaccttaagtgatccgcccgcctcggcctcccaaagtgctgggattacgggcgtgagccactgtgcccgcttgtgactgacactaggcagtgtgactttgttagcttccttgacccttctggtaatccaatttcctggccagtgtgatggtgtgataaatagacttgttgagaggatgaaatctgtcaaaaacacctgacacgtggtaggtgtctacaagaagctattgtcacattttatcggtagaaccccaggatgtcagagccaggagggatgttctagtgatgcccactccttttataaacaatgccccaggaggacacagcttgtcagagtataggtcccagatttaggtttcttgacctcagggttcctttcctgccagggcaccaaaatgaggcactatataggcttaacaagaggcagtctagggcacgtttaagcatttctgcttgtatatgcataaaatatctttggcacgctcactgccaagtaacccccacacgttggtctgggaaacttggtggtgagagagcagaatagtgggggacattacactgtgtatgtgtttgtgcctttggctgttgagccatgtgaatatattgcctattcttttttttccctcactctgtcgcccaggctggagtgcagtggtgctatcttggctcactgcaacctccgcctccaggttcaagtgattctcctgcctcagcctcctgagtagctgggattacaggcgcctgccaccatgcctggctaatttttttgtatttttagtagagacagggtttcaccatggtggccaggctggtcttgaactcccgacctcaagtgatccacctgccttggcttcccaaagtgctgggattacaggcgtcagccaccatgcccagcctcttatgacctattcttttaataaaagaggcaggtgggggctgtggggccacctacactcactctggacacatttgtttgggctccaggtgcggcggcagcacatggagcgttgtaccagcttcctggtggatgagctgggcgtggtggatcgatcccaggccggggaccgcatcttctttgtgtctgctaaggaggtgctcaacgccaggattcagaaagcccagggcatgcctgaaggaggtaatgatgagaacagatgtcctccttttctctgatgtttgagacattttgtctcgtgctgaggagtctgtcagtagaaaatccttctgagaaggggatgctgagaagagcagagaggctcttgctctttagccagtggcttggtttctggggatttcatcgttttcctctgctgccaagttgtttctggactaatgcagtacaatcctcctagggggcgctctcgcagaaggctttcaagtgaggatgtttgagtttcagaattttgagaggagatttgaggtgagtcctctgattctggtatctggcgattctgtgcctccccagctcccattggctgtgtccctggcagtgaaaaccagagtctggcccttggttgtaggcccctggtggcccccacctccctccgtgcctctgtgtgttccaggagtgcatctcccagtctgcagtgaagaccaagtttgagcagcacacggtccgggccaagcagattgcagaggcggttcgactcatcatggactccctgcacatggcggctcgggagcagcagtaagagtccaagactgcagataggtggagagagctgccgagacaagggtgctccacccctgccttgggcagttagga

SEQ ID NO: 395 - DNA, 2300 bp, Homo sapien
ggtggcccccacctccctccgtgcctctgtgtgttccaggagtgcatctcccagtctgcagtgaagaccaagtttgagcagcacacggtccgggccaagcagattgcagaggcggttcgactcatcatggactccctgcacatggcggctcgggagcagcagtaagagtccaagactgcagataggtggagagagctgccgagacaagggtgctccacccctgccttgggcagttaggacacgccttgatggcagggctgagtctctgggctcccatccagagccctttccctggccaccagaccatgttagaaccacatagacagcctggtgaggagggcggctgggtgcttcatcaccccacctggtctgtgcagcacgattccctgtgttggaggtcttggcccatgccctgctgagctctgcagccattctcagagcctgaacacatttttcaaaacaacattccagccaggagcagtgactcacacctgtgatctcaacactttgggagaccaaggcaggaggactgcttgaggccaggagtccagcccagataacatagtgagatcccatctctacaagaattttaaaaatcagctgggtgtggtggcacacacctgtagttccagctacttgggaggctgaggcaggaggatcactggagcccaggagttcagggttccagtgagctgtgatcgcaccactgcactccagcctgggcaacagagtgagaccctgtcactaaagaataatatgaaaacaccttgcttctatcacacagaattgactttctcagttgtttatgttaagttaaaattttaaaaagttcagttcccttttgattcttttgcacttgtcccagtgtcactctgccctgaggcaccataatcatgaatttacattgttctatcacccaaacagtactttttacataaatgctgaggaatatgtcaggtttttacatgcttcagatgtacagatgtggcatcacactgtctgtcactgtacctggctttgctttctcaacatcgtttttccctctatccttgttagtatgtgtagtttgtttatgaatcggaactgctgtagtatattccattgtgaatatgcctcattttcctatggatggaattttagattttttttttgctattggaaaccctactgcagtggacatttgttcatgtgtccccttgtgcacctttttaagagtcttcctggggtgagttcctaggggtgtggcaattctgttttagggtacacgcgtttccagttttagtcagttttcttgatgctcttcagaacagccgtacccattcattgcatgaccagtactgtccataggccttccatttcatcagccctcaccagaacttcagacctggtcatttttgccaggccttggtagaaaatagtgcctttaaaaatttcatttacaactgggcatggtggctcacgcctgtaatcccaacactttgggaggccaaggcggatggatcacctgaggtcaggagttcaagaccagcctgaccaacacggagaaaccctgtctctgctaaaaatacaaaattagctgggtgtggtggcgcatgcctgtaatcccagctactcgggaggctgaagcaggagaatcgcttgaacccaggaagtggaggttgcagtgagtggagatcgtgccattgcactccagcctgggcaacaagagtgaaactccatctcaaaaaaaaaaaaaaaatcatttctgtgattactagtgaggttgagcttttttccctatattaattggcagaatttgtttaaacccccttaaagcgccctccctgttttgtgcccaccacctgacccacatcgaagactgaagagtgcatggttggctgcagggtcctcttcttacctgggaaggggaaggccatgcccctgggtgcgtgtgtgcagccctgccaggcaagatagcgggcagggcggcgtgggatttctggcatcccctcttgctcctctgcttagtcagacaggaacatggatttctcaccagtactctgctttcagggtttactgcgaggaaatgcgtgaagagcggcaagaccgactgaaatttattgacaaacagctggagctcttggctcaagactataagctgcgaattaagcagattacggaggaagtggagaggcaggtgagaaatgaggaggaggcattctgggaagatttggactccgagtagagtccagaagaaagcagacctcctcctcttagggacttctcagcctttcagaagaaagttgtggccctgtttcaag

SEQ ID NO: 396 - DNA, 2300 bp, Homo sapien
cttctggaggtagaggggctacctatcttcttttcattcttttttttttttttttttaatttgagacagagtttcactcttgttgcccaggctggagtgcaatggtgcgattttggctcaccacgacctccgcctcccgggttcaagcgattctcctgcctcagcctcccgagcagctgggattacaggtatgcgccaccatgcccggctaattttgtatttttagtagagacggggtttctccatgttggtcaggctggtctggaactcccgacctcaggtgatccgcctgcctggacctcccaaagtgctgggattacagacgtaagccaccgcgcccagccaatttttgtatttttagtagagacggggtttcgccatgttgcccaagctgatcttgaactcctgacctcaggtgatccacccgcctcggcctcccaaagtgctgggattacaggcgtgggccactgcgcccggccccagtttttctaagttatatagtttaggtttcacaactagatctatgatccattctaggttaatttttgcatatgggtttcttttttttttttttaggatgagtgtgtggatatccaattatacctacaacatttgttgaagacaccatctcttcttgttttcccaagtttccacacacattattgataaaataaatttttttggggggggtgctgggtgtcgctgggctgtaactccttacctcaagccatctgcccacctcggcatcccaaagcgctgggattacaggcgtgagccaccgccccgggccgaaggcattatcctttctccactgaattgcactttcatttttgtcaaaaattaattgctcacatatcggaactctattctgttgcattgatccatttgtctacctggacgccaataccacactttctttcttttttaaattaatttatttattgagacagggtctctcagtcagggtggagtgcagtggtgcaatcaaagctcaccacagcctcagcctcttggactcaggtgatcctcccatctcagcctcccgagtagctggactacaggtacgtgcctggctcattttttgtagagacggggttttgccatgttgcccaggctgggtatcttttttttttttttcttttttgagatggagtcttgcgtcttgctctgtcatccaggctggagtgcagtggcgcgatctcggttcactgcaatctctgcctccctagtagctgggttcaagcgattctcctgcctcagcctccctagtagctgggattacaggcgccggccacctcgcccggctaatttttgtatttttaggtttactggcgtgagcaaccgcggccggccccaatactacactttcttgtttactgtgtagtccttatcttctggcgcaaagcgggcactcgctaaaaacctgaatgaaagtataaagcaggccgggcgcagtggctcatgcctgtaatcccagcattttgggaggccggggcgggcggatcacgaggtcaggagttcgagaccagcctggccaacatagtgaaaccctgtctctactaaaaatacaaaaaaaaaaaaaaaaaaaaaaaaaaaaaaaaaaaaagccgggcatggtggcgctcgcctgtagtcccagctactcgggaggctgaggcaggagaatcaatcgcttgaactcgggaggcagagattgtggtgagccgagatcgcgccactgcactccagcctgggcaacagagtgagactccgtctccaaaaaaaaaaaaaaaaagaaaagtatgaaacgatgagtacaatgagtagccagccgcctgccccacctaccccgccgttccggactgccgcctgcgccgagcctaggccgcccagcctgactgaaactgccgctgctgaactcagcgtatccagtcccgcagctgaccaatcggagctcgcccttccggggcccgccccattccaggaatcgacctccgcaccggcctcgaaaattgaccaatcggttgtgtagctccgctcttagtcccgcccccacgctgaaactgacacttcggatcgccgagtaacgctcaccagacgtcccggccctgcccctcacctgaccaatcaagacggccggccgaggcccctggaacggctcaggcggctgcggctgctacggcggcgcatgctaggggattctgccgggtgagtgctgggcggcaggactggggtggggcggaagggctcggcaggaggccccacgtgcattcccgcgaggggctcgggggccgcagtggaaaagaagggtaggctgcatc

SEQ ID NO: 397 - DNA, 2300 bp, Homo sapien
acctctgcctcccgggttcaggtgattctcctgcctcagcctcccgagtagctgggattacaggcgcgtgccaccacgcccggctaatttttgcatttttagtagcgacgaggtctctcgccacgttggctaggctcatctcaaactcctgacctcaggtgatcctcctgcctcagcctcccaaagtgctgggattacagacgtgagccacttggcctgttttttgttttttttacagtgatgcaaccatggctcactgcagcctgggtctcctgggctaaagctatcctcctgagtagctggggccacagacaagtgccaccatggccagctaattaaatttttttttggccaggcactgtagctcatgcctgtaatcccagcactttgggagaccgaggcaggcggatcacaaggtcatgagatcgagaccatcctggctaacacggtgaaaccccgtctctactaaaaatacaaaaaattagctgggcgtggtggcaggcgcctgtagtcccagctactcaggaggctgaggcaggagaatggcgtgaacccgggaggcggagcttgcagtgagccgagattgcgccactgcactccagcctgggcgacagagcaagactccatctcaaaaaaaaaaaacaaaaaaacaaaacaaaaaaaaatgtttctacaaatgttgtccaggcttaacatgctttctttaattctaacaacaatcgtatgaggtagatactgttgtcgtccagcagatgaggaaactgaggcacagagaagttaaataacttgcctgaggcagtacagttaaagagtgtcgaatgggggtctctggcaccacagggcaccctactgagccccgtgtcctgctgtcttgacttcaggtagaagagctgggcctggaacccagccctgaggacatcctgcggcccaggggcaagtgacacctgctgagagaggcccaggatggtggaggctgaggaactggcacagctgcggctgctcaatctggagctcctgaggcagctgtgggtggggcaggatgctgtgcggcggtcagtggccagggcagcctcggaggtgcgtgcccgccttgggaaccccagaggaaggggctacctgaccttcaggccagcatccaggcttctgggctcatcttgttcaatacacccattttactgatgatgggacattgagggctggggagggaagagactggccttggtcactgctgaggccggagcaggatgaggatgcttgccttggtgcctggcgtaggcccggtgggtaggttctggcagccactccctgggtgacccggcccctctctccagtcaagcctggaatccagcagcagctacaactcagagactccatcgaccccagagacgtcctcaacttccttgagcacctcctgcccacggggccggtcctccgtgtggggcccaccagatgcctgtcgaggggacctccgtgatgtggccagatcgggggtggcctctctcccacctgccaaatgccagcaccaggagtccctgggccgaccgagaccccactcagcaccctcgctgggcacctcaagcctgagggacccagagccctcagggaggctgggtgatccaggaccccaggaggcacagaccccgaggtccatcctggctcaacagagcaagctgtccaaggtaacgtgggagagcgggacatctgctgatgggaggagcttccttgggcctcagtttccctatctgacacatgtgcttgtgggtagcctcccttgcagaataagaggctcctgggagatactgtgagttgggtcttgctcagcctaaatgctcgctaggtggtagctgtgagtatctcatacagtgctttgagaagaggccaggatttgttcacagccacacataaagtggggccaaacgtttcccttcttgctcttgtgcccttggctgagccctgggctgcaagtcagggtgtaagttaagacacagtctctctgtccctcgaattgcggcttcctctgggccaggcctcttggcttagtccttgtccctctgtgcttccttcctcagcccagggtgaccttctctgaggagtctgcagttcctaagaggagctggcgcctcaggccatacctgggctatgactggattgcaggtaaggcgtgctgttgccctgcacacactttgcctgggagtgggaggtggaggcctgggatcctccatgctcctgtctgagcctccacccggtgctgttgcttgtttctctgaccgtgccatcctccgtggggagcaccctctttt

SEQ ID NO: 398 - DNA, 2300 bp, Homo sapien
cttttttaattaaacaaaaaatagagatgaggtcttgctacgttacccgggctggtctcaaactgggctcaagtgatcctccaacctcggcctcccaaagtgttgggattacagatatgagccatgtcacccagctgccagcttttctacttttgtagtagaaagctctggactgggaagcaggtgtcttgcgttcctcctgtccctgtctggttctgtcattatcacaggcaggtcacttccataattgcttacctcattgtttaacatagtcccagctcaaacagcctaagatactgggcctggtacatccagaggagagtctggaagtgggtctcttgggaaggggcatgatggagcagttttcccaagtggagtccagcagccccaggagggttgagcatggagtggtcagttgtggagaccttgctgggaagttcctggtgggaggttatcactcctaccctatagggccttcacctgatggaggcctggtacctcgcaggacagatcaaggtagacacagaagccagagtatccttaggctattctgggctcagggaaaataactggcccacccttaattagagcacctaggactgcctgcctatttctgagccttggctttcacatctgaaaaccaaacaaaatcagtcaaaagaacccttgacctgtggcccacccagcagatgctcaacacagacacacggaatgtggaataaaaggagcaaagagaaaacccaggggatggggaagcactggaagggaaaatcattcaccagcaaatgagaacatagtacgaggaggcttgaatcatttctgttaggagagagtgccagccgcctcctccaggaagaaaactctaaagggtcaggcctcagggaaataaaatgatctataccatccatcagttcctccaacattcagtccatccatctaccaatccacccacccatttacccactcacctgctgctcatccatccatccatccatccacctatgcatccatccatccatccatctatgcatccatccatccacccatccacccacccatttacccactcacctgctgctcacccatccatccatccatccatccatccatccatccatccatccacttatgcatccatccatccacttatgcatccatccatccatccatccatccatccatccatccatccacctatgcatccatccatccatccatccatccatccatccatccatccatccatccacttatgcatccatccatccatccatccatccatccatccacctatgcatccatccatccatccatctatgcatccatccatccacccatccacccacccatttacccactcacctgctgctcacccatccatccatccatccatccatccacttatgcatccatccatccatccatccatccatccacttatgcatccatccatccatccatccatccatccatccatccatccatccacctatgcatccatccatccatccatccatccatccatccatccatccatccacttatgcatccatccatccatccatccatccatccatccatccatccatccacctatgcatccatccatccatccatccatccaccaatttatcatccactcactgattcattttacagcaaatgcttatgaatggggatgggtgggtgatggttgctttttctgcagtctccctaggccagttgtcccttccaaagaatctcaagggcatgggagaaggtcctggctgatcgtgtcagggacaggaaactactcacatttcaccgtttcttggggcaggagtggaggtgggggcattggaacccccttggggcctcctaatatcctgtgagtccccacctccagggccagaagctgcctgcctccgctccccgcagcccaggtgcggcgggcagcacactccctagagccaggaccactagttccgtcaaatccggggcgggccattcaaacagctaagggaggcgtctcctagtgtgccttttcctgagtcatctctgcacgtgtttgcccccttttttcttcgctgcttgtagctaagtgttcctggaaccaatttgatacgggagaactaaggctgaaacctcggaggaacaaccacttttgaagtgacttcgcggcgtgcgttgggtgcggactaggtggccgcggcgggagtgtgctggagcctgaagtccacgcgcgcggctgagaaccgccgggaccgcacgtgggcgccgcgcgcttcccccgcttcccaggtgggcgccggccgccaggc

SEQ ID NO: 399 - DNA, 2300 bp, Homo sapien
ctccacggggaagcccgttctggatgcaggtaatggtcccagcccactcacccctactcccagcaggggcttcctcctggggaagtgtggattgggggagccaggagggagcttctcctttgtgggtatggtctgagaagggggattaaggttgaccccaggtttctggcttcttgagttggtgctgtggctctggcacttgctagtgactattcttttctttttgaaacagtctcactctgttgctcaggctggagggcagtggcacccatcttggctcactgcaacctccacctcccaggttcaagagattctcctgtctcagcctcccgagtagctgggtttacaggcgcttgccaccacgcctggctaaatttttttttaatttttagtagagacggggttttgccatgttgtccaggttggtctcaaactcctgacctcaggtgatccacctgcttcagcctcccaaagtgctaggattataggtgtgaaccactgcgcctggctgctagtgactattctttaattcttgtaggcaggaatttttttcacagcttcatcctcgtggcttataattgctactcagaaaataggtctttgttgattgatttcatgactttgactagttgttcgagcctttgagcctcagttgtctcatctatacaatggtaatggcagagaccgtgcagggttataagcagtgtagcattgtagacggcctctgtcagagttagctcttaggctggacgcggtggctcacgcctgtaatcccagcactttgggaggccaaggtgggtggatcacgaggtcaggagtttgagaccagcctggccaacacgatgaaaccacatctctactaaaaatacaaaaattagccaggcgtggtggcgcgcgcctgtaatcccagctactcaggaggctgaggcaggagaatcgcttgaacccgggaggcggaggttgcaaggttgcagtgagccgagattgcaccgctgcactccagcctgagcagcagaatgagaatcagtctcaaacaaaacaaaacaaaacaaaacaaaacaaaacaaaacaaaacaaaacaaacaaaacccccaagagttagctcttagggaaagatgccaggttactcattttaggacttgcagttctagtggctgacacgaggtggcagtagtgctccggccagagtttctgaaagtgcggtcccgtctggcagcattggcaccggctgggaacttgttaggaaagcaaattatgggccccatcccagacctagagaatcagaaactgcactttaacaagatctccagggcactcatgtgcacattaacgtttgagaagcacttaactggcatatactactttttaaacatctaaacatggacttcaataaagtgcaatcactagctctatgatctctgtaagtgacaaaagggaaaaacgaagcgagtttagtaccgaggtgtgaagaagtagatctagataggggttaagagcgtggccctgcagtccccccggcctggcctggcctgggctggggctctgccacttactctcagggtgaccttgggcaacttaacgaactttcgtgagcctcagctcccctcatttttaaactgaaggtagtgacggtgcctagggcatagggttggggatcattcattcagggaacgcttgtggggtgtgtttatgtgcagtggggactccatgcctgccctcatcaagcaggtctagagggttggccgggaggggactgggttcaacctcttccttcccctcactgcttggccctccccaccctgactccggccacaccagcagtgctgccagatgccggtcacaccgggccctcgtccacagtccccaaattttggtctattggacctcaattcctttgttctggctcctagacgcctcaatttctcactctctagacacagtttgcccttctctcagccttcaatagttgatcagcttcctggagccaggcgagggagggctggatgagataagagccttggcttggaaaggacctgttgttgttagccatgatggaagctgtgtcccaggagaaggaggaagtcgtctggggctggggctgtcttgtgtggttgcagcaaggcaaagagtgtggggcgtctctgtgttccagggccagtgctcttctgggtgatcctggtgttggttgtggtggtcggctccagcgccttcctcctgtgccaccggagggcctgcaggaagcgaattcggcagagtaagtggctgtgtccttggggccttggggaggacaggttgctctc

SEQ ID NO: 400 - DNA, 2300 bp, Homo sapien
gaaggtctccaagaaacctgcactagagccccagagagaatgagctggaaactgtccccaaagtccccagtgccagatgggtgacaactttggctgccatggaacactgtgccctttccttcccaaaccctcacccctgggcctgaccctggagtcaagaactgcacttggcagagttcagagagaagtcgcctgctctcaagcctgggtcggcctggagaaggggagaagccccatgttgcatagagattaagcttgaattcgttcccaggatgggacctaagcctgggaggatccccaccttcaggaggtgatggtgccattcactgggatagggaaactggcaggaggagccggttgttgagggttgggggtgcagacagtctgttggtcccattggtcttgaggtgtgtgggggacaactagagagaactattgtcccctgcttccacgaggtgacatctccctcctgccttcagctctattttagggatcaaggagtccttggagctgctcctaggcattctcataagggccagaagagctctgcatgtctgtccagcggctctgcagagttaaggctgtgggtcataccagccacaccctcagcgtggtccatgtcacagaaacatgtggaaaccaggtgatttcccagcctcctggtcaggaggtggggttttccatccccagggagtcacttcccagtttctcactcagcactcagcacctagaagcaccatccttgcaggctccactgtggggctggtggccgggagcaagggtctctgtacctcttcaggcagcctgcagtgaggaaacagggaacagaatagcctcctgccacccagcccaccccaacccttagaaatgccctatgtgctgggggctaggacccccgtaatccagggctggaggaatgtgctctggccccgcagggctggccctgtattagggctggcactcaaagtggggatggggggacagattgcagctggaatgggtgctcggtcatgatgtaaatcctggggaagccagctctcctgggcctggtctcagcagcccctcagggccctgcagcttccctggtgacattctctcccagcctctgttcatctgccccctgcctgggcaggagacttgagcagggaagtgcagagtcttctccctgtgagaaggctggatgcgtgtttaaggataaatgaacacgcgaagagtagtaacaacagccaagatttataaatgcctattgttatatatgtagatacttacttaagtatatataaagtacagactgcattatgtatattacatatctttaaatttttagaatagtcctatgaggtcagttcagagatccagacccaggtggtctggctctagagtctaaacaggccgagtgcagtggctcacacctataatcccagcaccttgggaggccagaggcgggaagatcacttgagggtgggaagaacacgtgagctcaggagttcgagaccagcctggacaacatggcgaaaccccatctctataaagaaatcagcctagcatggtggcccgagcctgtagtcccagctactcgggaggctgaggtgggaggatcgcttgagcgcaggagttggaggctgcagtgagctatgggtgaaagagtgagaccttgtctcaaaaaaaattaaaaaataagaattaaatatatttaaaatagagtctaaataagtgaatgatctagaattctcttggttcccctaaagcagctgtcagctttgggggatgtttttccaaattagtgcctcaccctcacgggacagggaagcctgtgggagctgggagggcaggtggaggccgggcaggtggaggccgggcaggtggagatggtgattcgaagaggaggggacgataggaggaggttgaggggtcacccgagtgctgggagtgacgctggaggtatcggcccagcgatgctggagtggtcgggtcggaggcccagcagcgtctggggaggggcgtgggggaggcgtgtccaaggccggctggccccgccccgccccgccgcctggcctctggcccgctggggcgcgggctttcgctttcagtcgagggctagcgagcgcagcggagcctggagagaaggcgctgggctgcgagggcgcgagggcgcgagggcagggggcaaccggaccccgcccgcacccatggcgcccgtcgccgtctgggccgcgctggccgtcggactggagctctgggctgcggcgcacgccttgcccgcccaggtgggtgactcgcgcggcccacgggggacagcc

SEQ ID NO: 401 - DNA, 2300 bp, Homo sapien
gctggagtgcaatggcgagatctcggctcactgcaacctctgcctcctgggttcaagcaattctcctgccttagccaggagagtagctgggattacaggcacctgtgaccatgcccggctaatttttgtatttttagtagagatggggttttgccaagttggtcaggctggtcctgaactcctgacctcaggtgatccacccacatctgcctcccaaagtgctgagattacaggcatgagccaccgcgcctggcctgggccatgtgcatttctaacaagcttcccaggtacagccaattgtctgtgctaggtgatctggacttcgaggtccttcacctctgaaggactgccttccttcctccttctgtctgtggagttccaggttttactcccaaacctcagccccagaggagacccagcatccagattctgagaggttgatcccaccatacaggaaccccagtcttgctcaggagtgagtcagcccaacatgcaccctcattagcttagcatcatgagggttggtaattattatggtaaatacatgattgtaaccttgccgttctgcttcctgcatcttctaatttatatgagcctgaggtctccctcttgcccttcttgtgataatgcaaggaggaagtgttcagctgttcattcatacacactcattgagtcttttctgtgctaggcaatgtctaggtgttgaagaaacactgtgaaagggataaaatctctgttttcaaggtactggggaaagaacaacatatgtataaacaaacaagataatctcagggagtattaggttccatgaataaaatacaacagggtaatggataatggaactttatttttattttcatttttgagagggagtctcactctgtctggagtgcagaggggtgatctcggctgactgcaacctccgcctcccgggttcaagtgattctcctgcctcagcttccccagtagctgggactacaggtgtgcactaccacgcccggctaatttttgtagttttagtagagatggggtttcactatgttggccaggctggtctcaaactcctgacttcagtgatccgcccgcctcagcctcctgaagtgctgggattacaggcatgagccactgtgcccagctcataatggaaccgtagataggcacaagtcctctctgagtggaatatttgaagccagagggagtcagctatacgaatatccagagctattctgtagctctggattggccacaagagggtattgagcactggaattctggctagtttgtactgagatgcgcagtaaatgtaaaatatacccgaatttcaaaaacttactataaaaaagttaacatattgtattagtaattttttcttttggcgacatgttgagatgatcatattttgaacatattggattaaatatattaaaatgaagttcattttcttctttttcgtttaaaaaaaatgtactagctagtaaatgtggattgcctatgtggctggcattgtgtttctattggtctgaggagaagggtcctaggtagagacaacggcaaaggtacagttcctggggcagaaactgaaggatgctgaggcagagtcggccggggaaaaagtggctgaaatgggaagggaccagatccagtgggaccttggtggcagctctgtaaggaggtgggttttaactgaagtacggtggggacgccgttttaagcagggaagggcagggtctgaattaacaggcccctgtggctgcgaagtggggaacggactgtgggtgagtgggccagacggacggccaatcgcacctttcgcttggatggaaggcagggtggttgtaggtgggaagaatcctgggttcccatgctgtctgaaccagagtcatttgtggccctgccctcccctgggactcaatttccccacctataaaataagccccagtgtccgcgaaccctggaggggcccgcaccactgcaggagcggccgccggcgccagggggcgcctcctcgataactcggcgctcggctggccaggcaccggcgcgtcggccgctcgattggtcgggtcggggccggcctgagcgccgcgggcctgcgccattgaggagcggcggggaggaaacgccgcgcagcgccgggctggggcgggcggcccgggacaccgacaggtaggggccgagcggctccgtgccgggcggggccagggtcgggaactgcagggccggcgcggacccgcgggccgccgctagggctccgcctggacatgggggcccgggcccaccctggggagagcgatgctagg

SEQ ID NO: 402 - DNA, 2300 bp, Homo sapien
aaaaaaaaaggagaatacgcaacagacatcatataaatcctaaaatatttactatctgtcctgttatggaaaatgtaactcttggtctgaactcttcatcagcgcctaagcttcagctctcatgtacgtgttagagcggacggcctggaaattcgtttagatgaagcgtatgggctggtggtagcactacacatgataagcctgttctagatgtaaaactttccctttaacctacacatgatatagcctgttctaggtgtaaaactttaacctacacatgatgtagcccgttctagatgtaaaactttcctttaaccttcacatgacgtagcctattctatatgtaaaactttccctttaaccttcaatgctttacacacagtaggtggcctactgtatttgttaaatggatatttcatgatgctgtttttatttttaggtgctgttgaattagaaaacttgccattaaagaaagatgccttgaaagaattggaattaccatttgaagtcaaagctggtatgtggaactaaaggagggggaagaaatttgagtcttaaattgtttgagaggtgaaaactgagagccctggagtttgtattgatttggccagttagaggaaggatatagcaaatgttagagtttaggccagtcttaaagtgtggtctttgggccactcgtatcaggatgaccttgtgatggtggtggggaggtcaggtgatacccggaccgactgaatcagaatctctgagggaatgtcattgaacctacagtgtttaataagcactccaggtgattcttatgtttactcaagtgtgagaacctctgttctacattcaaggtttccttttctttcccctttccctttttctttttcttttcttttcttttttttttttcagatggagtctcgctctgtcaccgaggctggagtgccgtggtgcgatctcggctcactgcaacctctgcctctcgggttgaagcaattcttctgcctcagcctctagagtagctgggactacaggtgtgcaccaccatgcccggctaatttttttgtatttttagtagagacgaggtttcgccttgttggccaggctggtcttgaactcctgacctcaggtgatctgcctgtctcggcctcccaaagtgctgggattacgggcgtgagccaccatgcctggcctcctttttatttatgtatttatttatttatgacagggtcttgctttgtcacccaggctggagtacagggatgctatcatagctcactacagctttgaacttccaggctaaagagatcctcctgcctcagcttccccagctattagttggaatagttgaatacagctgcgtgccaccaagcttggctaaatttctgaatttattactggattacacggttgatcatttgatgttgtcattaaaaataccattgttggactggacttggtggctttcacctggaatcccagcactttgggaggctgaggcaggaggatcacttgaggccaggagttcaagaccagcctgggcaacactgcttgactcttataaattgaacataaagaaagcttgtattctaggaggcttggctagaaatggaagaacttgggaaataaatatcacaattctaccgagccgtttggctttctcatcagcccaggttctcatgaagcatcagaattctttattgagagaaggccagcaccatttacctatgtttcagtttgtggtgggtatgttcaagattgaatatatcataggtctgatgactccaactagtgcttatcaaccagacaatgactaatgaacaagaaatgagtttagtgtccatgggcttgtgcgggacccggggaagaaagacaccctgagcaagtgtaagatgtactccagttggaaaaggagatagtttctagaggagggatgttactgttgatgtggtaaagtcttcgcgaactttttccagcttatataagtcattataccttattcttacagatgtcagcctcctaacacttgtttcacatgtgcaagagcctgctgcctgttgttttaaataaaaaaaagtagtaacagcaatccatgctccttaaacaaaattgtaaaaataccaaaaaatggaaagaattaaaaatgtgtacagatggtgaacaagactttccttctccttccaggcttcattgggaaagtaacccttcagattcccttttatcgcccccatgtggacccttgggtgatctccatctccagccttcacttaattggagccccagagaaaatacaggatttcaatgatgaaaag

SEQ ID NO: 403 - DNA, 2300 bp, Homo sapien
gacatgtagctgggtttttattcctacattttctgaggtctgtaaataatgattcagtggaactttgaatttctttgtattcttaatgtttgaaattttaagagtatcagttataccagatgtgtttggccaaatataaattatttcccatatattttaccccagaagtatgatgcagtttttctatgccttccactttacatgtaacctcttatatttgttacacttcttcattcacctagcaactggtatagtaaagtaatgctgtgcgttagaaatcttgggacaaatatcttgagtgggttttgcttccattagctatgtgaccatcagggagttatttttcttactattcttcccttgactcagttatagtaggaatacggagatagcagaattaagtagcctgtacttttggcaataattatttatattaatgatgctttggagttttcaaagtgctttcctacacattatctcatttgatccttataacaaccctgtttgttcatttcttcagtaatttaggaatgagtgtgtcatgcagcttgccaggtgctaggaacagagtggaaaacaagaaagacaaggtcattgccttcatggagtttatatttcagtgggaggatataatcaaggaaaaaaagataattagttatgataatacctaatgaggcggtggtcggcagatgtgttactttcattttataagtgaggaaacattgttaactcttagccctggttgtctggctcatgattcagtgttttttccattaacatataactgaacgcatgttcaagatgtaagtgctagtcaggatgcctgtatatatataaatacatagctgtgtgtacaggaaaaaaagactgaaaagatatggtgttgatgtggtaataataatagctgttacattttcacctcagtttctgggtgtattgtctcatttaatccctatacctctttgaggtagggcttatggcttattattattcccattttatagataaggaaacggaggcacagagactttaacgacttaaccaagataaccaagctactaagtggccaggggtttattagttttatcttttaaaataaccaacttattcaggcctgtattatggccgaggcatactctcagccaatagaccacctgttcttataaagaggatatgttctgggctgggcacgctcacacctgtaatcccagcactttgggaggccaagacgggtggatcacatgaggccgggagtttgagaccagtctggccaacatggtgaaaccccatctctcctaaaaatacaaaaaatagctgggcgttgtggcacgtgcccgtaatcccagctactcgggaggctgaggcatgagaatctcacttgaggccaggaggtggagtttgtagtgagctgaaattgtgccactgtactccagcctgggcaacacagcaagactctgtctcaaaaaaaaaaaaaaagtatgttctgtggtttttgggtgcagtcatattctataaatgtttaattgatttttctctgattgtcggtttcctatatcattgacttatgctttttattttcttccttctacttcagatttaatttacttttctttttccagcttcttaaggtggaagctttcaattactgatttttaagtctttattgctttctaaagtcgtggtgtaaatttctctctaagcatagttttaagtgtatcccacaaattttaatgtattatgtcttccttatcattttagtgaaaatatttttctgtttcccttgtgatttcttctgacctaggggttatttagaagtgtgtagtttactttccaaatatttggggattttccattatcttcttgttactgacttccagtttaactccatggtggtcatagaatatgctctgtatgattttaattgttttataaactcacgaaacttttgggaacctgaggttatttggtggtaaaattagggaattaattatcctctgagtcagttttccttcctctttcaggtgagagatcaagcccagcgctgttcacgggttctcctggatattgaggctggtgctcccgttctcttgatcccagaaagttccagatcaaataatctgattgtagcaaatttggggaagttgaaagtcaaaaataagtttctgtttgctggttttcctggcaccttttccctacaagataaggtgagcaatcagtatccatttccttttccgttcagctagtatttgatcactaattgaaaaatttgtatgctgctgtaagatgatccataattgcta

SEQ ID NO: 404 - DNA, 2300 bp, Homo sapien
gtctcgatctcttgacctcgtgatccacctgccttggcatgcccgccttggcatatggacatggtggctcatgcctgtaatcccagcactttgggaggtcgaggcggcagatcacaagttcaggagttcaagaccagcctggccaacatggtgaaaccccgtctctactaaaaaaaaaatacaaaaattagccaggcatggtggcgtgtgcctgtaatcccagctaccgggaaggctgaggcaggagaattgattataccagggaggtggaggttgcagtgagcctagattgagccgctgcacttcagcctgggtgacagagcaagactcagtctcaaaaaaaaaaaaaaaaagaaagaaagaaaaacaggtttattatttgtatagagcatgatttgaatctctttttggccactcccttcacagttcttggtttgggcaagtcatttaatgtcacttttttagtttctttctggattaatgatacaacttagctgttctcactgggatgtttgtgtttcagtcttacgtgttattcaagtgctccctggctggtgttcagttatggttggcatgggctatatttggttttactggctaagcagtcttaagaggagcttcgttatttagaaattgaacactttgttttcttttcaagcaatgctttccaaaaaacaaaaaaaaagctttcctattcagcttatctaaactttccccactcccatcagtgtttctgtgcagataattgtattctgttaggcctgatagaaggtgatgctgaatgcaaggtgtcctgtcagtctcacactgcacacacagcaacccgagatggcacttggtcagccgtctctgtttttctttgttattgcatcattgtcttttaaaactctgttgtatgtcggcttttctctgcagacaaaataacttttcttatatacctctgccatttcaaacactagccctctctatacttagagcatagtgtctgtaggattcacaatgcccagttcacccatgggaggttagagaaagctttttagtattgagatgaggtacagatgtgtgcccctccccctcttcaactttacttctgtccatcccagctgagatgacgaacctattcagagtttatcctcatgtcccatctgggctcagtatgaaacactggtgtttgcctttagttaccactaaatccaaagagttaaataaagatcttggcatcttttctttattgctttcccaagtgtaatatttaagctctttgtgagtctcatgaggttttccttattaatagattagttacctcatactaggtttaaggatttccctccctccatttcttgctccttccttccttccttccttccttccctccctccctccctccctccctccttccctccttccttccttccctccttccctccttccttccttccctccttccctccttccctccttccctccttccctccttccctccttccctccctctctccctctctccctcccacagggtctcactctgtcacacaggctggaatacagtggcacgatcacagcttactgcacccttgacttcctgggctcaagtgaacccccacctcagcctcctgagtagctgggaccacaagtgcacaccaccatgcccagttaatttttgcattttttgtagagatggggtttcactatgttgtccaggctggtctcgaactcctgggctcaagtgatcctcccacctcagcctcccaaagtgctgggattataggtgtgagccaccacacctggcctggtttgaggattttctaaatgtaaattttgggagaaaaggggctttttgtagttgaagcatgacagtcatattaacttgcttcatttggagctacatgaaatttttgtcattggaagtaggaattacctacttgataatgtaggtgagtacattttagccccgttgtttgggcgtgagctatgtcagtgttaagttagtgacttgtctgtgtaagtgatcttttttctttttcatagagaaataagtcatactgtgccagacatatctatccatggcaatctctcctcagtccactgctctctggatctgtataaatacaagctgatccgcggcttattagagaacaacctgggagaacccatagaggaatttatgcggccttatgatttacaagatccaagaattcatgtgagtgagaccttatgttcttctgtcactctcatagtctcagctgacggtcaccctgtgtatctattcctcaaactcacttggagaaagaaggtggagc

SEQ ID NO: 405 - DNA, 2300 bp, Homo sapien
ccacatagcatgggcagtggtacctgcagagggatctgtctgccaaagcagctggggcaccagaaagcctgctttgggtttcttacaatgtttatagtcaggtcaccgctctttagaatttggttacttacagttttgtattgattgttgtttctttccacattccctgattagaagctttttgtgcaatgaagccatattttatgttccttttatggcttccatggtacccaccttataatagatggtggtggtatctatgtttaaaaaatgggctaacaattttgtttgaaaagctttgagatggtctacttctgcctttccagggagacaaaaacaactattagtataaaagaataggaaagaatgtttttattttattttgttacaaaatgcatactatgactgtagggtaacttatgtaaagggagacttccttaaggtaaaggctttttggacaaagtttaaataagtacatatgatatatcttgctacattttaggttacccacttagaatatagttcttggcagcactggggaggtccatttttatttctttcgtgattcccaccaagttaggtcctgatgccttcttctgagagataaggcctgtaagagttgtggaagaattgggggctgggaatagtcaggcagggaccaaattctcccatagcagccagcaaatacgtggagcttccatttgtcctgttccttctttcttgcttccaccttcagcccctttgcacaagagacaaatttgggcactgtctccaggttgggggagggtctctgccatgcagataggggcgtctgctcatagccttcttctgtttgtcgtagcagaggtgaaaacccccaagcgccggcagccatttgtcccctttgctctgaggaaccacacggggtgcactttgtggtttgccaccctgaccaccacacccaccaggtaagcagtcagtttatattaccccgagtcatctctgccaccaaagccttcttgtgccagcccagtagagcaaggtgggccccctcttgaggctcttgggatgatatttgaatgaataacttgctgtcttgctgagatttatgatggaggttctggttttgtagagaatctatagtcagagaagcaggtcctgagtctaattatgatcttgtttttggtataccttatgtttaaaagccaagcaaattaaggatgtgagcaggaagtatgaaaaagccattccatcttttctcctcgatctctaccttctttcccattttaaagagctatgtgtggttatcacaccaaatgttttgccattttattccaagattgctttgaaaacatccccattctccctctatccctaaagaattctttcatacctaaaacgcacttcaacccagatggaattgggtggagtttggagaacaaaggagactttacctaagccaggcgagaaccttttctaacaactttctgcctgtttagatcttggctcagccttccaagtacatggtggtcgttccagctgaggtcatgaagtgcatggcatgagtaacagaatccattgatttgaaatcacatttctccgacctcccccaagtatgagactgctctagaagagaagcttttttgttttaacagtgtaggtctgttaaattccaactaatcacttaaatgccacttgaaaaagtcatgccttaattcacatgtaccagattctactgcctgaggtaagtggctacagagtgacagctttcagctgtttctaaaatgtcaaataagttgtgattcagcacgaagatagctatagttagcgaccctcaaggtcattctttgtagctaggtcatgcagccttttattgctgggaattgagttgtgagaaggttctgctcttctgcacggggctcctgtgagagggagctgggaagaaacagggacaggctgatgtcatctgatttggttccagagctgcactctctcacagtgggagtccaggggtagttccagaagggaacggaacatttctcgatgatactcacaatgttagtgaatggcgagaagtccttacaggtgaagagattccctttgaatttgaagcaagaggaaagttaagacacaggtaaagtatggtttattcttttctttaaaaaaaagaaagtggatgtaagtgagggtccctagtgttttgtctttttactttccttataaatgattttattttattttattttatcttatcttattttattttatttttgagacagggtcttcttgctctgttgcccaggctggagtgcagtggcacg

SEQ ID NO: 406 - DNA, 2300 bp, Homo sapien
ccaccacacctggctaattttttatttttagtagagatggggtttcatcatgttggccaggctggtctcaaaatcctgacctcaagtgatccgcttcggcttcccaaagtgctgggattacaggtgtgagccaccacacctggccccttattaatgattttaatgtcttctttttaaaagatatttcgtaaatcagtgtttccttttattattttattttattttatttttgtagagatgaggtctcactgtgttgcccaggctggtctcaaactcctgggctcaagcagttctctcacctcggcctcccaaagtgctgggattacaggcgtgagccactgcacccagcctccttttaaaaaataaagactttgctgccatcttggaaatacatgtcttttcattaactatccatttatttgacatatgaggtgataacctgtgtgtttcacagaatttggtggaaacatagacatatcataaccctcaagtttattgcatcttggcctgattttcatgatggattggtgatatggtattcttaaaagattctcaaagcatgttgatttcaattttaatttacatatatgccacgtagtacttttaacaagcagctagtttcaggactcaaagctaataagaagacaaattctgattctaaaaagaactgatctggggagactgctagctgatgcattcctgaagtacccatactcaaaactggaatgaatgtgagaaaatgttctatctgattactgagagatcataaaatatccaataaagtgttgtattatttacaagtatttttctatgcacaggctatccagtggatatgaataggttaagacagcatttgaataggttaagatttagtatttgagcctcatatttgttttcaagctgagctgaaattgaagagattggctttagctttctgtaatcatgtgctttttgtggtgctttcagttcctgagtgtaaacttgctcccaagtcaagcaggtttccttttgcatagctttggtacccacacacattattcccaagaagcaagagttctgaacgtgtgggtctccagggattttatagggaaaaaaaaaatcactatgctgggcacacatgtgcttggaagccactttagcttccaggtaagagcagtgagcattttcctgttggtccccacagttcttggagaagctaactacagaactgttgggaacatttctggataagcccatcctctgtcatatcagaaagggtttgacctctttgtcatttctgtttttgtttccgtatttcataatccatttcaggtcccactattctgcttgaattcttcaaaataaatgccttttctggctttttccccttttggcacactgcaccccactccttgcctccctccccgcttcctgtcagcctcaaatctagttccccatttcacttctggcttgaattaggcaaaatctaaaatagaattaaatgtgcagtttcctcctgttcctcctgttctgcccactgccttctgctccagtttcagtcgagcacaggagccctgaaatgagcgctgtgcctctcctgccctgtctgtagtcacgtagggctggagccaaacaactgcatgtggttctgagcgaattaggatttcaacaaaggaaccaagaataattttttatgcatttccaagagtatggttatatgattaaatcgctactgcatttttaccaccccagtgacatcattatataggttggggtgagggttggtgggggaaagaccttggctcgtgtttaggttttgcgtggtttgtacaatggaggataaatgccactcttactcagtcaagctttacagatcttgcagtttgtgttgtaagtgtaaaacccagttaaactgtgctcctgatttcccttgcattaggtaatctccaaaaggtttagccaactgggtttttacatcatatgtactaaatcagatttgtgtctttgcttctacttttcatcccttctggagattgtgcctaatatctttttctttgttctgcctgacagacacacccatgacctccggattcatcaactgcaagtgagagtaaatggctgggagcaagtgagcccagtgtctgtggacaaagtcgggaccttttttcgatatgcagcaccagataaaaattcatcttcctctacggtgtgtgacattcaggaagtcagatggttaagcgactgtcaggaagtcagatggttaagcctgtaataagcttactctaatgaaactttcttgttctttctttcccctaattcta

SEQ ID NO: 407 - DNA, 2300 bp, Homo sapien
ggtgtgcacctgtaatcccagctactcaggaggctgaggcaggagaatcacttgaacccaggaggcggaggttgcagtgacccgagatcgtgccgttgcactctagcctgggtgacagagtgagactctgtctcaaaaaaaaaaaaaaaaattctttcatcaaatgcttttgaagttaaagaatctgaaatcagtgctatttcaacatgtttagaagcaaaatttaatcttttatactttatggtcagctctctattgagaacactattacaaaggaacagaagtatgataatttaacaatagatattccaaaatagttcttaaaatagtggttttgtttttgtttttgttggaaatagagtcttgctctattgcccaggcttgagtgcagtggtgcaatcatagttcactgtgactttgaacacctaggctcaagtgaccctcctgcctactgagtagctaggactataggcatgcaccaccatgcctggctaatttaaaaaaaaaaaaatagaaaaaagtagagacaaggtctcactatgttgcccaggctggtctggaacttctggtctcaagtgatcctcctgccctggcctcccaaagtgctaggattataggtgtgagccaccatacctggccccaagatagtatttatatttgacttttaaatgtattatctaattcaatagtgagcccttcttaattatactttgcccttgtcttttttagtgtgaattggatctggatatagtgggttttaggctatgtttttaggagctgttgggttttaaggaggtgactctagtgcccaagggagcctattgggtagggctctagcactctcatccctacctcaaccagcacttttgtctgttagcataatgtgttccccgtaagattttatctgggtgaaggagtggggagggaaaagggattctatagcgaaaaccaccattgttttgtatattccctgggtagaggcagcccctatctgttgtgtgagaattggaagccagtttggaggaggaggaggatgatttgtgtaatttttgttaatccttttaaaatggttttaacgggcagtcctaaactactgcgaacagacctatgccatctatttcatttactttcctcaccttttcatttggaaacaatttaaactataggaaagttacaaaagtagtaaatgaatatccctatatcttgtacctagatttaaccagttttcagcatcttgctacatgttgcttctctcttcacatacatgaacacacattttcctttctgaactatttgaaagtaaattaaagtcatcatgatacttaagccataaaaacctcacttatcacccaaaaatagggacatttttctaattaaatataatactattgtcacatactgatgaaatttaaccttgatatgttttctaataaatagttttcatagactgaatgaatgactagaatgtccttcatagcaactcccttcccattgatctaggatccagtcaaggatcatttattttagttgccacgtgtattctcttgtcttctttaatctagagtagtcccgctttgcccattttgtctttagtgacattgacatttttgaagactccaagcaagtttcttgtagaatgtcctattttctgcatttgggcagtgatttcctgtctgtagatttgggtcaaatattttcgatagctatactttctatgtgatgctgtgtgtttcccaccatgtcacatcaggatgcctgtgatgtctgttggtctcattattgttggtgataagttgttcttcacctggttaaggtggtatccagcaggcctcttttttgtgaagtttcctttgttctttgtaaataagaataatcccattgagggaataatttaagacaaagtgaatattctgtttcccaaaaacctttcattcaatggtttaatggttcttgaatcacttattacattggtggttgcgatgaaatttatttatttatttatttatttatttatttatttttggaaacagagtctcgctcagtcgcccaggctggagtgcagtggcacaatctcggctccctggagtgcagtggcgcgatctcggagcttctcgggaagctccgcctcccaggttcacaccattctcctgcttcagcctcctgagtagctgggactacagctgcctgccactaagcctggctaatatttttgtatttttagtagagacgcagtttcgctgtgttagccaggatggtctcgatctcctgaccacgtgatccacccatctcagcctcccgaa

SEQ ID NO: 408 - DNA, 2300 bp, Homo sapien
tgactctagtgcccaagggagcctattgggtagggctctagcactctcatccctacctcaaccagcacttttgtctgttagcataatgtgttccccgtaagattttatctgggtgaaggagtggggagggaaaagggattctatagcgaaaaccaccattgttttgtatattccctgggtagaggcagcccctatctgttgtgtgagaattggaagccagtttggaggaggaggaggatgatttgtgtaatttttgttaatccttttaaaatggttttaacgggcagtcctaaactactgcgaacagacctatgccatctatttcatttactttcctcaccttttcatttggaaacaatttaaactataggaaagttacaaaagtagtaaatgaatatccctatatcttgtacctagatttaaccagttttcagcatcttgctacatgttgcttctctcttcacatacatgaacacacattttcctttctgaactatttgaaagtaaattaaagtcatcatgatacttaagccataaaaacctcacttatcacccaaaaatagggacatttttctaattaaatataatactattgtcacatactgatgaaatttaaccttgatatgttttctaataaatagttttcatagactgaatgaatgactagaatgtccttcatagcaactcccttcccattgatctaggatccagtcaaggatcatttattttagttgccacgtgtattctcttgtcttctttaatctagagtagtcccgctttgcccattttgtctttagtgacattgacatttttgaagactccaagcaagtttcttgtagaatgtcctattttctgcatttgggcagtgatttcctgtctgtagatttgggtcaaatattttcgatagctatactttctatgtgatgctgtgtgtttcccaccatgtcacatcaggatgcctgtgatgtctgttggtctcattattgttggtgataagttgttcttcacctggttaaggtggtatccagcaggcctcttttttgtgaagtttcctttgttctttgtaaataagaataatcccattgagggaataatttaagacaaagtgaatattctgtttcccaaaaacctttcattcaatggtttaatggttcttgaatcacttattacattggtggttgcgatgaaatttatttatttatttatttatttatttatttatttttggaaacagagtctcgctcagtcgcccaggctggagtgcagtggcacaatctcggctccctggagtgcagtggcgcgatctcggagcttctcgggaagctccgcctcccaggttcacaccattctcctgcttcagcctcctgagtagctgggactacagctgcctgccactaagcctggctaatatttttgtatttttagtagagacgcagtttcgctgtgttagccaggatggtctcgatctcctgaccacgtgatccacccatctcagcctcccgaagtgctgggattacaggcgtgagccaccacacccggctgcaatgcagatttttaaaaaattaattattttatttttatttttaattgagatgaggtctcaccacgttgcccaggctggtctcgaactcctgggctaaagtgatcctcccaccttggcctcccaaagtgctgggattataggtgtgagccaccatgcccagccagaaatgctgatttttaattctctaatttcctctacatttattcactgatatttttccgttaaggtaaactttccattcccttcagcgatttttctgtatatatacacacacacatacatacatacacgtacattacatccatccatcctcttctttacagcagaatatcagcgtataaatgttgaggaaatgggagaattagaaaatcaccattttgtaatcatattaccaatttctacttttttcagatgatggaggaacacacagtgggctgtaagttcagtggtattgactgaggcccaaacagtgttgtgattgtcagaaatatgagaagtaagtggatggcatcttgtctcctacattttatgtagcctcttttgtttccttgtcctgcagggataccttgggaaaatgcttcttcctacgagtggaaattactctccgaggagctacgtataggatctcatttagtgacacagatcagttacctcctcctttccgaattgacaacttttctaaggtatcaagtggagctgagagccagtttgactgtttcatgtgtgggagggtggagtgtgtactgcccttgacaca

SEQ ID NO: 409 - DNA, 2300 bp, Homo sapien
ggtaggaggctcttgcactaatgtaaatgaagggttatggtggcctgaactggaagaagtggcaggggtggacatgaggaggctggagagaaatggatagaaatgagagcttacttaggagtagagtcaggcagattttgtgactgaatgtgggaatgagggagaggaaggagtcagtaatggcctccaaggttctgatttgggcaactcacaggatgataatccagatcactaagggatgaacatggagcagacttgcagaggaagggaggagttaggttttggacttgttgagttaaggtaactgtgtgatatctatgtgaagatgtccataagtcattgtaactatggctctgaaacccaggggagagatctgtgatggggataagggtttattaggtcatagcgtaatcagaacaaaggaaaaaaaagatgttggaatgtagcaatgagctctctgagatagtgcatcacaattcacaacaccactttttatttatttatttatttatttagctatgtcactctctttcacctaggctggagggaagtggcaaaatcatagctcattatagcctcgaactcctgggctcaggtgatcctcccacctcagcctcccgaatagctggaacttaagtgcatgccaccatgcttagctaattacttttcattttttgtggagatagggtctcgctatgttccccaggctggtcttgaacttctgggatcaagcgatcttcccaccttagcctcgcaagtagcttggactacaggtgtgtgccactgtgccggctcacaataccactttaaaaaacaatcttaaggcaaaaatgaatgcagtgatcttgaggtttgcatattttgacttgagctataatttgagatcatctgcagatatctaaccccactacgtgaggctctcaaggtgtatagcttgagtttgccatgcagacttgaaaccaagtttgcttctttattacacaaatcttaccttaccagtgctttggaaaccattcgcttccataggattattgattatataatgacttttgacctacacagttgttctgggttagaataggtttcaataaggaagagtgaatcatcttcttgtggtgttttatttgacttcagataacagatttctgccaccggaaaagcagccgttcatatgaagtggatgaacttcctgtcaccgaacaagagctgcagaaattaaagaatccagatacagagcaggaattggaagtaaggtctaaatattgtgaatttatttatttgatcatcagttttttagaattttacttggtggtattttagaccttctgttttctttctatcctgtatgattctaaatatgagttacgcttcacagtgtttactgtttatcagtgaatgtgtgaatgtattatgtaaatgacaacaaagtttatgtggaatcagcatgtagtaagcattgctaaactattattacaataaaggaagctaaattgtttgaatttcagtaagatttaagacaaacaattttttgttttttgcttcagccatctctgacatcttccttctgttttctctgtttgggattggagagtgacaagtttgaaaaggaagatgagatgaacatgaaaaagtatatttatctgacgtttattcagtgatttttgaaaaaatcaaatgcctatgtgtaaaacactgtgttgggtgctatggaagtgtagtggataacagattatgagctttcatcccaaataaggtgaaagattaccaaataattagatttctataatgaaatgcagaatgtcatcagtcctttgatagaggtatcatcacatactctggagttctcgttggggtgaagggtatgcctagaaagcaaggcttccagtgagatgatagcatttgagccctccaggtaaataataggactcccctaagtggttttcatctgctgagagatcgggagtagaggaatgtaaaatgctttattttcttatactctcctggatactgtgagctgtgtttaaaacaatcagggtgccatattttggtttcctttcaggtgcttgtgaggttagaaggtggaattgggttgtccttaattaataaagtcccagaagaactggtctttgcaagtcttacaggaatcaatgtgcactatacacagctggcaaccagtcacatgcttgaactcagcatacaggatgtacaggtaagggggaagttccaaagctgttagtcaccttgttttcatgctgatcacccaaccagatctaatgtttgatgttctaagaactttaatg

SEQ ID NO: 410 - DNA, 2300 bp, Homo sapien
ctggacctcagcagcagagaccatgccctcatgaaggcactggggagccgttcacagtcagcactggccactcctcatctcagcccaatgaagttttacatttccatgtagatgaggcactcgggatatagaaaagttgtgcagcttgactcaaagcagacagtaattgggtagcctaattgaagtttaactgcaagttccaactttgtaggctgcagaaaaaaaggaaaaaaaaaaacaacaacaacaaagtttaactgcaagtttcatgagacagcgatctgcctaaccattcactcctcctagaagcaaaagctaccgtgatcattgaggcacagccggtcttcatatatcctcaaaggagggggattagcttccacatcccttctctattcctggaggtgccagtagtgggagagtcatggcagaagttaccagaggcaagtggggcagaggcaagtagggtatatgtttggatcagtggatcagtgtcctttattgtgcagaaaaagctaaaattacagattcttctgaagggatacatagcagccgtttcaccaatgtccctcagtccatttgtccaggtccagaagtattcatgaggagctatgcgttagaagagagcacttgggctgggcatggtggctcacacctgtaatccagcattttgggaggccaaggtgggaggattgcttgagcccaggagtttgagaccagcctgggcaacacaatgcccccatctcttacaaaaaaaaaaacaaacctggatatggtggcgggtggtgtgcacctctggtccttgctacttgggaggctgaggtgggaagattgctgaagcctggaaggttgaggctgcagtgagctatgattgtgcccctgcactccagcctgggcaacagtgagaccctgtcaaacaaggaaagagaacacttgatctggaaaacaacaggccagagtcccagccaccttacttattagctttgggccctgggtcaagtcaagacatctatgtaagactcagttttagttttttcatctataaagtggggataaatttatctctctgtttattctgcttctcaggggtttgaagcccaaccagagttattttaatgtggaagctataaagaactataaaaatgctgggtgatattattttaaagtcctattaaaggagcgcagagatccttgcaggtggagaaatgtttcagtgccagtttgttctgatgacactgtatctcttaggaacatactggctctaacactatcaccgagggataaatcaccctggtttcttggaagtgagttataaccatctccaaccatcccggttgattgaacaggatccaggggtgttactcagggtttttccccactgtttagacaacagggactaacaaatgatttgaagggattagaagtgagattctgaccgagggttgacctgagcccagggaccaagccaggaatagaacccaagagtccaagagttctgcctctgagcctgcaattggaatgagactttctgcttcctttgtaatatttcatccaagtaaaggcttagatcttagcatctatgttttaaaagacccaaattttaagcagatgataggaaagtaagccataaaactgtgaaagagtactccttccagtaatccatctgaaaagtggccttacaggaaacattggctcttttttgtgtttatttgaacatgattttatttatagggaaccccccctccttatgttcttttagattaaaatacttccaagttcctctccttgttggagtgcgctggcattccaagcgacagccacctaactttcctctgaaatttccaggcaacccaatagttctcaggaaggcaggtgggggtggggagagaagagggcggaggactgcagagcctttggcctcaacatgagtgttgtggaccaatatcccccactgcatttgttcactgtacaagtatgtgtggtttggaactgaaataagaaaccttttccaaggcaacgttctgctggctcaggttgcatcttctggcctacgtgtattgggccacactttgtctgttcccaagtaaagtttatgaaaatggcacagatgcagccacacttgaggtgccactgaagctatgtgaagagcctgctacccttcaaacagaccaggcccaagcaaggtgccaagccatgtgagagtgcccagtccactgtgtaaatgtgacggcctttgatggtagtgtttgaaaagatacttagtagaaagttgcagagacccgggagcagccatttcacaaaag

SEQ ID NO: 411 - DNA, 2300 bp, Homo sapien
tgtcactcccaggctggaatcgctttcccatttttacagacctcgaagatgagaggaggccgtcaccacaatggattccggccctggggtctgatggagacattggtccgcccttcggtcagactcttgggggcgttaggggggtgggggggtctctgctctgcaacccttagctgaaccccatcctccacttctctcctcccgtctggtcagagtgggaagaggtttggattgggatcccccctcctgcacttcctggctgggtaacctggacgatgggataacagtcccccgattgcaaggtcaggggaaggactgtgtcagaatataggccctcagtgcaggacagttgctcatcctaagcctctcctgccttttgctcttccagtggcttttcacccagaaggaagatcctcccctgcagaacctctccccagaactaggtctttgcaggtgacgaggtaatcccagcctcccctccccgcagatcagcgtttttcgaagtgactttctcaccaggcggagcattgaaagtaccgatcccagcgcacccagccctgctgaatcagaatctctgggggtgaggcccaggaatcgccgtctgaacaagtcgcgggctggaaacggctgccccagattacagggcagctccctgcttcgctctcgctcctccggccccgggaacgtgcaggggggcgggaggcaagtcccatcagcactttgaactggggctgctttttagtgactcacctcccagacttcctgcaacagacaactctaaatagctcggtcccaccctccagcaggggagacattccggtcgggaagggcaggaggttagaaggtgggtgccccgccagggcagtccagggagacccaaggacaggagacgctggctgcacagcacaggggcgcacgaataggacgttttgtttacaggcttttgttattaaggaaattggtgtcagtcaaggtaattctagctcagatgagcaataaatatgctcccagctaatcttgtggggattttattggcactcggagcagaggttcctttaccttgactactccctcccctcaaagcaaagtcctgctccccagcggcttccccctaagcatcgtgaggcacttgggtcaggcttttaaaagtccactctacgtgaacacagaagaggtccgagcaaaggtgaggagtggcttcctgatcctacctggaggccgaggatgaccaaatgacctgaaataaaaccctgggtgacctggttggatcaaggcatacgcaagctcccccgggcctgctccacactcggggtgatcacctggcccgcgggcggcccgggcaaggaggaacgtctcgagaaggcagccggctcgccggagtcggttccagcgtgttcgagttacagctgcgagccctcagggacaccggcggcaagtcccggcttgcagagaggggagccagtcccgggagagcgcgagtcccggcgagcccgagtgcgcgccttatgcgcgctccccgcgacggcgcagggggaggggaggccgcagcagccactcagaggaacggtagtgaagcctcccaacaactttaactgtcaatcagacttaatggggtattgaaaaaatgggggaaaaaggggccgccctctccgcgacgcggctgcccggggagcgaatgaatagggccgcgcagaccaaggcgtccgatccacgcgcgctccacacccggaccctctccaagttggaaaggacaaaaagaaggcaataaatgctaaaaagggagagaaggggagctggatcgagcggcaactcccagcctctgctggaacagagagggagggagggagccggagcgagcgagcgcgcgcgagggcgagcgctgcacgtaaagaaactgacacccggaccccccacttctcctgcacgttgctggcaatcagatcgcgtttaagcaatttcctgagcccaagaatagcaatgagtcgggagactttcgcgggctgaaattgggagctccaagcactttttccccccacttttttttttttttttttttctggagacggggtgggggtgggggcgctacaatttggaatcagcttttttttttttttttttttttttttaatcttgcactttgaaaccgcgggaccgaggcagggtgcgcgcgtgtggttggtgcctttttttttttttcttcccctccctaaactcctctgtcagtctgtaaacattacctgagaattccccagccgaaacggctgctggggcaagaaacttcttgttagaactttccacct

SEQ ID NO: 412 - DNA, 2300 bp, Homo sapien
gtgctatcttcaggggtatccataaacatgcttaagaaaccaaaaattacattatttgtcatgagttttaaaaagataattacacctggccgggcatggtggctcacacctgtaatcccagcactttgggaggctgagatgggtggatcacgaggtctggagatcgagaccatcctggctgacgtggtgaaaccccgtctctactaaaaatacaaaaaaattagccgggcgtggtggggggcgcctgtagtcccagttactccggaggctgaggcaggagaatggcgtgaacctgggaggcggagcttgcagtgagctgagatcacaccactgcactccagcctgggtgacagagcgagactccatctcaaaaaaaaaaacaaaaaacaaacaaacaaacaacaacgacaaaagataattacacctagccagaatagtgaatcttataaccctctaagagaaacctaagtaaactcttacaaagatacaatgacgtaaaaacacaaaaatctgccatgcatatactcactggggtaaagcctcttctataacttttgttttctgaaacaaaccaaacaaacaaacaaaaaaccaaaaacctaaaacataaataataggaatgaaaaagggggtctgccttctagttccaagctcctgcagcactcggaggttaataactttcccttccagtccccttgggtggtttcacttcagagtgcctccagtaaaacacctccctgtgaataaatggctttccctagcacccaagggagcagattttcagcaaatttgttgagtgtgtgtgtcaagaggaagacaccagtgagtccccctggtgtagcagttgagcaacttctttgccagttcagcaaattcacactatgccctttccaacaagagctgggtctcatccctatgggtggaaacggggtctttcttgggtgctctatttaagccctaagggtagtggtattttcttatatgtatagtttctatattctcccttttttttttttttttttttttttgagacagagtctcgttctgttgcccaggctggagtgcagtagtgcgatctcggctcactgcaacctccagctcccaggttcaagcgattctccagcttcagcctcccgagtagctgggattacaggcatgtgccaccatgcccggctaatttttgtagttttggtagagagggggtttcaccctgttggccaggctggtcttgaactcctggcctcaagtgatcctcccagctcagcctcccaaagtgctgagattacaggtgggattaccaccgtgctcggcccaaattaaaatttctaaaattttcaggctcaaagcctatttcctgaaatggttccaatcatttctttctctcttagaagaaagtaacgtggataaaaattgtccccaaaccagcccttggcaccatttttagaggcggaatatgaggctggataaagcccagttttgcctgcaatggcattcctgtctcccgtcccaggaccccagaagattatgactaccagaaaacacgccagtctttgccctgatctggccagaggcccagagggtacataggcggtgacagagtgagaccttgtttcaaaaaacaaaacaaaactggggttagggaagctagctagggagctggggtgagacgtgctgtgctcaccctaaccacactctgacaaggaaagctggcgaagtctcttatcttacagttgaaagatcaggccctggaggcctatataacccatatgagatctctttctagggttcccaggagccgaggtgcccatctgagcctgatcttcctgaaatctttgggaagctcaccttccaagactccccatgatgagcagtattgatttttctgggtccccacattgcttagggaaataggttcctccacctcccattggcctttttgtgcttaccctgagaagctgtgtcaggccactgtgtcaggtgtcaggcttagcccagagagagtgaggtggaggaggcggagggtgtaacccagccaggtcctcttcacataagctatcagacaagctcctcagggcagcagctcctcaaggccccaggaacatggctgtcccctggctagtgctactcttggcattgcccatctttttcctgggggtctttgtctgggctgtctttgagcacttcctcaccacggatatccctgctaccttgcagcatcctgccaagttgagattcctgcattgcatattcctctacctggtcactttggtgagtttactctcaggccacgtcgtaacctg

SEQ ID NO: 413 - DNA, 2300 bp, Homo sapien
caccccatctctcttcgctgactctcttttcggactcagactgcctgcacccaggtgaaataaacagccttgttgctcacacaaagtctgtttggtggtctctttacacagacacgcgtgacacccagcactttgggaggccaaagcgggtggatcacctgaggtcaggagttcgtgaccagcttggccaacatggtgaaaacccatctctactaaaataacaaaataaaaaataactaaaaatacaaaaaaaattagctggcatggtgtcacacacctgtagtcctagctattcgggaggctgaggcaggagaattgcttgaacccgggaggcggaggtcgcaatgagctgagattgtgccattgcactccaggttgggtgacagagagagactcagtctctctctctcacacacacacacaaataaatcaataaaaataaaaattagatgggcatgcatggtggtgcacacctgtagtcccagctactccagaggccgaggtgggaagattacttgagcctgggagatggaggctgcagtgagccaagattgcaccactgcactccagcctgggtgacagcatgagaccccatctcagaaaaaaaaaaaaagaaagaaagaaagaatgcttcaggctggcttcctgacatctaattaagtcttcccacgtgccagactcatactagtgcttgacacaggctggtgttcttgaggcagccaacagtcctatggagtggggagtactattattatccccatttgacaaacttggaaactgaggctgattgcacataacgtgctcatgatcagcatgctggcatttggcagagccaggattcaaattcaagtgttgcaaatgcagggtttctcaaccaccatactatcggcttgctggactgcataagtctttgtgcattgcaggatgtttggcaatatccctggcctcttgtctatgacactctagaaccagccctctggctcttcctgagtggggacaacaaaaatgtttctgatattcccatatcttctgggaggtaaaatctctcctgtctgagaaccactgctctctcactcaagctgggaggcgggagacacagcagatattactattgttactgcagatgtgggacttggttgttagggaagatttccaatggtgacatcaacctctgacctgacctggaaaggcaagcaagcacagtttcccagatttgcaagaaagaggaaagcaagcacagtttcccagatttgcaagaaagaggacaaagcctgtctattcattctctcactccataggcatttgctgagcacctacaaagtaccaagccccaatccagcctctggtgataaaatggcacaaaaagaaaattcctgtcctcccagacaataaacagacaagtgaggcaggtgatgataaaggtcacagggaaaaaccaagcagtgggggggtgagcaaggtgggggatggggaagatgggggatggggaaggtggaggatgaggaaggtgggggatgtggaaggtgggggggtggaaagggtgggggatggggaaggtggggctggggaaggtgggcgtaggcatgctggcgggagttaaattttaaataagattgccagggatggcctcactgagaaggcaacatttgagcagagaccagcaagaggggaggcatggagtctagccgaggtctaggggaagaatggtgtacagagaatggcttgccgtacaacagctctgggacatcctccacaggctgatggatggatgataagctggagttgaatcacagagtcgggggatgaggtccgagggccggtgggaggaatcgtatttatgatgtccattgtgacttggtggcttatccaagactatttctagttagcagtgccagattgtaagctgggactctagaactttcttttgtggctggatccggctggatgggccactttcttctctgcatgggccctgtcctagaaccacatcctcacctgagcctgtgactcacctgggctgggccagtgtttgtgggacccagggaggtgggggaggacaggtgtgacttataagtggaggaggtctgctggctctgaaccatgtcctaaatggtttccactgcgcacagcttcctctcagcccgctctgagctggaagcagcatgtgggacctggccctgatcttcctcgcagcagcctgagtgttctcactaggggtcactctgtgggtcatttgcagccattttttcactgtgcacatccctgcagcggttggccaccctgtgaaactgagagtcctc

SEQ ID NO: 414 - DNA, 2300 bp, Homo sapien
atgttacatacatgtttttccattgtgtatgtgctcagttccactcataagtatgtatagcttccccccaaacctgctgaatatatataaacacaggccttgtgaagcatgaaacccaacctgtccttcctctcttggaagagagagtacctctgatccatgctggagactgtctctctgtgcagtttgcaaactgctatcgccattaaagctcttctttttactatttagccatgctggtggtctttccaatgactgtcatgtataaaacagtcacagcaaccatggttacatgcaaaatgcgtgaatcttaaaaatattaaccccactggggaaatcggactcattgcatactataggattgaaactatatgaaagtccccaaacaggcaaaactgaacattattgtttaagagcatactttggcagtaagcatataaagaaaagcaaggaagtgattgctatagaagtcaagagagtggtttcctttaggggaggaatgggttgtgagtgggaggggcatgtggagtactttgggcgtgctggcgatattttatttcttgaccagctcagtgttttttgtggggttttgctattccataattcatttatctgtacatttatttttaacgtactttttgatatttgtgttttatgcgacaataaaaggttttgaaaattgaattataccgcgctaggtgtggtggctcatgcctgtaatcccagcactttgggaggccgaggcggatggatcacgaggtcaggagattgagaccatcctggctaacacggtgaaacctcgtctctactaaaaatacaaaaaattagctgggcgtggtggcaggcgcctgtagtcccagctacttgggaggatgaggcaggagaatggcgtgaacctgggaggcagagcttgcagtgagccgagatcatcccactgcactccagcctgggcgacggagcgagactctgtctcaaaaaaaaaaaaaaattaaattataccgaacgcatgcctcctctgcatgttaattggaaggacacctcctcttcctagctccagccctgccccaactgtggtctctgctaaataaaggtttattctaacctgcagaacatctttcatggtcatttcctgcctcaggcttagtttcaagatggaacacatagtttcctggagttcctctatttttgtttgaaggccattggaaactttctctgaattgcctagcgaaatccagcctcttcacttttagcaagcaatactatagcacacagagttttgtttagttaaccacatgttataggcatcttttaaagtcagcctttaaaactcttgcagaggatttcatcatctggatgtattacagtttattgaacaagccctctgctgatggatatcttggtgctttttgactttttttttttcctaatgaatgagcaagacaaaggcccttatctcattggactgagctctgtggggatggtgcccaggtctaattgctaatgcattgcagctgtagctaagcacctggcatagaatgggaaatgattgtggaatgaatgaatgaagactgagcaaatgaagcatattataccagtgtgagcacaaagacagaattctttgtgcaagcccctacaaagtagcagataggaaatgaatggagcccactggtttaggtctgaaccagcgtggatttaaatcccatcacaactgcatgatgttaggcagctacttaatctctttgcttcagtgtcctcatctgtaaaatgggtataataatggcatctgcgtcagagggctgctgtgaggattaaacaggtgaataaatgtgcataaatgtctttgcttggagcaagcacatcaacattcattaaatagtagcagactttaactcaccccaaatgtgaaagtgtagcaaggatgatactagtattgtggtgagaacacagaaaccaggttcttctggcgactgcttttgtggtgtggtggttggtttgatttgtttctgtgaggtcaattttgcttctgcagaatcagctgttctcttacagagagtatttatactcagagtctgtcaccatggagacagtcaacagtagagaatccaagatagatcaactctccctaaaggctgacagtgaactcttggggccgttttattctctgaggttagcaaggagtcatctactagccattcaggaggccagctgggaagacaaaataggcaccccaaactcagcaacttcataacaccttcctctccccgcctgaagccttaaactgcatcaagtcaaagaaacct

SEQ ID NO: 415 - DNA, 2300 bp, Homo sapien
aagggctgggattagaggcctgaggtctttctttcttttccttccttccttccttccttccttccttccttccttccttccttccttccttccttccttccctctttctttctttctttctttctttctttctttctttctttctttctttctttcttgcttgcttgcttgcttgcttgcttgcttgcttgctttttcttttgttcctttttgacagtgtcatgccgtcacccaggatggaaggcagtggcgccatctcagctcactgcaacttcgcatcctgggtttaagcgattctcctgcctcagccttctgagtagctgggagtgcagacatctgccactatgctcggctaattttttgtatttttagtagagacggagtttcaccgtgttagctagaatggtcttgatatactgacctcatgatcagcccaccttggcctctcaaagtgctgatgttacaggcatgagccactgtgcctgggtctgagctttctttgtaggcctaatgttgatgctctgataagaatctctatgttcaatattagtgacaggaaaggactctaagaaggaggaaacatgaattatcaaattagagtaggaagggagtgggtgagattaagatttggatgaagggtcctggaaaatgactggggccaatggttgctgggaaatgttccactgtgggaagatcccagagtctaaaggaaaggtttccagatgatagaacaatgacggacatatggaccctcgttcatttctctctcacatcctgtagagcccacagtttctacctgggtggcttccagcttgggacagccacccttcccaggtgtagccacaatcttctctctggcctctgctccagctcacattctcagattccatctttgcaagctggttttctgagaggagcccatcatttttgtgggtaaacaccctttaccttctagtagggccaagactatacctgccccctgtgttttcaaagtgaatgttatggtttaagtctgccctatctcttttgatgattctccttttaatttctgaactcaatctagggtgggtgagatggctgatgcatgttatcccagcattttgggaggctgaggtgaggagatcacttgaggtcaggagtttgagaccagccgggccaacatggtgaaaccccatctcgactaaaatacaaaaattagtagggcttgttggagtgcacccgtaattcccagctacttgggaggcagaagtgagagaattgcttgaacccagaaggttgaggctgcagtgagctgaaatcgtgccactgtactccagcctgagtgacagatgtaggcccagtctgaaaatcaaacaatcaataaataaactcaatcttgacaaaggactttgagtcctgacatctagatgcccacaagataaccgccatgttttacattgtcttgtttcctttgcaggttcccattagaacacctagtctcattccgctcagtccccacctcacttggtcactttgtcctgatttccttcagtgaagccttgacttagtcttgagatagatcacaccctcagtggttcctttcttctacctgaatgtgcatatgatctgctatgttagatagcataaaacacaggtgaccattcgatatacacagctttttattctgttttcttgggaatgacatcactatcttcttcaggctgttgtagctctgaaacattttgacaattttgatgtggccaaacatcctccaataaggacaccttaaggtttttttttttttggtctaatatcaggaacagattaatcccttccctgtatcactatgaaagtcgtgtattagcgaaacttcatcagtatttgaggaataaatgaatgaatgagttttggactttcaccctattatttattcttttacttccataaatgtgtatctaattcgatcaattagtcagaagaaagctgaaaactcaatcaggattaactgggtgtgactgcaagatctaatcaggtatcactttctgattggaagctggtgattgagaagggaagggtggggttagaaaggtctataaaagctcctgagggtacccagaagagacccacagcactcattcctgaagctactggttggttccctgagaggtcccagaactctgcgaagtgagtccagcgctggtaagtcaccacctgcttagggtcatgcccatctgatcagcagccagccagtcagggacggtgacacacatcccaaagtggcacacaatatttttctgtctgtttcgtgagatgaacagatt

SEQ ID NO: 416 - DNA, 2300 bp, Homo sapien
gtttgagtcagagtccaagtctgtcacccaggctggagagcagtggtgcgatcttggctcattgcaacttctgccttctggagtcaaatgattcttaatttttttatatttagtagagacatggtttcattacgtaggccaggctgttctcaaattacggacctcaagtgatctgcctccttggtgtccagcagtgttgggattacagacatgagccacagcacctggtccatttctggtagaaaattttcaaaataaaaaataatggcatcgattttagggagtccctttagtgttcccccagcatgtttatggtgtaaactgagaatggaggctgtctggggccacaggacactctcattctcattgctttagggtggtaagtgacaagaaatttttcttcaaagaggtagagcttggctttcaggatcctcagtggcactgtccggtggttctgggattcagtggagcaatggaagaaaattaataagtcagtggtctccatgacccctccctccttggtgtttggaagacattcttcctggtaccagtagaagcagatgattgtctttgccctgagagtgacacattttccctggatttgtcttctagagattttccttgcagatctatcaggatgagcatccaggccccacccagactactggagctggcagggcagagcctgctgagagaccaggccttgtccatctctgccatggaggagctgcccagggtgctctatctcccactcttcatggaggccttcagcaggagacacttccagactctgacggtgatggttcaggcctggcccttcacctgcctccctctgggatcactgatgaagacgcttcatttggagaccttaaaagcattgctggaagggcttcatatgctgcttacacagaaggatcgccccaggtgaggtgacccaggagggctggtagatagggctcaggtgtccagggaaagaacagcagggtcaggcagagaagtagcccaagtgtggcccagagtcttctgatggtgttggcgaggaagatcagggaggctttggccattttccagatcctcagagaaaggactgctcaccatacagggtccactgtgggaacagaaacctgcctttactcagtggaaggtaaagggaatagaagtggggaatcaaaagtcagaatcaaaagggaacagggattgagaaaagacaaagagaacagggagcactgaggacaggagcagctgatttatgggatgacaatgaaagcaaaggtcagggatgagtccttctaaattctgagtctctcccttactttacccacaggaggtggaaacttcaagtgctggatttgcgggatgttgacgagaatttctgggccagatggcctggagcctgggccctgtcctgcttcccagagaccacgagtaagaggcagacagcagaggactgtccaaggatgggagagcaccagcccttaaaggtgttcatagacatctgcctcaaggaaataccccaggatgaatgcctgagatacctcttccagtgggtttaccaaaggagaggtttagtacacctgtgctgtagtaagctggtcaattatctaacgccgattaaatatctcagaaagtcattgaaaataatatacctgaatagtattcaagagctggaaattcgcaacatgtcctggccacgtctgataagaaagcttcgttgttacctgaaggagatgaagaatcttcgcaaactcgttttctccaggtgccatcattacacgtcagataatgaactccaaggacggttagttgccaaattcagctctgtgttcctcaggctggaacaccttcagttgcttaaaataaaattgatcaccttcttcagtgggcacctggaacagctgatcaggtgagaaaggatcatgcactttgtatgcagaccacagcatagccttgttctgtaacagcaaacattagaaggcatgtactgtgtgccagccagtggcaacgtcacagtgaaggggacatcagaatgtcaacacattgtcccattcagtgttccatgtcctggagtggctatcacaggatcgctccaataaggggagaggggtcacctggggtagaagctagagagggacatcatgtacaagctagttagtgggggtttcagctctattgggggtgcacgtgtgaatttcctgttacaaagtgtgtttcaagttgatatgatgtcaaagagataatagaggagggtatgaaaggagggaaagcgcatcaaacctgtccatttcacaatagaacgtctg

SEQ ID NO: 417 - DNA, 2300 bp, Homo sapien
ggacaggatgtaagccaatcgaaagaccttccacaggtggtgaatttgggagcctgcccaatgtgacctgcaagttttcactggcaatatgcaggtgcagatatgacaaagaataaccatgacctttacatcacccccagctgttgaggaatgggatccttttgaccctttctgtccatagaaccatgttactcatcttgagtggcaacaaaatatatggtctacttaacagagaagaagactctgtaaaaaaaaatgtttattatgaagtaagcaaagaagtggcaatagatgcgagattatttggggagataaaggaagttgaaggttttgaaaggaaaaataaggaggattatacaaattgttttgaaagactcatacttggtcataaggattaaaaccaaaagggcatcagtgcaatgttagatagattcctcttacacccactcaataacccccaacatgttcagcaagtcttgcttcactcccaggttcccattaaaaacccagctcaaccctgaccagctccaccctcacttccatttgtaattttgacatgactttattacaggaccatcaggttcctatgcctgctgcacagtagcttagcaatattctgagacagcagggtttgcagcagagagtttaatgatcacaaggtggctgaatgagaagctaggaggagatcctcaaattcatctccccaaggagtactgaaggtttccagtggatcctggatagcaaggggccggaaagttggggtagcggtaagagggaagaagtcaacaggatgtagaaactgcattctttggtgagttggtgcattgcatggcccttcagatcagctggcatcagcagtttcactgacatgcagaacctgaaagaatatctcagatgaaaaaattaatgttttacaatgcttgaatcgttgtctgcagggaagttaaggggaactgtaatctaaggtctatatgattttggaacagtaggctgccagcaaccacgaggaaccaggtcagagagcaagaagacctcctgatgaaggctgaatgtgttgcaagcttcgtttatttttgtttctctccctcccttcttcactgattaaatttataaactttagagatgtggtttcaatttcttccaaagaagccttaacctaagccctgagaccactcacgccctcagtggcacctctcctccaccagaacgagcatgtaatctgctaccttaggttacacaaaatcccaaaaaccattcaatacattgagatttttattctgatttcgtagggatgactcctctgtttttataaagctttttaaagtagaaagcatttttatattttgatgtggccaaagatctcctaacaacactactttcagattttatttttctgtctaatgtcgtaacagatcaaatccgtccctgcctcacactcaagactatgaagttcacatattagtaaaatgccatcagtgtttgtggagttcatgaatgaatgatttttttattttttgacagaatctccctctgtcacccagactggagtgcagtggcacaattctggctcactgcaaccattgcctcctgggttcaagcaattctcctgcctcagcctcccatgtagctgggtttcaggtgcctgccatcatgcccagctaatttttgtatttttgtatttttgtagagacagggtttcacctttttgacctggctcgtcttgaacccctgacatcaggtgatctactcaccttgtccttccaaagtgctggaattacagctatgagccacctcacccacccttgaatgaatgtattcttgacttctaccctatccctaacactgtcaatttcttgcttcacgaactgaatatagatatgtgatatgaacggatatctgactcaatccattaatctggggagagccaaaaacccaatcaggattaactgggtggagcttcacaaatgcaatcagatattgctttttgattggaagctagcagtgcaaacgtggaagggcatgggtgggagttgtgattagaaaggtcaataaaatcttctaaagacccacaggagagacccaaagtcttcaagcctggagttcctgcttggttcttcctgaggtctgagcaccttctagactacatccagatctggtaagtcactaatttctgtaaggacactcccatctgacctacagtcagtcagtctgggatggtgacagtgcagcctacgatggcacagagctatatcctgtcctttttttttctcatatgaacaatttgaagctttgaatttttt

SEQ ID NO: 418 - DNA, 2300 bp, Homo sapien
cagatcaatgtagactttggtacagagttggtggtaccagggctgccatatccagtttacaccccaacctgatatatcagcaaatctcctggagtaaggaaaatatttctgaggaggggtttcacatgaaattcagaaaattcctgtgtttgaagcagtccaaatgacattttgtggcaacaaaatatatggtctacttaacagagaaggagactgtgtaagaaaaaaaaaaaaaagatgtttatcctgaaatgagcaaagcattgggaatggatgtgagattattttgggagaaaaatagaagatgaaggttttgaaaggaaaaataaggaggattatataaattgttttgaaaggctcatccttggtcctaataatcaaaaccaaaggggcatcagtgaaatattggatagattcctcctccaccccctcagtaacccccaacatgtttaccaagtcttggttcactcccaggatcccattaaaacaccaagctcaaccaagcccatcctctaccctcacttccttttgcaattttgacatgattttattacaggaccatcagattcctatgcctgctgcacagtagcttaccaatattttgagacagcagagtttgcagcagagagtttaatgatcacagggtggctaaatgagaagctaggaggagatcctcaaattcatctccccaaggaggagatccactgagggtttccagtggatcctggatagcaaggggctggaaagttgatatagagttaagagggatgaagtcatcaggatgtcaaaactgcattctttggtgcgttggtgccttgtagggcccttcagatcagctggcatcagtactttcactgacatgcagaacgtaagaatatctcaaatgaaaaagttaatgttttacaaggcttaaattgttgtctgcagggcagttaaggggaactgtaatctaaggtctaaatgatttggggacagtaggctgccagcaaccatgaggaagaaggtcagagagcaagctgacctcatggtgaatgctgaatgcgctgcaagcttggtttatttttgtttctccccctcccttcttcactgattaaatttataaagtttataggtatcgtttcaatttcttccaaagaagccttaacctaagcactgagaccactcacgccctgagtggcacctctcttccaccagcacgagtgaagaaactgctaccttaggtgatataaaacccacaagaccattccatacatggagatctttattcttattttgtagggatgactccgtttttataaagttgttttaactagaaagcatttttataattttgatgtggccaaagatctccccacaacactactttcaggttttatttttctgtctaatgtccggaacagatcaaccccttccctgcctcacactcaggacctgaaggcgacatagcagtaaaattccatcagtgtttgtggatttcatgaatgaatgcattttttttttgacaaaatctccctccgtcacccagtcaggagggcaatggtgtaatcttggctcactgcaaactcagcctccagggttcaagggattctcccacctcagccacatgagtagctggactacaggcagccaccatcgtgcctggctaacttttctatttttgtagagacagggtttcaccatgtgggccaggcgggtcttgaactcctgacatcaggtgatccacctaccttggcctcctaaagtgctgggattacaggtgtgagccacctcatctggccttgagtgaatgaattcttgacttccactctatccctaacgctgtcaatttcttaattcatgaaatgaatatgcatatgtgatatgaatggatacctggttcaatccattagtcttcggacagccaaaaacccaatcaggattaactgagtggagcttcagaaatgcaatcagatatcgctttttgattggaagctagcagcggatatgtggaggggcgtgggtgggagttgtgattagaaaggtcaataaaagcttctaaagacccacaggacagactcaaagtcttcaagcctggagttcctgcttggctcttcctgaggtctgagctacaactacaaccagaggtctaaactacaaccagatctggtaagtcactaatttctggaaggacactcccatctgacctacagtcagccggtctagaacggtgacagtgcagcctacgacggcacagaactatatcctgtctttttttctttttttcatatgaacactttgaagctttgattttttttctaaat

SEQ ID NO: 419 - DNA, 2300 bp, Homo sapien
gtgcaatggcacgatctcgactcactgcaacctccaccttcttggttcaagcgaatctccagcctcagcctcctgagttgctgggattacaggcatgcgccaccacacctggctaattttgtatttttagtagggatggggtttctccatgttggtcaggctggtctcgaactccagacctgaggtgatccacctgcctcagcctctcaaagtgctgggattgcaggcatgagccacggagcctggcctgtctatcactttctgatgcagtgttgcatttagttagctggtaatttattaagtacttttttctggctgaccgtggtggctcatgcctgtttgccaatcatttgctgccagaacatgggcagatttttctctggccaagtctcaggtttatcaggttagaaatggggaaaatagcaacgtgccttagattctccatgaggaagagctgaggtccgggatgatcggtaccagccatctgttgtgcctcgtggatgctcagtgaacacagattctcacaaccattattggtgctgagctcaccctcagcctcaggtttacaaagtggggcgtgggaagtagaagcctcactgggctcaggtgatcctcccacctcaacttcttgggcagcttggcctacaggtgcacactgcctccccctggctaatatcttgtatttgtattagagacagggtttcatcacattgcccatactcctcacaaattcctgagctctagcactctgcctttcttggcttcccaaagggctgggattggaggcctgagcttgcttgctttcccttcccaagtgtggccccgatcttctctctggcctctgctccagctcacattctcagattccatctttgcaagctggttttctgagaggagcccatcatttttgtgggtaaacaccctttaccttctagtagggccaagactatacctgccccctgtgttctcaaagccaatgttatggttaagagtctgacctatctcttttgatgattctcctttgaatttctgaactcaatctagggtgtgtgagatggctgatgcctgtaatcctagcactttgggaggctgaggtggggagatcacttgaggtcaagagttcgagaccagccgggccaacatggtgaaaccccatctcaactaaaaatacaaaaattagtggggcatgttggagcgcacccataattcccagctactcgggaggcaaggtgagaaaatcgcttgaacccagaaagttgaggttgcagtgagctgaaatcatgccactgcactccagcctgggtgacagatggtggcccagtctgaaaatcaaagaatcaataaataaactcaatcttgacaaaggactttcagtcctgacatctagatgcccacaagataaccaccatgttttacattgtcttgtttcctttgcaggttcccattagaaaacctagtctcattccactcagtccgcacctcacttggtcattttgtcctgatttccttcagtgaagccttgacttagtcttgagatagatcacaccctcagtggttcctttcttctacctgaatgtgcatatgatctgctatgttagatagcataaaacacaggtaaccattcgatatacacagctttttattctgttttcttgggaatgacatcactatcttcttcaggctgttgtagctctgaaacattttgacaattttgatgtggccaaacatcctccaataaggacaccttaaggtttttttttttttttttgtctgatatcaggaacagattaatcccttccctgtatcactatgaaagtcatctattagccaaacttcatcagtatttggggaataaatgaatgaatgagttttggactttcaccctattatttattcttttacttccataaatgtgtatctaattcgatcaattagtcagaagaaagctgaaaactcaatcaggattaactgggtgtgactgcaagatctaatcaggtatcactttctgattggaagctggtgattgagaagggaagggtggggttagaaaggtctataaaagctcctgagggtacccagaagagacccacagcactcacacctgaagctactggttggttccctgagaggtcccagaactctgcaaagtgagtccagcgctggtaagtcaccaccttcttagggtcatgcccatctgatcagcagccagccagtcagggacggtgacacacatcccaaagtggcacacaatatttttctgtctgttttgtgagatgaacagatttaggctttcatttttc

SEQ ID NO: 420 - DNA, 2300 bp, Homo sapien
tactcagggacaggatgtaagccaagcaaaagaccttccacaggtggtgaatttggaagcctgcccaatgtgacctgcaagttttcactggcaatatgcaggtgcagatatgacaaagaataaccatgacctttacatcacccccagctgttgaggaatgggatccttttgaccctttctgtccatagaaccaggttattcatcttgtgtggcaacaacatatatggtgtacttaacagaaaagaagactctgtaaaaaaaaaagtttattatgaagtaagcaaagaagtggcaatagatgcgagattatttggggagataaaggaagttgaaggttttgaaaggaaaaataaggaggattatacaaattgttttgaaagactcatacttggtcataaggattaaaaccaaaagggcatcagtgcaatgttagatagattcctcttacacccactcaataacccccaacatgttcagcaagtcttgcttcactcccaggttcccattaaaaacccagctcaaccctgaccagctccaccctcacttccatttgtaattttgacatgactttattacaggaccatcaggttcctatgcctgctgcacagtagcttagcaatattctgagacagcagggtttgcagcagagagtttaatgatcacaaggtggctgaatgagaagctaggaggagatcctcaaattcatctccccaaggagtactgaaggtttccagtggatcctggatagcaaggggccggaaagttggggtagtggtaagagggaagaagtcaacaggatgtagaaactgcattctttggtgagttggtgcattgcatggcccttcagatcagctggcatcagtagtttcactgacatgcagaacctgaaagaatatctcagatgaaaaagttaatgttttacaatgcttgaatcgttgtctgcagggaagttaaggggaactgtaatctaaggtctatatgattttggaacagtaggctgccagcaaccatgaggaaccaggtcagagagcaagaagacctcctgatgaatgctgaatgtgttgcaagcttggtttatttttctttctctccctcccttcttcactgattaaatttataaagtttatcgatgtggtttcaatttcttccaaagaagccttaacctaagcactgagaccactcacgccctcagtggcacctctcctccaccagaacgagcatgtaatctgctaccttaggttatataaaatcccaaagaccattcaatacattgagatttttattctgatatcgtagggatgactcctctgtttttataaagctttttaaagtagaaagcatttttatattttgatgtggccaaagatctcctaacaacactactttcagattttatttttctgtctaatgttgggaacagatcaaatccttccctgcctcacactcaagactatgaagttcacatattaataaaataccatcagtgtttgtggagttcatgaatgaatgatttttttattttttgacagaatctccctctgtcacccagactggagtgcagtggcacaaatctggctcactgcaaccattgcctcctgggttcaagcaattctcctgcctcagcctcccaagtagctgggtttcaggtgcctgccatcatgcccagctaatttttgtatttttgtagagacggggtttcacctttttgacctgactggtcttgaacccctgacatcaggtgatctactcaccttctccttccaaagtgctggaattacaggtatgagccacctcgcccacccttgaatgaatgtattcttgacttctaccctatccctaacactgtcaatttcttgcttcacgaactgaatacagatatgtgatatgaatggatatctgactcaatccattaatctggggaaagccaaaaacccaatcaggattaactgggtggagcttcacaaatgcaatcagatattgctttttgattggaagctagcagtgcatacgtggaggggcgtgggtgggagttgtgattagaaaggtcagtaaaagcttctaaggacccacaggagagacccaaagtcttcaagcctggagttcctgcttggttcttcctgagatctgagcaccttctagactacatccagatctggtaagtcactaatttctgtaaggacactcccatctgacctacagtcagtcggtctgggatggtgacagtgcagcctacgatggcacagagctatatcctgtcctttttttttttttttttttatatgaacaattggaagctttga

SEQ ID NO: 421 - DNA, 2300 bp, Homo sapien
taagccaatcataagaccttccacaggtggttaatttggactcctgaaaaatgtgacctgtaagttttcactggcaatatgcaggtgcacatatgacaaataataaccaggacctttatatcacccccaactggtggggaatgggatccttttgaccctttctctccataataccaggctactcatcttgtgtggcaataaaatatatggtctacttcacagagaaagagattcttttaaaaaaaaaaaggatttttattatgaaatgagcaaagcaatgggaatagatgtgagattattcagggaggtaaaggaagacaaaggttttgaaaggaaaaatcaggagaattacatacactgttttggaagactcattcttggtcacaagtatcaacaccaagggggcctcagtgcaatgttggaaagattcctcctccacgccctcaataacccccaacatgtttaccaagtcttggttcactccccggatcccattaaaacacacagctcaaccctgaccagcctccaccttcacttccctttgtaattttgacatgactttttttacaggaccatcaggttcctatgcctgcagcacagtagcatactaatattctgagacagcagggtttgcagcagagagtttaacgatcacagggtggcaaaatgaaaagctgggaggagaccctcaaattcatctccccaagaagtactgagagttttcagaggatcatggatagcaagaggctggaaagttggtgcagtttggtggcagtaagaggtatgaagtcatcaggatgtcaaaactgcattccttggtgagttggtgccttgcagggcccttcagatcacctgccatcagtagcttcactgacatgcagaacctgaaagaatatgtcaaatgaaaaagttaatgttttacaaggcctaaattgttgtctgcagggcagttaagggcaactgtaatctaaggtctacatgattttgggacagcaggctgccagcaaccatgaggaagcaggtcagagagcaagctgacctcatgatgaatgctgaatgcactgcaagcttggtttatgtttgtttctccccctcccttcttcactgattaaatttataaagtttataagtatggttgcaatttcttccagagtagccttaacctaagccctgagaccactcaggtcctcagtggcacctctcttccaccagcaggagtgaaaaaattgctaccttaggtgatataaaacccacaagaccattgaatacatggagatttttattttgattttgtagggacgactcctctgtttttataaagctattttaactataaaacatttttgtgattttgatgtggccaaagatctcccaacaatactactttcagattttagttttctgtctaatatctgggaaagattagacccttccctgcttcagactcaggactatgcaggtcacatattagtgaaattccatcagtgtttgtgaagttcatgaatgaatgaattttttttttccgacaaattctccctctgtcacccagagtggagtgcaatggtgcaatcttggttcactgcaaccattgcctcttgggttcaagcgattctcccacctcagcctcctgagtagctggattacaggcatgtgccatcgtccctgtctaattcttgtatttttgtagagacggggtttcaccttgttggcctggctcgtcttgaatgtctgaactcaggtgacccacccaacttgtcctcccaaagtgctgggattacaggagtgagccaccttgcccggtcttgaatgaatgcattcttgattcccaccctatccctaacactgtcaatttcttgattcatgaacttaatatggatatctgatatgaatggatatctgattcaatccattaatctggggagagccaaaaccccaatcaggattaactgggtggagcttcagaaatgcaatcagatatcacttgttgattggaagctagcagtggatacgtggaggggtgtgggtgggagttgtgattagaaaggtcaataaaagcttctaaagacccacagaagagacccaaagtcttcaagcctggagttcctgcttagttcttcctgaggtctgagcaccctccaaactgagtccagatctggtaagtcactaatctctctgtaaggacactcccaactgacctacagtcagctggtctgggatggtgacagtgcagcctaagatggcatagagttatatcctgttttgttttttttctcatatgaacaatttgaagctttgcattt

SEQ ID NO: 422 - DNA, 2300 bp, Homo sapien
tgggggagctttggtattctggtggagattctgtgagtggagaaggggtcaggtcatcttctcagaggggctctgaaggatgctctgagtttgacagcagatgagcaccttgagaagaacaggtgacaggacatggtagaaatgcccccaagtgcgggattctcactggggtcctgggggtggtgctggaccttctgaattgggcaggaagggaaagtctgtcaatcagttcttttcaacatttagattattgaactccttaggggatcctctgagctcctcaccagaggggtctgtccatcatttgctgcctgaacacgggcaggttcctctccctagccaagtctcagggtcaccactttaaaaatgaggaatatagcaacatgccttagattcctcgtgagggagagctgagatcttggatgaatggtaccagtccctgctgtgccttgtgcatgctcaatcaacagagacactcaggatcacctttggtgctgagctcaccctcagcctcaggctcacaaagtgagggcaggtgaagtagaagccgcactgagcacgtttcagtttaactcgattgcacacatagcagggcattgatagtgaggtcagaaatgtggagaaagaacatttacagaaatattccatgatggagaacatccttcaaagtacttcagttttggaagccagtggcatctccgggctgtttgggtttcatatggaatgggagagaaaggcctggaggactttctggaggcgggggacgttcttgctactttgtgccctaaaatagcagaagaatgactgtgtgatcctgcttaggatgggagccatccctgaacttagcagatcttttaacatgaaatagagcttccaggttttgttggggaaatgtattgtacatttgcacacaatacaaccagatgtgtgcaccgttcttaaagacaggaaggctgagtttctctctctctctttctttctttctttctttctttctttctttctttctttctttcatttccttccttccctccctccctccttccctccctccctccctccctccctccctccctccttccctccctccctccctcccttccttccttccttccttcctccctcccttccttccttccatcctctggcatctgccccagctcacattctcagattccatcttcccaggctgattttccaaggcgagcccatcatttttgggagtaaacacgctttcccttgtagtagaggccaagactgtatctgcctcctctgccctcaaagacaatgttgtgtttgaagagtctgcactgtctcttttgtaattattccctttttaatttttaaactcaatctagacagagtctttcaatccttctgtggagatgcccacaaaatacccaccatgttttatgctgtcttggttccttcccagggttctactagaacacccggtcccatcctgcccagccgccacctcactttgtcattctgtcctgatttccttcagtgaagccttgaccttagtcttgtgatcaatcacaccctccgtggttcccttttcaacctgaacccacatatgacctgccctgttataaaacataaaacccaggtgaccattggataaaggagctttttaatccgttttcttagggtggacatcactgtctttttaaagctgttttaactgtcttaacgaaacgttttgataatttcgatgtggccacagattttcccataaagatatcatcaggttttgttttttctttctaatgtcaggaacagattaaaccttccatgtctctatgaaggtcacatactagtcaaatttcatcagtgtttggggaataaatgaattaatgagttttggactttcaccctgttatttattctttcactttcataaatgcacatctaatttaatcaatgaatcagaagaaagtgtaaaactcaatcaggactaactaggtggaacttcggaatctaatcaggtatcactttctgattggaagctggtgattgagaaggggagggtgtggttagaaacatcaataaaagctcctgagtttgcaaaggagagacccaaagccctggtgcctggaactactgcttgattctctgagagatcccagcaccctacaaactgagtccagatctggtaagtcaccacctccttaggaacatgcccatctgatctgcagccagccagtcagggatggtgacacacagcccaaagtggcacagagaatttcctgtctgttttttcaatttaacagatgtaggttttgatttttcctcta

SEQ ID NO: 423 - DNA, 2300 bp, Homo sapien
tccctccctccctccttccctccctccctccctcccttccttccttccttccttcctccctcccttccttccttccatcctctggcatctgccccagctcacattctcagattccatcttcccaggctgattttccaaggcgagcccatcatttttgggagtaaacacgctttcccttgtagtagaggccaagactgtatctgcctcctctgccctcaaagacaatgttgtgtttgaagagtctgcactgtctcttttgtaattattccctttttaatttttaaactcaatctagacagagtctttcaatccttctgtggagatgcccacaaaatacccaccatgttttatgctgtcttggttccttcccagggttctactagaacacccggtcccatcctgcccagccgccacctcactttgtcattctgtcctgatttccttcagtgaagccttgaccttagtcttgtgatcaatcacaccctccgtggttcccttttcaacctgaacccacatatgacctgccctgttataaaacataaaacccaggtgaccattggataaaggagctttttaatccgttttcttagggtggacatcactgtctttttaaagctgttttaactgtcttaacgaaacgttttgataatttcgatgtggccacagattttcccataaagatatcatcaggttttgttttttctttctaatgtcaggaacagattaaaccttccatgtctctatgaaggtcacatactagtcaaatttcatcagtgtttggggaataaatgaattaatgagttttggactttcaccctgttatttattctttcactttcataaatgcacatctaatttaatcaatgaatcagaagaaagtgtaaaactcaatcaggactaactaggtggaacttcggaatctaatcaggtatcactttctgattggaagctggtgattgagaaggggagggtgtggttagaaacatcaataaaagctcctgagtttgcaaaggagagacccaaagccctggtgcctggaactactgcttgattctctgagagatcccagcaccctacaaactgagtccagatctggtaagtcaccacctccttaggaacatgcccatctgatctgcagccagccagtcagggatggtgacacacagcccaaagtggcacagagaatttcctgtctgttttttcaatttaacagatgtaggttttgatttttcctctaaatatagtattcacttcatccctcaaattttgatttctgcttcatttttctcatttcaaaattcttattgaagcagttttttaaaaaagatattaaaaatttacagttggatgaatttttatgtcttgacatgtgaagttatttgtttctgtgcccttcagctacagttcacacacttagttgtattgtgattttctcgagtcttgttctgaacatgggatttatctctgcccttagactctgtccctaagtgggtgattgtgagtatgtagaagggatgagtattggatccttcatctgagacttagtgtttccacccgcaccttccaagtgctctagaatactgccacactgcttttatagtttctcttataatttttcaaaataaaaacaagtggcattgattttaaggagtcacttcagtcttccccaagcatgctaattgtgtaaactgagaatgcaggctgtgtggggccacaggacagtcattctcattgtttttgggtggtaagtaacaaaaaaatttccctcaaaaaggtggagcttagctttcaggatcctgagtgacagatcccagtaatcctgagtttcagtggagcaatgtatagaaattaatgggccactggccacctcgtcccctccttggtgtttggaagacattctttgtggtagtcacaggggcacagatacagatttgtggccaccaagtgcagaatggaactggggggaattgagggcttttccacctccaccagagcaatgagattagcaataggagaagatgaggtgatcatatttggcctgagagtgatgccttttctctggatttgtcctctagagttttcccttgcagattcatcaagatgagcatcagggccccacccagactcctggagctggcaaggcagaggctgctgagggaccaggccttggccatctccaccatggaggagctgcccagggagctcttccccacactgttcatggaggccttcagcaggagacgctgtgaaaccctgaaaacaatggtgcaggcctggcctttcacccgcctccctctagg

SEQ ID NO: 424 - DNA, 2300 bp, Homo sapien
tgagaccagaagattgaggctgcagtgagccatgctcataccactcctgtactccagcctgggcaaaagagagacaccctgtccaaaaaacaaaaacaaaatcaatcaaaaaggatctttgaccttaattttaaaccaatcacatcctcttccacccaaatggagacatggctgcagggggtgcatgcctgtagtcccagctatgtggaaggctgaagcatgagaattgcttgaatcttggaggccgaggcaacagtgagccgaaatgacaccactgcactctagcctggccgatgaagtgagattcagctccctcaacaccaaaaagacttatgccacctaggtgatcattggatatatgaagatttctattgtgttttcttagggactgtcatctctgtctctgaaaactgttttaaccctgaaatattttgataaacttggcatggccaaggatccctcaacaaagatactttcaagttttctttctttctgtctaatatcaggaagaggttcaacccttccctgtctcacactcaggactttgaaggacacatattagtaaaaccccatgtttgtgaagggaatcagtgaatgagtcctggactttcaccctatccctaaatctttcattttgatgaatgaatatctaatttgatcagttaatatttaagaaaggcaaaaatccaatcaggattaactgggtagagattaagaattctaatcaaatgtagctctctctgtctctctgttcaatctagcctatttcccaggctggagtggagtggtataatgtcagctcactgcaacttctgcctcctggattcaagcgatcctcctacctcagcctccctagtagcttggactacaggcgcagaccactgcacctggctaatttttgctgtcttagtagaggcagggttttaccatgttggccaggctcgtcttgaactcctgatctcagatgatccacctgcctcggcctcacaaaatgctcagattacaggtgtgagtcactgcacccagccaaagtggttcactttgaatatgtgtaagaggtgtgcattggaaacatctatcttgtgagtaatgcataacagtgtcacatagctttcagagcttctcactgaaattttcaataatgaggcaggggtggaggctcacacctataatcccagtatgttgggaggccaacaggggtagattgcttgagactaggagttcaagaccagcttggacaacatagcgaaatccactgtctttacaaaaagtcaaaaaataaaagatgagctgggtgtggtgatgcataactgtggtcccagctacttgggaggctgaggaggaagaatcctttgagctgggaggtcaaggctgcactgagctgagatcccaccactacactccaggctgggtgacagagcaagaccctgtcagaaagagtgagagagggagagagagaaagagagagagaatgagagaagggatgcagggaaagaagacaagaaagaaagaaggcagagagagggggaaagaaagaaagagggagagagaggaggaaagaaagaaagaagggagggagagagggaaagaaggaaagaagaaagagagagaaagagaaagcaagcttaaataatgaaaagaaaacaaatagaacctgttctagggatgccccatgaatgttcccaacaagcttatttgtaggaactgaaaatgtgggcatgtaggcttgtgacattcccattcccattgttttagaaccttgagtaattagtaatttcccccaatggtaggaggggttcactttcaggttcctccacactcactagtcactggatggagcactggatagaaaggaagggctcgtggtggccctgcttcctcactgcttcggagacgctcatgctgatgcagcagaggcagaatgctggcttaatggccactgagtacagggcagaattggagtaaactgagggctgtttcaccattgccagagcagtgactttggccttgggagaagataagattgcatgggcttggcctgagagtgatgccttttctctgggtttgtcctctggaagttttccctgcagattcgtgaagatgagcatccggactccacccagactcctggagcttgcagggcggagcctgctgagggaccaagccttggccatgtccaccctggaggagctgcccacagaacttttccccccactgttcatggaggccttcagcaggagacgctgtgaggccctgaagctgatggtgcaggcctggcccttccgccgcctccctctgag

SEQ ID NO: 425 - DNA, 2300 bp, Homo sapien
tcaccatgagattctttactcagggacaggatgtaagccaagcaaaagaccttccacaggtggtgaatttggaagcctgcccaatgtaacctgcaagttttcactggcaatatgcaggtgcagatatgacaaagaataaccatgacctttacatcacccccagctgttgaggaatgggatccttttgaccctttctgtccatagaaccaggttgctcatcttgtgtggcaacaacatatgtggtctacttaacagagaagaagactctgtaaaaaaaatgtttattatgtagtaagcaaagaaatgggaatagatgtgagattatttggggagataaaggaagttgaaggttttgaaaggaaaaataaggaggattatacaaattgttttgaaagactcatacttggtcatgaggattaaaaccaaaagggcatcagtgcaatgttagatagattcctcttacacccactcgataacccccaacatgttcagcaagtcttggttcactcccaggttcccattaaaaacccagctcaaccctgaccagctccaccctcacttccatttgtaattttgacatgactttattacaggaccatcaggttcctatgcctgctgcacagtagcttagcaatattctgagacagcagggtttgcagcagagagtttaatgatcacaaggtggctgaatgagaagctaggaggagatcctcaaattcatctccccaaggagtactgagggtttccagtggatcctggatagcaaggggccggaaagttggggtagcggtaagagggaagaagtcaacaggatgtagaaactgcattctttggtgagttggtgcattgcagggcccttcagatcagctggcatcagtagattcactgacatgcagaacctgaaagaatatctcagatgaaaaagttaatgttttacaatgcttaaatggttgtctgcagggaagttaaggggaactgtaatctaaggtctatatgattttggaacagtaggttgccagcaaccatgaggaaccaggtcagagagcaagaagacctcctgatgaatgctgaatgtgttccaagcttggtttatttttgtttctctccctcccttcttcactgattaaatttataaagtttatcgatgtggcttcaatttcttccaaagaagacttaacctaagccctgagaccactcacgccctcagtggcacctctcctccaccagaacgagcatgtaatctgctaccttaggttatacaaaatcccgaagaccattcaatacgttgagatttttattctgatttcctagggacgactcctctgtttttataaagctttttaaagtagaaagcatttttatattttgatgtggccaaagatttcctaacaacactactttcagattttatttttctgtctaatgttgggaacagatcaaatccttccctgcctgtcactcaagactatgaagttcacatattagtaaaataccatcagtgtttgtggagttcatgaatgaatgatttttttattttttgacagaatgtccctctgtcacccagactggagtgcagtggcacaattctggctcactgcaaccattgcctcctgggttcaagcaattctcctgcctcagcctcccaagtagctgggtttcaggcacctgccatcatgcccagctaatttttgtatttttgtatttttgtagagacagggtttcacctttttgacctggctcgtcttgaacccctgacatcaggtgatctactcaccttgtccttccaaagtgctggaattacagctatgaaccacctcacccacccttgaatgaatgtattcttgacttctaccctatccctaacactgtcgatttcttgcttcatgaagtgaatatagatatgtgatatgaatggacatctgattcaatccggtaatctggggagagccaaaaacccaatcaggattaactgggtggagcttcacaaatgcaatcagatatcattttttgattggaaggtagcagcggatatgtgcaggggcgtgggtgggagttgtgattagaaaggtcaataaaagcttctaaagacccacaggagagacccaaagtcttcaagcctggagttcctgcttggttcttcctgaggactgagcaccttctagactacatccagatctggtaagccactaatttctgtaaggacactcccatctgacctacagtcagtcggtctgggatggtgacagtgcagcctacgatggcacagagctatatcctgtccttttttttttcatatgaac

SEQ ID NO: 426 - DNA, 2300 bp, Homo sapien
cggctcactgcaacctccgcctcctaagttcaagcaattctcctgcctcagcctcctgagtagctgggattacaggtgcccaccaccatgcccggctaatttttgtatttttagtagagacagggtttcaccatgttggccaggctggtctcgaacacctgacctcgtgatctgcccacctaggcctctcaaagtgctgggattataggtgtgagccaccatgcccagcttcagagttccgaatcaagcagttgaaaaataatgcaattgactgaagtctttttttttttttttctttgaggcattgtcttcctgcgtcattcttggtggaatgcagtattgtgatctcgactcactgcaacctctgccttctgggctcaagccatcctccctactcataagttctagccttctgaatagctggaattcaggcatgcaccagtataaccggctaatttttttgtttttgttttgtttttgtctttttctttttttttttttgagagagagtctcactctgttgcccaggttcgagtgcagaggcatgatcttggctcactgcaaattctgcttcccgggttcaagtgattctcctgcttcagcctcccaagtagctgggactgtgggtgtgtgccaccacacctggctaatttttgtatttttaatagagatagggtttcactatgttggccaggctggtcttaaactcccaaactcaggcgatctgcccgcctcagtctcacaaagtgctgagattacaggtgtgagccaccgtgccaggcctattattatttttttttatagtgatggggtcttggtttgttacctaggctggtctgggacacctagattcaagcaaacctcccactttgccttctaaagtcttgggattacaggcatgaaccaacatgactggtctcatacaccattttcaagaatggagtctttgttctgaatgtgggatccatttgtttctctagactccattccaaagtgggtaatattttatttatttatttattttattaagacagagtcttgctgttctgcccaggctgggggtacagtggcagagtctcagatcactgtaacttctgcttcccagacacaagccatccttccacctcagcctgcagagcagctgggactacaggtgtgcgccatcacttccatctattttttgtatttttttggagagacagggtctcactatgtagcccaggctggtcagcaactccagggcttaagtgattgttctgccttggcttgccaaagtgttggaattacagctgtgagcctccatgtgtggcccctcattacttttttgaaagtgaacataatggtgtctaattaaaaatattcctttagtctctcccagccaagttcactgtgggaactgagactgtagactgtttggggccacaggagactcccattaccattgttttattgttttattttttttatttatttttttttttgagactgagtcttgctctattgcccaggctggagtgcagtggcactatctcagctcactgcaacctccgcctcctgggttcaagtgattcttatgcctcagcctcccgagtatctggagttacaggcacctgccaccatgcctggctactttttgtatttttagtaaagactgggtttcaccttgttggccaggctgttctctaactcctgacatcaagtgagccgcccgccttggcctccaaggtgctgggactacagttgtgagccaccaagcccagccacatgaccattgttttagatccttaaattgagaagacattttttctcaaaaaaggagctgagctttgaagattcttggtaacacttcccagagctaatagagttgggtggagcaattaatgaaaattcatggagtaggagtgattttgcccgttccttggaggttaggagacactcttcttggtaccagaagggcagaactatgtctgtgtggccaattattgcagagtcgaattggggtaaacttaggactctttcacatctgccagagtagtgacttttggcccaggagaagtcagggtgtgagaggactggcctgataagtttgtcttttctctggatttgttttcttgcagatttatgaggatgagcctacaggccccacgcagactcctggagctggcagggcagagcctgctgggggaccaggccttggccatctccatcttggatgagctgcccagggagctcttccccccactgttcgtggaggccttcactagcagacgctgcgaggttctgaaggtgatggtgcaggc

SEQ ID NO: 427 - DNA, 2300 bp, Homo sapien
tcaccatgagattctttactcagggacaggatgtaagccaagcaaaagaccttccacaggtggtgaatttggaagcctgcccaatgtaacctgcaagttttcactggcaatatgcaggtgcagatatgacaaagaataaccatgacctttacatcacccccagctgttgaggaatgggatccttttgaccctttctgtccatagaaccaggttgctcatcttgtgtggcaacaacatatgtggtctacttaacagagaagaagactctgtaaaaaaaatgtttattatgtagtaagcaaagaaatgggaatagatgtgagattatttggggagataaaggaagttgaaggttttgaaaggaaaaataaggaggattatacaaattgttttgaaagactcatacttggtcatgaggattaaaaccaaaagggcatcagtgcaatgttagatagattcctcttacacccactcgataacccccaacatgttcagcaagtcttggttcactcccaggttcccattaaaaacccagctcaaccctgaccagctccaccctcacttccatttgtaattttgacatgactttattacaggaccatcaggttcctatgcctgctgcacagtagcttagcaatattctgagacagcagggtttgcagcagagagtttaatgatcacaaggtggctgaatgagaagctaggaggagatcctcaaattcatctccccaaggagtactgagggtttccagtggatcctggatagcaaggggccggaaagttggggtagcggtaagagggaagaagtcaacaggatgtagaaactgcattctttggtgagttggtgcattgcagggcccttcagatcagctggcatcagtagattcactgacatgcagaacctgaaagaatatctcagatgaaaaagttaatgttttacaatgcttaaatggttgtctgcagggaagttaaggggaactgtaatctaaggtctatatgattttggaacagtaggttgccagcaaccatgaggaaccaggtcagagagcaagaagacctcctgatgaatgctgaatgtgttccaagcttggtttatttttgtttctctccctcccttcttcactgattaaatttataaagtttatcgatgtggcttcaatttcttccaaagaagacttaacctaagccctgagaccactcacgccctcagtggcacctctcctccaccagaacgagcatgtaatctgctaccttaggttatacaaaatcccgaagaccattcagtacattgagatttttattctgatttcctagggacgactcctctgtttttataaagctttttaaagtagaaagcatttttatattttgatgtggccaaagatctcctaacaacactactttcagattttatttttctgtctaatgttgggaacagatcaaatccttccctgcctgtcactcaagactatgaagttcacatattagtaaaataccatcagtgtttgtggagttcatgaatgaatgatttttttattttttgacagaatgtccctctgtcacccagactggagtgcagtggcacaattctggctcactgcaaccattgcctcctgggttcaagcaattctcctgcctcagcctcccaagtagctgggtttcaggcacctgccatcatgcccaggtaatttttgtatttttgtatttttgtagagacagggtttcacctttttgacctggctcgtcttgaacccctgacatcaggtgatctactcaccttgtccttccaaagtgctggaattacagctatgaaccacctcacccacccttgaatgaatgtattcttgacttctaccctatccctaccactgtcgatttcttgcttcatgaagtgaatatagatatgtgatatgaatggacatctgattcaatccggtaatctggggagagccaaaaacccaatcaggattaactgggtggagcttcacaaatgcaatcagatatcattttttgattggaaggtagcagcggatatgtgcaggggcgtgggtgggagttgtgattagaaaggtcaataaaagcttctaaagacccacaggagagacccaaagtcttcaagcctggagttcctgcttggttcttcctgaggactgagcaccttctagactacatccagatctggtaagccactaatttctgtaaggacactcccatctgacctacagtcagtcggtctgggatggtgacagtgcagcctacgatggcacagagctatatcctgtccttttttttttcatatgaac

SEQ ID NO: 428 - DNA, 2300 bp, Homo sapien
tgagaccagaagattgaggctgcagtgagccatgctcataccactcctgtactccagcctgggcaaaagagagacaccctgtccaaaaaacaaaaagaaaatcaatcaaaaaggatctttgaccttaattttaaaccaatcacatcctcttccacccaaatggagacatggctgcagggggtgcatgcctgtagtcccagctatgtggaaggctgaagcatgagaattgcttgaatcttggaggccgaggcaacagtgagccgaaatgacaccactgcactctagcctggccgatgaagtgagattcagctccctcaacaccaaaaagacttatgccacctaggtgatcattggatatatgaagatttctattgtgttttcttagggactgtcatctctgtctttgaaaactgttttaaccctgaaatattttgataaacttggcatggccaaggatccctcaacaaagatactttcaagttttctttctttctgtctaatatcaggaagaggttcaacccttccctgtctcacactcaggactttgaaggacacatattagtaaaaccccatgtttgtgaagggaatcagtgaatgagtcctggactttcaccctatccctaaatctttcattttgatgaatgaatatctaatttgatcagttaatatttaagaaaggcaaaaatccaatcaggattaactgggtagagattaagaattctaatcaaatgtagctctctctgtctctctgttcaatctagcctatttcccaggctggagtggagtggtataatgtcagctcactgcaacttctgcctcctggattcaagcgatcctcctacctcagcctccctagtagcttggactacaggcgcagaccactgcacctggctaatttttgctgtcttagtagaggcagggttttaccatgttggccaggctcgtcttgaactcctgatctcagatgatccacctgcctcggcctcacaaaatgctcagattacaggtgtgagtcactgcacccagccaaagtggttcactttgaatatgtgtaagaggtgtgcattggaaacatctatcttgtgagtaatgcataacagtgtcacatagctttcagagcttctcactgaaattttcaataatgaggcaggggtggaggctcacacctataatcccagtatgttgggaggccaacaggggtagattgcttgagactaggagttcaagaccagcttggacaacatagcgaaatccactgtctttacaaaaagtcaaaaaataaaagatgagctgggtgtggtgatgcataactgtggtcccagctacttgggaggctgaggaggaagaatcctttgagctgggaggtcaaggctgcactgagctgagatcccaccactacactccaggctgggtgacagagcaagaccctgtcagaaagagtgagagagggagagagagaaagagagagagaatgagagaagggatgcagggaaagaagacaagaaagaaagaaggcagagagagggggaaagaaagaaagagggagagagaggaggaaacaaagaaagaagggagggagagagggaaagaaggaaagaagaaagagagagaaagagaaagcaagcttaaataatgaaaagaaaacaaatagaacctgttctagggatgccccatgaatgttcccaacaagcttatttgtaggaactgaaaatgtgggcatgtaggcttgtgacattcccattcccattgttttagaaccttgagtaattagtaatttcccccaatggtaggaggggttcactttcaggttcctccacactcactagtcactggatggagcactggatagaaaggaagggctcgtggtggccctgcttcctcactgcttcggagacgctcatgctgatgcagcagaggcagaatgctggcttaatggccactgagtacagggcagaattggagtaaactgagggctgtttcaccattgccagagcagtgactttggccttgggagaagataagattgcatgggcttggcctgagagtgatgccttttctctgggtttgtcctctggaagttttccctgcagattcgtgaagatgagcatccggactccacccagactcctggagcttgcagggcggagcctgctgagggaccaagccttggccatgtccaccctggaggagctgcccacagaacttttccccccactgttcatggaggccttcagcaggagacgctgtgaggccctgaagctgatggtgcaggcctggcccttccgccgcctccctctgag

SEQ ID NO: 429 - DNA, 2300 bp, Homo sapien
gagcaagtgcctgggggagctttggtattctggtggagattctgtgagtggagaaggggtcaggtcatcttctcagaggggctctgaaggatgctctgagtttgacagcagatgagcaccttgagaagaacaggtgacaggacatggtagaaatgcccccaagtgcgggattctcactggggtcctgggggtggtgctggaccttctgaattgggcaggaagggaaagtctgtcaaacagttcttttcaacatttagactattgaactccttaggggatcctctgagctcctcaccagaggggtctgtccatcatttgctgcctgaacacgggcaggttcctctccctagccaagtctcagggtcaccactttaaaaatgaggaatatagcaacatgccttagattcctcgtgagggagagctgagatcttggatgaatggtaccagtccctgctgtgccttgtgcatgctcaatcaacagagacactcaggatcacctttggtgctgagctcaccctcagcctcaggctcacaaagtgagggcaggtgaagtagaagccgcactgagcacgtttcagtttaactcgattgcacacatagcagggcattgatagtgaggtcagaaacgtggagaaagaacatttacagaaatattccatgatggagaacatccttcaaagtacttcagttttggaagccagtggcatctccgggctgtttgggtttcatatggaatgggagagaaaggcctggaggactttctggaggcgggggacgttcttgctactttgtgccctaaaatagcagaagaatgactgtgtgatcctgcttaggatgggagccatccctgaacttagcagatcttttaacatgaaatagagcttccaggttttgttggggaaatgtattgtacatttgcacacaatacaaccagatgtgtgcaccattcttaaagacaggaaggctgagtttctctctctctctttctttctttctttctttctttctttctttctttctttctttctttcctttctttctttctttcatttccttccttccctccctccctccctccttccctccctccctccctccctcccttccttccttccttcctccctcccttccttccttccttcctctggcatctgccccagctcacattctcagattccatcttcccaggctgattttccgaggcgagcccatcatttttgggagtaaacacgctttcccttgtagtagaggccaagactgtatctgcctcctctgccctcaaagacaatgttgtgtttgaagagtctgcactgtctcttttgtaattattccctttttaatttttaaactcaatctagacagagtctttcaatccttctgtggagatgcccacaaaatacccaccatgttttatgctgtcttggttccttcccagggttctactagaacacccggtcccatcctgcccagccgccacctcactttgtcattctgtcctgatttccttcagtgaagccttgaccttagtcttgtgatcaatcacaccctccgtggttcccttttcaacctgaacccacatatgacctgccctgttataaaacataaaacccaggtgaccattggataaaggagctttttaatccgttttcttagggtggacatcactgtctttttaaagctgttttaactgtcttaacgaaacgttttgataatttcgatgtggccacagattttcccataaagatatcatcaggttttgttttttctttctaatgtcaggaacagattaaaccttccatgtctctatgaaggtcacatattagtcaaacttcatcagtgtttggggaataaatgaattaatgagttttggactttcaccctgttatttattctttcactttcataaatgcacatctaatttaatcaatgaatcagaagaaagtgtaaaactcaatcaggactaactaggtggaacttcggaatctaatcaggtatcactttctgattggaagctggtgattgagaaggggagggtgtggttagaaacatcaataaaagctcctgagtttgcaaaggagagacccaaagccctggtgcctggaactactgcttgattctctgagagatcccagcaccctacaaactgagtccagatctggtaagtcaccacctccttaggaacacgcccatctgatctgcagccagccagtcagggatggtgacacacagcccaaagtggcacagagaatttcctgtctgttttttcaatttaacagatgtaggttttgatttttcctcta

SEQ ID NO: 430 - DNA, 2300 bp, Homo sapien
taagccaatcataagaccttccacaggtggttaatttggactcctgaaaaatgtgacctgtaagttttcactggcaatatgcaggtgcacatatgacaaataataaccaggacctttatatcacccccagctggtggggaatgggatccttttgaccctttctctccataataccaggctactcatgttgtgtggcaataaaatatatggtctacttcacagagaaagagattcttttaaaaaaaaaaaggatttttattatgaaatgagcaaagcaatgggaatagatgtgagattattcagggaggtaaaggaagacaaaggttttgaaaggaaaaatcaggagaattacatacactgttttggaagactcattcttggtcacaagtatcaacaccaagggggcctcagtgcaatgttggaaagattcctcctccacgccctcaataacccccaacatgtttaccaagtcttggttcactccccggatcccattaaaacacacagctcaaccctgaccagcctccaccttcacttccctttgtaattttgacatgactttttttacaggaccatcaggttcctatgcctgcagcacagtagcatactaatattctgagacagcagggtttgcagcagagagtttaacgatcacagggtggcaaaatgaaaagctgggaggagaccctcaaattcatctccccaagaagtactgagagttttcagaggatcatggatagcaagaggctggaaagttggtgcagtttggtggcagtaagaggtatgaagtcatcaggatgtcaaaactgcattccttggtgagttggtgccttgcagggcccttcagatcacctgccatcagtagcttcactgacatgcagaacctgaaagaatatgtcaaatgaaaaagttaatgttttacaaggcctaaattgttgtctgcagggcagttaagggcaactgtaatctaaggtctacatgattttgggacagcaggctgccagcaaccatgaggaagcaggtcagagagcaagctgacctcatgatgaatgctgaatgcactgcaagcttggtttatgtctgtttctccccctcccttcttcactgattaaatttataaagtttataagtatggttgcaatttcttccagagtagccttaacctaagccctgagaccactcaggtcctcagtggcacctctcttccaccagcaggagtgaaaaaattgctaccttaggtgatataaaacccacaagaccattcaatacatggagatttttattttgattttgtagggacgactcctctgtttttataaagctattttaactataaaacatttttgtgattttgatgtggccaaagatctcccaacaatactactttcagattttagttttctgtctaatatctgggaaagattagacccttccctgcttcagactcaggactatgcaggtcacatattagtgaaattccatcagtgtttgtgaagttcacgaatgaatgaattttttttttccgacaaattctccctctgtcacccagagtggagtgcaatggtgcaatcttggttcactgcaaccattgcctcttgggttcaagcgattctcccacctcagcctcctgagtagctggattacaggcatgtgccatcgtccctgcctaattcttgtatttttgtagagacggggtttcaccttgttggcctggctcgtcttgaatgtctgaactcaggtgacccacccaacttgtcttcccaaagtgctgggattacaggagtgagccaccttgcccggtcttgaatgaatgcattcttgattcccaccctatccctaacactgtcaatttcttgattcatgaacttaatatggatatctgatatgaatggatatctgattcaatccattaatctggggagagccaaaaccccaatcaggattaactgggtggagcttcagaaatgcaatcagatatcacttgttgattggaagctagcagtggatacgtggaggggtgtgggtgggagttgtgattagaaaggtcaataaaagcttctaaagacccacagaagagacccaaagtcttcaagcctggagttcctgcttatttcttcctgaggtctgagcaccctccaaactgagtccagatctggtaagtcactaatctctctgtaaggacactcccaactgacctacagtcagctggtctgggatggtgacagtgcagcctaagatggcatagagttatatcctgttttgttttttttctcatatgaacaatttgaagctttgcattt

SEQ ID NO: 431 - DNA, 2300 bp, Homo sapien
ttctttctttctttctttcttcctttctttctctttctttctttcctttctttccttccttccttccttccttccttccttccttctttctttctttctttctttctttctttctttctttctttctttctttctttctttctttctttctttctttcttgcatgcttgcttgctttttcttttgttcttttttgacagtgtcatgccgtcacccaggatggagggcagtggcgccatctcagctcactgcaacttcgcatcctgggtttaagcgattctcctgcctcagccttctgagtagctgggagtgcagacatctgccactatgctcggctaattttttgtatttttagtagagacggagtttcaccgtgttagctagaatggtcttgatatactgacctcatgatcagcccaccttggcctctcaaagtgctgatgttacaggcatgagccactgtgcctgggtctgagctttctttgtaggcctaatgttgatgctctgataagaatctctatgttcaatattagtgacaggaaaggactctaagaaggaggaaacatgaattatcaaattagagtaggaagggagtgggtgagattaagatttggatgaagggtcctggaaaatgactggggccaatggttgctgggaaatgttccactgtgggaagatcccagagtctaaaggaaaggtttccagatgatagaacaatgacggacatatggaccctcgttcatttctctctcacatcctgtagagcccacagtttctacctgggtggcttccagcttgggagagcctcccttcccaggtctggccccaatcttctctctggcctctgctccagctcacattcttagattccatctttgcaagctggttttctgagaggagcccatcagttttgtgagtaaacaccctttaccttctagtagggccaagactatacctgccccctgtgttttcaaagtgaatgttatggtttaagtctgccctatctcttttgatgattctccttttaatttctgaactcaatctagggtgggtgagatggctgatgcctgttatcccagccttttgggaggccaaggtgaggagatcacttgaggtcaggagtttgagaccagccgggccaacatggtgacggccaacatggtgaaaccccatctcgactaaaatacaaaaattagtagggcttgttggagtgcacccgtaattcccagctacttgggaggcagaagtgagagaatcacttgaaccagaaggttgaggctgcagtgagctgaaatcgtgccactgcactccagcctgagtgacagatgtaggcccagtctgaaaatcaaacaaacaatcaataaataaactcaatcttgacaaaagactttgagtcctgacatctagatgcccacaagataaccgccatgttttacattgtcttgtttcctttgcaggttcccattagaacacctagtctcattccgctcagtccccacctcacttggtcactttgtcctgatttccttcggtgaagccttgacttagtcttgagatagatcacactctcagtggttcctttcttctacctgaatgtgcatatgatctgctatgttagatagcataaaacacaggtgaccattcgatatacacagctttttattctgttttcttgggaatgacatcactatcttcttcaggctgttgtagctctgaaacattttgacaattttgatgtggccaaacatcctccaataaggacaccttaaggtttttttttttttggcctaatatcaggaacagattaatcccttccctacatcactacgaaagtcgtgtattagccaaacttcatcagtatttcgggaataaatgaacgaatgagttttggactttcaccctattatttattcttttacttccataaatgtgtatctaattcgatcaattagtcagaagaaagctgaaaactcaatcaggattaactgggtgtgactgcaagatctaatcaggtatcagtttctgattggaagctggtgattgagaagggaagggtggggttagaaaggtccataaaagctcctgagggtacccagaagagacccacagcactcattcctggagctactgcttggttccctgagaggtcccagaactctgcaaagtgagtccagcgctggtaagtcaccaccttcttagggtcatgcccatctgatcagcagccagccagtcagggacggtgacacacatcccaaagtggcacacaatatttttctgtctgtttcgtgagatgaacagatt

SEQ ID NO: 432 - DNA, 2300 bp, Homo sapien
caagtgattctcctgcttcagcctcccaagtagctgggactatgtgtgtctgccaccatgcctggctaatttttgtatttttttttttttgagacggagtctcgctctgttgcccaggctggagtgcagtggcgtgatctcggctcactgcaagctccgcctcccgggctcacgccattctcctgcctcagcctcccaagtagctgggactacaggggcccgccaccacgcccagagaattttttgtttttttagcggagacggggtttcaccgtgttagccaggatggtctggatctcctgacctcgtgatccacccgcctcggcctcccaaagtgctgggattacaggcgtgagccactgctcccagcctaatttttgtatttttaatagagatggggttttactatgttggccaggctggtcttaaactcccaaactcgggtgatcttcccacctcagtctcgcaaagtgctgagattacaggtgtgagccaccgtgccgggcctattactatgtttttttatagtgatggggtcttggtttgttacctaggctggtctgggacacctagattcaagcaaacctcccacttcgccttccaaagtcttgggattacaggcatgagccaacatgactggtctcacacaccattttcaagaatggagtctttgttctgaatgtgggatccatttgtttctctagactccattccaaagtgggtaatattttatttatttatttattttattaagacagagtcttgctcttctgcccaggctgggggtacagtggcacagtctcagatcactgtaacttctgcttcccagacacaagccatccttccacctcagcctgcagagcagctgggactacaggtgtgcgccatcacatccatctattttttgaatttttttggagagacagggtctcactacgtagcccaggctggtcggcaactctatggcttaagtgattgttctgccttggcttgccaaagtgttggaattacagctgtgagcctccatgtgtggcccctcattactcttttgaaagtgaacataatggtgtctaattagaaatatccctttagtctctcccagccaggttcattgtgggaactgagattgcaggttgtttggggccacaggagactcccattaccattgtcttgttgttttgttttgtttttctttttgagactgagtctcgctctattgcccaggctggagtgcagtggcactatctcagctcactgcaaactccacctcctgggatcaagcaattcttgtgcctcagcctcctgagtagctggagttacaggcacccgccaccatgcctggctactttttgtatttttagtaaagactgggtttcaccttgtcggccaggctggtctctaactcctgacctcaagtgagccgcccgccttggcctccaaagtgctgggactacagttgtgagccaccaagcccagccacatgaccattgttttagatccttaaattgagaaggcattttttctcaagaaaggagctgagctttgaagatccttggtaacacttcccagagctaatagagttgggtggagcaatttttttttttttttgagacagagtctcactgtcgcccaggctggagtgcagtggcgcaatctcggctcactgcaggctctgctccctggggttcatgccattctcctgcctcagcctccagagttgttgggactacaggtgcccgccacctcgcctggctaattttttgtatttttagtagagacggggtttcaccatgttagccaggatggtctcgatctcctgacctcgtgatccgcccgcctcggcctcccaaagtgctgggattacaggcgtgagccaccgcgcctggccagggtggagcaatggatgaaaattcatggagtaggagtgatcttgcccgctccttggaggttgggagacactcttcttggtaccagaagggcagaactatgtctctgtggccaattattgcagagtcgaattggggtaaactaaggactctttcacacctgacagagtagtgacttttggccgaggagaagtcagggtgtgagaggactggcctgataagtttgtcttttctctggatttttcttgcagatttatcaggatgagcttccaggccccacgcagactcctggagctggcagggcagagcctgctgagggaccaggccttggccatctccgtcctggatgagctgcccagggagctcttcccccgactgttcgtggaggccttcactagcagacgctgcgaggtt

SEQ ID NO: 433 - DNA, 2300 bp, Homo sapien
gagactggatatcactatgttttccaggctggtcttgaactcctgaccctgtgatccacctgccttggcctcccaaagtgccaggattacaggcgtgagccacctcacccagccttcttgacattttaaatacatattttgtgattttgtgtgcccttaaattatagttcatagactttggggtattgtgattttacaagttaggttttcctttttactaaaagttttttttgagacagggtttcaccctgccgaccaggccggagtgcagtggggcaatcccttctcactgcaacctctgcttcccgggttcaagtgattctcaggcctcaatcttccaagtaactgggatgacaggtgcatgccaccacgcccagctaatttttgtgggtttttttttagtagagacggggtgtcaccatggtggccaggctagtctccaactcctgacctcaggtgatacacccgctgcagcctctcaaagtgctgggataacaggtgtgaaccaccgcacccagcccctttaataaaagttttaaaacattctatgtaatatatatatatatagagagagagacatagtctcactctgtcgcccaggctgcagtggagtggctcaatctcagctcactgctacatctgcctcccaggttcaagtgattctccagcttcagcctcccaagtagctgggattacaggtgtgtgccaccatgcccagctaatttttgtatttttagtagagatgaggtttcaccatattggtcaggcttgtcttaagagtgatagctttgttctgaacatgtgatccatttgttcccttatgctctatccaaagtggttctttgttttttgagcttggagtttcattcatgtcgcccaggctggagtgcagtggcacaatctcagctcactgtaacctccgcctcccgggttcaagtgattctccttcctcagcctcccaagtagctgggattacaggtgtgtaccaccatgcccagctaatttttttgtatttttagtacagacagggtttcaccatgttggccaggctggtcttgaactcctgacctcaaatgatctgcctgcctcggcctctcaaagtgctgggattacaggcataagtcaccatgcccagccaaagtggttcatttttaatatgtgtaagaagtgtgtatggaaacatctctgtcttgcgaatgatccataacattgtcacatagctttcaaagtttcccactgaaattttaaataatgaggccggagcagaggctcatgcctgtaatcccagcactttgggaggccaaggtgggtggattgcttgagtctaggagttcaagaccagcctgggcaacatagggaaacccattgtctttacaaaacatcaaaaactaaaaggttagctgggcatggtgatgcatgcctgtggtcccagctacttgggaggctgagatggaagaatcctctgagcctgggaggtccaggctgcactgagctgagattgcaccactgcactccagcctgggtgacagagcaagaccctggcaaaaaaaagaacaaagggagggagggagggagggagggatgagggaaagaaggaaagaagaaagggagagagaaagagaaagaaagtaagcttaaataatgaaaagaaaacaaaacaaatagaacccattctagggatgccccatgaatgttcccaaccagcttatttgcaggaactgagaatgtaggcatgtaggcttttgacactcccattcccattgttttagaaccttgagtaattagaaatttcccccaaaggtgggagggattagctttcaggttcctccatattcactactcactggatgagcactggatagaaaggaagggctagtggtggccctgcctcctcactgcttgggagatgcttatgctgatgcagcagaggcagaagcctggctttgtggccactgagtacagagtagaattggagtaaactgagggctctttcaccattgccagagcaatgactttggccctgggagatgagattgcatgggcttggcctgagagtgatgccttttctctggatttgtcctctggaacttttctttgcagattcaggaagatgagcatccggactccacccagactcctggagctggcggggcggagcctgctgagggacgaggccttggccatctccaccctggaggagctgcccacggaactttttcccccattgttcatggaggccttcagcaggagacactgtgaggccctgaagctgatggtgcaggcctggcctttcctccgcc

SEQ ID NO: 434 - DNA, 2300 bp, Homo sapien
tccctccctccctccttccctccctccctccctccctcccttccttccttccttcctccctcccttccttccttccttcctctggcatctgccccagctcacattctcagattccatcttcccaggctgattttccgaggcgagcccatcatttttgggagtaaacacgctttcccttgtagtagaggccaagactgtatctgcctcctctgccctcaaagacaatgttgtgtttgaagagtctgcactgtctcttttgtaattattccctttttaatttttaaactcaatctagacagagtctttcaatccttctgtggagatgcccacaaaatacccaccatgttttatgctgtcttggttccttcccagggttctactagaacacccggtcccatcctgcccagccgccacctcactttgtcattctgtcctgatttccttcagtgaagccttgaccttagtcttgtgatcaatcacaccctccgtggttcccttttcaacctgaacccacatatgacctgccctgttataaaacataaaacccaggtgaccattggataaaggagctttttaatccgttttcttagggtggacatcactgtctttttaaagctgttttaactgtcttaacgaaacgttttgataatttcgatgtggccacagattttcccataaagatatcatcaggttttgttttttctttctaatgtcaggaacagattaaaccttccatgtctctatgaaggtcacatattagtcaaacttcatcagtgtttggggaataaatgaattaatgagttttggactttcaccctgttatttattctttcactttcataaatgcacatctaatttaatcaatgaatcagaagaaagtgtaaaactcaatcaggactaactaggtggaacttcggaatctaatcaggtatcactttctgattggaagctggtgattgagaaggggagggtgtggttagaaacatcaataaaagctcctgagtttgcaaaggagagacccaaagccctggtgcctggaactactgcttgattctctgagagatcccagcaccctacaaactgagtccagatctggtaagtcaccacctccttaggaacacgcccatctgatctgcagccagccagtcagggatggtgacacacagcccaaagtggcacagagaatttcctgtctgttttttcaatttaacagatgtaggttttgatttttcctctaaatatagtattcacttcatccctcagattttgatttctgcttcatttttctcatttcaaaattcttattgaagcagttttttaaaaaagatattaaaaatttacagttggatgaatttttatgtcttgacatgtgaagttctttgtttctgtgcccttcagctacagttcacacacttagttgtattgtgattttctcgagtcttgttctgaacatgggatttatctctgcccttagactctgtccctaagtgggtgattgtgagtatgtagaagggatgagtattggatccttcatctgagacttagtgtttccacccgcaccttccaagtgctctagaatactgccacactgcttttagagtttctcttataatttttcaaaataaaaacaagtggcattgattttaaggagtcacttcagtcttccccaagcatgctaattgtgtaaactgagaatgcaggctgtgtggggccacaggacagtcattctcattgtttttgggtggtaagtaacaaaaaaatttccctcaaaaaggtggagcttagctttcaggatcctgagtgacagatcccagtaatcctgagtttcagtggagcaatgtatagaaattaatgggccactggccacctcgtcccctccttggtgtttggaagacattctttgtggtagtcacaggggcacagatacagatttgtggccaccaagtgcagaatggaactggggggaattgagggcttttccacctccaccagagcaatgagattagcaataggagaagatgaggtgatcatatttggcctgagagtgatgccttttctctggatttgtcctctagagttttcccttgcagattcatcaagatgagcatcagggccccacccagactcctggagctggcaaggcagaggctgctgagggaccaggccttggccatctccaccatggaggagctgcccagggagctcttccccacactgttcatggaggccttcagcaggagacgctgtgaaaccctgaaaacaatggtgcaggcctggcctttcacccgcctccctctagg

SEQ ID NO: 435 - DNA, 2300 bp, Homo sapien
gggggagctttggtattctggtggagattctgtgagtggagaaggggtcaggtcatcttctcagaggggctctgaaggatgctctgagtttgacagcagatgagcaccttgagaagaacaggtgacaggacatggtagaaatgcccccaagtgcgggattctcactggggtcctgggggtggtgctggaccttctgaattgggcaggaagggaaagtctgtcaaacagttcttttcaacatttagactattgaactccttaggggatcctctgagctcctcaccagaggggtctgtccatcatttgctgcctgaacacgggcaggttcctctccctagccaagtctcagggtcaccactttaaaaatgaggaatatagcaacatgccttagattcctcgtgagggagagctgagatcttggatgaatggtaccagtccctgctgtgccttgtgcatgctcaatcaacagagacactcaggatcacctttggtgctgagctcaccctcagcctcaggctcacaaagtgagggcaggtgaagtagaagccgcactgagcacgtttcagtttaactcgattgcacacatagcagggcattgatagtgaggtcagaaacgtggagaaagaacatttacagaaatattccatgatggagaacatccttcaaagtacttcagttttggaagccagtggcatctccgggctgtttgggtttcatatggaatgggagagaaaggcctggaggactttctggaggtgggggacgttcttgctactttgtgccctaaaatagcagaagaatgactgtgtgatcctgcttaggatgggagccatccctgaacttagcagatcttttaacatgaaatagagcttccaggttttgttggggaaatgtattgtacatttgcacacaatacaaccagatgtgtgcaccattcttaaagacaggaaggctgagtttctctctctctctttctttctttctttctttctttctttctttctttctttctttctttctttctttctttcttttctttctttctttcatttccttccttccctccctccctccctccttccctccctccctccctccctcccttccttccttccttcctccctcccttccttccttccttcctctggcatctgccccagctcacattctcagattccatcttcccaggctgattttccgaggcgagcccatcatttttgggagtaaacacgctttcccttgtagtagaggccaagactgtatctgcctcctctgccctcaaagacaatgttgtgtttgaagagtctgcactgtctcttttgtaattattccctttttaatttttaaactcaatctagacagagtctttcaatccttctgtggagatgcccacaaaatacccaccatgttttatgctgtcttggttccttcccagggttctactagaacacccggtcccatcctgcccagccgccacctcactttgtcattctgtcctgatttccttcagtgaagccttgaccttagtcttgtgatcaatcacaccctccgtggttcccttttcaacctgaacccacatatgacctgccctgttataaaacataaaacccaggtgaccattggataaaggagctttttaatccgttttcttagggtggacatcactgtctttttaaagctgttttaactgtcttaacgaaacgttttgataatttcgatgtggccacagattttcccataaagatatcatcaggttttgttttttctttctaatgtcaggaacagattaaaccttccatgtctctatgaaggtcacatattagtcaaacttcatcagtgtttggggaataaatgaattaatgagttttggactttcaccctgttatttattctttcactttcataaatgcacatctaatttaatcaatgaatcagaagaaagtgtaaaactcaatcaggactaactaggtggaacttcggaatctaatcaggtatcactttctgattggaagctggtgattgagaaggggagggtgtggttagaaacatcaataaaagctcctgagtttgcaaaggagagacccaaagccctggtgcctggaactactgcttgattctctgagagatcccagcaccctacaaactgagtccagatctggtaagtcaccacctccttaggaacacgcccatctgatctgcagccagccagtcagggatggtgacacacagcccaaagtggcacagagaatttcctgtctgttttttcaatttaacagatgtaggttttgatttttcctcta

SEQ ID NO: 436 - DNA, 2300 bp, Homo sapien; identical to SEQ ID NO: 430

SEQ ID NO: 437 - DNA, 2300 bp, Homo sapien; identical to SEQ ID NO: 432

SEQ ID NO: 438 - DNA, 2300 bp, Homo sapien
gagactggatatcactatgttttccaggctggtcttgaactcctgaccctgtgatccacctgccttggcctcccaaagtgccaggattacaggcgtgagccacctcacccagccttcttgacattttaaatacatattttgtgattttgtgtgcccttaaattatagttcatagactttggggtattgtgattttacaagttaggttttcctttttactaaaagttttttttgagacagggtttcaccctgccgaccaggccggagtgcagtggggcaatcccttctcactgcaacctctgcttcccgggttcaagtgattctcaggcctcaatcttccaagtaactgggatgacaggtgcatgccaccacgcccagctaatttttgtgggtttttttttagtagagacggggtgtcaccatggtggccaggctagtctccaactcctgacctcaggtgatacacccgctgcagcctctcaaagtgctgggataacaggtgtgaaccaccgcacccagcccctttaataaaagttttaaaacattctatgtaatatatatatatagagagagagagacatagtctcactctgtcgcccaggctgcagtggagtggctcaatctcagctcactgctacatctgcctcccaggttcaagtgattctccagcttcagcctcccaagtagctgggattacaggtgtgtgccaccatgcccagctaatttttgtatttttagtagagatgaggtttcaccatattggtcaggcttgtcttaagagtgatagctttgttctgaacatgtgatccatttgttcccttatgctctatccaaagtggttctttgttttttgagcttggagtttcattcatgtcgcccaggctggagtgcagtggcacaatctcagctcactgtaacctccgcctcccgggttcaagtgattctccttcctcagcctcccaagtagctgggattacaggtgtgtaccaccatgcccagctaatttttttgtatttttagtacagacagggtttcaccatgttggccaggctggtcttgaactcctgacctcaaatgatctgcctgcctcggcctctcaaagtgctgggattacaggcataagtcaccatgcccagccaaagtggttcatttttaatatgtgtaagaagtgtgtatggaaacatctctgtcttgcgaatgatccataacattgtcacatagctttcaaagtttcccactgaaattttaaataatgaggccggagcagaggctcatgcctgtaatcccagcactttgggaggccaaggtgggtggattgcttgagtctaggagttcaagaccagcctgggcaacatagggaaacccattgtctttacaaaacatcaaaaactaaaaggttagctgggcatggtgatgcatgcctgtggtcccagctacttgggaggctgagatggaagaatcctctgagcctgggaggtccaggctgcactgagctgagattgcaccactgcactccagcctgggtgacagagcaagaccctggcaaaaaaaagaacaaagggagggagggagggagggagggatgagggaaagaaggaaagaagaaagggagagagaaagagaaagaaagtaagcttaaataatgaaaagaaaacaaaacaaatagaacccattctagggatgccccatgaatgttcccaaccagcttatttgcaggaactgagaatgtaggcatgtaggcttttgacactcccattcccattgttttagaaccttgagtaattagaaatttcccccaaaggtgggagggattagctttcaggttcctccatatttactactcactggatgagcactggatagaaaggaagggctagtggtggccctgcctcctcactgcttgggagatgcttatgctgatgcagcagaggcagaagcctggctttgtggccactgagtacagagtagaattggagtaaactgagggctctttcaccattgccagagcaatgactttggccctgggagatgagattgcatgggcttggcctgagagtgatgccttttctctggatttgtcctctggaacttttctttgcagattcaggaagatgagcatccggactccacccagactcctggagctggcggggcggagcctgctgagggacgaggccttggccatctccaccctggaggagctgcccacggaactttttcccccattgttcatggaggccttcagcaggagacactgtgaggccctgaagctgatggtgcaggcctggcctttcctccgcc

SEQ ID NO: 439 - DNA, 2300 bp, Homo sapien
ttttaaattttgaaaagacctcctcttcatagtatctggggacccaggctaagaagtccccagagagatcaagtggcttgtgaaagattctgtggctagtggtggggccaggaccagacccagggtcttgattcatataggtcagtgctccagccaaccagaccacttggcagggagggcttgtgtacacacccagacatacagacacgcgggcatgcacgtgcaagatggcagcccaaccaaatgcgggtgtcatgaaaccatgatgctaagggctcaaaccagtaataggttcccctcagtacaggagggagcaggcagaaccaagcctgagattggcagagtgcaacagttcggttcaggctgcttttgcagagttgcaagggtgggagatgtgtttattctgccacctgcctgcactttgtgtgactcttcaataatttatacatcatttatgtaggcagaagcattttcatccactctgggagcattcagaccactcctcccgacacctgcctcttcaagagcatgagactggggtggggaagctgagcccttgaagttggggatggcaatggcaaattgggcaccctgggagagtggagacagagacggagaactgagggaggtctggcttagtggcctggaatgtaagtaggggaaaagctgcaggactccaggtgcctcaaagcttccccctgggtctcccccgcctcttccccagggctcctgcaaatatgctcatctgttgagcccttggctccatcccaggggatcagttttttcatcccatggctcagaggcatcaagtcggcctgtacctttggaagaaggccgagggcttagctttatggcttcagaatccgaggctccaccaatccccagcatggccaggggccagggaagggtctctgggagcctgctgcccaacagctgttccctgggttattttggtctagtgggagtctgtcaattctagggcatttggaccaaaatagccaacagcgggacaatctcttggtagctctgtggggacccctccccatatagaagtttctagaatgaggtgggacagaaagaaaggagtttggcatcggggtggtgaagagggaattttcctgccagtgtcagaggctgacatcagcatttcctcactgtcctttcatctcagccttggcacgttcctgactgcctccctaggctatccaaggtggggttttgagggggagagaggaaaagataatttttgaactttgttcttgacttcttggtcctcccccaaagctgatgagatatatattacctttttccatttcacaaatggagctaccaggtccacagaggcagaggtactggtctgaggccacacagcttggaagccaggcctggtgactccaggcctcagagcctcagcagctggacctctcagaccagcagctgatccttgcatggatgccagttccatccagaagttcggggccggcatggaaagtgctgactggccctgcaggccacagcgggggccctggcagccacttgcctcgctcaccctccagcctaagatggttcaagtgcaggtgggggagggaagagggaagaccagtcactcactctctccccttggaaccccgcccaaattcagaccagcagaccctggcgcggcacccgagaacctgcagggattgcccccggagcagagtcagagtgacccaggtcccactccctttggcgacatagggtggcgtgcagggagcgtgctttggcaccaggcgggcgcgagggggcagggcgcacgcccgggacacgccttagggaaaccgctcctgggcttggtagctgaacttagacgtcgagtgcagcccgcccggtgcgcgcggcgtcttactgccagatctcggaaatcagctgccagggtggggccgcgttttggcgacggccactcggccacccctgccgctcccgcctctcccaagagatttttctagcgggttaatttcctgtccgggtaaaccctttggtgagtccctcgcccctccctccccgcccctcccctctccatccctgctgtcccggctccccagtccgtccgcgccgcgctccatcgcccccgcacgcccgggcgcacgccctccccgcccgggccgccctctggctccccgcgcccggcagccagtgcctcaccgcgccgtcccgcgccagggctcgctccgagagccgcttccttctcgccgcggccggcgcgggccccccggccatgcgcccccgagccccagcctgcgccgccgcggcgctcgggctct

SEQ ID NO: 440 - DNA, 2300 bp, Homo sapien
catcattcatggccatggctttctgagcttaagctgtttgccaagaatggagccacataccctccttctttccctcttcccctcagctgagcagggtctcatgcttccagatcccctgtgtttcacttcagctcctttagctaaccgagtctcgctgcccaaggcccatattccttctctcatgagctgctggctctatctggtccaggagggtgagttctttcttccctctggtcttcaggttccccctcccaagacccagcttttctctctaggttttcagaccaacagcacccagagccgatccactaactccttcatcctggcccctctccccaccccaggacccccagctgaatgcaattccttattacctcccactcctccatcctgatcaaaaggtcatgtgaccaaccttctagattctagacacatccgggggtgtgggatagaaggcaggtgtccttgaatcatgacctagcctcagcatccctctaaattagttgcatgtaacccaatctcccccacctaggcttcactgtgtttcaatctttttgaataaagcgggccatctttctttctgtgtgtgaccttggagttacacataagcagaatagatgtgcatctattctccatctaacaggctcaacagacaatgcactattcctcctgtcaacagacattattgacactagagtcataaaatgcatctccaagatggggaagtcagttcaagaaagagtatctgtatcacgagttttctctttacatttccaactccttggctctaggggtgttgccgctacccctcatcttctaggttcaggtgctcagctcctgtttgtagccccaggacaagacgttacctgggagatctttagaaatgcagaatctctccctatcccacaacagaattgcacctgcataaccagtgccccaggtagatctggctgagaagctatgatgaagggcaaggtttgccaaatgttcatggggacaagttctccagcgacactggtttaaaataggaattccgaaaaggtctgattaatgagtttggggtggaacccaggaaactgggcatttatttaaaacaatctctcctgtgattcttagaaagtaaatttataatggggaggggtcaaagataagcatctgaaaacaattttcacgcaatgtggagctttgagacagcgttagtcttcaggttcttttgttgaatggaatttgtggcatctgggagtggagcagagaccacttcccaaactcctgttcttatttttttaaattccagcaattcagaaggaattaaagtaaaagacgtaagttctctggttgctgatatctggtacctgagatcaaggcaagatcgcttaaaccagtaaagtgaggattatgggagcaaactcaggaataaagagggtgaaccaggcctggaaggggacacaggtttggcgaccagacgggtcaccgcttggcccggcctaatccaactgcgcacgtcggtgggccacagcatcgcagcgctggatccccgggtcggcagaggcggatggagttcagcctctttttcaaaactgccaaagccacccggtctgccaaactcccccaccagccagctctggggcagccccccggagcccgcccgctccggtccccgggacaagggcgcaattgaccagcgcgggccgcctctggcccacccagatgacggccaactttttttgtttttaagccatcaaattcaatatttacaggaaaaaccccatgcttggttctaaaactactggccactcaagaaacagtttacttctcacttctgcccataacaagaaaaacatagacttgtgccttactcttaaaaaaataataataataaatataggttttttaaaatttatatataatttttaaaaccccgtttgttgcatgtggtccctttccctcctgttgttgagcagaataaaagcccattttgccagggcccgcagtcctggcggcccccgcagctgcggccctgtaactttaaacctggcctgagatcatcgttttggcgccggccaaacagagcccgagggcgggcctagcgcgcccggacggagaccaccttgcggccgaccccgctcccccgcctcctcgggagagataaatgctgactccgctcggaaagttctcaactgcaaagtttgctgtccggctgcctagggtctgggaagctcgggcaccctccctctccggggctcctgctcccacccctccggcccccccaccgtcgcgctcctccaggctgggcctgtggc

SEQ ID NO: 441 - DNA, 2300 bp, Homo sapien
caactttttttgtttttaagccatcaaattcaatatttacaggaaaaaccccatgcttggttctaaaactactggccactcaagaaacagtttacttctcacttctgcccataacaagaaaaacatagacttgtgccttactcttaaaaaaataataataataaatataggttttttaaaatttatatataatttttaaaaccccgtttgttgcatgtggtccctttccctcctgttgttgagcagaataaaagcccattttgccagggcccgcagtcctggcggcccccgcagctgcggccctgtaactttaaacctggcctgagatcatcgttttggcgccggccaaacagagcccgagggcgggcctagcgcgcccggacggagaccaccttgcggccgaccccgctcccccgcctcctcgggagagataaatgctgactccgctcggaaagttctcaactgcaaagtttgctgtccggctgcctagggtctgggaagctcgggcaccctccctctccggggctcctgctcccacccctccggcccccccaccgtcgcgctcctccaggctgggcctgtggccgcggtgctttttaattttcccccagctcagaatcttgctgctcggcccccaggagagcaacaactcaacgggaacgatgtggaaggtgtcagctctgctcttcgttttgggaagcgcgtcgctctgggtcctggcagaaggaggtaagacccagcgcaagtggcttcctgccgtcgctgatggggacgagcgagcagagacttgctggaatgcccgggcctggtattcgaggttgtccaggggagcgcgggggagctgagggtgtgtgcgtgtcaggcggctgagcgccggaggaggagaggcagcggcttagtcggtgccaggtcccaaagacgcagctgcgcgggtgtgccgggaggagccccggaatccacaggctgcgaggtgggcagcacagggggcctccctccgagtcggcagcaccagagagatcgggtggaaggttcacagtaggcagccccgcttgctggcagcagtggctggggtttccttcccatagagcggtgtgttggaggaatacgcacgcctcgggagaagctggcctcgtagaatcaggagggacgttcaggagggcttgggccaaggggagggttccccgccctgcggtggccctggtcccccttgggactacctagtctggcgccctgcctgttggacacactcagcaccccgtcactggactggaagaggcctcctttatcctctttagagaggatagtgtgtgtggaaaggatccaagtggaggcttccgaggagtgtgagtgcatgaggattgttacgcgttacgaacattgaggtttaagtgggtttgagccacgtgttcatcttgggcaacaacatcagtggctgaatgtctgttggtgactccttaggctttaaatattttgtatcccatgttggggtgggggcgtccacagcttccattaccctttgtcctctcctggagccttacctcttcccgctgggttgctgtgttggtggtctccattgacatctgtcaacattttgttttcttttcttgggtttttatttttatatttcctcaatagaacatatgttctgcaggacgcagctacatccagccatgattccccacggccaaaacaatgcctggcacatagtagttgctcactaaatgttggttgaaggaattgtaacctaactcgtgatctttggggctggaggttgctgagttatgctgtgaaaagtaaacattttccaaaaattgaggatcaaggtaggcctaggccctgaggaatacttcttggagagggagcggtttgcaggaggggtgcgcctaacctggcctcctacaatggtccacacagacaaaaatacccaatctcagggaaatgacagagttctgctctatgctgtgctgtctgcttcaaagggactgagcaactctttttataggggccgtgggttattcgtagcagtcctatctttggaacttctctttccactggaatatatacagttctgtattttcagttacatttcctttttggcgagacaatgtgcaaatgacaccgttttgtgctcaccagggcaaagcaagggagcgccctcacttcagcatctcagccctgctaaagaaaaagctgctgggtaacatcctttgtttttgcccagggaagctttagctgtgattcccttcagccggctcctgaatgtcaaaggtactcctaaaagatggcgttaaaaccgaaaa

SEQ ID NO: 442 - DNA, 2300 bp, Homo sapien
actactggctactctgttaaccaaccatctagtatccattctggttcaccgtgccacttctgatttaacatcctttattttccttttgcattctattgaatgccaggtggcccatagcttttctcttaaaatggtgatttctatgtcagtgttttgatggtggatggaacagtggggtctccctattttcttcatagataccccagataatttcgatgcatggatccagttggaaggtattaatctaggtaaggggtgcagaagtctgatgactttgctccacaacagagaatactactttgatgacaggcacgtggtatctcccagatctagggtctcttttccttgaatagcggaagaaataagcaaacccttgaggtttgatttatttccttattttcttaagccctgtcacttctcaaggccttaataaaatttactctaatgaggtgatcttcatttgtttactataaccgactcgatcatcagctatagcctcattcttttttttttttttttttttgatactgagtctcgctctgtcacccaggctggagagcagtggggcatcttggctcactgccagctccgcctcccgggttcacgccattctcctgcctcagcctccggagtagctgggactacaggcgcccgccaccacgcctggctaattttttgtatttttagtagagacggggtttcactgtgttagccaggatggtctcgatctcctgacctcgtgatccacccgcctcggcctcccaatgtgctgggattacaggctgagccaccgcgcccggcctagcctcattcttttacaataagataacatgatatatgttgatacaacacgttttctttcttttttgagatggagtctgtctctgtcgcccaggctggcgagcagtggggcgatcttggctcactgcaagctccgtctcctgggttcacgccattctcctgcctcagcctccggagtagctgggactacaggcacccgccacgtcggccggctaaatttttgtagttttagtagagacggggtttcaccgtgttagccaggatggtctcgatctcctgacctcgtgatccacctgccttggcctcccaaagtgctgggattacaggcgtgagccactgcgcccggccaacacgttttcttaagattaaacctgttacataaatgatcgttcataatttttggaagcacacctgcccttagtatcctgtttttccactgggtgctttctgcagatggccaacgtagccatcacattcggattcttcctgacttcattctcagaggattactttatcttgaagtgctgaaggctccaggcaccatctataacgacaactcccaactttccagctcatctccagcctgtgcttctccccgactcaactcattttcaaccacgtgctaggcctccacccttggatgtcgaagagccatctccagttccacccagttcatcttcatcagaacatctatgagtcgtcgtctctgcagtccatttgtttgcccgcttgggaacagcaagctccttaagggcaggactactaccgcgctctcagaggcgctgcactggaacatcgcgggcacagggcagcgttggtcactgctcctgggtactagggcagcaaataaacccagcagctgcgtctgtctgcctggagttggatctttttggtatagatccaaacgtagaagtataaggtctacgtttatgtacttgtcagatatttaatgacctccaacgatagacatgcccccccaacacctccttcagtctttttgattctttgagaatctttgaaccacgcaggatcctagccctagggtgcggtcggacttgccgcgacgccagccgccggggttccttcccgaggcgccgccatgggatccgcggtgacctacgaggggcggctgggtggtggccattgggcgacggcgcagggtcaagggccgggctctgggatcgtggggagaccgggggtcccggagccccccagccccgcaggccactgcctcgccgcccgacgtcacttccgactggagtcaagatggcggcggcgcggccgcgggcgccggggccggcgaaacagcggcggcggcggcggccctcggtgctctgaggcgctggcgcggcgggcgcgggtaaggagtggcgcgggtgggcggcctctgggctcgcgccgggacgctggtccctccccccgaggagcgcggcggcgacggcggcggcgacacgctggggacccggcgccgcagggatggccgggtcggcggacgcgcc

SEQ ID NO: 443 - DNA, 2300 bp, Homo sapien
atttactattttcatgtcttctgagtagcttttcatgttatttttaatactcatgcagaaaaaaaaccaaaacagcggacttctactagaaaactccataatggggagtggaagaggaggaggttgatggttgggggaaaatcgtcaaacttgcatgacgatgggtagctaagggagtttccagatgatgagggacatcacctgactgtccttaccacagataactgccgccctgtgtctagggcttcacgctttgtgcgctgagcaccagctatgctgtcacctatggttacaacatttggttagaggcctggggtggtggtccatctctctctttttgaagctacaagtttctagttagagctataaaaaccacctttatggagtgtctgaaagctgtggactccattactgaaaacaatacttagcttccattaaagcagagtttctcaacctctgcacttactgacatttgggtgagagaattctctgttgtggaggacgatcctgtacactgtaggatgttcagcagcatccctgtcctctatcagggagatgccagtagcacctccttccagtgtgacagccagtaaaatctccagacatttccaaatagcacttgaaccgctgcagtgaaggaaggctcatctaactgtatggttgaattattgaaacagattattgaatctctttaagaactgtaaggatagactagatggtttacaccttgaagccaagaagtggacttcaggtctgtccacgttcctttccacctttggttttgtgactttattgaatggtcagtttcagcacttttgcttcggcatcagttttgtggcatgaggtaaaacaatgtgaggtatcctggagatcataaaggagttttcatgacgtggaatcagcattcttagtatgcagattaaattatgaaatttgaataaatttgcatagagttgatgcgtggtaaataatttaagcatatagaccattatgctgaacagcgcagaaacaactgtcttctagaaaagcaacttggtccagcaaccccttgaagattgatggtagaggctatgctgtagtttttccgaaacctgtttttttgaaaacaaccaatttgaggttatgcacagaaatggtgagtttgccctgaggcaataaggcttacttttgaagtgcttacctaactttaacttaatacattataatttaaagatagttcattgatctttgtggaaaacatgcagcattaatgcagctttcctctagggggaaaagtataagttgccaaatccttatttgtaatctttctaagtgtagatagtattgattgaatttttattgtggcatacgtaatctttagtcggaatgtattgataaataaaacgtgaaaagagatgtgcttttggagctacatttggtaggggtggttttctgaattacagaacatctgtataatttcactggaatgaatgcatgtgtcgtttaaatattctttcttaaagagaatgcctttcattccccacccccaccttcctgaggcatgaattagagttattgtatgtagtaaatctggctcatttggaatgaaatatgcttacagtatttttcttagtactgtatagtatttattcttagagtcttggttcatgtcatgcctatactgtgttttcatttattagtcctttggaacatgcaataaaggagattttactgaatacttattattttccagccattttggtgaaaagaatattttgtagctcttgcaataaatcatactctgggttttgctttgaaagagctgaattacttcttggcacagcttgtctgaaatatgtaaagctaagtgcaagtgttagtttgattatagggggcagtctgtctggaaattggtaaaacccacacattttatatgtgcttatatgtagttctattaagacctatgttaaactctggtgggataattccgtggcactttcacataatttaaattatgccatgtaagagtcactaaacccttatatacttcagtatgaatcctgtacattgcccaagaccttgttaagagaatgtaaattaaatataaattggagtatcagtgtaaaagtgacattctaaatgttcctcactctgcgaggcttattttttagggactttgctataattctgaaagacttagttttacagtacatctgaaagtaggagttttcagaagtatggctcttgggataaatttagattcttaattgtgaagctctgttaccacttgttagaaggcaggtcagctcacctgcttgggg

SEQ ID NO: 444 - DNA, 2300 bp, Homo sapien
tcatttcaaatattagttgataccacttcaatatgtgacttataacaaaaaaatagagaaagtatacatttggaatttacacaatctagaaacagtttactttaacataagcctgttctttcaacagattagttcatcagaatgccaaaaggcgttcttgatggctgttttaatttattaatatatattaaagtaagttttttggttagatttaactggttcaagaagggaaatcatgtattggttcaaaaataagaaaaaggcagattttagccttcttaggggtgggtgagagccaaggaaacagctgccttgttttaatttaaagaatttagaatatttttaaatttggactgtgtagacagtgagagttctgcagagaattaaacgaagtaatattcacttttgggggctttatctagactagaaggtatgttgaagtgaggaactattttgtttctaaaccgtaggtggaatctccctccccgcaaaaaaaaaaaaaaaaaaaagaaacaaaaaacaaaaaggatcactctcttggataaccattgtgcaatgatccaaatcaggaagctaacagcaacacattattttactagctaatatgtacaccttactcaggttctgtcaattgttccaatcatgtctttgtaggaaaagaaaacgtttccacattcagttgttatgtcttatgtgtttggctggtaccttagtctttgtcttttataacctttcagttttgagaactggttggttattttgtagaatgtcccagagtttgagcttctcttatggtttcatcatgattagattcgacgtatgcattttgggcagaaatctaccagaagtgatgctctgttttctgtgcatcgtatcaggagacatatgatgttggtatgtcttattacaaaagtgttgttttttttcttttgtaattaataaatattttatggggagatattctgaggctatgtgttttgttactcctcaaacttttacctacttttagcatccatttatgattcttgcctgaattaatcattactgtgatgattgccaaatggcgcttttctaattccaacatttcttttttactgattagttgggatctcctttaaggaagagctttcctttttatttacttgttcattccttcctttcttcattcattcacatgaggctggactcacggattctcattttattcagtgggttttagatagaattttacttgtattgatacccttgtaacttttttaacagatcatttgttgtgagagaaaccaataggctgtttccccaaattctaggggtgtgaactttgcactcagtggatcttttcttcgggatcttgttctgggtggaatcaatttgatggtggccctcactacttccagtcatacgtggcttaagaatgtgatggtttaggagcataatacatgggagatacttcctgctgtatttaaaagttaaaatgtggaagtttgatgtccggtccgaagggcgaggcacggacctccctggaccagagcaggttggtggccccgggcggcctcccgttggcggctctgggatagaaaccgcggcgcatttgtaagtgcttgcgcgtggttcctcctcgttgtcctgttgaagttgctcttggtctggaacgcgcgctagtcgttgtctttcagcactccgctttccacaccgcacgcttttcagttatgctttacatttctcctcgacttagatttcgtgagcaaaatgggcccatgttttattttttctcgtgcgtgggccgtcgtgaggctttaaacaggaaactgggacagcacccgggctccgctacccgtcaccgggccttccgcgcccctcgccccacgccgcgggtgcggtcctccctccagcagagggttccgggcgccggcgcggcccgcacggggccgggagcccttcctgccggccgggtgcgcgcggcgccgccgacagctgtttgccatcggcgccgctcccgcccgcgtcccggtgcgcgccccgcccccgccaacaaccgccgctctgattggcccggcgcttgtctcttctctccccgcagccaatcgcgccgggcgaggagctcctggtctggtacaatggggaagacaaccctgagatagcagctgcgattgaggaagagcgagccagcgcccggagcaagcggagctcccccaagagccggaaaggtaggagccccccggcccgcccgcccggccccggcgccacgcccgcccaggacgccgccctgccgccctcgctgctgctggcccgaccgcgag

SEQ ID NO: 445 - DNA, 2300 bp, Homo sapien
cattcttccctccccacagcccctgacaaacaccaatctgcttcctgtttcatggatttatttattctggatatttcatataaattgaatcgtataatatgtgaccttctatgtcgggcttctttcaactaacataatgttttggagcttcatccacgtagtagtagcatgtatcagtactcttcacggctgagtaatattccattgcatactgcaatttgttcatccaatcatctgttgatggacatttgggttatttctgccttctggctactaatgaacagtgctgctatgaacattcatgtacaaatttttgtttggatatttgttttggacatatacctaggagtggatttgctgggtcgtatggtaatcctatgtttaactgttcaaggaactgctaatatgttttccacaatggctgcaccacggcatcccccttttcaagacccacacagctctgtagttttgatgctctccccataacgtaactgaaagactgcaaagaactgaatcctggtttgcagatacactaagcagttctaagtgccttggttggtccagttggtaagaacttgtgttaatgaggttaaggtcagggttcgatccccgaactgacccattagctgagcagagcggacagagtgaagaattgtgtcttcctgccacatgctccaccatcaaatcctgccctcttgcaaaagcttgttagtggtcacaggggaatggagcaagactgtttttatggttccacagaaaaggggggagaaatctatcatccaaggcctcctgaaggcgcagcaggaggaacttgcaatcagatgattactttcttccagtcccgctgtcacctggtttctgcgggccccttaagtaaattgcttaaccctatgcagagcctcagtttccttatccctaaaatgggaataataatcctcactcacaagagataagaatgcatataaaagcactctacacgcagtttttgcttggttcttatgggcttcctgtaagaacctgaagggtgggcagcctcatttttcctcgcagcaccccactggcttctgcaatctgctctttgctgctctccggaggttgactgagctggaatgatggcgccctgttgaccagagggttgctggctgttttaaattgtcctatttgcatggaatgaagtttgctatggtaacaaggtctggtggctggaatccagggccccagtgaaaaatgcaaagcctgtggtctgggagagaaagaggagctggagagggcatatcaacgtcaggttacctcagttcttctgtgaagaggggatgggtaaactgaggcagcagggctcaactcttctgctcccagtagaagaaagggaagaagccccatcgacgccttccttcttatctctcaacctcatctctgtccccgccaatattcagcccggctaagaagcttaggagctggctaaggctgctcctccacctggatgcacacacagggctagggctgtggagaggcgggagcaccagcggcccacgccgaggaagataggcgctccctcctggggtgggcagcgcaggtctggcctgcgggtggggggtggagagtgagaggcacgcggggcaccagctcagctcccctctggggatttcgtactcgcagtttaaggaaccggtggagcacgaactccactcctgagctggcgcaagcgtctcccttccatggagatccaccccggctcccctctgaggccccctttccaagcaccctctcttccgagcacccagcacctccccaaccttagcacggctcggggcaccagttctccagggcgggggctgccccaccgctcaagggaggggacagagggccggcctcggtccaggcgacccctgcccctcgccaggggcgccaccttggccccctcccgactgccgtccgccgcctccgcccccccggggggtgtgtctccgaagtacgggggcgcgggaggccaagggtgcccccagcctccgaccgagaccccctcccgagccggcggcgaatggtaggctccatttaaagagtgcctggtggcgcgcggtgtccttcttggagcagctctcggcgcccgcccgccggggtctcggcgatcgctgctcctcctcctccttctcctcctcttttttctcctccgcctcctccccccgccgcctcgccaccgccgcggctagggctggaggcgccgctgtcattcctgtgccggaggaaccggcgctgccggtgcctgggggtcggggcgcgggcgaagccgggccgcggaggac

SEQ ID NO: 446 - DNA, 2300 bp, Homo sapien
tgttatggagttaagaggaaagcacatgtctctatcaaaagtataattcatgtacttccagaaatacgtgaaagactatgtttctttgcggaagtgaaaagtcttcctaagtgtttaatatgccaagagtgtttaagtcaaaataatataacataaatgcccttatgaaataaaccacagtagcccctgctcaacccagctcactcatttatgttcccaggcaggtccctgaaggtaactcagacagtcctggaccagattctccaggatgcaggggctggcaagggcattcctagcttctccgctctcgggtgctcagagtgatcattcttttgttctgctctgtctgttatctcagtaaaggagaggaattaggggattcccagcatctctggtcacttggtgtggtgtcagtttccttcctcctggaaaagtggtgtgggtacttttcttccacagctgggagcacccagcacttcccatgccactctgccgtcctctggcgcagttaaaagtgcactttgggaggccgaggctggcgcatcaccagatcaggagttcgagaccagcctgaccaacatggcgaaaccctgtctctactaaaaatacaaaaattagccgggcatggtggcgggcacctgtaatcccagctactcaggaggctgaggcaggagaatcgcttgaacccgggaggcggaagttgcagtgagccaagatcacaccaccgcactccaggctgggtgacaaagcgagactctgtctcaaaaaaaaaaaaaaaaaaaaaagtgccagctagacagggcaggggttctaaggcagcctccgcagctgggccagtttccatcattgggaaggtgaggatgcgggggcggggggaagctgggaaggccatgatagttggtggccaggccactgtggttgctgagagccagggcttctgacccatgggcaggaaactgctcctaaaaggttttgtagacttaagggaaagtaattaggttctcacagcttgttggacagccataggccagtgacctagaaatttgcacatctcaggcctgggccagtgggagcctcagattatagagccaagcctgggcagggtaaggttgctagcatgctgcctacaaggggaggctgggggctccatgagtgtgtgactgactcctcacctggctgtgtggcctcggctcccgcgtgtctacaacaggggggaactggacctgcctcctggggctgtaaggagataattagtctttctaaacagcatcgtaatccccagatcaaagggggctcagagctgcacacttacttcacaggagcactgccagcctgaacacccactccagcgggtgggttctgttgtgcagaccctccaaggtgccacttcctacagggtttgcctggccttgtcactgttcccccacccactcccagggtccaggctctggcctcccctgccaatggctgccatagttggagagttcatgggcagcactgataatggacagtggggaattactaatgcctaactcatagatggggaaactgaggctggggaagtgaggtgaagtcacagggcctcccaccagatctcagccccctcgcgatctcccccaccagacggtgggtgcactcagcattcccctcacttagaggatggccggtcacacgcaaagatgagcgaaggaaaggtcccggggctgctcccctgcccgcccactccttctgacctctcccggtcagctgtggggacctcggctctcggcaaggctgtcacagggtgtcaggagaggagagagacacagcaaagtggggtgccaggcagaggccaggggctttcaaagaccggggctcgagttccgtcacagccacccctgtgacatcggccgtctttctgaccctccgtgtccccgggaatgaccgcgtcggggatgcaccgagtggcgggggccgggcgcacaacggggcgacgcggcggcgctccccgggcactggggccagtctgggcgccgcggcggggcgggggcggggcgggggcggggcgagcctcggcagtcgccagcccggaaggagcgggaggaggagccgcgggactgagagccgttcccacgtgagaggctccgcggccgaattcctcgcgtgcagcaggcgcggaccgcccggcgtccggccggactgagagccctggtccggcgcgcgccgccggccgggcgggaggcgggggcgggctcggctgcgccccgatgcggcggcgacctccgggtctgtgagcccggcgcgcgccgtcggagcccctc

SEQ ID NO: 447 - DNA, 2300 bp, Homo sapien
tccatttggcatttctcttaaccccgagctcagaaagccacgtggccttattctgcctcttcacatcctctacctttttaaaattctgtattattttattacgatgatcatttgggttcttatcacttcttgcccctcccctttacatgaaacccgcggttgaggggactggggcgcttgtgtgtctttgtctttgtgtaccggctcccagcactgtacccttctggggaccagttgtgtcgtgaacgaaacaggatgccttgtcttcatgggtcctcccagcaacccaatggggaagtgcagttgctaatcccatccacagatggggaaactggtccttagaacagttcagtaactgcccaaagccacacagccagtggatgtcccaaccgggaatttatcccagaccgtagacctcagcagtatggaaagacttcacgttgctcttaagaaagtagacccacattatggcggggcgcagtggctcacacctgtaatcccagcactttgggaggccgaggcgggcggatcacgaggtcaggagatcgagaccatcctggctaacacggtgaaaccccgtctctactaaaaatacaaaaattagccgggcgtgttggcgggcgcctgtagtcccagctacttgggaggctgaggcaggagagtgtcatgaacctgggaggcggagcttgcagtgaaccgagatcgtgccactgcactccagcctgggcgacagagcgagactcagtctcaaaaaaaaaacaaaaaaaaagaaagtagacccacattgtttctggtctctttttcctttaaatttttatccttaaaaaaaaagtttgtcctctccttgacattccttgttttaagcaacgcaagcatttgcttatcttcctgctgttagcaatttcagtgggaggtctgctctctgtgagccgttctgagaagaacttgtgctgggactggatgagatgcaatctccactgcttggaattaagaatggttttacgaagctgcccactaggacccattggtgggtttcgtgtgagcatacttctgctagcagggcgagggcaggatggaggcaatggagggcttggttcttctggacaatcagggtgaaagccactgctgagatccatttccctgaggagtctcaacctgtggtccggcaccctctgccctccaccctgtgttgtggtccagtgtgatggactgaactttatccttctgccaaggctggtggcacgccatagtgggtacagggcaccagttttggaatcaaacacacactgatttgaatttgtcagctctgctccttactagctatatgcccctaagcaagttatttaatgtcccaagcctcagtttacccttctgtaaaatggaaattgtattacccacctcagagttgttggaaattggacaggaatctgtgtgattagcatcctttccccctgtggggcctgatgctacccatgccataaggaaggagggggaattcctattcctctagactccaaaggacttgatgtatatgtgtttaaaatatatataatacattttcttttatttttgaagtttgaaatattgggatttactcaaacaggtgactccaaagggctgctagctgcttatttggctttctgagtcatcacgaaatctccataatgggcaccaagcaccatttatgttctttgtaatactccagttgagtgaactggacaatttgccaggaccctccagccattctggaggaagaagagtttgttcattttttaaatcatctcaagaggaaaatagcacccctggctctggggttagcctccctcatctgtaacacagcaagctgacaaaaatggaacgtcagcacatttgcatgtagacagattttagtcccagcagataagcacacccaacatgtcattaaacccggccgaagccatcgccctggggatcccgtgtttgctgtgagtcactaagggctgtaaacactccagagagacaggcatggttataaggggtgtgcgggcgtggagttattttaatggatttactctccgtgagtgcgtcttatgttgcgggtgccagatgagtgcctttcaagggagagggaaggtcaggcttgcctcctgttcacaaggacaacctctgtctcccttgtggcggcttctatgaaggtggggactccaggctttctctcgtctgctttttggatgccttcaagagaggccagttagaggatatcaattgtggcaattccccagagccctcatcagatggcattagcccgtcatgtgctgcag

SEQ ID NO: 448 - DNA, 2300 bp, Homo sapien
cccaccactttgggaggctgaggcgggcggatcacctgaggtcaggagtttgagaccagcctgaccaacatggtgaaaccctgtctctactaaaaatacaaactaattagccgggcgtggtggcgcatgcctgtaatcccagctacttgggagactgaggcaggagaatcgcttgaacccgggaggcggaggttgtactgagctgagatctcactactgcactccagcctgggtgacagaaagagactctgtctcaaaaaaaaacaaaaacaaaaaaacacacactggatatgcagcttctatgtcagggtcgagttttcttgtgggggaagaaattctgtcttcagacataaaggtaactcggggacttgagtttgtctgcctcttcccgctcccagctccccctcctaaaaaaaaaaaaaaaaaagcaactcacatttttctgtgccttaattatatgtttggttcacagactaaactgctgaaactctgtaagtgaagtaagggtgtttttctaatcagctgtgttcatttctagtcctgaaaggttgtggcctgatgccggggagacacagctgtgggggcccccgttggtgtcctacttggtttcagaagccatgcctgccacggcccctggagatgggatggaccattctggaattgcaggtctctctcgccttcgaataggcaggggtcctagggggacacgaatgaactgccccagagaggcggtctccagtgtggactgcctggtgtctgtgcatgggagatgggccaggggcaaggggcaggtggggaactgggcttgggcctccccataccccagactcctatgtgacccagctgagtcatggtgctgttcccggggccttggggttggctggcctttatttaggacaataaaacccaccattgtaatcttcccaggcagctgggatgataaacagagaagtgagcacttggaaggagggaaaagtgctttattcagcactttgtcaatatcagcaatatcagcccgcagcaaggccttctgcggatggcggcaccatcctgttctgggcagggcaggaggcctcttgcccgcctgccagctgatctgcattctgggcttccttccgagttacattcgttgggttttggggtcgcagtggccctgccacacattcagaacagcatcctgggacaaagtaccgcaggggacagcaccaggctgcacggaggctcatggcccacagctccctagctttctgttcttgggcaggctccttatcccttttgccttagtttccccatctgtcaagtaggactgaaactacccctgaggtctctgggaggttgcaggggatgtgtgcccagcatcaggagcacccctgcaggcctcgcagctatagatggtggaagtccagtgctggaggctgagttgggtctcctgtgaggcagtcccccgtggcccagtcctggtctttctcagcccaaggtaatttttcaattaactcaattggctggaaaccggggcgccctggagtgtgggaaaacgtcccaggccggaagggccctcccctctgcccccactcatttggggcttggcttccagagggaggatccagtttcacatcgggacaccaggatgtgatccccgtgcccctctgaaaaatcccagatggcgccttctggaagccctagcagtctccgcactggcggccagtctgtcctccctccctgccccctccccccaccccggctggctccccggcccggctccagctccggtggggagagcctcaaacactgctcgttagtgactttattgctaaacaatttagaaaggcagccctgccagttttcataagtgaaacatttaaagtatgcaaagcatattttatttcttcctggagcagctgctcaggcaggctggagagtaatcgggagtgagttatatggatttgtgagctgccccgcagcactttcaagctccacggcctcgagagcctcccaccaaagggcaagtgtccgctccggcccggaagacttgggcagcctgagcccaagacttgctctcctttcctgtcgcctccatggagtcaggcatgccctgtgatggcatcagcagctgtctgccagtgttgacggagggctcatgggtgccaggccgcttgctggggctttttatctgtcctcaggcattggcacagcagccctgggagatgaatactattgtgatcttcattctccacacaaggacagggaagtgacgtgccagggtcaaacaactacccaaggacagagccaggatttgaacc

SEQ ID NO: 449 - DNA, 2300 bp, Homo sapien
accacgttaacctccaggaaccaggagtctgtggtcccagggatcgtggagccccacccttagacacccccagggcttcctggaggaggcagaggacttattttgagttttctactcccagtgggaatctggcctgtctccagtttgccacatgaccttgccctctctgggactgtttcccacctgagaagtgaagggagttaaattaggacagtggtttttaaacttttgaggatcatgaccactttaagaatctaataagagcttttgacactttctctagaaaaaatacacaaaacttcacaacttttcactgtgttgggttggtgggtgggactctctggcccacccactttcagggctccatggactcgggggtaagaactctaaatgagttcatcttcgagaacattttcagccatgacatcttgtgtgaccatgggcatgatggcgtcctctctgggactggtcaccttatctacaaaataccaatgacaaaacccaccaaccccttaccaacccatcatcaccttatggatatcattttatttaccctcacaacatcaatgcaggatagacatgcttactcccattttaaagatggagaaggccgggtacgatggctcacacctgtaatcacagcactttgggaggccaaggcaggtggatcacctgacatcaggagttcgagaccagcctaaccaacatggtgaaaccctgtctctactaaaaatagaaaaattagtaggcgtggtggtgtgtgcctgtgatcccagctactcaggaggctgaggcaggagaattttttgaacccaggaggcggaggttgcagtgagccgagactgcatcattacactccagcccgggcgacaagaatgaaactccgtctgaaaaataaagtcggagaaaattagatgcagagaaatcatgagcataaagtcacactacaaaaaacctgacttcaaagtcagttgcctttccagtgtcccatgctgcctttgtgttaaaaacaagaacaatgacagcttctactactactatttatagaacactaggtgtgtcccagaccctgtgttaggggttttgcattctcctctcttttagtccctacaactccatgaggcaagcgcaattctccccgttttacagaggagaaaacggagacccagagtttcaaggtcccagagctaaaaagtaatagaaccagaacagcttcccgttttccgtgctgcgccgtgacccagacaatatctaaattttgtgccgtcctcagatttcagagtctaatccggctccagttcagggatggggcagtgacagattttataaaatgtctgaattccttttaaaatcatgctgttttattcaacttgggctcttacaataaatagctcaaaccaacagctgggaacgtatcgccaagctgcggccccatggggacacccttaatgaaaagagaacatttctgaagggcaggagcacattaattgtgggcatgcagatggagattgctgattatggatgggcccctctcgagtaggttaagtggggtgccccctttgcagctctccaccccaactcttgttgcaccattgatttgctgaccaaactcttgcttcagagaggagaggaggccattctagtcttcatcagtgacaaatctggcccagtggcatctgattcagagggctgtgggctccagctcctgcccgagagaaccgtcctgtaacaaggctgaggccggcccttgagggactgggagggggactgccccaggaccttttcatcctagaagggaggttgtcttgggccagaagtttccagttcaggagctccagctgggcagcctccaggtggactggggcagatgacccgctcacccagcactgctctgtcatccacacattcgactatgagacaaacactggtgagtgtgaactcagagcctgaaggggccctggacattcacagataagccacaccccaccctgccccccaggagctgaccgtccagtgaggcagctggccagatgcgtaaccatgaaccacaatgtgactggtgcagagatggggacttccaggggctttggacacagagaagggctcctgacccagcatgacatcttggaaggcttccgggagaccagacgtctctgcagagtccataggagttcactgggggaagagggtggggtagaggacaggcccggagacaagggggtcccagtggacccaagtggttctgggaggctgatgggcagagggaaggagagtgaagccaagctgcaagcccatcctgc

SEQ ID NO: 450 - DNA, 2300 bp, Homo sapien
gggtgagccctgggcagggttgcaaggggctggccggggaggggaatggggggtgaagagctcagtgcctccaggaaacggcccccaggaccccaagccccatgtgcgttgggggaggggaagtcagccagggccagtgcaggtgacccttgtggaccattcaaaggacttgcgattttactcctgcaaagagaagccacagagtgttgagcaggggagtgcacggtcacactgacattttaaaaggaccccctggtggtcctgggggatgcggaatagaagggaagcaaaggcaggaaacggggagcagccggggaaagtggcagaaacccacaccagagacgcctgcagcttagagctgggaaaggagagaagtggacagaggatgcactgaccagagtgaccgacagacaaggacgggctatcagcttgggagctgggtgacagagaagggcccctgggtgacggtgacagtgacagtgaaggggaacaactgagccattaagtatgacacgtctgtgacagccaggcagcgttaagaggacagctagaggctgagagaggaaagaggagctcagaaaagagctcagagcttagctgctcagaagagagtggagaatttgggagccctccctcacgggtgccttccagagccctggagatgggtaatacagagacaggagtgcctggagaaagaggggaaggggttaggagggaagaggagcccattgtatggcagcatgtaccccagcagggtggtcacgggatgctgaatgcatatccgggcatgaaggcaggaaggacagggaggacccacccaggaccctcagcaggagggtggcatgacaagctgtctctggctgctgccccaggagcagggtggagtggctttgcaagcccaccactttccctttcacatactgatggcttcgtggccccctgcacctcccacttagaccagcgctctcccacctgtcagacctggggcattttgcaaagtcccttgcaggtgggatgcggtgatcctcgttccttctgcaaggctgccactgtgtggcgagcagcggaatgacagccaggcacagtcacacattcaccggcttgaaaattcaagcacttgcgcacctgctgtatacgtggtacaggggtcatttctatgtggggcacaaggaaatctgagacctggcagtgcagtggtaagagagagggtttgtaatcagtcaaacatggactttaattctgactccaagatgagccactgtgtggctctaggcaaagttggagcatcccatctgcagagcgaggacggcagctttgccttcttcgcgcatgattaggacctgcctggcacacctgagtggacacccaacatccctgaagcaggaaaacagaccgcagagcactggggagggatgcgccgatcaggtgggccaagcccaggctttgtgggtctcggggatgctgtggaggcccccagggaaatgaggggggcttaggtggaggggcggggtccccagaggtgctgcctcctgccacacgtggcccttctgctccccgcccctgcgccttctcaccctcgctgcgtctgagtgtgggattctctcttcctgttcccttccgtttgtttctctgttgatccctttctgttcttgagtctcggtctttctctctctctctctctctctctgcctcttcctctttgttcttctctatctccctctgctcctttctctcagtgtctctctctctccttctctgtctctttctctctttgttctctctttctgtgtccctttctctctctctgtctccctcctccatccacctctttcaccatctctgccctttctgtctcattttttcccttttttcctcttgatctctcggctccatccctgtccatgtctgtctctgtggctctcttggtcctcccccaaccccattgcttttcctctctctgcatctccacccatttctgcccgtccgtctgtttctgccgcctttccccacccatccactctctggctatgtctcctccccagcctgtccaaagctgccgagctggaccatcactgggtggccaaggcctggctgaatgacattggcctgtcccagtactcccaggcctttcagaaccacctggttgatgggcggatgctgaattccctgatgaagcgagacctggagaagcacctgaacgtgtccaagaagttccaccaggtcagcatcctgctggggatcgagctgctgtaccaagtgaacttcagcagggaggtgaggaccagggcacagggtggggg

SEQ ID NO: 451 - DNA, 2300 bp, Homo sapien
tctgtaataggggaatatgactcataccgaccttgtagctttgttccaaaggttcagtgaggcaaattgtatgcagcctgcttgatacatagatgcccggcagtaactgagagcttctgcccctgccttcatctggaggcagaagaatctccatgcagtcaatttcctctggagtagctgcataggagtccccttctgtcagtttgctccagcgttctcattagcatttcaatggagaagaacaattccattacaaactcaaatagacttgaccctcaaacacatagaatgagagaaccttgtcacctgtcccacctcctcggctgacaggcttcccaagacattggcaatggaaaacatttattctctggtcactcagcaggccgctggaatgggggtggaaggacacattgagcttagatgagattctgtcccaccccaccctcaaaccatccctgaaatgtgagcccaaactccaggcactgggtcagctgagtgcccagaggcgtgggcctgtgtgcaatgggacccagcggggcctttgaggccacattctggctcctccgccatcatcgtgtgattttagacaagaaatttaccctctctgagccacggttttttcagcttgcaatggggatgatcactccttcttcccagggctttgcagagggtttgctgagccaccgtggtgaggagctgacagtgtgcccagcacgtagtgggtggccctcgagtactctttccttcccattcattttctccagcacagcatcttgtgcctctctgcccttgtaaatccttggttaatgggttgagactcaatgctcgggctggcccacctggtggaggctgactcccaacccccaaccttccttcctgcaccatgatgcctatttagtgcccagggttctctacattgactcaggagagtccagtgagatgccccattctccataacgttccctcatcaaaagttccccttctaacgtaccatttcctcgaggtctaagtgactagaaatacttaataggtcggttcaaagcttccaaagaccttggccctgtgcttggcttatgccctggagttttcgtgttttcatcttatccaaaggcctagatggggggatttcagccactgtggaaaaaataaggagggaggatattttggcacactggaggccaaggtcaccccgtattcctttgtctacagaaagacaaccactttctgtgcatagggtagcttgttaagaccagggctggccaggcacggtggctcacacttgtaatcacaccactttgggaggtcgaggccggtagatcacttgagcccaggagctggagactagcctgggcaacatggcaaaacccggtctctaccaaaaatacgaaaattagctgggtgtggtggcgtgcacctgtagtcccaactgcttgtgaggctgaggtgggaggatcacctgagcccagtaagccaagattgcaccactgcactccagcctgggcaacagagcgagaccctcgctcagaggaaaaaaaagatcagggctgcttactggactttatcgtacagatgaggaaactgaggcccagtaaggtgttttactcgcaccagaacatatggagggaatagctgagcaggaactccaaccacgtctgtgtccccaaagcctttggccacagtaagatgtaattgtagcaattactctttctattgttactcagagcttaatgtttatgtgtgtgtatatgtatgggtatgtatgggtatgtgtgtgtgtgtgtatatatgtgtatgtgtgtttgtatgtttgtgtatgtgtttatatgtgtgtatatgggtgtatgtgtatgtttgtgtatgagcgtgtttgtgtgtatatatctgtgtgtatgtgtgtttgtgtttgtatgtttgtgtctgtatgtctgtgtatatatgtgtttgtgtgtatgtgtatgtgtgtgttgtatgtgtatgtatgtgtatgtggtgtttgtgtatgtttatgtgcgtgtatatatgtgtgtatgtgcatgtgtgtgcttgtgtgtatatgtgtttgtgtatgtttgtgtatgggtgtgtgtgtgtgtgtgtttgtgtatgtgtttgtatatgtgtgtttgtatgtttgtatgtttatgtgggtatatgtgtgttgtgtatgtatgtgtagatggtgtttgtgtatgtgtgtatatatatatgtgcgtgtgtgtgcctgtgtgtgtatgtgtgtatatgtatgtgtgtatgtgcgtatttgtgtgtgtatttgtgtatgtgtctgtgtatttgtg

SEQ ID NO: 452 - DNA, 2300 bp, Homo sapien
accatgtaagtgccatttctgacaagttgggtgaacgttggtttcaaatcatcagctctgcattcaagtgccctgctacaattctggctcactctgtgggaataactgcctgcctgggcacgttgctgttgctgcctcccaaacggcagtttctggggtcccaggtcatccaggctggatgtggcttgggagagacctgtggcaccaggttggagggaggtctcacctctcctttctgagctgtggactgcagcttcaggaccctatggatgaggccgaatgtcatgaagataatggaatttggagtctcaacaaagccaagccacatgccagagattcaccacctggggcccaggatcagaagtgtgcccttaggaggccaaacatccacctgtctaccaactagacatttggtctcagacagcaagaaaggctgcgtttatgtcattagggggaacaccacggtcttcggcatgagagaggtgtaattctcaagttcatcagagctcggcttcccccatgagaggaaacaatttgccaggttgaagaacacacgctttgagggttctcagaggctgacacctgttgtgaatcttggaaactcaagccccagtgcaaacggccttgaaggaggtcgagcatcatggttccaacaagtgactcgctttgataacccgatgtgtaagcagaatcgcaatgcatccgtccttccctaatcatcacgtggctgtcatctggtcaatgaactgaggcccgaaggcttgagtcaaactggttttcaaggctgtgctcatgggatttatatgtttcttgagccctgttggaggctcttggcaggtctgaacattaaacatttcttttcttccttttgcacactgcttcaacctaaagagttggagcgaactagctctatatcatttctgtgttgtaaatgggaaattagctaccccataacttcccattgtctcctgagaggttacaaattgtgttacagatattagcaagtgttaatcctcacgatgtccctgggagggaaccagaagtatcgtagatgaagacatcgaggcacagagaggtgaggccactgggaagaagccacacagcataacagtggcaggtcaagaaaagggctggggttctccccaccaataccaaatgattttgctctgtggagtttgtgtctcggttaggacattggtgagctatgtcacctatgtttcaggtgacagggacatcacaacaaaggtttgttgggttaacaatgtcaagcatttccctgccccagaccccaaactcattgccacactccataccactgtcacggagtgcagatagtggggtttggaatctcagtaaagccaaaccacaggccagagattcaccatatggggccgtcggtcatccccgatcctgttgtcccaatagctttcattctggtgataggatatctgcatctcctagaaatgtggctgctaagccccactcctgcacggatcattcaccggctccccactcagcgtagccactcctgggtggatcggcaaacagctcttcaatacgtccacccccatgtgtcacagagcttttcaggtggaaggattttgcattctcccaagagagattcagtgagccaagtcaggacccaagttctcagtcaagggtaagatgctgtagccgagagttccccaacccccgccctgtccgacgtctcggcaagaggcagcacttcctgcacccggctctgccaatgcactgggcgctggggtgtggggttggggtcccccctgctcccgccggaagggtgttttagggaactgtgggcctcctcccaccttggcagctccgtttaaggctccagggactgcttggctgctccacagtgacggtcactctgaggtggagcctgtgtatcctggatggaggcagggccggacactgtgacaggtcctctgggcccatctccagctgaacaggaaagtccatggcccacccaagacaggtgggctggtgtcttctctctcctgggcgctgtggagctgaaaccgcagagtccatcgggattttgcccaggagcaagggacatcctcagcctgcggccgctatgtacagtgagaacgacacctggggccatctggcttctcttccttcctgggtctctcacgttgggtctggtggagccaccagttccttacacgttggtgacctccaggctgttgtagccttccagacggcactgttccagcctgctctgggggtcatcgtctccgcaatcttcgttttgaagagagccatagtcatca

SEQ ID NO: 453 - DNA, 2300 bp, Homo sapien
gaacatctgcctaggtgactgagtttgcaggatgtattagtttcctcccgctgctgtgacaaattgacccaaacttcatggcttagaacaacacagtgaactatcttcttacagttctggaggtcagatgtccaaaacggatctgcaaatgccttcccaccttcaaatcataaggcagacccaaacttgcctttttgtggatgccaagagctccttctggatgctctggctgacactccattcctttccttttctagctcctagaggctgcccacattccttggctactgacccttgtccagcaactgtatcattctgatctctacttctatcaccacatctccctctctaactctgaccctcccgcttccctcttgtaggaacccttttgacaacattggacccaccaggaaaatcaaggataacctccccgtcccaacatctttaacttgatcccatctgcaaagtcccttttgccacgtaaagtaaccagttctggggatcaggttgtgaacatctttgggcagccattattctgcctatcacagaagggggttcctagcttagtgatttagagcaagggccctgcaaagaccccagattcaaatactttgtcacttgctagcagatccaggtacctaacttctctgagtcttaacagcctcatctgaaaaactagaataatagaatcttccttctagggctgttttgaaaaccaaagaacacaatgtatgcagtgcacgtgaaacacagggttcaataaatggtagggaagattcagagaaactaaccatgtagagggagagggctgtggaggagaggaggataaggagaggcatgcttcctttggtagcttcttcagttttgcctgggcctcagctttgcctgagaatttcgtcagtctctccccagatcagccagggtgagcctgcttaaatggaacactctgaagatgatatcctgtgataaacaagacctgcccagttgagtctgcagcagagtggggcgggtctgggatgaccctggcatggaaaagtacagcagctctttgtcttcagattaggagctgggacagctgttctgacatgatcaccccccgcccccaccccaggcctctccaaagtccatcttgcagagtcaaatgaaaaccagattcctggtcttatctgagagctacgtgactgtttcctgtcactcctttggagcctgggaaggtccccacatgcattgtctaaactttgggatgaatacgcacagctcttaaatgggagcatattattataggtacctgcctacacaaagggtcctccctattcactaaaatcatgggttattatttagggctttcattcatccaacaaatgtttattccgcatttgcaggtggccaggcaaggtgaacattctctcagggtggagagtatgtgcagacaggaggaattatgctatgggagggagagcagaagctctggagtggatcatcttgggtctagatcctgatacttcccagctgtgttttcactgggcaaaatgacctcacctccttaagcctcagccttctcttctataaagtgggcataacaaataaccgcctcctaggttatgaggattaaatgagatggttcaggggatgtgggtggtaaccccgcccctggttcatagcaaggatgtgaggaatagcagttgctgtcatagacatggagactgtttccccaaatgccttcccacccccaaatcataaggcagacccaaacttgcctttttgtggacgccaaggttctgtcgagctgttagggtgcaagttaagaagccagaatggcgggctgaggggagaaatgcccgcatgttacaactctgcaggtgtacacacgtggacaccatatgtacccatgaattccgcctttggaagtgaacttgattgcagcctattttcgtctggaggcggtggattcccggtaggaggcgccttcagtcctcggctcgatcctgtgacgccagccagctgcctatcggcttctcagtgtttgaacttcaaagggctggacgctcacccaagaaggggaccccggcctgacctctctcggaattcaaaaaaatctaaggctcagagagggaatgggagctggctcttccctctgtgtttagcatccacgttttttggcggtctggctgaaaccagcccaccctagttcgggcgccagagcaacgcagttccgagggcagatctccaaggggcggaggcagagccgcgggtgagaggcttccgcgccgacttcgggtttgcactccccggagccagaa

SEQ ID NO: 454 - DNA, 2300 bp, Homo sapien
ataaggcagacccaaacttgcctttttgtggatgccaagagctccttctggatgctctggctgacactccattcctttccttttctagctcctagaggctgcccacattccttggctactgacccttgtccagcaactgtatcattctgatctctacttctatcaccacatctccctctctaactctgaccctcccgcttccctcttgtaggaacccttttgacaacattggacccaccaggaaaatcaaggataacctccccgtcccaacatctttaacttgatcccatctgcaaagtcccttttgccacgtaaagtaaccagttctggggatcaggttgtgaacatctttgggcagccattattctgcctatcacagaagggggttcctagcttagtgatttagagcaagggccctgcaaagaccccagattcaaatactttgtcacttgctagcagatccaggtacctaacttctctgagtcttaacagcctcatctgaaaaactagaataatagaatcttccttctagggctgttttgaaaaccaaagaacacaatgtatgcagtgcacgtgaaacacagggttcaataaatggtagggaagattcagagaaactaaccatgtagagggagagggctgtggaggagaggaggataaggagaggcatgcttcctttggtagcttcttcagttttgcctgggcctcagctttgcctgagaatttcgtcagtctctccccagatcagccagggtgagcctgcttaaatggaacactctgaagatgatatcctgtgataaacaagacctgcccagttgagtctgcagcagagtggggcgggtctgggatgaccctggcatggaaaagtacagcagctctttgtcttcagattaggagctgggacagctgttctgacatgatcaccccccgcccccaccccaggcctctccaaagtccatcttgcagagtcaaatgaaaaccagattcctggtcttatctgagagctacgtgactgtttcctgtcactcctttggagcctgggaaggtccccacatgcattgtctaaactttgggatgaatacgcacagctcttaaatgggagcatattattataggtacctgcctacacaaagggtcctccctattcactaaaatcatgggttattatttagggctttcattcatccaacaaatgtttattccgcatttgcaggtggccaggcaaggtgaacattctctcagggtggagagtatgtgcagacaggaggaattatgctatgggagggagagcagaagctctggagtggatcatcttgggtctagatcctgatacttcccagctgtgttttcactgggcaaaatgacctcacctccttaagcctcagccttctcttctataaagtgggcataacaaataaccgcctcctaggttatgaggattaaatgagatggttcaggggatgtgggtggtaaccccgcccctggttcatagcaaggatgtgaggaatagcagttgctgtcatagacatggagactgtttccccaaatgccttcccacccccaaatcataaggcagacccaaacttgcctttttgtggacgccaaggttctgtcgagctgttagggtgcaagttaagaagccagaatggcgggctgaggggagaaatgcccgcatgttacaactctgcaggtgtacacacgtggacaccatatgtacccatgaattccgcctttggaagtgaacttgattgcagcctattttcgtctggaggcggtggattcccggtaggaggcgccttcagtcctcggctcgatcctgtgacgccagccagctgcctatcggcttctcagtgtttgaacttcaaagggctggacgctcacccaagaaggggaccccggcctgacctctctcggaattcaaaaaaatctaaggctcagagagggaatgggagctggctcttccctctgtgtttagcatccacgttttttggcggtctggctgaaaccagcccaccctagttcgggcgccagagcaacgcagttccgagggcagatctccaaggggcggaggcagagccgcgggtgagaggcttccgcgccgacttcgggtttgcactccccggagccagaactccgtggcggctccgggcctccgtggatccgagcagagactggctgcccgcctgccactcgcaggctgggaaaacgccagccggtgcctcgccgggaaagttctcggcaaagctggggatgagccctcagcagggcaggctcccggtgcagcgcgcccccatccattg

SEQ ID NO: 455 - DNA, 2300 bp, Homo sapien
cccccaccccaggcctctccaaagtccatcttgcagagtcaaatgaaaaccagattcctggtcttatctgagagctacgtgactgtttcctgtcactcctttggagcctgggaaggtccccacatgcattgtctaaactttgggatgaatacgcacagctcttaaatgggagcatattattataggtacctgcctacacaaagggtcctccctattcactaaaatcatgggttattatttagggctttcattcatccaacaaatgtttattccgcatttgcaggtggccaggcaaggtgaacattctctcagggtggagagtatgtgcagacaggaggaattatgctatgggagggagagcagaagctctggagtggatcatcttgggtctagatcctgatacttcccagctgtgttttcactgggcaaaatgacctcacctccttaagcctcagccttctcttctataaagtgggcataacaaataaccgcctcctaggttatgaggattaaatgagatggttcaggggatgtgggtggtaaccccgcccctggttcatagcaaggatgtgaggaatagcagttgctgtcatagacatggagactgtttccccaaatgccttcccacccccaaatcataaggcagacccaaacttgcctttttgtggacgccaaggttctgtcgagctgttagggtgcaagttaagaagccagaatggcgggctgaggggagaaatgcccgcatgttacaactctgcaggtgtacacacgtggacaccatatgtacccatgaattccgcctttggaagtgaacttgattgcagcctattttcgtctggaggcggtggattcccggtaggaggcgccttcagtcctcggctcgatcctgtgacgccagccagctgcctatcggcttctcagtgtttgaacttcaaagggctggacgctcacccaagaaggggaccccggcctgacctctctcggaattcaaaaaaatctaaggctcagagagggaatgggagctggctcttccctctgtgtttagcatccacgttttttggcggtctggctgaaaccagcccaccctagttcgggcgccagagcaacgcagttccgagggcagatctccaaggggcggaggcagagccgcgggtgagaggcttccgcgccgacttcgggtttgcactccccggagccagaactccgtggcggctccgggcctccgtggatccgagcagagactggctgcccgcctgccactcgcaggctgggaaaacgccagccggtgcctcgccgggaaagttctcggcaaagctggggatgagccctcagcagggcaggctcccggtgcagcgcgcccccatccattgcccgcgcgcaagaacccggaatgggccccacctgggccgggactcgggcgtgcgatcccgagggcgccctggggaccacgcatcgggtggggaccctggccgagggcgtgagctgactcagtttttaaaaactcgcttcctccttccctacttgtgccggtcactcacctcgctgggaaccagcccagggcagaagggggagagggaggcggtggcctccccaggaaggaggagaggtgagtatcccgccaggtaaaggcggggcggctggcggagctgtgcctcggcgtctgcgcctggtgtgggaggaaagcgggtctcccagctccacttaaacccctaaaacctgggacttctagcttgagacattccccgaccaccacccgtcacacacacgcgcgtgcgcgcacacacgcatgcacaccgattctctgggccctagggaggaggggggatcagggctctattttctcccgaccccctcttatccaactcggctggcaagggttggggagaacttaggcccagcccccggcacacgctcagcgcgctccagcggcatacgctggggagtgggtgcccgcctcgctcagctgcgatccctcgcctcgggcccgggggtggtgccgagggccgggagggagggtcggccggtgggcggtgcttctccgggctggaggccgctcctggccggcaccgccctccgcctcccgcggtccctccctcccgcacgccggcgctcccaggccgcgcttcctgcgtccccaacccggtccctgagagggcagtgcgccctctccaccactgcgttccctcggctaagaatcccccgaaccccagccccgcgatcgcggcgcccaccgaggaggccgcccgggtggggcgcgggggtcgcgaagcccgcagtcccggaccgcccagccgagacgg

SEQ ID NO: 456 - DNA, 2300 bp, Homo sapien
gaatgccccgccgcaccctgggacgttgtcatgtcagtttcacagatgaagaaaccgacgcgctcagggaaggactcgagtttcaatccactttgctcatgcccgattctttacccccgtgtttgcttgtagagcgacacacacacatacacacacacgaatctaaatccctaaaaggccccgacttccatacagtaagggatgcgcgagcaaagcgccaaggtggtttcctgggacctactgggaagttctgctcctaaccacgcgctgaaagcgcttctggcgaagccaagggttcgaagcccgccgggcggatagcacctgttcccgccaacagggggcccccaaggccagctgccttccccagccgaggccagctggccaggcgcggtgcccgggaggcgggagcgtcccgcgccggcggggcgcggccgcagagggtgcggggtgcggagtcctcccggtggtcgaccccaggcgggaagcgctcggcggacagacggacggacaggagacccaaacgggcctcggcccccttacacggccctgtggggaaccgacagcgcgccgcgggaagcagcgggcgcaaggcgcggcggctgagactcacccgggaggcggcgggtccggctccgtctcggctgggcggtccgggactgcgggcttcgcgacccccgcgccccacccgggcggcctcctcggtgggcgccgcgatcgcggggctggggttcgggggattcttagccgagggaacgcagtggtggagagggcgcactgccctctcagggaccgggttggggacgcaggaagcgcggcctgggagcgccggcgtgcgggagggagggaccgcgggaggcggagggcggtgccggccaggagcggcctccagcccggagaagcaccgcccaccggccgaccctccctcccggccctcggcaccacccccgggcccgaggcgagggatcgcagctgagcgaggcgggcacccactccccagcgtatgccgctggagcgcgctgagcgtgtgccgggggctgggcctaagttctccccaacccttgccagccgagttggataagagggggtcgggagaaaatagagccctgatcccccctcctccctagggcccagagaatcggtgtgcatgcgtgtgtgcgcgcacgcgcgtgtgtgtgacgggtggtggtcggggaatgtctcaagctagaagtcccaggttttaggggtttaagtggagctgggagacccgctttcctcccacaccaggcgcagacgccgaggcacagctccgccagccgccccgcctttacctggcgggatactcacctctcctccttcctggggaggccaccgcctccctctcccccttctgccctgggctggttcccagcgaggtgagtgaccggcacaagtagggaaggaggaagcgagtttttaaaaactgagtcagctcacgccctcggccagggtccccacccgatgcgtggtccccagggcgccctcgggatcgcacgcccgagtcccggcccaggtggggcccattccgggttcttgcgcgcgggcaatggatgggggcgcgctgcaccgggagcctgccctgctgagggctcatccccagctttgccgagaactttcccggcgaggcaccggctggcgttttcccagcctgcgagtggcaggcgggcagccagtctctgctcggatccacggaggcccggagccgccacggagttctggctccggggagtgcaaacccgaagtcggcgcggaagcctctcacccgcggctctgcctccgccccttggagatctgccctcggaactgcgttgctctggcgcccgaactagggtgggctggtttcagccagaccgccaaaaaacgtggatgctaaacacagagggaagagccagctcccattccctctctgagccttagatttttttgaattccgagagaggtcaggccggggtccccttcttgggtgagcgtccagccctttgaagttcaaacactgagaagccgataggcagctggctggcgtcacaggatcgagccgaggactgaaggcgcctcctaccgggaatccaccgcctccagacgaaaataggctgcaatcaagttcacttccaaaggcggaattcatgggtacatatggtgtccacgtgtgtacacctgcagagttgtaacatgcgggcatttctcccctcagcccgccattctggcttcttaacttgcaccctaacagctcgacagaaccttggcgtccacaaaaaggcaagtttgggtctgccttatgattt

SEQ ID NO: 457 - DNA, 2300 bp, Homo sapien
tccttcaagagcagagccagtgcgttcacgcacgtgcacatacacagtgctgtgcattcagggttcaggcccaattaggccagtgggaatcctctcccacatagactttctgtatgtcccacagccctgagctaggacaccctgctgtctaatcccacagttcctgtacttccttcttactttattggtattccctatagatcattttcctgctggcctagaagctctgctaatccttaacttgctcactgctgtttctccagtgcctaactcgctacttaggaggtagtgagatgcacaagaaatatttgttgggtgaaaaaaagaaggaacagacttaaagctgataaaggatgttgttccaaatatttttagagtctcttttaacaaagtggccaatttcagataaactcatggtttcacaagaaaatatcttcgcagcatcagatttcaagcagcctggtcagtcatcctttcggagagactggaaaaaatgcagaattgaaaacaggtccttgcccagctaaacatcttgtaaattttactgttttgcaaaagttcctgtcacaggaataatgtatgggggagaggtttagcaaggggcattgcttgctcctcctcctcagtccttgagaatgttctaaactaaagccttgagtgactgcttctctggctcgctctcaaccaacaaatgctgtggaatcccaggaccgctggctgctccctttagcgcagggtctctgggctgctttgtggaaagaaggtttattttgtccagctgggcacaggagcggagaggaagaatgtgcaggcctgtgtcccttttaacaaagggagaactcgatgtggtttcagagaagcttgtcttgctgggtgacttcatgtggcctgcattcatttcatccaacattgactctgcaaacttttttttttcgagacagagtcttgctctgtcacccaggctggagtgcagtggcacaatctcggctcactgcaacctccatctcccaggttcaagcaattctcctgcctcagcctcccaaatagttgggattactggcacgtgccacagcacccagccttttttttttttttttttgtatttttagtagagacggggttttaccatgttggccaggatggtcttgatctcttgacctcgtgatccatccacctcggcctccccaagtgctgggattacaggcatgaactctgcaaacattttttgagtccctgctgtgtgccaggcttagagatgatgacaatgtggtcatgggaagagagagactcaccacggtggttgctggaggatttggggagcacatgaaaggggcatctgagctatgggtgaccagagaaatgttctggagggtggttgggggtgggtagtgcaaagaaaggcaggctgagacatgcagtaggagaggcaggagccaggctaaggccaccatgagcagcatcattctaagaagctggattttctcctgcaggaagtagggagccattgagggtggggaacagatgacagtaggctgtttggcctggtcataccattggctgaggccctgtcccccaggtgagtctgttacaaccatcgattgtggaccattcatcccatcgctcactctcccagcagcctccagcaagagctacgattttactgcacttcattaaattccacacaatgttttaatgacctgagctccgacctttctggcctccagcagggaaaggtctggcttttccttttcagggagtagcgggctgggcagaccggcctcccttctcgcagcctcgcacaaggagcctgagcacgtaagacatctggaatgcatcaaaggcgaggcccagccagagccggcgtgctcggtgctgctgcctaactccttcaagagcagagccgccacattcacaaagcgtctggaatcggaactgatcgtcctctctgctctttctgctttccttccaggcccttccaccgcagccatccgcacgggaggcctcgcgattgctcggaaccatcccgcaggagttcagctgatattttctagtgtggggcgagagattttgtggagcgcatttaaggggtttttgttgtgactgctgccttgtatacatttattttctttcttggaactgggcctcgccctcctcccactgacatgatggcccagtccaaggccaatggctcgcactatgcgctgaccgccatcggcctggggatgctggtccttggggtgatcatggccatgtggaacctggtacccggcttcagcgcggccgagaagccaacagctcag

SEQ ID NO: 458 - DNA, 2300 bp, Homo sapien
gccaggccccacctccaacactgaggagcaaatttcaacatgagatttggaggggtcaaatattctaactatagcaagtggcaaaaagaagggaagagggatagagtgttgaggtttttattttgtttggatgtgcttttgttgttcttatttttatttgcttttgttgttcttatttttatttgcttttgctgttcttattgtttttatttgctcttttttgttgtttattagatttcatggtggttgtttcattgtttcaaaaaaccaattttagaaaagatgatatgtgagtaaaaagctaaagtaaagaaggcaaaggagactcttgaggggaagtgcattccaggcagaggaatgggcaagagcaaaggctctgaggcagaaacgtgtgggaagctgagcttgaccctctctgttcctgtgaagccatcacttgggtcccagcccttgtggtccctcctaacattttacgcctagaatctttctggttgtaggaaactgatccaggcagaaccttccagactgagggcctggaagagatttgtagggacaggctccgggagaggtctctgcagttcagctgcataaatcagggttttgtcaagcttgttgcaaatgcacattcctggattatgtcccaggcctgctaaatcagaatctctggggtctgtgcccagaagtccgcatttctaaaagcctccaggcacgtttgagcatcttcactgtatattccaccacaaatcgatgtccatgatttctctctcagatcctcttcctattgactaggtgtattagtctgttctcacactgctataaagtaattccttgagactgaataatttacaaagaaaagaagtttaattgactcacagttctgcactgctagggaggcctcaggaaacttacagttatggcggaaggccaaggggaagcaaggaagctagcatgttgtaacatggtgtagcaggagagagagagagcaaagggggaagtgccacacttttaaaccatcagatctcatgagaactcactcgctatcatgagaaaagcaagcgggaagtctgcccccatgattcaatcacctcccaccaggcccctcttccaacacgtggggagtgcaattcgagatgaaatttgggtggggacacacagccaaaccgtatcactagggtagaatgtgccatagttcatctctcttagaaaaacgtttagagtttttcttgaggtgtctggtcagccatttcctgccagtgaaaggaatcactctccaggtagagtcagcaggagataggatttcctgctggagatagtggcgggagataggatttgcacatctgctcaacacactccatcccgcgagtcctgtgccggctgacaagcggtttcttaaggacagtaactgttccaggtgtattctgggatcagcgtgtgacactcataggactcaaaagatgtttgcagagatagagaaagggcaaaagaatgaataaatgtcactcttaacagggaggagcagaggcagcaggattgtgagtttggaaatattttttccccagcacatggaagaaatcctcattctttcaaaatttttcattccaccccatccctttcccaatccccaccccactcccagagatcccctcttcttactctttctattttctggcctgtaacggaaaggactagagatttgggtagggcagggggcatactaacctccaagggtctcatgagttcagctccatcaatctcctacctctccctatcgcccccgaccctccctcaacgcatccagcttacagtgaggggtaatggaaaggattcttgaatcaaatctcctccctgctccttcctcgctgtaaaaccttgggccatttctgtgacctctgagcctccgctttcctatctgtgaaatggggcaggctcgtggggcctggagcattcagcaggcggtaacccagtgggcgttccctgcacggtgccacgccccctctgccgcgcaggccacgccctcatctattaggctggaccccgcggcgcctggcggcgttgccatggcaacgcgcgtacacaggccggccgggcgggcggggtgccgggtgcgagctggagactccgcgggagcgcggccgggaggcttcgccccggagctggcccgacgcctcccgagctggcagggctctcggcggaggtcggagcgtgggcttcctcctcccgccaggtgagtgcggcgcgggaaggggtggcgggccgagaccggggaccggaaggggcggcccagcgaggactagccctgg

SEQ ID NO: 459 - DNA, 2300 bp, Homo sapien
gaatgatcagcttcccctcccccgctatcagtttctccactgtttccctcatagttttgcttttgcagcaggctggcttcttatgttggaaaacatgactgtagacaaactgaagtctgtaagtttaaagtttatgatccaaaaggaagcaagagcttcttcctcttttaagtaatacatgaaatctctgagaaaatgccaattgaccaggctgggtcaattgcaggtgggacaggaaggcaggtgggacaggaaggatcagggcacataactgaccctcctaccaagaccgtgtggaagggtcaggggtgctccctcaaggaagtcacagggtccccaccagaaaggcaggaaccatagctgtgcaccataagctgcaggcttctctgtacttcagtgcccagcacaagcgtggcacacagtagatgctcaatacatgtttgttgtgtggatattgaacaaacacctggctggaaatggagccctcgggtaactcatattggataaggcaaagggctgccccagagcatggactctgtttgaggctgtcctttgaaatgttgccacaagcactcacagggacccaatgacagaccctggtcagcagttgggctccatcatgaccaaaaccctgtggttccccaggttagcaagctagaaggtcgagctctccaggcaatgagctggcctagaaactgcccacccgcttccttcccaccagtggaaaattgcatggagagcagtttcctctcaaagtaactgatcaggaactctgtagctgcctatgaatcacatcggggaatttttgttctcaatcttcctgatattttattgatgcgttctggtgagaagtttgggggattttttcccccttttttgggaaacctaacaaattcttcggctacggtgctttttcttttggagagatgggggactgggttaatgatacctgtgggtacagcctgccaagcccaaagttttttccagcctgaaatttacaagagcctatatacataaatcaccattcccctctcatttatttttcatgactcagttacctggaataaatttttatgtgaataaccaaaagagccagggaataacagaagagaggaaaggggaaaagctatttcagaatgtattaaatttgtaaagttaaatagccccattatagtcagaatgtggttgaatagagtcatttccttaattacctttccttcgtccccagatgttagactgaggcctggtaagttgattcctaaaaatattataaataaactttttggcaacaaaaattcccaagtgggatggtggttcttaatatgaaagtataattttaggggaaaggaaagtttctgtcgctctaaggtatacacatgacttatagaagtctgtatgcaagtaatcattttaaccaaactcttgtctctatgagttgccaagtgacagagagcctcaaagtctgccttttccctgcctgcctgcccttactttcccaaaataattacactataattttcctacctttttttgagacagttttgctcttgttgcccaggctagagtgcaatggcatggtctgggctcactgcaacctctgcctcccgggttcaagcgattctcctgcctcagcctcccaagtagctgggattacaggcgcttgccaccacacccagctaatttttgtatttttagtagagacagggtttcaccatgttggccaggctggtctcgaactcctgacctcaggcgatccacccatcttggcctcccatagtgctaggattacaggcgtgagccaccgcacccggcccctacttttttttaatgggctcagcctcacacctaggcccacacctagtaagcctcccatctgatctctacccaggatgaaataattctgctgctgggaaaagaggtcagccgtctctcagattatgaaattgaatccaaatacaaagacgtcataatagcaaacctgcagaatgaagtggctgagctgagtcagaaggtgtcagagaccaccacctccaggcagaatgagaaggagatctcgcagaagtgtcaggttctggatgaagacatcgatgccaaacagaaagagatccagagcttgaaaagccaggtaggcagagcctgagaggtacagcacagctctcaggccaaggcccgggaggccccaggaccaccaaccaaggtgagccacccagagttagggaacgcgtggtcagtggagcatggtggttaagaacacaaatccacaagactgggagattcggcagtttcctagcatggtaaga

SEQ ID NO: 460 - DNA, 2300 bp, Homo sapien
agcgtgtgcatgctgcccctcctcacagccccctcaagacagcagccccccagatccaccggaccccaactcttcccagatatctcctctcttccccggaagagtactggacctgcccccttctccatctttccccagctccttctctaccacacacacctgccctccagacctctccctctttcatctccatcctcacatgtgtgtccagttaccccaaaacatcagtctcctcctccttcttctctttgcctctttctctgcttttctgcatttgcgaaataaaagattaaaaaagaagagccatctgaccaaatcatgtgcaatccgcataaaggtaatattaatgatagctataaatcaagatgggcacattttgaagggcatttagatacggaaaaagccagcaccgttccatagagaagaaaataaaaccagaaagtacctagaaatcttcaaaatcttcgcagaactctccaccgacttccttttttcttctctgattaccttctccttttaacatcggcatcccaaatgccttattttctctttttaattttggatggactttttcccttgtcagggtttggtatttcagccccaccatgttaaacactgcgttgggcgcctgcctagtcttcctagacaaccctggcgacactggcctggcagagtgttttaagagctggcgtcagcccctcttttaaacctgaaaacctcggtgcaccctaccctccttgcagagggaggaagcaacatcaggtccctgccagacagactgtgacactcgaaggtcgcccttcctctgatactcggattgatggacttgaccctggggactccttggaaagttacctcttggacttcagtgccaagtgtcctgactaaatgagccttccttagaccttctgactcccatcacctgccctttccgaaaatacatgtgtccagggtcattaatctcatgaatcttgacttgtttgaggactttgtttcaaagggaaaaaaaattctatgttcctttatcaatctaacattcttttcttattgccagttgttgacaacaatcccttggtttgtgcacacaccaatgggttagatcagggattggccaaattgtcccataaagagccagatagtaaatattttcagttttgcaggtcatatgctctctgctcttctgcaaaagcagccatagacaatacacagcaagcacagtgttccaataaaactttatttacaaaaacagaccagatttggtctgtaagccatagtttgctaacctctggtttagaacacaggcttcagaatcaaatgggtcagagttagaatccctcctcttgtgatttactagtaaactgggtggattcttgaatgtaagcctgtttcctcctctgcaaggtgggaagcatggttatcactgtgccaagcatttcgtgttcatcgtcgcatccacccctcacatcaacccaacacaggaagactattactgtctccgttgtacaggcagggaaactgaggctctggtagcttcacttccccagtgccttacagctggaaaggatcaacctggggctctaccctgggtctcctgactccagagcacatgctctgagctcctaggctctgctgcccacagcctccccaggggagtgcggtgaggagtgaagaggtagcacatgcagtgcctggcagcgtccaaattcctgccatggtaaccatgtctgttaaacaatggtcattggtttccaggctttggaggagtacattactcaagagagaaacagagcgaaagagactttagaggaagaacggaagagaatgcaagaactggagagcctcctggcccagcagaagaaggtatgtggctcagggagacagagtcagctcgagccccactgcagctaggaagggtggatctggggctctggtctgggcccgccggctctgagctccagggctgtgctgtccacagtcccctagggaggtgtagtctggagggaagaggaaacctgtgcggtgcctggcagagtccagtttcctcccatggtaaccatgtctattgaacaatgatcgttgactcaggctttggcgaaaagcattacccaggagaagaacagagtgaaggaagcattagaggaagagcagacaagagtccaagagctggaggaacgcttggcccgccagaaggaggtacgctcggggagatagagtcggctgagccccagtcggcttgagggccatgtggaaggaagttcagagcggcgatgatgggggtgagatcgtggtggagccttcct

SEQ ID NO: 461 - DNA, 2300 bp, Homo sapien
ctttctgtcggcctgaggcatccatgctgggacggactgtcctggggtggagaacattccttagtggtggtgctgaaggctggaggcttttaggatgctggtggagggtccacgcagccctgaggtcccatgactctgtcattctcccgtttctgtgctttggaacacagaagacgcccatgtcaccattcctacttgtctcccaagcgctctctctctctgactgtgttttacactgtttacaattttttcccaactggttgtcaaggctacaactccagggttccctccttgagtctcccacgcttcccaaagtagctgagcccacccaaacgcaaactccacgaggaaggctccaccacgatctcacccccatcatcgccgctctgaacttccttccacatggccctcaagccgactggggctcagccgactctatctccccgagcgtacctccttctggcgggccaagcgttcctccagctcttggactcttgtctgctcttcctctaatgcttccttcactctgttcttctcctgggtaatgcttttcgccaaagcctgagtcaacgatcattgttcaatagacatggttaccatgggaggaaactggactctgccaggcaccgcacaggtttcctcttccctccagactacacctccctaggggactgtggacagcacagccctggagctcagagccggcgggcccagaccagagccccagatccacccttcctagctgcagtggggctcgagctgactctgtctccctgagccacataccttcttctgctgggccaggaggctctccagttcttgcattctcttccgttcttcctctaaagtctctttcgctctgtttctctcttgagtaatgtactcctccaaagcctggaaaccaatgaccattgtttaacagacatggttaccatggcaggaatttggacgctgccaggcactgcatgtgctacctcttcactcctcaccgcactcccctggggaggctgtgggcagcagagcctaggagctcagagcatgtgctctggagtcaggagacccagggtagagccccaggttgatcctttccagctgtaaggcactggggaagtgaagctaccagagcctcagtttccctgcctgtacaacggagacagtaatagtcttcctgtgttgggttgatgtgaggggtggatgcgacgatgaacacgaaatgcttggcacagtgataaccatgcttcccaccttgcagaggaggaaacaggcttacattcaagaatccacccagtttactagtaaatcacaagaggagggattctaactctgacccatttgattctgaagcctgtgttctaaaccagaggttagcaaactatggcttacagaccaaatctggtctgtttttgtaaataaagttttattggaacactgtgcttgctgtgtattgtctatggctgcttttgcagaagagcagagagcatatgacctgcaaaactgaaaatatttactatctggctctttatgggacaatttggccaatccctgatctaacccattggtgtgtgcacaaaccaagggattgttgtcaacaactggcaataagaaaagaatgttagattgataaaggaacatagaattttttttccctttgaaacaaagtcctcaaacaagtcaagattcatgagattaatgaccctggacacatgtattttcggaaagggcaggtgatgggagtcagaaggtctaaggaaggctcatttagtcaggacacttggcactgaagtccaagaggtaactttccaaggagtccccagggtcaagtccatcaatccgagtatcagaggaagggcgaccttcgagtgtcacagtctgtctggcagggacctgatgttgcttcctccctctgcaaggagggtagggtgcaccgaggttttcaggtttaaaagaggggctgacgccagctcttaaaacactctgccaggccagtgtcgccagggttgtctaggaagactaggcaggcgcccaacgcagtgtttaacatggtggggctgaaataccaaaccctgacaagggaaaaagtccatccaaaattaaaaagagaaaataaggcatttgggatgccgatgttaaaaggagaaggtaatcagagaagaaaaaaggaagtcggtggagagttctgcgaagattttgaagatttctaggtactttctggttttattttcttctctatggaacggtgctggctttttccgtatctaaatgcccttcaaaatgtgcccatcttgatttatagctatcat

SEQ ID NO: 462 - DNA, 2300 bp, Homo sapien
cagtgagcacctccataggccaggtctgcatgaggtcctccgtggaatatcccaacagtaacagcaaggttaagaccctgaaaaaggatcagacggagttaagcggaggtacacagaggatgcagcaactcccaggcaaggcttgcaggaataacacaatgaaaacggtatagggatttaatttattcaaaaaaaagtgttttctttcctgattataaaaaaaaacctgtcattctagaaaacttgaaaaaaaaaaaaaaacagaaaatcactccaaagaaaataataactaacatagagtccactgagcacagttgccactatcgacattttgatgtgattccttccagacagcctttgtgttgagcctcagcatcgatatcgataactaccgatttatgaccaagttagtgattgacactgtgacactgtgcacactgcttcggatgctatttttgatatttactatacgatgtgtcaaccttaaataatgagattctctaagcatagagtttattcgagctcaaagcttgaggacggcaacccagaaaacagacttcaaaagaatgagtcagtgttccaaagcagggaggtgaaagtttcactttgataggcagttaacaggatcgcagtgtcttccacacaaggtcagcacatgcggttatagccctttggttggttacagcttgctacattcctgggaaaattgctttactattccaggatgaggggtgatcatctgaaggagtcatctctggcgtggccagggctttcccactcatttacagaaaagaatagaagttgcaggtgcgtgctacgtgacccaggccacacagccacattcctctcgagtctcaaaataatttaaggtttcaaccgctttaagtttgaatgattttggccaggcacagtgactcacgcctgtaatcccagcactttgggaggtcgaggtgggaagatcacctgaggtcaggagttcaagaccagcctggccaacatggcaaaaccgcatctctgctaaaaatacaaaaattagccgggcgtggtggtgggtgcctgtaatcccggctactcaggaggctgaggcaggagaatcacttgaacctgggtggcagaggtttcagtgagctgagatcattccactgcactccagcctgggcaacagagcaagactccatctcaaaaaaaaaaaaaaaattgaatgatttcatgttgcgtagaatgtctcaatgtcatcgaacaatcttccatggcctgggtttgcactgtgctggatggaagccgatttcttttcttctcccctggggtggtttctcactcttcactagtgcagcagatgcccggctgacccaccctgtgcatcagtctttacgtccttaggaaaaattccctaaagtggagttgctgagtcacaggacatgcacattttcaggctcataatacacattcctgagtgagtgtctagaaaggtcacagcagtttgcacctccaccaacagagtttaagaatgcccagtactttgaatatattttaaattggattaaataatgttcgtaagatgcccagcacagtgccactcaagaagcccacacttcacattattgcaggagggactcagaatagaatgttgactatgaaagatcaaaagaatggggccaggcgcgttggcacacgcctgtaatcccagaatttgggaggccgaggcaggcggatcacgaggtcaagagatcgagaccagcctggccaacatggtgaaactccgtctctactaaaaatacaaaaattagctgggtgtggtagcgtgtgcctgtagtcccagctacttgggaggctgaagcaggtgaatcgcttgaacctgggaggcggaggttgcagtgagctgagatagcaccgttgcgctccagcccaggtgacaatgcgagactcctccgtctcaaaaaaaaaaaaaaaaaaaaaaggagaatgggttccgggaggagggataagagatgcccaggacagggccgctggagccctggaggaaaggggggtgtcctgaaggcaggtgttgcagtgaaggagagaagggactcagcacattcatcttggagaacagatttagagacagacatgacagccctcctcaaatatttaaagggctgtctcataaaagagaaataaaacatactcaatgagctccaggtgacagaactgagctcagagaccagaaatcacaaggagacagatctccgctgaatataaagacgagttctataataattggaaccttccagagaaggcatggactttgtgctttaaaa

SEQ ID NO: 463 - DNA, 2300 bp, Homo sapien
acagcacgcccagacaattgtgagcctcgaagagaaactccagaaagtcactcagcaccataaaaaaatagaaggcgagattgcaacattgaaggacaatgacccaggtaagtccgaagggaggccaaggaaatcttagtgttcggggcaggttctgattgtccgctgggtcccaacaggctgatggctaagaaaaaggccgtgcctcattcgaaagctcattcattctctgaggcccccttttgttcttgttacacaacgatgtcagaagccctccgaggcccaggttcagcagaagtcatggcaatgagttgggacatcctttgtgcctactcagtgagccggcgagacacacaggctaccggggctgtcagggccagcgagggcagcgcgaagtggaatcatcttttccacatgaaaacatctcatgcaggggcctttcaaaggtttctctctgccatcggccttttgcatcttcactaatgcactcattaccagccaggatttatcccttaaaaaattaaccctaaagaggctgaaaaaagaactcagacttgtgagcacttatttgccccaaatggccaaggtaagctgtattattgtaagctcttgaagaaagttctggaagtagaggactcaggccagggtatcccagcctcagccctgttgacatttggagcaggatcattttttcatggatgggactgtcctgggcactatcaggtgttagcagcctccctgtcctccatccatcagttgccagtggcacccctaccccagttgggacaaccaaaaatatctccagacattgcccaatgtcccctagaggcaaattcactcctgcttaagaaacatggctgtagtccccagcaagctggcaagccatcaggacttacctcattcattcactcactcagctctctcggtggagcttctgttatgttccaatctcatgtaggcactcaggatccaatgatggacaaaccagattttgtccccgtagtaacaaaattattgccctgacaggtgatccaggatgaatagggcaccatgacaaggacaaagagtggagttcagtttcccaatccagagtccaggtcagagggagggtgtctgagattgagctgggggccaggtcagtggctcacgcctgtaatcccagcacttccggaggccgaggccggcggatcactaggccaagagatcgagaccatcctggccaacatggtgaaaccccgtctctactaaaaatacaaaaattagccgggcctggtggcgcgcgcctgtagtccagctactcgggaggctgagacaggagaatcgcttgaacccgggaggcggagcttgcagtgagccgagatcgcgccattgcactccagcctagcaacaaagcgagactctgtctcaaaaaaaaaaaaaagaaagagagagattgagctgggacctgaagggtgacgtccaggtcagagggagggtgtttgagattgagctgggacctgaagggtgactgcatctttgtcacccccgtacttagaccagtatgcactccacaaatgttagttgaagggataaacaagtgagtgaacacgtgaggataaacaagtgagtgaacatgtgactgagtagtgagacaggacgctagaggcggtgcactgaggtgtaaatgggaggtgaggagaggaaggcgctaaacacagattcttcttccaagagagacaggcaggcggtgggaccaggggctgagactgcactgctcaccagcttagccaagtgggtcgccggcagcttccatcactccggtgcccctttccctgtctgtaagtggatttgatggcccctgccttctagagtagctgggaagattgcatggccacacacttggggagagcccccagcctgtgacatggcacacgtgcaggtctcacaaggtggagagggctgcaggtggaggcagggtttgtaagttgtgaaagacacaggtgtgcttgtaagcaaaggggaaggacagtttcctctcacaatgatcacatgtccctctgatacagccccaaaggaggaaaggccgcaagaccctctggtggctcccatgacagagagcagtgccaaagacatggcgtacgaacatctgatgtgagtacccgtgggtgtgtgagcgccaggcattctcaccggcaccacctgggtgggggcaaacaggcaaccagcccctacctgggccacattgtcagaagccaaacaaggagccgggcctgctgccttcccagtgctgcttccatttccccattccttcagcccagacc

SEQ ID NO: 464 - DNA, 2300 bp, Homo sapien
caaaactgcccaatttattgtcatctttaaatacctgctttattctcatctcatagatagataaatgtgtccactcttaatatagacaaatatgtcacacttacctatcacagtcaccttcaggcttttagatttttgtgaatgggttttttgtttttatttttgttttttttaatctcccaggtttacagtatagagccggtaaatgctgcaagctgacatgctcttggtgttcgtggcgagcacttaaaacccaatttagttgtgaggggatgtatgggggttgtccgtggcctccagactccccgcttggcctggtggcttttctatgcctttggctggggctttcagcaagcagccggctgagcagggtcttagcaggtgcacagctgtctcctctctggaaagggtctgaagtgaaggggtgggttgccctccacacctgtgggtgtttctcgtaaggtggaacgagagacttggaaaagaaaaagacacagagacaaagtatagagaaagaaataagggggcccggggaaccagcgttcagcatatggaggatcccgccagcctctgagttcccttagtatttattgatcattcgtgggtgtttctccgagagggggatgtgtcagggtcacaagacaattgtggggagagggtcagcagacaaacacgtgagcaaaggtctttgcatcatagacaaggtaaaggattaagtgctgtgcttttagatatgcatacacacaaacatctcaatgctttacaaagcagtattgctgcctgcatgtcccatctccagccctaaggcggtttttccctatctcagtagatggaacgtacaatcgggttttataccgagacattccattgcccagggacgggcaggagacagatgccttcctgttgtctcaactgcaagaggcatgccttcctcttatactaatcctcctcagcacagaccctttacgggtgtctggctgggggacggtcaggtctttcccttcccacgaggccatatttcagactttcacatggggagaaaccttggacaatacctggctttcctaggcagaggtccatgcggcttccgcagtgtttgtgtccctgggtacttgagattagggagtggtgatgactcttaaggagcatgctgccttcaagcatctgtttaacaaagcacatcttgcacaacccttaatccatttaaccctgagtttgacacagcacatgtttcagagagcacggggttgggggtaaggtcacagaatctcaaggcagaagaatttgtcttagtacagaacgaaatggagtctcccatgtctacttctttctacacagacacagtaacaatctgatctctcttgcttttccccacactgaagtgatgctcacccaccatctgcatcatctctggaaagggtcggaagtgagcgtccagtttccgctgcgtgaaaatggcattcctttaataaaaggaggggggatgttttctatttaacctgcattcattcatttgacaaacatgcccactctgtgccaggtgccatgctgggcacaaggagggggagagtgagcaaacagcaacaccatccctgcttctatggcactctcctctggaccagtgtttccaggccttagcactgttgatattttagggccccacaatctggcgtggtttgtgggggcatgtgtggatgtctagtagcgtctttgctctctaccccctagatgctagtagcactccccgcctgcagttgtgacaatcaaaaatgtgtccaaacactgccaaatggcccaggggaggggacaaaaccaccccaattgagaaccactgttctagagggaagacaggcggtgatcaaagaacaagacaagtgatgtataattacagagacttcaaagacagagtcattctctgaagggtgggaatacaattataagaaagcagttgacaaaggaatcagacggaatgatcaggacgcggactgaaaatcaactctcttgagttaatcttcggtaatcacacagtgctttagcttccagtcatagaaagtcataatggaatgtcaagagaggcctttcatttctttctgatttcagcctcagaatggcctttgcaacgcaaggttcggctcagccatggagaagtcagggaagatggatgtggctgaggctttagagctcagtgaaaagctggtatgtacatccagcatccaccctgctcctatccaaagcctggggcccctgcagtcagtgttgaacgcaggatagtttaaatatcaacctcacatgcctattta

SEQ ID NO: 465 - DNA, 2300 bp, Homo sapien
aaggactcacccatccgggcagcatttcccgagctctgcctgagtttaacagttgtaaggctccggcgttcagcagccctcctgcaagatactataggtaatgagcaggaattccaccaccctccctcctaagagctgtgtccacacaaagccaaataggtaactgaccagagagcttactacgcacaggcagtccacataattcaaaccccaaccccagttttttcacatatatatgtaagttgttttgcaagaaggcaaaaccctcacattatctcctcactgtgaagtttgcgcccacgtcaagcagatgcaaacaatttcataaaacggcaacccagttttatgcagaaccattggaaatcataaattggagtaaattgaggctcactagagtcttgaaagtaattagctgctttgtgaggaagactaagaattcaacaaacttaagcatctacaaacatcatctgcagacatcatcttaaacattttaatctgcatcctgtccctagtcctttgcattccttaaataactattttacttctgttgggtccttcagggctgcatacaggagatatggaagcctgtcttttgcaagtagctggaccgaactgcccaaaactaagagaaacttaattctgagatttaaaacaaaaaaaccattttagctgagcatctttattggactcaaaaacaatttcataaacaagtaaatgagaacttcacattttctgaaccttgaaggttttttcctcaatttcattcttttaaaaataccttttaaattaattcagcaaggttcttaaacacagcaaattgacaaatatcaactgagtgtctgttctgtgcaaatcactctgtaacagcttgctggctttacattctcgagggctccctgcctccagagcaccctggttttcggccctgcacgcatcttttctctgcaccttggctggttggagcagtttcagtagacaggtcctgattgacccaacatttcagagaacatgcacagagcatagtcctccttctaaatcagggattctcaaatttcagtgagcagaactcccctgggtgcttgtttacacgtagattcctgggtcccaccccagagatcagtttcgtctgtccaaattggagcctgaaaatctgtattattaacctaggccccagtggttctgatgctggaggtccagagttgtgcagttgtaaggtgacagcccagaccacagagatacttatctgaactctttccccagtcctgtccaggagccgttggggaggacatctctcctctggggaccccatcaaaatggcgacatcatgatctccctgtcagtttccctaaagtacagtcacaggcgacaacactggcccagcagctattgtgccaagtcatccgtgtgatggtgcggggcctcgggagagaggaccaccagccccttcccctgtccctcacccgctgtctccaggggccctttcaggggtgaaacccagtcccatctccctcgcagctgctagtctgtcctcttccaagaggccatcggcgcccgccacggttcaccctaaacaggggtttctgctccccaggtccgcctcggaacccctgcaaccctcattgagaacgccagtgtttaacagcgagtcgtttccatagcaaccgacagggtgtcacagacacaggattatgacttcacggcgtggggattccggagaagggggtggggcggcgccccccctcgcttccccgccccccggcaagccccgctcctcacccaagccgcgggggaggagccctcttctttcccgcccggccccggcccccagcaggacccctcccgctcagctgctacagtgggcacgaagaggggcatggctttcggccgcgctccccagcctcgcggggggcagacgacggcgggcggggcgcgcagagtacactcgacccccggcggccgggagcgatcacgcgcacgccgcgcgggcccgggggcgggggcggggcgcgcggtccccgccagggcccaagtcccaccttcgggggcggtgcctggcccggggagtgtcaggaagaggaagagcgcggccggcggcgctgcgctgagagcaggggcccggccaaggcgagtgccgcgcgggccaccatggccacggacgagctggccaccaagctgagccggcggctgcagatggagggcgagggcggcggcgagaccccggagcagcccgggctgaacggggcagcggcggcggcggcgggggcacccgacgaggcggccgaggcgctgggcagcgcgga

SEQ ID NO: 466 - DNA, 2300 bp, Homo sapien
ggcaccttccccatcccctgggcacacacatggctgggagagagtggctgtgcatcttagacccaacagagtgggacccagggatgggccggagggagctgggccctctctccctagcccctccacagagacattaagattgtttttgtggggggacagggggatgagcccacacgcctgggggtgcccatccaccctggtgagggcacacagtgtggatctgatggaataaagggtaggggtgggggtaacagggcaagtcacataggaaggggccccttttgaccagggtgggtgtgggacatggggggtccctgtggggagggaaggggatatacggagtggggaggagagatggggggccttgcgacagaagcaggggagcggtgactgcaagctgctgggtgcacgggggtggggcgggcaggagcgggagggaggccttccaaacccggaggggactcggcccacagggacgactggagtgaggtttacaccagaggggcaacaggggccgaggggtcccttcctaaggagaccacttgtgagtgaaggatttgggtcctggctaatgagtgggtggggatggaaagggcaagtctttgcccccagtttgctggtagacgctaagtaactggagaggaagttggggggatccctgcccagaacccaccttgagggagacctgagatcgcagaggaaacgaaaagaccttaagggagggaatgtggttggcatgtggtgtcgaggggcactggggtgggtatctttggccagcgtgtgttggggtgggggtggggaacgcgagtagctgggatcggggaaggaaggccgctgggtcctcagcctcggtgtgtgcggtgtggggtggtggagaagccccactaacagcgcggagggcccgggacccacacgtgtggtggtgggggtggggctcgcggggcctggcgattatctggaaggaagcctggggtcccccactctgtggacgcgtctatggtgtaccggaggcagcacaaatacgagtctccgccgcgtgccaggggccgggggtcccccagactaacgtgcgcggtgagatgccgggtctcgatctggaaggggccgccgggtccccaaccccggtgcgtctgggttcggggaagcttggctgacggcaggctcccggggcggagcgggatccggggatcggggggttcggggcccgagaccgggtcgcggggcgggcggggggccgggtcgcgcgggcacttactgcttgaacatcttctccatgtccttgatctgcttcctggagaactccttgaactcggtgtaggggttgaagacgcggcggctgggcgactggggctcgccgatgccctggttgaggtctgcgcgccgcagcagcttggcgctcagctcgcagtccgcgctgcccagcgcctcggccgcctcgtcgggtgcccccgccgccgccgccgctgccccgttcagcccgggctgctccggggtctcgccgccgccctcgccctccatctgcagccgccggctcagcttggtggccagctcgtccgtggccatggtggcccgcgcggcactcgccttggccgggcccctgctctcagcgcagcgccgccggccgcgctcttcctcttcctgacactccccgggccaggcaccgcccccgaaggtgggacttgggccctggcggggaccgcgcgccccgcccccgcccccgggcccgcgcggcgtgcgcgtgatcgctcccggccgccgggggtcgagtgtactctgcgcgccccgcccgccgtcgtctgccccccgcgaggctggggagcgcggccgaaagccatgcccctcttcgtgcccactgtagcagctgagcgggaggggtcctgctgggggccggggccgggcgggaaagaagagggctcctcccccgcggcttgggtgaggagcggggcttgccggggggcggggaagcgagggggggcgccgccccacccccttctccggaatccccacgccgtgaagtcataatcctgtgtctgtgacaccctgtcggttgctatggaaacgactcgctgttaaacactggcgttctcaatgagggttgcaggggttccgaggcggacctggggagcagaaacccctgtttagggtgaaccgtggcgggcgccgatggcctcttggaagaggacagactagcagctgcgagggagatgggactgggtttcacccctgaaagggcccctggagacagcgggtgagggacaggggaaggggctggtggtcctctctcccgaggccccgcacca

SEQ ID NO: 467 - DNA, 2300 bp, Homo sapien
agactaagtaaggtaggagaattgcttgaacctgggaggcagaggttgcagtgagccaagatcgcaccactgcactccagcctgggcgacagagcgagactccaactccatctcaaaaaataaataaataaataaacaaaccagcctggccaacatggtgaaatccggtctccactaaaaatacaaaaattagccgggcatggtggtggacatctataatcccagctactcgcgaggctgaggaagcagaattgcttgaacccaggggtggaggttgcagtgagctgagatcgcaccactgcactccagcctgggccacagagcaagactctcaaaaaaaaaaagtgtaagttagaatcctccttcacccccagatcaccgctatgaatggcggggtgcgtagtgctctgaacttttctatcaggaaggaattcctaaggtggccagtaggcccagctcagaaaatgaccttcaaggggagctcagtatgagtagaggggaaacgaaagacagaatctaaccaaccaggctgaggccaggccttggggcgaatggatcaaaccacatgttccaagggatggccaaccccgaatgccggaggctctggtagaatttctgctactcagtgctttgggccctcagatctgccactgaccttgacattcaagttacagaattgtagaactgaaaggagcctgaaagtccatctggtccttttgcccattttagagatggggaaactgaggacctacaactaagctgactccaggaaggaatctggccaactaagcaccttccagagcctgctgcatccctgcctccaaccacagccctggaggcaggtgcaggagtgcatcaagcccaggcaattagaaagatgagacagagagagagccaggaagcgatccaatagcactagaaaggcagagaaggagcagcatgtctccacagcttgaagccccaggctggtgttagaagctttggcttcaaagtctggctctgctgctgcccagccgtgtgaccctagatggtcacttacccgctgagtctcagcttcctcacttttattttatttttttagagacaaggtcttgttctgtcacccgcgctggaatgcagtgtggcacgatcacggctcactgcagcctcgaactcctgggctcaagcgatcctcctaccttggcctcaggagtagctgggactacaggcatgcaccactgcgcctggtcctttctcatctcacctcagagcagataaccgcgtctatttcatgttgttggaagaattaagtgagataatgcaagaagaattgagcgcaatgcctgacacacagtaggtgcccaataaataactaaaaagaataaggtaacggcctgtaatcacacctgtaatcctagcactttgggaggctgaggtaggcagattgcctaagctcaggagttcaagaccaccctaggcaacagggtgaaaccctgtctctactaaaatacaaaaaaaaaaaaaaaaaaaaaatggtggcacacatctgtagtcccagctacttgggaggctgagacaggagaatcgcttgaactcgggaggcggaggttgtagtgagctgagactccagcctgggtgacagagcaagatcctgtctcaaaaaaataaataaaatacaaaagattaacctggcgtggtggcaggcgcctgtagtcccagctacacagggggctaaggcacgagaatcgtttgagcccgggaggtggaggttgcagtgagctgagactgtgccactgcatttcagcctgggcaacagagcaagactccatctccaaataaataaataaatagtataaggtagggagagagaatgaacacacacgtcaaacagagtggggtgggggatgccaaaaagcactgcaactcagaattttctgtttcaggatatttggaaaatccatacttctaagaaagccctgtctcctgcccaaattaaacagtaaccacccaaggtcagggaaagggccttatcagagcaggtttctctccaaggggcggtttggccttgaccaggtgcactcacctgctcctgcctataagtgtgccccagcccatcccgatggtcagccagtcctgagcacctaaccatgttgggcatcactgtcctcgctgcgctcttggcctgtggtaagcggtggggtggggctgcagctagcaggctgtgagctcgggctggcctccagggcaaggacgggatggggagtgggggggcctctgctctccaggtaagacactttggggtcccctgtgggttcagatgc

SEQ ID NO: 468 - DNA, 2300 bp, Homo sapien
tacatcttctgacatccagtcccatgggatgctgccccccacccaatctttctcacctttgcaccatcctagggagattgcagaattctttcccacccattttcttacccgtacaacaatcctgcaatccaggcctggatggttatctaggaaagtaaggcccagaagataagtggcttgtccagaccaccacactcaaaattgatggatcaaagacttgaactcggctgggcgcggtggttcatgcctgtaatcccagcactttgggaggccgaggcggacgaacacgaggtgaggagttcaagaccagcctggccaatatggtgaaaccccgtctctactaaaaatacaaaaataagtcgggtgtggtggccggtgcctgtagtcccagctactagggaggctgaggcagaagaatcacttgaacttgagaagcagaggtagcagtgagccgagatcgcgccactacgccctagcctgagtgacagagcgagactccgtctcaaaaaaaaaaaaaaaaaaaaaaaaaaaaaaaaaaaaaaaacacttgatatcaagtcttaagagtgtggagctggtcttttttttttttttttttgagatggagtcttgctctgttgcccaaactaaagtgcagtggtgcgatctcagctcactgcaacctccacctccaaggttcgagaggttatcctgcctcagcctcctgagtagctgggactacaggcatgcagccccacacgctactaatttttgtatttttagtagagacggggtttcaccatgttggccaggctggtcttgaactcctggcctcaggtggtctgcccgcatcagcctcccaaagttctgggattataggagtgagccaccgtgcccggccgtaaagtgcattttcatccaccaaatgaagccctcctctgccagcgttctgcttccccccatcattagagtggccagatcctaattgtgcatgtcggccttgccttctgctacatgtgcaccttccccgcattatgcaaattctgctacatgtgcaccttccccacattatacaaatccttaccacaatgttgtgaaacaatactgggcatgggtttctctccctgtttcacagatgggtctagagacttacatgactcagccaaggtcacattgcaacccctggtatggcctagaacaggctttctcagtctcagcaccattgacatttggggcagggcgagtcctattgcccagtgcattgtcgggtgtttagcagcgtctctgctctctgctccctgcccactggatgccaatttacatcaaccccagccatgacaaccaaaattctctccagatgttgtcaaacgtctcctggtgggctgaaccagccccattgagaaatactgccttagaatgctgtgggctcagcatgccaccttaatcttttcattgaaaacacaactcctggccgggcatggtggctcagcctgtaatcctagcactttgggaggccgaggcgagcagatcacttgaggccaggagttcgacaccagcctggccaacatgatgagaccccccgtctctactaaaaatacaaaaattagccagcaatggtggcacacacctgtaatcccaactactagggaggctgaagcaggggaattgcttgaacccaggaggcagaggttgcagtgagctgagatcacgccacttcattccagcctgggtgacagagcaagactccatctcagaaagaaaaaagaaagaaagaaagaaagaaaacacaactcctctcctcagtcttacccagggaggggaacaaaaacaaacaaacaaaaaaaaaaacaactccgagcaccaacaattagtatttttcttccttccctaacacacaacataatctcttcaaaacagatggaacccatattccaatatctacctttggcatctttttcaaagtatttctagggtgacatttgggaggaaatgggaaaaaaaaaatatttggacacagctcttttttccactgggctttgagaaaaccccatcttgcgtgctcttactgtatctctcactgataagtccgctcataaaaccagggccttatccagggccacgcttacagaactcccacggacacaccatgataaggacgctgctgctgtccactttggtggctggaggtaagtcctgttacccagaggcactggtttcccatgccctggtggggctggaaatgggatcttcctgtcctcccctctcgcccccacccaacccctactgcattcagacctataatcataagaacattggaatgg

SEQ ID NO: 469 - DNA, 2300 bp, Homo sapien
atgggatggagttgggactggagtccacgtcttctgacatccagtcccatgggattctgccccccacccaatctttctcacctttgcaccatcctagggagattacagaattctttcccacccattttcttacccatacaacaatcctgcaatccaggcctggatggttatctaggaaactaaggcccagaagataagtggcttgtccagaccaccacactcaaaattgatggatcaaagacttgaactcggctgggcgcggtggttcatgcctgtaatcccagcactttgggaggccgaggcgggccaacacgaggtcaggagtttgagaccagcctggccaagatggtgaaaccccgtctctaataaaatacaaaaataagccaggcgtggtggccggcgcctgtagtcccagctgctcgggaggctgaggcaggagaatcgattgcagcttaccgcaaccattgccacccaggctcaagtgaccctctgcctcggcctagcctccagagtagctggagccacatacgtgtgccaccgcacctggctaactttttaaaagaaattttgtagtgacaggtggtctcaccatgttgtccaggctggtccttttttttttttttttttttttttttttcagacggagtcttgctctgttgcccagactagagtgcagtggtgcaatctcagctcactgcaacctccacctccaaggttcgagaggttatcctgcctcagcctcctgagtagctgggactacaggcatgcagcaccacacccgactaattttcgtatttttagtagagacggggtttcaccatgttggccaggctggtcttgaactcctggcctcaggtggtccgcccgcatcagcctcccaaagttctaggattataggagtgagccaccacgtccggccataaagtgcattttcacccaccagatgaagccctcctctgccagcattctgcttccccccatcattagagcggccagatcctaattgtgcatgtcggccttgccttctgctacatgtgcaccttccccgcattatacaaatccttaccacaatgttgtgaaacaatactgggcatgggcttctctccctgtttcacagatgggtctagagacttacatgactcagccaaggtcacactgcaacccctggtatgacctagaacaggcttctcagcctcagcaccattgacatttggggcagggcaagtcctattgcccagtgcattgtcgggtgtttagcagcgtctctgctccctgcccactggatgccaatttacatcaaccccagccatgacaaccaaaaatgtctccagatgttgtcaaaaggtctcctgatgggctgaaccagccccattgagaaatactgccttagaacgctgtgggttcagcatgccaccttaatcttttcattgaaaacacaactcctggccgggcgcagtggctcagcctgtaatcccagcactttgggaggccgaggcgagcagatcatttaaggtcaggagattgagaccagcctggccaacatggcgaaaccctgtctctactaaaaaatacaaaaattagccaggaatggtgacacacacctgtaatcccagctactagggaggctgaggcaggggaatcacttgtaacccaggagacagaggttgcagtgagccaagatagcaccactgcactccagcctgggtgacagagcaagactccatctcagaaggaaaaaagaaaaaaaaagaaagaaaacacaactcctctcctcagtcttacccaaggaggggaaaaaaaaaaaaaaaaaaagaaaagaaaagaaaacacaactccaaggaccaacaattagtatttttcttccttccctaatacacaacataatctctttaaaacagatggaactcatattccagtatctacccttggcatcttctcaaagtatttctagggtgacagttgggagaaaatggaaaaaaaaaatttggacacaagctcttttttccactgggctttgagaaaatccccatcttgcgtgctcctagtgtatctctcactgataagtttgctcataaaaccagggccttatccagggccacgcttacagaactcccacggacacaccatgattaggaccctgctgctgtccactttggtggctggaggtaagtcctgtcacccagaggcactggtttcccatcccctggtggggctggaaatgggatcttcctgtcctcccctctcgcccccacccaacccctactgcattcagacctataatcataagaaaaccgaaatgg

SEQ ID NO: 470 - DNA, 2300 bp, Homo sapien
ggccctcgtctagcaacagttgctaggatggggacgcactctctggtccctattctctttaaccctattcgtagaaccttagagcgtcagattggaagtgaccttagggattctttaactctccaactcctgcaatattgatagggagaccgaggtccagagaggggcagagatttgcccaaggcctagaatccagcattccttttatttttgtttacttatcttttttttttttgagagaatccaggacttttaatcccgtttaccgaaaaccgagctccacccaagaatgtaccagtctgtgccttaagcacggggaaagggcggtgggggtggagagagggataaggcacaggtaagtgaaggaaactttctttgagccaatgagatagatcccttgcggatataaagagctttcatatctccctgtcttgtttttatttttttctctttgcatttatcactatctaacatagtatgtcttatttattgatatagtttatcacctgatccttccactggaatgtaaactctaaaagcagggattttgttttgttcaccttcatgttcttagtgtttgactacaggctcaataaatattcgtagaagtgaacgaatggggctgaggttttggtgctcaagagattatattctaaggtggattcttaagagtgtggcttacagagtcaggttcgggtttcaatcctgcctgcctcggccacttagtacccaagtgaccttaaacattcgtttccctgaaccctagggtctacatctgtaaaaccggcggggggtgggaatactttcctggcaggattgtagttaaggataagtgaaataagcatgaaaagtggctagcacgatgcctgggacttagcaaatgctcagtaaacagaaacgattatttttgaaatgtgaaaatgaaccgttcagaacgatgggagtttacaggactagatttctgccgtttttttttttttctgtgtgggaggtgttagggtgggagggagggaagagggaatggaagactgtgtaaggtgggcttggttggatcagacactcgagtttggaacagtcaactgcgatctgggcacaagggcggtgaggggagcttatggttttacttggggtggaggagggggctaaggggaagccatgccccggaggaggttgaatgggcgggacagatcacggctccactcatggtttccctcttgctggaagtgtgacgactccctccggatctctgtaaaagcggggctatagtgaattctggcgaagggcccgcggtggaccaggaactggtgccagaattgcaaaagggcacctgcgcccggagtggggaggtgatgcgggggcggggcggggccctgggggcggggcgagtcgcggaggtgccgccttggggcggggcggtgacagaaggatggatcctgggggtgaggattgactttgggggcggggcgagagtgcgaactggagtctgaggctgagcggtgacgcaaggacgattctgagggtggagcgaggggaggggattggctcttggaggcggggcggtggcacgaggctagcccttgggggcggggcggtggcgcaagattgaccttgggggcggggtgggggcgtgggttgaatcctgggggcggggcggtggcgcggaatggattctggggtcggcgcgaggcgctgaggtgcgtcctgagggcggggcgatgacgcagagcgaatcctgggggcggggcgagaccttctagatgcgtcccggggagtgggcggtgacgcggtggcaggttctggggacaggcggtgaccccagaattgaccctggggacagggcgaggcgcggaggcgtcctgaaggcgaggcggtgacgcaagagcgaatccttggggcggggcgaggcgttggagatgcgtcctgcgggcgggacggtaacgcgggggcggggcggtgacgtgaggtcagtgcggggatacggggcgggttctggggcggggacgcagtggtggattctggagcggggcggtgacgtggggcgggttctggggcggggcggtgacgcggagcgtgttctggggcggcgcggtgatgggaggcttggccctgggggcggggcgaggcgcagaggtgcgtcctgagggcggggcggtgacgcaagagcgactcctgggggcggggcgaggccttggagatgcgtccggaggcggtggggagcgaagactgacccggggccgtgacgcgggggcaggccctggggcgggggcgggtcctggggactggggcgggcggccgaggcc

SEQ ID NO: 471 - DNA, 2300 bp, Homo sapien
ggttccgcgcgtcacgccgggaaggagttaccgggaaagtacaccggcccaaccggctgcagctccgtgctccagttagttcgccgggccgggagcttcccgtccacaccagcgctcgcctgggcctggggaggggaaagaggaggggacaagcccgaggggagtcacgtgacgcttaaaggtctatcgcactgaaggcgaggaccgaacaggtcgagggcgtctactgggcgaatctattttgacccttgccactcgccgtctaggcgtggacctggggtggttgctatagaaacgaggcgcgctctttggttgcagccaaaaggctgatcgtgaccaaagaggccaaaacgtgcctcctagcgaggcgaagtcgctatgcatgatgggataccagaaggacctcctcgatccaggaaggtgtttccgctcctaccgggagatggccctcgtctagcaacagttgctaggatggggacgcactctctggtccctattctctttaaccctattcgtagaaccttagagcgtcagattggaagtgaccttagggattctttaactctccaactcctgcaatattgatagggagaccgaggtccagagaggggcagagatttgcccaaggcctagaatccagcattccttttatttttgtttacttatcttttttttttttgagagaatccaggacttttaatcccgtttaccgaaaaccgagctccacccaagaatgtaccagtctgtgccttaagcacggggaaagggcggtgggggtggagagagggataaggcacaggtaagtgaaggaaactttctttgagccaatgagatagatcccttgcggatataaagagctttcatatctccctgtcttgtttttatttttttctctttgcatttatcactatctaacatagtatgtcttatttattgatatagtttatcacctgatccttccactggaatgtaaactctaaaagcagggattttgttttgttcaccttcatgttcttagtgtttgactacaggctcaataaatattcgtagaagtgaacgaatggggctgaggttttggtgctcaagagattatattctaaggtggattcttaagagtgtggcttacagagtcaggttcgggtttcaatcctgcctgcctcggccacttagtacccaagtgaccttaaacattcgtttccctgaaccctagggtctacatctgtaaaaccggcggggggtgggaatactttcctggcaggattgtagttaaggataagtgaaataagcatgaaaagtggctagcacgatgcctgggacttagcaaatgctcagtaaacagaaacgattatttttgaaatgtgaaaatgaaccgttcagaacgatgggagtttacaggactagatttctgccgtttttttttttttctgtgtgggaggtgttagggtgggagggagggaagagggaatggaagactgtgtaaggtgggcttggttggatcagacactcgagtttggaacagtcaactgcgatctgggcacaagggcggtgaggggagcttatggttttacttggggtggaggagggggctaaggggaagccatgccccggaggaggttgaatgggcgggacagatcacggctccactcatggtttccctcttgctggaagtgtgacgactccctccggatctctgtaaaagcggggctatagtgaattctggcgaagggcccgcggtggaccaggaactggtgccagaattgcaaaagggcacctgcgcccggagtggggaggtgatgcgggggcggggcggggccctgggggcggggcgagtcgcggaggtgccgccttggggcggggcggtgacagaaggatggatcctgggggtgaggattgactttgggggcggggcgagagtgcgaactggagtctgaggctgagcggtgacgcaaggacgattctgagggtggagcgaggggaggggattggctcttggaggcggggcggtggcacgaggctagcccttgggggcggggcggtggcgcaagattgaccttgggggcggggtgggggcgtgggttgaatcctgggggcggggcggtggcgcggaatggattctggggtcggcgcgaggcgctgaggtgcgtcctgagggcggggcgatgacgcagagcgaatcctgggggcggggcgagaccttctagatgcgtcccggggagtgggcggtgacgcggtggcaggttctggggacaggcggtgaccccagaattgaccctggggacagggcgaggcgcggaggcgtc

SEQ ID NO: 472 - DNA, 2300 bp, Homo sapien
ccccagggtcaattctggggtcaccgcctgtccccagaacctgccaccgcgtcaccgcccactccccgggacgcatctagaaggtctcgccccgcccccaggattcgctctgcgtcatcgccccgccctcaggacgcacctcagcgcctcgcgccgaccccagaatccattccgcgccaccgccccgcccccaggattcaacccacgcccccaccccgcccccaaggtcaatcttgcgccaccgccccgcccccaagggctagcctcgtgccaccgccccgcctccaagagccaatcccctcccctcgctccaccctcagaatcgtccttgcgtcaccgctcagcctcagactccagttcgcactctcgccccgcccccaaagtcaatcctcacccccaggatccatccttctgtcaccgccccgccccaaggcggcacctccgcgactcgccccgcccccagggccccgccccgcccccgcatcacctccccactccgggcgcaggtgcccttttgcaattctggcaccagttcctggtccaccgcgggcccttcgccagaattcactatagccccgcttttacagagatccggagggagtcgtcacacttccagcaagagggaaaccatgagtggagccgtgatctgtcccgcccattcaacctcctccggggcatggcttccccttagccccctcctccaccccaagtaaaaccataagctcccctcaccgcccttgtgcccagatcgcagttgactgttccaaactcgagtgtctgatccaaccaagcccaccttacacagtcttccattccctcttccctccctcccaccctaacacctcccacacagaaaaaaaaaaaaacggcagaaatctagtcctgtaaactcccatcgttctgaacggttcattttcacatttcaaaaataatcgtttctgtttactgagcatttgctaagtcccaggcatcgtgctagccacttttcatgcttatttcacttatccttaactacaatcctgccaggaaagtattcccaccccccgccggttttacagatgtagaccctagggttcagggaaacgaatgtttaaggtcacttgggtactaagtggccgaggcaggcaggattgaaacccgaacctgactctgtaagccacactcttaagaatccaccttagaatataatctcttgagcaccaaaacctcagccccattcgttcacttctacgaatatttattgagcctgtagtcaaacactaagaacatgaaggtgaacaaaacaaaatccctgcttttagagtttacattccagtggaaggatcaggtgataaactatatcaataaataagacatactatgttagatagtgataaatgcaaagagaaaaaaataaaaacaagacagggagatatgaaagctctttatatccgcaagggatctatctcattggctcaaagaaagtttccttcacttacctgtgccttatccctctctccacccccaccgccctttccccgtgcttaaggcacagactggtacattcttgggtggagctcggttttcggtaaacgggattaaaagtcctggattctctcaaaaaaaaaaaagataagtaaacaaaaataaaaggaatgctggattctaggccttgggcaaatctctgcccctctctggacctcggtctccctatcaatattgcaggagttggagagttaaagaatccctaaggtcacttccaatctgacgctctaaggttctacgaatagggttaaagagaatagggaccagagagtgcgtccccatcctagcaactgttgctagacgagggccatctcccggtaggagcggaaacaccttcctggatcgaggaggtccttctggtatcccatcatgcatagcgacttcgcctcgctaggaggcacgttttggcctctttggtcacgatcagccttttggctgcaaccaaagagcgcgcctcgtttctatagcaaccaccccaggtccacgcctagacggcgagtggcaagggtcaaaatagattcgcccagtagacgccctcgacctgttcggtcctcgccttcagtgcgatagacctttaagcgtcacgtgactcccctcgggcttgtcccctcctctttcccctccccaggcccaggcgagcgctggtgtggacgggaagctcccggcccggcgaactaactggagcacggagctgcagccggttgggccggtgtactttcccggtaactccttcccggcgtgacgcgcggaaccgcggacgcggcggggccaggccg

SEQ ID NO: 473 - DNA, 2300 bp, Homo sapien
gcctggagggtggtgagccctgggagggcaggatgctcccacccttccatataccttaccatgtacctctcttccttctggctgatcatctgtctcctttgtaatatcccttatacctaatgagtaaccataaggaatgttcccctgagttctgtgagcagctcgagcaagttagttgaacccaaggagggtcatgggaccctttgatttatagccagttggttggaagtacaggacacaacctgggacttctggcgtctgaagtgggagcagtcttacgggactgaacccttcacctgcaggacctgatgcttcctctgggtagatagtgtcagaactgagttgatacccaattggtgtctgctggaggatttatggggaacccccacccccacagcgtgtggtgtcagaagggaagcattgagttgggcatagtggcacgtgcctggaatcccagctactcaggtggctgaggcaggaagatcgcttgagcccaggagtttgagaccagcctgggcaacatagtgagaccccatctcttacacaatgagtgtcagggaaagcattgtgttgagtgtgagtaggaaaaacaggttggtttttcctctctcacaacttcagtgtgcaacaataaatgaattaaatagattgatggcccagtttcagtgagctcctactatgtgccaggctctggtctggtgttggggatacatcagtggactacaaagggatccctatcttcatgaggcttacattctagaaggggagacagacaataaacaattgacagaaggaaagtgggtggtaccttagaagatggtaaacgctgtggaaaaagttaaagtgagcaggttgtgtgtggaccctgagtgtggggagtactgttttaaatatggtgccaaggtaggccgcattcaggacttgaagttggtaaagaagtcagctacgcagaagtcacggagatgcacacttcaggctgaaggaacagccaaggccctgaggcaggagcatccactgtcttcatagcacagcaaggacgctggggactggcgcaggctgttggaggagtggaagaagagggcatggggaaccaggggccaaacacaaagggtcttgttggcctctgtgaggattgtgcattttattccagctgaaatgggtctttgcagggtttgggcagaggagtgatgtgatccatttttatgttttaggaggagcagcctggctgctatgttaagaacagactgtcaggagacagggagaaatagggggagagcatttaggatattattgcagcaacataggcaggagagataatgatgactcagagcagggcatataatgaaagtgatgaaaaacagttgaattccagacattttctaaagagaaaaccaacaagacttgccgacagattggatgtggggtgcaacagataagagaagccaaagatgacgcttacagtttttgccctgagtaactggaaggatggagctgtcatcaactgaaatggcaaagacgtgggtaggacaggtctgtgggaggagattaggggttcgtttttggaaatgttaagcttgagaagtctagtagacatccaaaagaaaatgtacatttatcggcctttaatattgaatgtgtctccagtgttagcagagtaactggccctccaaatatatggttggatgaaagaacaagaaaagttgttcaagtattaagtgaaataagtatgagatgaccccattttgttttatgtatatgcatacacacacacacacacacacacacacacacacacatttgtaactcttcttacatattgccagattgctctacagaaaaactgaaccaatctagaattccagcagtgaaagaatgctagacagtctattaggaaagacatctcctatgaggtcgggatttcaatttcacaccaaaaaattacttagcactttttccagctgccatggagacataaaaaggcttcatttggatcttccattcttttcaggtgtaggaattggcgtggtccatgctgggtatgagagacgcctggcccatcacctaggggcacacagcacgccctctatcctaggaatcattaacgggaaaatctccttcttccacaatgcagttgtccgtgaaaatctgcgacaatttgtagaaagtcttcttccagggaacttggtggagaaagtaagtatctgtcaaggaaactatggctgagaagtagtttaagaggtacctaggactgttaattgcccagaacattttctgtagtcctctcaaacctgagtttcatt

SEQ ID NO: 474 - DNA, 2300 bp, Homo sapien
cctagtggtcagagaagatttccctaagatgtaacatttcagctgagacctgaaggatgagcacagtttagccaggcgtctgggatagactgggtcactttacagaagcacagaatatggaagagtgactgtccctactaaagcattccacacagggtgagtctttggaggtcttgggaaggagcaaggataacaattaaacagtagggaagtacagagtattgaggaaatggattggtgggaatcgggaaggctaagttacatgtattcaataaagtaggaagagttattatacaaagtatctaaaaagtctagaaattcagggaatgtattcattacaccttctcaggtgaatgaatcagtagctttaaatttagggctgtttcatctgtaaaaggtatctggatatggaaggaaaacatatcaatcatgtaacttgaaaatataaaacataatttccctgtgtgtctaggcttttcagattcctttatagtcttaagagcgaagaaaaaaatgacttaaatataaaaaaagaatatcctggactgtaaggattgttgtttacacagccttcaaaaaatatcccaaatccacacacttctcactttttttaaccactgccaccctggaacaagccaccatcgtctcccagcgagacccccctggcagccttctaactagtctctctgctccattccactcttgtaccctccaggcagatgtccacacgtcagccaataatgtttgaaaatgcaaatcagatccagtcactccccatcctggggtctttgcacttgtagtctctctacctgggatgctctgaccccatttcctgtcataacaatgtcaccttttcagttggcacttccctgaccaacctgtctgatggagcctggcttctacccactctggcctctctctgtccccttttcatctttttttttttttttaatatatagcacttgttgatacctgtcataatatatctgttttctgtcttccccactggaatataagctccatgagggcaataatattgtctatattacctgacatatactaagtgctcagtaaatatttttgggagaatgaatagctaaactttccattggaaccttgcaaaggaagccgttcagaatgaggctcagtggcctctggcctgagagagatttgaccagccctccctatactggaagaactaggacaaatagtttctaaaaggccctgccggccaggaacagtggctcacgcctataatcccagcactttggggggctgaggcaggcggatcacttgaggtcaggagtttgagaccagcctggccaacatagtgaaaacccgtctctactaaaaatacaaaaactagttgggtgaggtggtgcacgcctataatcccagctacttgggaggctgaggcaggagaatggtttgaactcaggaggcggagttacagtgagccgagatcacaccactacactctccagcctgggcgacagagcaagactccatctcaaaaaataaaatgaaaggccctgctgcatcagagattcagtgaccaaccccttaaattcctggcaggcacgatggctcatgccagtaatcccaacactttgggagcctgaggtaggaggattgtctgaggccaggagttcaagaccagcctgggcaatataaacaaaactatatatatatagttttcatatatataaaatttcatatatataaaattttaaaattcgtaaatgtggtaaagaagtttggtttgggaaaaacatcacagattgggaagagaaacagtttgttaatgacttggaaatcctcccttagttgaaatgtcagctttcactgggcacagtgtattcacttccataagatgagctcctcgtcttcttcaccttcacttgccattataggtgctggccctgccatcagggattggttataaagttttgtctttttgttgtgcaggtactgtgtggttttattgactgctgagactaccaagttgagcaaaccctttgaggctttcctgtcctttgccctggcaaacactcaagacacagtgagatttgtgcatgtctacagcaatcggcagcaggagtttgccgacaccttactaccagacagtgaggcgtttcaagggaaatcagcggtaagccacagagtctctcctcatcccaggctcttcataaccatgtggcacttgattctgtttccttcttccttgagagtgttgaatacagattctaggaaatctgaaactctgaagcctattttcaaagtctactcttttgtttttc

SEQ ID NO: 475 - DNA, 2300 bp, Homo sapien
aagagaaacagtttgttaatgacttggaaatcctcccttagttgaaatgtcagctttcactgggcacagtgtattcacttccataagatgagctcctcgtcttcttcaccttcacttgccattataggtgctggccctgccatcagggattggttataaagttttgtctttttgttgtgcaggtactgtgtggttttattgactgctgagactaccaagttgagcaaaccctttgaggctttcctgtcctttgccctggcaaacactcaagacacagtgagatttgtgcatgtctacagcaatcggcagcaggagtttgccgacaccttactaccagacagtgaggcgtttcaagggaaatcagcggtaagccacagagtctctcctcatcccaggctcttcataaccatgtggcacttgattctgtttccttcttccttgagagtgttgaatacagattctaggaaatctgaaactctgaagcctattttcaaagtctactcttttgtttttcctttttcttgatttttttttttttcttttgagacagggtctcactctgtctcccaggctgggagtgcagtgacatgatctcagctcattacagcctcgacctcccaggctcaagtgatcctcccacctcagcctcccacatagctgggaccacaggcacacacaaccacgcctggctaattttttgtatttttttgtagagatagggtttcgacatgttgcccaggttggtctcaaactcccgagctcaggcaatcctcccgcctcccaaagtgctgggattacaggcatgagccactgctcctggcctaaagcctactcttaaaacagtttttgacctggtctttttacattctggatgtcagcctcaggcccccacagaaaccatgttttctatcagtgaacggtaaaggtcatcagtgcttttcaccagttttttactaaggcaagtctggtcttgcagcatcctagatcctagattttacaaatccttaggccactggtaatgtgctctggaaatttctgcccccctctgcctctttaacttcatcctggttgatctctcctgcctttctcctgcattgtcatcacttcctacagaaacaagaaattctcctctgacttttcatcattttcgcaatcatggaaaatctctctaaaaaacaaaggtttccattaatattaagtcaaggttatagagcaaagtctattgagaaaaaagagctttaacttttaacaaaagcttaggaaagtcaccataaaagttatttcttaggccgaacgcggtggctcacacctataatcccagcactttgggaggccgaggcgggtggatcacttgaggctaggagtttgagaccagcctaatcaacatggtgaaacctcatctctactaaaaatacaaaaattagctggtgtggtgcacacctgtctgtagtcccaactactcagcaggctgaggcacgagaattgcttgaacctgggaggcagaggttgcagtgagccaagatcgcaccattgcactccagcctgggagacaagggcgaaactctgtctcaaaaaacaaacaactgggccaagtgtggtggctcacagctgtaatcccagcactttgggaggccaaggcaggcagatcacgaggtcaggagatcgagaccatcctggctagcatggtgaaaccccatctctactaaaaaaaaaaaaaaaaaaaaaaaaaaataccaaaaattagccaggcatggtggcaggtgcctctagtcccagccacttgggaaggctgagccaggagaatggcgtgaacccgggaggcggagcttgcagtgagccaagatcacgccactgcactccagcctgggcgacaaagcaagactccgtcaaaaaaaaaaaaaaaagcaaacaactgtaacttaaccatgcttttgaaacttctgatgttttttctctacttttcttccaggtgtctattttagaaaggcgcaacacagcaggaagggtggtgtataaaaccctggaagacccttggattgggagtgagagtgacaaatttatcctcttgggctatctcgaccagctgcgtaaagatccagctcttctgtcctctgaagcagtgcttcctgacctgaccgatgaacttgcccctgtgagcatcggggctgggaagggtgggacaccaggagggcttgtgagtacacagtgctggtggcggatttctgctcagagcagaggtccagcagcagcactgtgttgcagggtagagggactctcccttccggctttagtcctgacca

SEQ ID NO: 476 - DNA, 2300 bp, Homo sapien
aggtgctgtcaagcatccaggtcagggttagaaattggtcgcctggagctcagggctgggatttgggcttgtggttgacctgcctatgggtgaaagtcatcacctccgtattaaaagggattgccagccgagaaggagccacgaaggtggaaggagaccaggggagtcccagtcaagaggccgcctgaggaacgtttcaaggagagagggtgctcagcagtagtggatgttggggacacctcattggaacgcctggcacatagcggacactcaatatttgtgagctgaatgaaagaaaaacccggagtaagaacatgatacattcaggacaagcaacatgaaagaaatagcagttgaatttgggagtcaagagaataactgagaccctttaagtggcataagggagaaaaaaaggaaaaaataactgagagattgttgcatttgttccagaaaatggctgggacctgccccaaggccaacactaagcactgataattgaccattaggaaactctgtcccgacctgcagagtggaggctccactccagagtggaggctggagtggtgtggggtttaatgtgcaacctttttttttttttttgacagagtcttgctgtgttgcccaggctggagtgcagtggcgcgatcttggctcactgcaaactccaccctcccgggttcacgtcattctcccgcctcaggctcccgagtagctggtactacaggtgcccaccaccacgcctggctaattttttgtatttttagtagagatggggtttcaccatgttagccaagatggtctcatctcctgacctcatgatccgcccacctcggcctcccaaagtgctgggattacaggtgtgagccaccgcgcctggcctaatgtgcaacctttgtgtagaggttgcaacgtaaatgcaaatgtgagccttttccattcaatctcaacatttagagatcagaaaaaataatatatataatactgctaaatggctcacataattccattacaaatcacttctttctttccacgtgtgtttttctttccccttagaaataaagaggatgtaacaggttctctggcactgtgaccttccttacagcttgcctgtaagtcctttatttatttatttatttatttatttatttatttatttatttttgagacggagtcttgctctgttgcccaggctggagtgcagtggcctgatctcagctcactgcaagctccgcctcccgggttcatgccattctcctgcctcagcctcccaagtagctgggactacaggcacctgccaccatgcccggctaaatttttgtacttttagtagagatggggtttcaccgtgttagccaggatggtctcgatctcctgacctcgtgatccgcccgcctcagcctcccaaagtgctgggattacaggcgtgagccaccgcccctggcctctagtccttttttaacaaggttatttaaaaagactttactggccaggcgcgatggctcacgcttgtagtcccaactactcgggaggctgaggtgagacgattgcttgagcccagcagtttgaggctgcagtgagctatgattgtgccactgcactccagcctgagcaacacagcaagaccctgtctcaaaataactagctagctagctaagtagctaactaactttactgcttcttgagattcctatccctggacatttaaaaatacattatttaaaaaaatgcatttcctatttttctggcttagagaaagatcattttccttcatatctttctggctttaaaaatattactctggggtggctgctgtggctcacacctgtaatcccagcactttgggaggccaaggtgggagaatcacttgagtccagaagttggagaccagtctgggcaacacagtgagaccgtctctataaaaacaaacaattactctgaatgggagaagaggctgctgaaggccacagtggggagcagggcgcagacacccctggcacagtgccggccagtgggcacccccagcctgactctatttgccagaggctgaagtccagaggggttgaggggagagcacggcaggtcctggggcccctcccccgccttgatcctagggcgcccctgacctttgagccggctcgggttccggctctggcgcgtgcacactcgcctcgccgttcgggaccagccagatcgcggcggcctcgcgggcggtttggtcggtgaggtcttggccgcgcgcggcaatgctgaggctgctggcgtccgggtgcgcccggggcccggggcccggcgtgggcgcg

SEQ ID NO: 477 - DNA, 2300 bp, Homo sapien
ttcaaagcaggtaatctgactcaagctcagtcctcaccaccagtttatattgctacatgtaagacctcatttcatccttctagaagtcctcagagacaggaactgtgagtaatcattcccatttcatggataaagaaactgaggcatggggattttaattaatgtacccgagttcacatagctagtaaacggcagactctccaaattggaagacagttgtggagtgaaaatatttattatttttttttttgagacggagtctcatcctgttgcccaggctggagtgcagtggcacacctcggctcactgcaacctctgcctcccaggttcaagcgattctcctgcctcggactccctagtagctgggattaaaggcgtgcaccaccatgcctggctattttttttttcttttttggaagaaaatgactttattctaattaactcacaaagaataaaatcataacagctagtttaaggaggccacacaaacatttgcccagtcccagattctacagagtaggaacaccctcccttccatttcaattctgaagcaaggaagctaggaatgacaggagaagtttaactgatgcttacactttataccctcactaccaattctatttttatactaaattaattagtatgagagctgattttccatctctccaggttgaacttcttgattaggccaatccgtttgcaagtcggcactgtttcagcacctcattgaaaccctcacagagcttgatgtcaccctggttctcggcacactccagaaactgtttgatctcacagaagcaaggctgctgctgctgtgccggctgggttccctgaggctcctggtaagtgatgtcaggcctcgcaggctcagcattacttcctccactgaagcccccagtaatggcatgacccagtatgtgccccacagcagagcccacagccacgccagctgcagtggttgccatctgggccatcagacctggctgccggggcgcagcagcagaagagccaactgtagatggcggtgccgctgctggtggctgagcgactggtgctggcctgggtgcagctctcatctgaggggcccggctggccggaggggccatgcgggaggtgtggcttcggcttccaggtatcctaggtacgcgacggctcggcctccggacgtgtgacaaccagcgaagagctaagtgacttcttccgcctggctaatttttgtatctttaatagagacgggtttcaccatgttggccaggctggtctcgaaccctgacctcaggtgatccgcctggctcagcctttcaaagtcctgggattacaggcatgagccaccaggccgaaaacatttatttctaacctttagagcacaaactctctgtctatactaattacatggggagtcaccttgctgcgctccaaaacgctcagtttcatcaccacatggtcaccagcaaagtttcgtttcttttaagtggcgtgatctcagctcactgcaacctctgcctcctgggttcaagcgattgtcctgcctcagcctccagagtagctgggattacagatgcgcgccaccacacacggctaatttttgtactttcagtagagatggggtttcgcctagttggccaagctggtctcgaactcctgacctcaagtgatcccaaagcgctgagattacaggcatgagcgaccacacgcccgaccttcacccattatttgtcaggaaatttctggccagcctaacattagcaggtgttgacgtaactaaaagcttctgtcttactttgaggaaatgctcttgcacaactgaactagcctcattgacacaattctgcaccgtttcactgcttcaccatagccagcccagacaagtctcaagcgccggtttcctttctttggtcgcaccagccaaagccaggactttgtaaaaggatacggcgcaaaccccaggaatgcctcgcctatgcgctcagagccacaactgccttcgcgaaaagctctgccaaagggcggttgcgccgcatcacgtgcctgcggcgtaatctcccactgggcagcggcgctggctcacgtgacacgtgcaggccaatgcctggcgtccgcgcatttggctcctggttgctaggcgacgccaacccgattctggttgctggagtttatcctcccgaggttgctgtgcgagtttcggactcagctcaagcgcttggatccctacagcacctgcgagggcttctcctggctgccgctttcgttctggcgaatgttcggggtggcagccccccttcgaggcttgcacgagggcg

SEQ ID NO: 478 - DNA, 2300 bp, Homo sapien
atccaatcatgttgtaggaagagcatagacgatgggaggcactgtcatggtcatctttggagaacaaaatctgccagacctgggaacctgagcaccactagaccaaatataacaattaatcaatgattcaagcctcaactgattccttgataccaccactgggcaatcctagaacatttctcagctaaacttgcttcaatttgcaatggttatttcaaacattcactgtagaaggcactgtgtacatctttcctaatacccattcccagccccccttttccctatttatgtcctttaggcaaagctaaatacttgcgttcctagcctctcttgcatctatgtgacacaattctgtccagtgagatgtaagcaaaaatgtgcacagggacttctgggcaagctttttccttgaataggaaaatgatgcgtgcagtggaggcagccagccatatattgcaaccctcaggaaaaggtcaagacaattacaaaagtattggccctgatttcagtgagccactcaaccagtgctgttgctacctccaggccttctctcctgtgagaaaacaaacccttgtttgtttaagccactgatagtcaagctttctgttgctcctaggggatataagcattctcactcccctgtgcctctactttctcttttttttttttttttttgagacagagtctcgctctgtctcccaggctagagtgcagtgacctgatctcggctcactacaacctccgcctcccgcgttcaagtgaccctcctgcctcagcctcccgagtagctgggactataggtgtccgccaccatgcccggctaatttttgtatttttagtagagacggggtttcaccatattggccaagctggtctcgaactcctgaccttgtgatccgcccgccttggcctcccaaagtgctgggattacaggcgtgagccaccgcgcccagctcctctaatttctctttgtaaaagccttcagctgctaattctccctttcctgccaccaacagcctacttactacctacttacctgcacccacagccatcttatttgctccttctctcctgttaaaatggaaaagggctccctaccatggagggggagtgggagtaaatggaaagatgctaatctggcatccattacaagttcatctttcagttttggttttcttactcatccgcaccttagttctgggcctctaccactcatcagctgtgtgccttaaaaacaggccattaaagtagcaaatatttattgagtagattctaagctgtgcccaaaaaggcactgcgctaggtggtaggagttgctagggctaggaaacagacacagtccaagtagagagaaaattatttacaagacaggggaatggagccttggaggaactgacctatgtggctgggagggcagagaatgtgggaagagctcggaagaaggggctggggaggtaggcgtgggccacagccaactggcttctgtagactagggagggtaatgattttggtttcaatcctaaatcactaagacaggaagtgaattactctgtcggagcctcaatttctacctcgaaaaatatgttttattactaactcctgtactagattgagagttacggagaaggatttatccttttattcatttctgcatcgccagcgcccgacacatggtaggcgcttaatcaatgcctgttcggtgaataaataagaccggggactcctccacagacttctgtcattaagtcaaccagtcagcagagatttccttctccgcgttcctttccttccctccccttttcttgcccttcctccctctcctcttccacgcccccttcccactcctccccctcctatcctctcctggcttcctcctcctcttcccggccccgccccccgctgcgttgcgaaggcggggaaggcgaggcgggctttacggcagccgcgttgcggcggggcggggcgccgggcggccggcgcgcttggcggcagccgtgggaggcaggccggcaggcagacggactcgcaggcgtgtggcggcggccgtgcttgctagtgagggcgggagggagtgactcactgagcgtgtgtgagggagggagcgagcgagcgaacgagcagccggcgccgtcctcccgcagcaccagccaggccacgccgccgcctcttcccctgcgccccgcgcccaggccgggccgagccgagccgagccgggtcgggcccgggccatgctgctcaccgtgtactgtgtgcggagggacctctccgaggtgaccttttccctccaggtcgacgccgac

SEQ ID NO: 479 - DNA, 2300 bp, Homo sapien
caccatttccttggttgggagttgaagaaagtggctagttgaacccctgctaaagggtagaaatgttacatcatgagtttaagcattctctttttctatctgaggtccaaaaaggcttcaggatagtcccagacttgagacaagtttgtttgttttttgattttttagtttatttaaaatccttaatagtgcaaggattgtgctataattctgatcactgtggaattgcttagtgtactgtcatttataacattaagcacagttatccttaagaaaagtattcagttgttcagacaagtttgaccatcaactatattttttggagttgaaggaatgtcgattgactcaggcctagcccctcattctggctctccttgtttacttttctctttttcatttttcttttttaaataacagttttattgagatagaattcatgcatttaaatgatttttttttactatattcatgagttgtgtaaccatcaccacaatccattttagcgtattttcattaccttaaaaagaaatcctatacccatttatagtcatttcccatttccccctagtctccgcagcctagacaactacaagtctactttctgtctctatgtatttacctatttggaacatttcatataaatggggtcatacaatatgtgagtccgttgtgtaaggattaaaattcccttttatcttcctttcattttagtaaggtcagttccacctggcatatagaacctgggagttgtagcttctaaactgtggtagcttttggtgtattcagcactgagaacctatgcaagtcccttttcttctttcttttctataaaatgatgacactgtttagctccccaagggcatgagaagagttagcagagatgcacagattaaagtataaattcagagaactattaagaacttccctgagccaatacgtttagcactgacttgcagaatttagcatctaatatttatgctgctcacttgacatatataatatcctttgatccggccgggcacagtggctcacacttataatcccagcactttgggaggctgaggtgggtggatcacctgaggtcaggatttcgagaccagcctggccaacatggtgaaatcccatctctactaaaaatacaaaaaattagctgggcgtagtggcacacgcctgtaatcccagctactcgggaggctgaggcaggagaatcacttgaacccaggaggcagaggttgcagtgaggcaagatcgtgccattgcactccaatctgggcaacaaggcaagactccgtgtcaaaaaaaaaaaaaaaaaattctttaatccaagcgtcaaggctgtttgaaccatatgtcagaccagagtaggatttttctcaagaacaacatccagacttatgcaattatatttattgaaactagctttaatttttttttttttttttcttttgagatgaagtttcgctcttgttgcctgggctggagtgcaatggcgccatctcggctcactgcaacctccacctcccgggttcaggtgattcttctgcctcagcctcctgcgtagctgggattacaggtgactgcgaccacgcccagctaatttttgtatatttagtagagacagagtttcactatgttgaccaggctggtcttgaacttctgacctcaggtgatccagccaccttgacctcccaaagtgctgggattacaggtgtgagccaccacgcctggccactttaatgatttaaaaacataaattaaaaacctgatgtctattgtgagatattttataagctaaaaatttggagttactaccatcaccttccccctatttttcttcttctatcgattcactctcagccggcagtctttatattcagagtcatcatgagaaagaacaaggttaaagtctacagttacctttgctgctgtcatataccatgtatgagcaagtgttctgctgtttccttcaagtgcttgtttttgtagagtaatttgagtaaactgaattgattttccccaacagacttaccccgaatagatttcagtagtatagctgtgcctggcacatcaagtccccggcagcgccagccaccaggaacacagcagtcccactcatctcctggagaaataacttcatctcctcagggcttggacaatccagccttgctccgagatatgttgctggccaacccgcatgagctgtccttgctgaaggaacgcaatccacccctggcagaagctctgctcagtggagaccttggtaagcttataaatttggaaggctattaggctggcctgag

SEQ ID NO: 480 - DNA, 2300 bp, Homo sapien
tgaggtcaggagttcaagaccagcctggccaacatggcgaaaccccgtctctactaaaaatacaaaaaaattagctgggcgtggtggcaggcgcccgtaatcccagctactggggaggctgagacaggagaatcacttgaacctgggaggaggaagttgcagtgagctgaaattgtgccaccgcactccggcctgggtgacagagcgagactccgcctcaaaaaaaaaaaaaaaaattagctgggcatggtgtcacatgcacttgtagtcccagctactcgggaggctgaggcaggagaatcgcttaaagctgggaagcggaagttgcagtgagcagagatcgcaccaccgcattccagcctggggaacagagcaaggctctgtctcaaaaacaaacaaaacaaaacaaaacaaaaaaaacaaaaaacaaagtaccactattttgggtctctccttgggaaactaaggggctggggagcgacctttggaggcttgtggggtccctctgagataagcaatgaatcagtatttcagatgctaaggggacttcagggatggggtggcctgagcagagaagagggaagaccagggaaccagagttgagaactggggtgtctgagaataaaaaggagggactaatctatgtgtcaggatatatttatttgggaacttaaggagggaagagagccaggtaggagactgacacctctaagtgcaggggctttatgagatggtggatttgaggagggtgtgtgggaagagagttgttacggtgggtttcaggggctgagggagttgaggcccttgggatacgtggggctgaagaagagggataaggataaggagtgggaatggggcattggggctgaaggtgaggagggtgtgttttgggggtggggaggaacaccagggacctcaaatgtaggactgggccttgagggtgaggcactgaggaggggaggctgtggagggccagggggcccagggagggtctagggctggggactggagtctaggctgacccggtgggggtgctgggtcctccaggctgcgaaagccagggggcctgggtctgcacattgagggggtggctgggctaaggaaggggaggaagataagtggggcttgcaggctaagagggtcttggggtccctggccagagttagtggggtgcactggggtctccaaggaggggtctgtggactaaagagggccggcgggagggggcccagggtctgtgggtgtctcgagtctctgaggagggccggggtctcagggtctgtgggggtctctggcctgtggggtcggagtctccagagtccttggggcctgtgggagtctctggggttttgtggggggatcctgtgggctgaggagggctgtggggagggtctcagggtctctggggagggccagtgcctcggggtctttgggggtctctgaggagggctgggggcccagggtctgtgggggtccccagcaggtggggttggggtctccggagtccctggagtctgagggtgtctctgaggtcccaggggggagtctatggcctgagggctgagggggagggtctccagggtctctgaggagggccggtgtcccgggcaggcggggtcggggtctccggagttcctggggtctgagggtgtctctggggtccctgagggaatctgtgggctgacgaggcctgggggagggtctccgaggagggccggggtcccagggtctgtgggggtctctggcaggcggggtcggggtgtccggagtccctggggtctgagggtgtctctggggtccctgaaggaatctgtgggctgaggagggcttggggagggtctctgaggagccccgaggtccccggcaggcggggtcgaggtctctggcgtccctggggtctgagggtgtctctggggtgccggggagagtctgtgacttgaggagggctgggggcgggtctcggggtctctggggagggccgcggccaagggtctgtgcgggtctccgggtccccggagtccccaggcgcaggcgggccctggcgccgccccgcctgacatcagttcctgccgccgccgccgccgcggcgcacagcccgcggcctccttccccgccggccgcgctccggagcctccgggccgcggtggagcgagggcccaggcgaggcgagggccgggcggcgggcgccgggccccgcggccggcacgacggagcccccgtacggccggcggcagcggttggcggcggcccccggcccccggcgcgggaagcggcggcggggcggcggcggcggtggcggt

SEQ ID NO: 481 - DNA, 2300 bp, Homo sapien
aactcagccaaattgttgtgagctccggaggccccaggggtggtggagatggtgttccttccaagttgctcctaaagtacaaaaccccatgtcctgttaggttgtggcttctactcgaaatggggccacccctgtcaggtttccctgggaggaactggccagcctgcctccctcctgggctaacgcatgctctgggggtcggggaccccggggggtgcctgacagggtgtctcctgcttccttgtcctcccagatggagacctcacagacacggtcagtggtccccgctccacagcctccgacctgaccagcagcaaggcctccaccaggagccccacccagcgccagaaccccttcaacgaggagccggcagagactgtgtcctcctctgacaccacccccgtgcacaccacctctcaggagaaggaggaggcccaggccctggacccgccggatgcctgcacggagctcgaggtcatcaggtcagcagggaggggcccagaaaggagctgaggtcctggggtccaacctgtccactcccagcatcagctgttcatccagggcagaccgggacaccccctgagggcagttgcatgccttcctggaaacccttcccacctctaggaggttctttgagcaagaggaagtggaggcctgtcctagtcagctcggctgctggaacaaagcaccgcagacaggcggcttccacaacagacattctttctcacagctctggagcctacagtccgaggtcagggtgccggtgtggccagcctctgatgagggattcacagatgtccctcttctcgctgtgttgtggcggggagtggagagagagctctctagggtcccttttatgagggtgctgatcccattcctgaggatcccaccctcaggacctcatcaccccccaccccctgataccatcacattgggagttaggatttcaacacaggaatctggaggggacacacacattcactccattgtagggctcaagcccttggaagcaggtggcacaggcagcgaccgtggctggtgtctggggccatgtccaggctgccagggcgtttgctgggtctgcctaagatcagaaagcaccttcaggctgtacttcttcccaagggagttcttggaagttaagatacaatttctgagattcattgaaagaaaagtatctttgtcatatgggcaggacatggaaaggaaggacatggtgggtggccagcagggactgtcaaccagagcctccccggctccctgacctccccgaccccctcttaaaacttcacactgactaagaggagaagccctgtgtgcgtgtcagactgcccaggcttgctggcctgaggcgggggattgctccccagtgactggagccaggaggccaccccatgggctggttccagtccacagcagcatcatgctcagacctggggtcccttagctaagcccgctccagccaacctggaaccagagtgggacccggagcgtgagcccagaaagcgctgagtgctttctgggtgattcctccatgatgatgcctgagggaagtgaggtcagctcgggatccacatccgaaggggggctgagtggagggggcattgcctgaccagccatggcctgtttttctttcctagagtgcagctagctcagctgttccattaggaggaattcagtagacccactctggggttcctctggctgcagccatctgtgcccagcccatgctacccccaccccgcccctgccagcaaagggggtgcctcggggcctgagccactgttgtcctctgacccagtgcctccacccagcactgcctaggaccactgacgcactagctgtgccctcagaggctacatggccagcattgccaccgtgacccagcctggttttcctcagcactggactactcaggggttaacactctccccgtcgttactgtcccagggtcaccaagaagaagaaaattggcaagaagaaaaagagcagatcagatgaggaggcaagtccactccaccccgcctgcagccagaagaaatgtgccaagcagggggacggtgacagccgcaacggcagcccaagccttgggcgggactcgccagacactatgcttgcctccccccaggaggagggagaggggccgagcagcaccacggagagcagcgagcgctccgagccgggcctgctgatccctgagatgaaggacacctccatggagcgcttggggcagcccctgagcaaggttatcgaccagctcaacgggcagctggaccccagcacctggtgctcccgtgctg

SEQ ID NO: 482 - DNA, 2300 bp, Homo sapien
agtggaggcctgtcctagtcagctcggctgctggaacaaagcaccgcagacaggcggcttccacaacagacattctttctcacagctctggagcctacagtccgaggtcagggtgccggtgtggccagcctctgatgagggattcacagatgtccctcttctcgctgtgttgtggcggggagtggagagagagctctctagggtcccttttatgagggtgctgatcccattcctgaggatcccaccctcaggacctcatcaccccccaccccctgataccatcacattgggagttaggatttcaacacaggaatctggaggggacacacacattcactccattgtagggctcaagcccttggaagcaggtggcacaggcagcgaccgtggctggtgtctggggccatgtccaggctgccagggcgtttgctgggtctgcctaagatcagaaagcaccttcaggctgtacttcttcccaagggagttcttggaagttaagatacaatttctgagattcattgaaagaaaagtatctttgtcatatgggcaggacatggaaaggaaggacatggtgggtggccagcagggactgtcaaccagagcctccccggctccctgacctccccgaccccctcttaaaacttcacactgactaagaggagaagccctgtgtgcgtgtcagactgcccaggcttgctggcctgaggcgggggattgctccccagtgactggagccaggaggccaccccatgggctggttccagtccacagcagcatcatgctcagacctggggtcccttagctaagcccgctccagccaacctggaaccagagtgggacccggagcgtgagcccagaaagcgctgagtgctttctgggtgattcctccatgatgatgcctgagggaagtgaggtcagctcgggatccacatccgaaggggggctgagtggagggggcattgcctgaccagccatggcctgtttttctttcctagagtgcagctagctcagctgttccattaggaggaattcagtagacccactctggggttcctctggctgcagccatctgtgcccagcccatgctacccccaccccgcccctgccagcaaagggggtgcctcggggcctgagccactgttgtcctctgacccagtgcctccacccagcactgcctaggaccactgacgcactagctgtgccctcagaggctacatggccagcattgccaccgtgacccagcctggttttcctcagcactggactactcaggggttaacactctccccgtcgttactgtcccagggtcaccaagaagaagaaaattggcaagaagaaaaagagcagatcagatgaggaggcaagtccactccaccccgcctgcagccagaagaaatgtgccaagcagggggacggtgacagccgcaacggcagcccaagccttgggcgggactcgccagacactatgcttgcctccccccaggaggagggagaggggccgagcagcaccacggagagcagcgagcgctccgagccgggcctgctgatccctgagatgaaggacacctccatggagcgcttggggcagcccctgagcaaggttatcgaccagctcaacgggcagctggaccccagcacctggtgctcccgtgctgagcccccagaccagtcctttcggaccggctctcccggggatgccccggagaggccgccgctttgcgactttagtgaggggctttcagccccaatggacttctaccgctttaccgtcgagagtccaagcactgttacatcaggtggcggccaccatgaccctgcagggcttggccaaccgctgcatgttcctagtagccctgaggctgctggccaagaagaagagggaggaggaggagagggacagacgcctcggcccctagaggataccacgagggaggctcaggagctggaggcccagctgtccctggtcagggaggggcctgtgtctgagccagagcctgggacccaggaggttctctgccagctcaagcgagaccagcccagcccgtgtctgagtagcgctgaggattctggggtggatgagggacaggggagcccttcggagatggtccattcctcggagttcaggtaacaagactctgcagctggcatgggactctcccagcccttgaagctggggacactgtgcctctgacctccagataaattaagcactaggaagacctagcctgagtgagaaggggtgtgagcctccctccctaactttggctcctagtgggaggcggaggcactaccccctggct

SEQ ID NO: 483 - DNA, 2300 bp, Homo sapien
gggcctccgcctcagtctgcagaatttctgccgagtggcaccgagaacaccatccatctaaggacgaacaaaagaaccaggagggcgggacccccctcttcctctcctgggttgggggctggggccctgagtgcccagccatccttgttcgtgtttgaacactctcctggccacgtggggaagcgggaacacggggtgtctgcgcatgtttcctcctcctagctccatcactgcgcacacagctgcctgcctcgccagatgcaggggggcgggcagccctccctggctgccaggaggctctgcatgcccacagtcctgccctgcctgtcccctcaacccggcagtgcctgtagcaccgaggagcaaagggggtggatggggggcttggagaagggcggagcccaccagcctggcatccatgttgacatcttctgactgtcccctgcttggctggagccaggcccttccctagagtttcgtcaagagcctcctggggaaggggtcaggtggtttgggttttgttttttaaaataaaatagacatgttatattgccaaggcttgtcactggccctttttgagcagggtaggggaagggagctctccaaatcccttgggcccttttctgcaaaccttcctccatcatctgccctgtgcctgacacaagggacacacgggacatgcagaaccagatcagccaccgctgccgggcggactcaccgtctgcagaccctcaggccctgggagtttctcggcccgacctttgccctccgtcctgttcctgtttgctgcagcagccaggggaggagcagccaccagctcaagccccagggcacgtctgcaccgccgcccaccatctgcagcccaccccggggcaggacgctcctgcctccacagccccgggggtgagtgcccaaacccaggagaatccaagctgtcctcgctgcctcttgctgcgccgtcccctccagggctggccagagggtgacaaccctgccaggccgggagcctgaggccctcaagccactcagcattgctgcctcaagggcctgggagggaaggggtgggccctgggaggtgggtgtgggactccaacttgggtggttctgcctctagtttggactgggccttgggtgactgagggtggcctggcaggagagagctgtctgggggcagaggccaaggtgggcatgttggtaccggccccagcctgagcagacacacctgacagctggcccaggtggcgttctcttctcagcgggcacaaagggcatcccagggcaggcctggcagcaagtccttaccagccaaggtcactcctcaagtcctactcacccaggtgccctgaagtcctgggagcagcgaggggggcataggagccagaggcagtgggggtgggggcgagcaggcgatgcgggtgcctttatcgggtgcagcactgacctaggcacactcttctcatcgccagtcctccacagaaccttctggagtggatgtcagtatctccattttacaaatgagagaaactgaagctctgagaggaagtgacttgcccaggggtcacacatgagagccacacctgggattccaatcagctccccagggctccagagcccttctctacttctgaccctgctgagcatgggcctatagacggtgggagccagactgaagacttgagtcctggaaaggggaagtcagtcaccaggggcatatcaggggcagggtggggcaggggcggagttggccgtgtaccccatgccagggacctcccagtcacttgccccctgcctagggctctgccaaagctggacaggctaagccagaggcaaggcaggggtgccagccctttgcccagggccagagggaggccaggaggaggtgcctgggctggttggcaccttctccctatccacgctctccctccagtcccaagtgacctttcccccagatcccagggtccaggcccgccctcggctggcaggtgtgggcacagaggcagctgggattggtcgcagctggcggaggcgcgtcccaggctccggcagaccgctggaacagctgagcagagcaggtggactgctgagatagaccagggacaccaggcagccacaggcctgtcagaccaggacccttaccctctagacatggcctcggtcccctgcaaaccccagccccgtagccctgcgaggttacagacagcctaaacgccaccaccacagggcctgtgccgtgcccctgacccgggcacagaaggccactggcccggaggccatggagacggtgcccccagcagtggacc

SEQ ID NO: 484 - DNA, 2300 bp, Homo sapien
agctggagtgcagtggcacgatctcggttcactgcaaccttggcctcctaggttcaagcaattctcctgccccagcctcctgagtagctgggattacaggtgtgtgccaccacacccggccaatttttgtatctttagtagagatggggttttgccatgttggccagactggtctcgaactcctgacctcaagtgatccactggccttggcctcccaaagtgctgggattacaggcatgagccacctcacttggcccaattttaacttaattatctctgtcaagagcctatctccatatacagtcacatcctgagctactagggggtaggacttcaacatgcacttctgcaggggccgcagttcagccaacatcatctttttttttgagatggagtctcgctttgttgcccaggctggagtgcggtggtgcaatctcggctcaccacaacctccacctcccaggttcaagtgattctcctgcctcagcctcccgagttgctgggactataggtgtgcgccaccatgcccagctaattttgtatttttagtagagacaggctttcgctgtgttggccaggctggtcttgaatgcctgaccttgccgcccgcctcggcctcccaaaatgctgggattacaggcgtgagccaccgcgcctggcctcagccaacatcatctaagggctctcacggagggcctcccagctgcccgccctgtgggcatttgcacatatcctgacaagcctgaaagaagctccgggtgcccattgttcagtccaggtgcccattgttcccgggactgaggcccgggaaagggaagcgacgtggcagggccagcagcagaccctgggcctttctctagactgagcaccattccccgtgggtgtgctctcagcgccgcaccgaccttcacactgcagagatggatgccaactccctggcaggggcaggactgctgccgagcagccccacctgccctcccagccacaccccaagtctgtaagggccgctcccaggaacacctgctactgcacactccaaaccaataaagttttatattttgtttacttcaacgaccctcctctgtggtgaatctcagtctcccccatccctgacccccaccttctgctccctctgccctttctgtttgtgaaagcaggatgggagccgtggtccacctgttcagctccgccctgctggacccaggtgaggcctgccacctagtggacccagggaggagcatcaggaagggcggccccggcctgtgggaggagaaggctcaggcaggctcgggctgcaggagattccacaccgagtcagagccggaggctttgggaagctggaaccagaccttacaaaaagcaggcagagctgacctcctggctgtgggggaagagagccccagacctcaggctgagagggcacagctgatctctggctatggggggatagagtccctactctcagaccctgggctgaagggtcagagcccacacttcaggctgcaagaggacaggacccacacctaaggcggggcaggacagatggagcctgggacttcgaaggggcattgggtggttcaagccctcaaggaagattgctattttttttttttttttttttttttagacagagtgttgctctgttgcccaggctggagtgcaatggtgtgatctcagctcactgcaacctccgcctcctgggttcaagccattctcctgcctcagcctcccgagtagctgggattacaggtgcctgccaccacgcccggctaattttttgtatttttagtagagacagagttttaccatattggtcaggctggtctcgaactcctgaccttgtgatctgcccaccttggcctcccaaagtgctgggattacaagtgtaagccactgcgcctgtcctccctcaaggaagatttcaagtaaagtggatgccagactttagcagggacagagaccagagaccagcccagagacacctgtcccttcaccccacactgcccaaatggggagcccgggcagcagctggctccaggcaccccgtgtgcctggagctgggaccttgcccttctgggcctcgaagggttaacacccctggctctcctcccctcccctcccctgggcctttgacccctcccagcctctctccttccctccaccgacacctttgcccagtgacgttggtctgtccttacgcagacctggccggaggctggggctccttccggggctgccatgttctctcttccatccctcccctcctggctccccggcctcccctccctcgagtggggctc

SEQ ID NO: 485 - DNA, 2300 bp, Homo sapien
cccgcctcggcctcccaaagtgctgtgattataggtgtgagccactgcacccagcctcatgactgactatttatttagaacaaggaaaaaaagcgcaacaaataactgcagaaatacaattttaactggtttaagaaaaagtaaggaccgggcacggtggctcatgcctgtaatcccagcactttgggaggccaaggcaggcagatcacgaggtcaggagatcaagaccatcctggctaacacagtgaaaccccgtctctactaaaaaaaaaatacaaaaaattagccgggcatggtggcgtgcgcctgtagtcccagctgctggggaggctgaggcaggagaatggcgtgaacctgggaggcagaggttgcagtgagccgagatcgtgccactgtactccagcctgggtgacagagcaaaactctgtctcaaaaaacaaaaaaaaaaaaaaaaaaaaaaaagaaagaaagaaagaaaagaaaaaagaaaaagtaagggagcccatagttgtactccagtctgggcgacagagcaagactgtctcaaaagaataaaaaataaaaagtaagggaaaaaaatgcattgactctggaggtctggtagtaggattgcaggtatggctggatccagcagctgatgaaatcagttatctttctttcctatctctttgctctgctgtcctctgtggtggtccaagtggggggcaaaagtggtgtcaagcttgtattctgccagccaacaagcccagagagctgatcttagaactaacagccactatgattggctggacatgggtcatgtatacaccaggcactgagagtggaagagaggttccccaaacagaaactgagtgctgttatcagaatcagggaaagtagtgctggctatcaggagccatggatgttccttggattctcttgcaggacaaagtcacgtccttcccttcccttcagaactttgtccctcttactaaaacttctatccttcatgtggtagggagagcaaaggaactcatctctgaacacctactgagcatcaggtatttttacccacatttaccccaccagattcttgctatgaagccacaagggacaaacctgggttggcaacccctcggttgcaagaggaaactgaggcccagagagaagtgatttgcccaaggctggcaagtggcagagctggaatcactcccagatactgatgttactcacagctgtatctgtgtccccatctgacccggccaccatgggggagctcccttttctctatgctgctcctctccccgccctgcctagcacagggccccacacacagcagcgcccaggaaataagcattggactgacctgactccaagcaggtagggtggaagatggaggatggaggaaggagctgggaggcccaaggggcttctgaggctgtctgccaagctgacctctgacctttaaagcccatgttttcccttctgccccctttccctgggaatattcgtccctattctcacactggctcctccccatctcagcttaaccctcacctcctcagagaggatttccccccacaccccacaccccacacccaccccacccccttttgtctcagaccccttgtccattccttcatagcaccttttactattggttattgttatgttaatttgctttatggtttgctctacccaatctccctgtaaggactgtggggacaaggactgatcatgtctgatttgatcccgtcggctccttgactcatgcattgcacacagtaggtgcccggtcagtgtctgctcagtcaaagctctccactgtggaggtgccacccccgccccggcaagcagacttgccctcaaacctctcttccaccccttccctgccactcagggtctcagctgccaccatcctaatagaagattgagccccttgcctgctggagccatctaagggagaagaaagccgttgtgagcctggcagggagggcggagggcagcagagcctctgagctggcagacaaagggcgtgtgttctcatccagcgcacttcctgggtttccgttgcaggaagtttggcacctgccgatcggtgacatcgacacccgagctgctgcgggccaggacgaatccctccatccgggagcagtggtggcggtggaacaggtggcctggggtgctggaggcaggtaagcagaggcagttgaacccctcattccccttggactgtcccagagcaaatgtgggaagcctgggtcctagactaagtcagtgtgaccttgaacaaggccccaaatcaactcttcgttgcctca

SEQ ID NO: 486 - DNA, 2300 bp, Homo sapien
acagtaggtgcccggtcagtgtctgctcagtcaaagctctccactgtggaggtgccacccccgccccggcaagcagacttgccctcaaacctctcttccaccccttccctgccactcagggtctcagctgccaccatcctaatagaagattgagccccttgcctgctggagccatctaagggagaagaaagccgttgtgagcctggcagggagggcggagggcagcagagcctctgagctggcagacaaagggcgtgtgttctcatccagcgcacttcctgggtttccgttgcaggaagtttggcacctgccgatcggtgacatcgacacccgagctgctgcgggccaggacgaatccctccatccgggagcagtggtggcggtggaacaggtggcctggggtgctggaggcaggtaagcagaggcagttgaacccctcattccccttggactgtcccagagcaaatgtgggaagcctgggtcctagactaagtcagtgtgaccttgaacaaggccccaaatcaactcttcgttgcctcactatcccacctgggggtgcaacaggtggttcaggggctgtcatggaggtgagggcaggcagctccacttttatctcttaaataaacttctgggtcactaagcatttgcaaaggggttctacagccaaaagcgcctgaaaacccccagatcgcaccttcctcctttgagtccttcccgtctctgtcgttcagagggtatggggaagtctcctccaaagggtgctgcaaagctggagttttggggggcaggggcaggatatcactgccaagccaggaatgagccgagcagggactcagacagccttgagtcccagcctcgccctgctgcacagaactctcagcacctccaagccccagcttccgattctgtaaaggatggcactggtacctgttcttgagactagcagagctgtgtgcccagggacacagcggctctggtttgaatttggctctgccatttgcccctagtgtggccttgagcctctcggggcctcagtgtccttgaccgtgaacaggaatcatcagccctggtgctcatggctcttgtgggattaggatggggatgaggatgggtaccagcacctagaaagcccctatcaatggcagctcctgggactgctgctgttactgcagcttggctgagaggatcaaatgggaaaaggggcgacaagagggatgggaggggcgatgatcagtgggtgagggcggaggcagcctcctctgaccctcataaaccagcctccctcagaaacagccccagagccaccctggaggggtgactgtagctgaggggttgcaggacgggccagatcctgtctggccaccccgcagatggcgctgggtccagcgctcctcaagcctcagccactgtggctttaatcaaaagaacaatctgtctgcctctgaatcagacccagattcctttccccacaatgtccctgaggcctccagggacccaggcagtccatcccggccccatcccgggccccagagtccaggctctgcctcccctcccgctcccgtcctaattgctccagctgggagggggagggtcactggatgtggagggaggggttcagccacagggccagccgggccctgccttccagagctcctggagcggcctgtcccccgggacaccgggacccacctgcagagggcttaccgctcaggagagcagaacaaggtgacctgctccactgggggtctccgagacccccaccctcaggaacactcccggaaaaagcccccaacccagcatatattaaccactattaatcacagtcctggctgtaactgtcaccttttatcctcaggccaacctggagaggtaggcagtggctacctccactttacagatgaagacactgaggctcaggaggtggcgtgactgctccgggtctcacgcttagtaaacggccgcagaaccctggtcggtttgacgcaagaccctggcggatcccagagccaaagtaagcgctcacctccgccggacagggtaggtggggttgccaacccaggagagcgagggaagggggacggcagggaccactcggggtccatgaagaacgcgaggggatgggcagcggggagggaaggaaacccaccccgactccccattctcctacccccactccccatccctcccattcccccatcgcccccatccccattcccccccattcccaccccctggcctgtgccaagggggaggggaggcgtcgtccagggaacaaagggagggggaaggggcggcgcggg

SEQ ID NO: 487 - DNA, 2300 bp, Homo sapien
ataacaggcgtctgccaccatgcccagctaatttttgtatttttagtagagacagggtttcaccatcttggccaggctggtcttgaactccttacctcgtgatccaaccaccttgccctccaaaaatgctaagattacaggcataagcctccacgccaggccaaatttttgtatttttagtagagacagtgtttcaccatgttggccaggatggtcttgaactcctgacctcaagtgatcgcctacctcccaaagtgctgtgattacaggcgtgagccatcgggtggccagatctgggttttgatgcctgcgctctgatatcctctaggcacacaaagaatgcagacaccggtcagacgcattgatagtgagcttgtgagccagcctgtcctgccctggggctatcatcgctttcgtccacccttggcagcaggaaactgcccctggagagggccaggaatcggggggtgccttgtggaagaggtgatgtttgagctgggcctctaagagaaagctgaaattcaccctgtgggggcaggacaggaaaaccatagaagaaacactgcaaggcaagagagaggacataggaagggcgagtggtccaggggctcaaagaggctgaggctgccgcagttggacttcatcctgaggtggtggagagccatactttttttctttttttttttttagacagagtttcgctcttgttgcccaggctagagtgcaatggtgccatctcacctcactgcaacctccactcccacgggttcaagtgattctcctgcctcagcctcccaagtagctgggattacaggcgcccgccagcacacccagctaatttttgtatttttagtagagatggggttttaccatgttggccaggctggtctcgaactccagacctcaggtgatccacctgcctctgcctcccaaagtgctgggacagagtctcaccggggtgcgatggctcacgcctgtaatcccagcactttgggaggctgaggtgggcggatcacgaggtcaggagatcaagaccatcctggttaacatggtgaaaccccatcactactaaaaatacaaaaacaaaattagccgggcgtggtggcgggcacctgtagtcccagctactcgggaggctgaggcaggagaatggcgtgaacctgggaagtggagcttgcagtgagccaagatcgtgccactgcactccggcctgggcaacagagcaagattccgtctcaaaaaataaaaataaataaaaaaagacagagtctcgctctgttgcccagactggagggcagtggtgcaatcttggctcaccacaacctcggcctcccaggttcaagcgattctcctgcctcaccctcccaagtagctgggattacaggtgcccaccaccacgcatggctaatttttgtatttttagtagagatggggtttcaccatgttggcagggtggtctcaaactcctggcctcaagtgatccacctgcctcggcctcccaaaatgctgggattacagctgtgagccaccatgcccggcccatggaaggtttttgagtaaaggagaaagagattgatgctctagaaagatcagggttaggaggtgagaccagaggccatggagcctccccatctctccccttgccccctgcccactgcccaggcctgaaccaggacccaggttttggagattgggtggagtgagagagtctggcactagaaagcaagcaaggagggtgctggctcatgtgcagggctgagaaaggtcagagcagagcaaagtggccaagagcatgggctctgggttccagtgccacctcaccaccgtgtgaccctggacaggtgacttctctctgagtctcgatttcttgatgtgttaggtgggtgatgatagtgcctgccctgcagccaccttgtgagtgtttatgagttaatgagcataacgtgtgagtgtttatgagttaatgagtataacatgctcagggcagagccggtcttggtgagggcagctctcactgtgccctgcccactctgccgccggagcctagccctgacgccctggcagatcctgatctgttctctttccctcccaaagcagagctggcctgaacctccaggacttcagcccttctaggagaatctgatcccaggtgagggaggtcacttggggtgtggcccagcaggcaggcgggactccagactgggaacggaagtcagccctgctggggctgggagctgaagcatctgttccttcctcgcgggtgtgagacaaggaagagtgatcattggtgagggctgccc

SEQ ID NO: 488 - DNA, 2300 bp, Homo sapien
tgaacccgggagacggaggatgcagtaagcagagatggtaccacttcactccagcctggtgacagagtgagactgcgtctccaaaaaaaaaaaaaaaaaaaaaaaaaaaatctggcttgcacctgaagcagcacacctctggtatttctgtgtatttttattataaataattttatttttctctcgatatagttaccttaattttatgggttttccttgaatttctgtaaattggcctttatataaaagttcaactggccgggcatggtggctcacgcctgtaatcccagcactttgggaggccaaggtgggcagatcacctgaggtcaggagttcaagaccagcctggccaacatggtgaaaccccgtctttactaagaatacaaaaaactagcctggtgtggtggtgcgcgcctgtaattccagctactcggaaggctgacgcaggagaatcgcttgaacctgggaggcggaggttgcagtgagctgagacagcgccattgtgccccagcttggctaacaagagtgaaacttggtctcaggaaaaaaaaaaaaaaagaggctgggcgtggtggctcaagcctgtaatcccagcactttgggaggcttgaggcgggtggattacctgaggttgtgagttcgaggccagcttgaccaacacagagaaactgtctctactaaaaatacaaaaattagccgggcatggtggcgcatgcctgtaatcccagctactcaggaggctgaagcaggagaatcgcttgaacccaggagacagaggttgcagtaagccgagaacacaccattgcactccagcctgggcaacaaaagcaaaactccgtctcaaaggaaaaaaaaaaaaaaagaaagttcaactgtaggtttcaaaagctcttaggcctggaaaggccagaggtctaattcctttctctgtttaaatattaaattatggtctgaggggaacaatattggattcctgtctcatttccgttttattccttctataccacagcgatcagcaagggtatcttgcaaacggtttcgcaagattctatataaaaaagttgcttaggccaggtgcagtgactcccgcctgtactcccagtactttaggaggccgaggcgggcggatcacctgaggtcaggagttcaagaccagcctggcctacatggtgaaaccctgtctctaataaaaatacaaaaattagccaggtgtggttgcgggtgcttgtaatcccagctacttgggaggctgaggcaggagaatcgcttgagtctgggaggcggagattgcagtgagccgagaccgtgccactgcactccagcagcctgggcaacagagcgagaccccgtattaaaaaaaaaaaagttgcttcatgttacaagccagtgactcttggatgggatgcgtttctgaagccgtcgctgttcagcagagcggtgagaagggcaacctttttctgatcgctttcccaagcaggcaggaatctaagtgtccggaaacgccaggagctggccgccaggtgagcggaggacgaaggggtcctgacttctaggggacaggccttggcagccgctttgacccgtagccctgtggaaaccaattgcatttctcttcatatcttccaccaggccggggcctggggttgccgctggaggggctaaagaccgctcctgcttcctcagccgccccttgcccggcgcgggaacccgaccgagagcccgccaagcagcgggactccactagcagctgcgcgcctgcgcaccggggccgagcgcgcgagcgttccttccccgcctgtagtccctcacttcgtcgcccggtccgcgcgcctgcgcgccggctgggaggaactcagcttctccgccttggcaggcgggaggacgcgcgcgcgcccgcggcgagggggaggcagtgcggcggcgggagtcgggccgcgcgcgccagtgggaagcgtccggctgccacagcgccagctccgtcgtagtcgctgccgcccgtgtcccgctcgcccctcctcccgctcccccgcccgcccctgcccgggcgcatgcgctgccggagcgcgagggtcggcttcgggtgtgtggtggcggcagagctgagctgcgaggcccgagagtcagaacctgggggagagggatggtctctgcacgggggggagccggaggagccgccgccgctgccgacgccaccgccgcagccgccgccgccgccgccccggcacccgcctcccggcgctgacggtctcgtacgaagccggcgagggggagccagcagcggcggtcgccggcacgccgcc

SEQ ID NO: 489 - DNA, 2300 bp, Homo sapien
gtaatgttcctccagactgccgctttccaaggcagctcgaatcctccgccccctcctccctctgtgcattctgagatcggctctgctgattcccacataaagtgggtcctggccgccattttagaaagtcattcacacaagccagaccgcagcaccgtccactaagaacccttccaaagctgcctgggacgatttcctctttcttctctctgccccctcatcttgcagaggggccaaactcccagccataagcatgcaatgtctctggaatctgcataatgagaaatgacacgtctaggcacataacactgaggagcgagcgaatgctgcaatgcacgtgcttgtacatcggtgcatacgaatttcccaggcagagacctacagagaaagtccacaggggattaaagtgagcacatctaagtggtttttccactccaataatgtacacctaaatgatttttccatcaaaacactgacgatactcgaggagaagccaggaggtggggggcgggtaaggggtggagcagcgccaggaagagaaagttcccatctgcttcccaatccagcccgtggtctccccttcatcctagggcacagaggtgaatttttgctccctgcctccccccgcccccgcctggtttctcaggcacgacgtagtaaacaccgggagagtccctggaagcgcgcacctccccccggcctgccgaggacagctcaagcaggttatgaatggccccacgattcccggctccttttcacacgcggacacgcgcagacgcgcgctccagcggcgagggtttaatgccccagtaacagcaaccaccaacacaatcaatgatcctccatttaaaagacaggagctccgccgccgctgcttccatttccttatccaagcggctcaaagcgagcgacgcaatctatttttcccatggtgactcattaatgaggacgctccataatttccttcactcactacatagtaagggaaattaaaagccaaacttaaaaccttccagggtcttaaatatcggaataaactgtcattttcgaggacaaccacagatttgctatggtccctctgaatctgcaccaagtccaagccaatcgtcattttaataagtgttttatgcggaggcctatctgttacggtacacaggcatttcacaaagaaaacgcactacacgctactcaataagatgtatcaacgacaacatttattcttataattcacaaaaatattcaggggaggttttttttttaagctacatcttctcatcgtaaaaggtttggaatgttttaccgtttgattcgggaattcaggggtggggggcaccagggtcttagggcggcctgggagtgcgacccgaggctacgggcgccggggctagcaacctcctgtcagacgcggtctcctccgccggggacgaggaagcccaaacgggcgcaccaacttatttcacaccactctccacccagccccgcaaaaacgagaaacgtttgccattcccagtgagtttcaaggctgcaaatcctccggagaggtcctagatggtctctccgggtccgcgacgcgaccacagtacctactgcgacttctgttttcgcaccgcctttcccttcgcacggaaccctcccgaagtcagacattgccgagcgcccgcagagcagcttggagtggcggcgccggacccggctgtcgggcgggctcgggtcccggctgctccgggccgggcactgcgcgcaaggacgcgaccccgccgcccagcgcatctcccaccgactcccgggctgacgcgagggcagccccggggcgccggctgcgtggaggccgagcctcggtcacctccctcgtcacggacgcggccgccggggccccgcgggctcttcgaaggcggcgcggcttggccgcccgcaccgccgacacccgaggcccaacgccgcgacgcgggccgagcggctgacgaggtcccacagcgcccgtgggtccgggccggagtcctcctcaccagctccgcgctccgggaggggccggcaacgggccggggcgggaagcggcgcccgaggagcgagcgcggccgcgggcctcgtgtcactcaccgtttgaaatgctcgatgatcttctcttcccgcacgttctcgggtaagttgcccacccagagatgcctggtttcccggaccatgctgggcggcgtgccggcgaccgccgctgctggctccccctcgccggcttcgtacgagaccgtcagcgccgggaggcgggtgccggggcggcggcggcggcggctgcggcggtggcgtcg

SEQ ID NO: 490 - DNA, 2300 bp, Homo sapien
tgagagttacagtttgtctgggactacttgcttccagtggaattattttgtctggtcactaagattttttttttcttgtggttcatctaaatatcatttgacacccttgcccattaagaaggtggattacccccataagaggggccaaaattggggaagttatgttcacaattctctccctagatttaattgggattataggtcgtgtttccacacttggaaaaggttggtatgtcctgacctgtgtatattagcccctctcctaacccaagtcaaactctctttttttccccactaactctagaagtatttagtactaatagtgaatcagagaatagccattagatttcagctctgctagctcttgtgcctgccttctgtatcttcttaatggataagaactttgcatatttataaaatagcagctgtagcagtaatcgtcctagaacttttttgcctgttgcttctgttaaatcattaataatggctttcactgattaacatttgatagggtgctaaagtaattatttatggcattttaagtctcaaaggaaaccctcttatttgttagacattgaaatataaaaatctcagaactgtagtaaataaaagagaaactcatttaatacatttaagtaggaaagatatagaatgtttatcatgccagttgtttttcacaatagcagcaaaaaaagctaaactaagcctaggaaggtggggttgctactaagtgaaatgatgggtgaaaagaatattagtggagagacctggaatctaagcatgtactggggatctggtattaattgttataagattttgccagatattcttcattggagagattctaattctttatgtttcatgattccttaatcccttttgatagaagatagatccagagatgggttgaagagaaactccagtgaaatggtcttttaggaactcaggagctgagttctagttctctacaaaagtagagaacttacgatttctttataggattataactagtttttaatattaacacataattgcatgtgtgtaatcgtacatgcaacgtgttttgtactttttaggttgacaggtattcacatcctactaaatgattgtttaagttaagctattttgctaatagcgaccttagaatatcttatagttcctaatgttacctaatttcatcacaggcaatttgagtatagctaaaagccaaaagaacatatttcctacaaccattgagtttatacattaagaaattgaatcatggaataggcatttttaaagtcatttggaatttgatagcacaggagtaaataatttttatttttatttaaattcacatagagtagcatgtggtaacccaatattttgatacttgaagtggtttttttttgagattctatttttattattaaatgtaattgggtaccgctgtgcagtctatgtagtctagtttatgtagtccagtaattttttataactatccaagcagtcaaaacttaatgaaaaaaagttaaacttagaaaattttttctggacttcttgaaagtccttcctattgttgagacatgcgctgcagcagggctttcatgtctaagttaaaacatagcatggaaatgtggcctaaaagaaatttgtgagtaaataaaatttggtatatactttaatcagatgaaagtgtaaaaactttcatattattaaaatagtctcttgttccgttaacatgaaaaggagattgtatatttatgtatgcaagtcagaaaatctctaataaagtaagcaagtgagctgcagaacactagtcatgaaagcccaatatacaatgaaaacaatgattgctcagctgtgaaaataatttttggagtcaagtaaaatgttaagcttgttagcgtttgcttattaagtaggttaatgctgtttagaaaatgaccagttgcaaagacaaagacaatgctgaagtgaatgtttgcatgacttgcttttagttttgcttgctcctttctgattaaatatttttccccctcctaaatgcagggcttcagataacagggagcgtgcttatgaacatagtgcctatggacaccatgaacgggggacgggaggatttgatcggacaagacattacgatcaggattactatagagatcctcgagagcggactttacaacatgggctctattacgcttctcggagtcgaagtccaaatcgctttgatgctcatgacccccgatatgaacctagggctcgcgagcagtttacactgcccagtgtggtacacagggatatctacagggatgatatta

SEQ ID NO: 491 - DNA, 2300 bp, Homo sapien
gatagatgtgtagaatgcagggcctccagaaattccagtctgaaaatttagacctattagttattttaagaagttttctaatgctgctcattttctgtttgtcttttcactaaagtttgttgttgttgcctttttgcagcagtgattccagcagtagttcaagtgatgattctccagctcgatcagttcagtctgcagcagtccctgcacccacttcccagttgctttcatctctggaaaaagatgagccccgtaaaagttttggcatcaaggtccagaatcttccagtacgctctacaggtaaaattttgtgtgaatgtcctttcctctgtgctactactgaggaatgaggtatgatactgcattacattgaaataactttgggcataaaattataatggaaaacccatttcgaaatattaacgttttaaatgaggaaagccatgaataatggaaaagtctgcttaagctattctgtggtctctactggtaatatttttaattgacagctgaccgtaatatactgttactcctacattggtcatgttgagcatgtaaacaagttaaaactattagtagatagtcatgccaacaaagaccaaattaagtattttttagctaagtgtatttcagtgattgcttaaattatttactaaaataggggccaggcgcggtggctcatgcctgtaatcccagcactttgggaggccgaggcgggcggatcacgaggtcaggagatcgagaccatcctggctaacatggtgaaaccccgtctctactaaaaatacaaaaattagctgggcgtggtggcgggcgtctgtagtcccagctactcgggaggctgaggcaggagaatggcgtgaacccaggaggcggagtttgcagtgagctgaggtcaggccactgcactccagcctgggcgacagagcgagactctgtctctaaaaaaaaaaaaaaaaaaaaaaaaaaattatttactaaaatagcctaaaaacttatgtatcaggtttgtgaatagagttattgagatactaatgttgatgagcttttgatttagagtacttggtaatttagaaatggacaagggagtaaaattggcttgcctttctatacaccttttatatttctaataaagcaaattaacacaagacccccagatggtatgattcatctgtaaaggatactaaaattgtttagcatgctacatgacacttctcacacaattttatcattgagatgatccttggaaagatagacgatgcctttccatttcaagtctttaacactttataaacagacatgtaaaagttttattatgaaacctaccccaaagtagaaggaatagcaaaatgaactccccttatataatatccaagattcagaaatcatcattttgcatttttgctttatctgtttcctgtcttcctgctttcctactgttttttgtttttttttttacctttaaggtgaatccttgatgttgttttatttcatacctatttacacacgtatatttatgtatatatctataatatataagggcatttttctggataaccacagtatcattcttacctaacaaaataaccaatactatcatctaacagtttattttcagaattgtacaataatctcgaaaccgtgtttttagagcttttttgtttgaaaaagtaatgttttaatgacaataaaatttaagtcaaatctcaagctagatccttttgtggttcataagcatgatgattgggttttcatgctgtgtgaggtgtgcctccctcagaccttgttatgacattagtatattacctgtctgacatgaacaaaaaaatgagaaaatcaggctaaagatttagtaggttgcttatttagttataattaaattagaagaattaataacttggttttttttgggaatttagatacaagccttaaagatggccttttccatgaatttaagaaatttggaaaagtaacttcagtgcagatacatggaacttcagaagagaggtatggtctggtattctttcggcagcaagaggaccaagaaaaagccttgactgcatcaaaaggaaaacttttctttggcatgcagattgaagtaacagcatggataggtccaggtaagacacaagcaagctgagtttgagttactcatcacacacactgtttgtgttgcagtgtatgagagggcagcatatgatcctgaatgaggacactattctggctttatttattgacatatttccattgtcttctgttttaaaagatggttctatttattgttcaacttaataaaaaac

SEQ ID NO: 492 - DNA, 2300 bp, Homo sapien
gcacgagtggataaagaaaatgtggtatatatatataacatggaatactactcagccataaaaaggaatgaaataatggcatttgcagcaacatggatggagctagagaccattattctaaatgaagtaactcaggaatggaaaaccaaatatcatatgctctcacttttaggtgggagctaagctatgaggacgcaaaggcataagaatgacacaatggactttgggaactcagggggaaaggtgggaggggtgagggataaaagactacactttgggttggctgggcgcagtggctcacgcctgcaatcccagcactttgggaggccgaggcgggcggatcacgaggtcaggacatccagaccatcctggctaacacggtgaaaccccgtctctactaaaaatacaaaaaattagccgggcatggtggcgggcgcctgtagtcccagctactcgggaggctgagtcaggagaatggcgtgaacctgggaggcggaacttgcagtgagcccagatggcgccactgcactccagcctgggcaacagagcaagactccatctcaaaaaaaaaaaaaaaaaaaaaaaaagactacaccttgggtagaatgtacactgttcaggtcatgggtcccccaaaatcacagaaatcatcactaaagaacttatccatgtaaccaaacaccatgtgttccccaaaaactactgaaataaaaattaaaaatatagttaaaaagaacgggtgaagttagccagttgtgggtgcacatgcctgtagtctcagctactggggaggttgaaatgggatgcttaagcctaggggtttcagtccagccgggcaacatagcgagaccccatctaaaaaaaaaaaaaagaaagaaaagaaagacggccgggcacggcggctcacgcctgtaatcccagcactttgggaggctgaggcaggtggatcacgaggtcagaagatcgagaccatcctggctaacatggtgaaaccccgtctctactaaaaatacaaaaaattagccaggtgttgtggcgggcgcctgtagtcccagctactctggaggctgagacaggagaatggcgtgaacccgggaggcggagcttgcagtgaaccgagacagcgccactgcactccagcctggaagacagagtgagactctgtctccaaaaaaaaaaaaaaaacctaaagacaagaaggggtgaagtcaactgctgggcttttttgtttctctagccattgtgaagacaggagtgagttgccagattggcatatgttgcatcccactgaaggctagtggacatgaatctctagggaacagtctccccactgcatactttcttcagctgtgcttggctgtttgggagctaacaaagagaaaaggtgcatttggattcacacagcgttggtattcttaccaaatccatgtgacaaaaaggcaagggggcaaaagagcttacagtagtggcaagagtgttgttaaaattatagattatggaaaatatgcaggcctagaagtaaacaaaggagaaagccctcagactgtgagaaagtggagaagtcagtggcctagagctaccaaaaaggtagaagaggggccacggaggggccatgcaagtctgcagacacttttgttttcagacacctttattcacgtccaagacaatcagggaaggggataatgttcggtttagaaggtagaaaaacacaactgggatctgcagctttgaagccacaagtagattcatatctccggtccaccacttacaagatatgtgaccatggacattgatttacactttttgagtctgttttcccttttttaaaattaggagaataatactatcttataattggtgtgaggatttaaagagataatgcatgtaaagcgcttaacacagtgcctggcacacagtaagagctgaacacatgatgttactgttatatttggaagagaaaccaaggcaggggtacaatgaggacaactctgagcgccgaagtactgtaaggtggaacttttggatagctaggcgcatgcgtctgtctatgggcgctctcctagcgaggacgctgcgcatgcgccggaagttgcagccgggaagcctgcgaggtcggttccgcccgactctaacatggcggcgccctttgtctgctctggagtgccgtccccggccttctcgcggccgtgatgcacctccctctgcggtggggtccgggacatggcaggtgagtgtcaacaatcgcccggggccggggaagtcccgggagccggggcggaggcggcggaggatggggcgcg

SEQ ID NO: 493 - DNA, 2300 bp, Homo sapien
gaccccgtcctccgcctccaaagccagcaagggagggttgagtcctcacttcatatctctctggccttcttccgttatcacatctctctaatccagccagaaaaggttctccgatttttttttttttttttgagatggagtctcgctcccatcacacaggctggagtgcaggggtgcaatcttggctcattgcaacatccacctcccaggttcaagcgattctccttcctcagcctcctgagtagctgggattacaggcgtgtgccgccacgcccagctaatttttgtatttttagtagagacggggttttgccatgttggccaggctggtctcgaactcctgacctcaggtgatccaccctcctcggcctcccaaagtgctaggattacaggcgtgagccaccacgcccggcgaggttctccgattttaaggactcatgtgattagattgagctcacccacgtaatccagaataatttccttttctcaaaattcaaactcttaatcacatctgcaaagtcccttttgccaaataaggtaatatattcacaggctttggggattaaggcgtggacatctttggcggccaacttggctaccaggcataggtacctcttatttctggaagtgatactgtttctatttaatatagcaataccaaatttccttttaaagtgcatttctttcatctgggccagtagcagatataaaataaaataggttaggtgcggaggctcacacctgtaatcccagtactttgagagggtgaggcaagcagatcacttgaggtcaggagtttgagaccagcctggccaacatgatgaaaccttatctctactaaaaaaaaaaaaaaaaaaaaaaaaatacaaaaattagccaggtgtggtggcacacgcctgtagttccagctacttaggtggtttacacaggagaatcactggaacccaggaggcagaggttgcagtgagctgagatcacaccactgcgcttcagcctgggcaacagagcaagactccatctcaaaatataataataataataaaattaaaataaagtgcacttctggccaggcgcagtggctcacacctgtaatcccagcactttgggaggccaaggcaagcagatcacctgaggtcaggagttcgagaccagcctgaccaacacggagaaaccctgtgtctattaaaaatacaaaattagccgggtgtggtggtgcatgcctgtaatcccagctactcgggaggttgaggcaggagaatcacttgaacctgggaggtggaggtttcagtgagctgagattgtgccattgcactccagcctgggcaagaagagcgaaactcagtctcaaaataaataaacaaataaataaataaagtgcacttctctctctctctttctttctttctttttttttcttttttcttttgagatggaatctcgttctgtcactcaggctggagtgcagtggcgcaaactcggctcactgcaagctccacctcccgtgttcacgccattctcctgcctcaacctccggagtagctgggagtacaggtgcccgccacctcgcccggctaattttttgtatttttagtagagacggggtttcaccgtgttagccaggatggtcttgatcttctgaccttgtgatccacccgtcttggcatcccaaagtgctgggattacaggcatgagccaccgcgcccggccaagtgcacttctttttcagtaaaaacagttggctgacttcaaggacatgtgaattaagtagcattacgtatagttcctagacaggggaaaaagccaaactggtggaaccactggataatgactgaggtttgggaaactgaggctggatgagaaggttccagaggcctaccctaaatcaggaagcagctgcgcttggtagaaatagtgtctgtttggtctgtttggtaggaggcctgcctcccattgagccaacaataatcctgttgacataaccctgttgatcaaagcgatcccctgactgctctgggccagttcctttggctcctggtggaatgcactcagagaatccggatccggtcagtataaaaggtctggtcccgcagtgggggagccacatcctggaagagtggcctaggacagctcctctcctgccagagctaggcaggcgccgaagtagccgcatggccccgtcagaagaccccagggactggagagccaacctcaaaggcaccatccgtgagacaggcctggagaccagctccggtaagaggcggcaaagggaccccagccccacagaaacaccagctgggggc

SEQ ID NO: 494 - DNA, 2300 bp, Homo sapien
cccaccccctcaggctccctctgcccacatccctccatccctctcccattcctcggaggctccctcagctgctcaggccctggaagaaaggatctgggaacctcggtgcaaagagaggcagtgagggggccccatggccatgggttgcagggacaaggccttcagttagccctgggggagtttgggtggggaagggacactggccagggtctggggtcccaggatggtaagggggagtaggagacattggaggcaggagcagaatttgggatgcggtgagtagggggtggggggctcaccttctcagcccgcacctcgatgtggttgttggaggtggtgacaatgatgtcttcaggtgagaagtctctcacgtccaccgcaaactcataggcgtctcctagggtcttgatgttgcctgccccaccggggcgggctgtgggatgggctgctgtgagcgaggcatggagcaggccttgcatgcagatccgggggttctggctccttctcttggggcaaggggcggctcccccaggccctacctcccccctagctgtttctccctaagctcctcctcattcctacagcccaccttttctggggtgggggtggggcctcacccagcacagtgtgtgtgtatatgaggctaggtctgtaacaaccccaccccaggcctggagcctgggggctgccccccaccgctcacccatccagccctccagggctccagctgggattggctgtggttacagagcatgggtggccatggaaccatgtccaacccccagggccacaactgttccttagaggcccacctgttttcatggccacatctgtccctgtggccacatctgtcttggtggccacacatggctgcaggctgtgcagcacctgttccaggccgaccggcagccacagcgccttcggtggcgccctggagcagacgtcccctccctgtgcacctcccctcccctcagggcccggatcacttgcctgggaaggccaggggctccgagtggggccgcatgaagctgccaaagtcatcggaaaacatgctcagggccttctccatgggcgggtcctgggccgggagagcacgggaggccgaggaggaggtggaagaggaggaggaagaggaagaggaatggaaacttctctccgctcggaaggtggaagaggttctgtggctcatccacggacggcgccgggccctgcccaggcgggcgagggctggacaggagagggtgtgggcgcaggcctctgggcgagcgtgccaggctccgactgcggccgctttataaggccgactgtccctgggcttggggccagccccttgtctactagctaaatttaggcctctccatggcccagagggggctggaaatcttctcccgtgcgccggccctgctgacagcccgacacgcaggccgagagggctgagctcacagcctgacattccaggctgatcacagcagccccaggggcctcctcaccactgcacagggctggatcctgtctccttgccactcggacctcggtgcctgccccagaaccttgcaagtttggggtttattgtgtgttttgtttcccccgtcagcctgggggctcctgaggactgtgcctcccctccagactctggttctcctccacggctgtacctcctccatcagtgtgcaggctccttggggacagggtaggtggaagcaccaccgctctgtgacgtcaggagctccttccctcaaggcagacaaccttcacagcccatctctaaggaaaggttgagccctgccagggggtgtaaaatgtgcagctgtcccctgccagcccccatggggacctggattctgtgcctgcactccctctgactctcagaacattcagcagccccaagaggacaaagttggcagctttctccttaaaggtctagaaggttgtgttcccggcaactgtctgctccatctctgtgtcagaggtgatgcctgcgagcgccttaggtgggatttcagtcagaggtaaaagagaattccggaagacaattattctagccctgagttctagaatgccttctgggcatgggctcctggctgcaagctgtccagcacggccccgtttgatccccacacagctgggagggtggaggggctcttcccatgttacggacggggaagcgaagcctcttggaaagggcggggctcgcagttgcgtaagtggcagagctgggattcgaacctagatgtgttggacccaaagcccttcagaggccgaggtggtttgaacatgtgcctatggagacaggctggccc

SEQ ID NO: 495 - DNA, 2300 bp, Homo sapien
tcaaaatcctggggtccaaggaaagggtctgtgtttgtgaaaagctctcctgggtgactgggattcaaaggactgcatcatctttgtagctccttctgtctctgtgatctgaaggtagaggcaggggaatgtccttgatgaccttttgaggtccctctgggtcagtgaagccagaggatccagtatttgtgtgggtgatgcctcgggaagggggaaaaaggggaggaggaatggtgggcgggggtgggtaacgggatctgacatccaggggcagtgactcaggccctcagcaccatgacagtgtgtctgcatttagccaccggctcctgtttccctggcgagcggcaggctctgggccccccaccccgccccaccctctctccatctcacctcagtgctggtggcttcccagctgccctagaaacccctcagccaggctgggtgtcacaggccccgacacgggcaggaaactctgccagaggcaacaggccctgttgctccaggcaacagcctggcccgccgctgtgccctgtgccctgctctgcttccactccacataccaccagcaccgctaatacccctgtagaaggagctctccaggatgaagctccagactgggttgtagggggctcagacaaaagagaaactgcccgtcttcaagaaccttcaatctaatggggagacaggtgaaccctcgcccccgtgggaactgccagttggatagggaagaagggacacagcagagagtcacagcacacaggaagactatgtcacactgccaggtgctgtgggaggacaaagacagtcagtgctgggggcatctggactgggtgtgggcccatgtgagcaggagcagtcagagaggcctccctgggggaggaggcattggagctgatctgggacggaagggacggatttggagaggacagcagaggcccttaactgcaacctgggcagagcagagggcctggccgcctctcagaatggcctccaccctggcccagggcaaggtcagtcccagctttgctgagcaagcaggtgggtagggaggggcttctctggctcttccgggccagcctgtctccataggcacatgttcaaaccacctcggcctctgaagggctttgggtccaacacatctaggttcgaatcccagctctgccacttacgcaactgcgagccccgccctttccaagaggcttcgcttccccgtccgtaacatgggaagagcccctccaccctcccagctgtgtggggatcaaacggggccgtgctggacagcttgcagccaggagcccatgcccagaaggcattctagaactcagggctagaataattgtcttccggaattctcttttacctctgactgaaatcccacctaaggcgctcgcaggcatcacctctgacacagagatggagcagacagttgccgggaacacaaccttctagacctttaaggagaaagctgccaactttgtcctcttggggctgctgaatgttctgagagtcagagggagtgcaggcacagaatccaggtccccatgggggctggcaggggacagctgcacattttacaccccctggcagggctcaacctttccttagagatgggctgtgaaggttgtctgccttgagggaaggagctcctgacgtcacagagcggtggtgcttccacctaccctgtccccaaggagcctgcacactgatggaggaggtacagccgtggaggagaaccagagtctggaggggaggcacagtcctcaggagcccccaggctgacgggggaaacaaaacacacaataaaccccaaacttgcaaggttctggggcaggcaccgaggtccgagtggcaaggagacaggatccagccctgtgcagtggtgaggaggcccctggggctgctgtgatcagcctggaatgtcaggctgtgagctcagccctctcggcctgcgtgtcgggctgtcagcagggccggcgcacgggagaagatttccagccccctctgggccatggagaggcctaaatttagctagtagacaaggggctggccccaagcccagggacagtcggccttataaagcggccgcagtcggagcctggcacgctcgcccagaggcctgcgcccacaccctctcctgtccagccctcgcccgcctgggcagggcccggcgccgtccgtggatgagccacagaacctcttccaccttccgagcggagagaagtttccattcctcttcctcttcctcctcctcttccacctcctcctcggcctcccgtgctctcccggcccaggacccgccc

SEQ ID NO: 496 - DNA, 2300 bp, Homo sapien
gaaccagggcaatggtttgggcacagaacagaagagttgtgtctgatgccacttttgggcaagaggttggggacaattgcctccactcccacccagacaaagccaccctctgaagcttatgatagcccttggatgattgttaaaatctgggaccctgggccaccctttgcccctagatgccaggcaagtcaaatcaaaatcaaagatgtgtgttgtgggaggtgggatgggagttgccgctctgtatggactcgagcccaccttcaccttggccaccccgacctgttgactctgcacagcaccagaactggctgccctgtcaacatcccgatttccagtgtctggtctggggcagctgctggctactgtcccacagccagcactgcacgtccacatctaccctcaccccccagccctgtgtgcaccaggaggctgagaagagggcagccagggtggctcagcaggatgaccggtttgaagccagcacagctctgctgaccctaactctttcatcaactagagcctcagtttcctcttctgtatgatgaggtgagcctggaagcaggggcctgtctctgccttattcatctctgagtccttcagagcctagaacagtgcccagcacctatttatagcaaggtttcaatgaatacctactgagtgatgagggcttcatcactggcctatgagctggctgtgtggggagctgatgggaagagatgtgaggtcccttccccagatcccaaatcaaaatcctggggtccaaggaaagggtctgtgtttgtgaaaagctctcctgggtgactgggattcaaaggactgcatcatctttgtagctccttctgtctctgtgatctgaaggtagaggcaggggaatgtccttgatgaccttttgaggtccctctgggtcagtgaagccagaggatccagtatttgtgtgggtgatgcctcgggaagggggaaaaaggggaggaggaatggtgggcgggggtgggtaacgggatctgacatccaggggcagtgactcaggccctcagcaccatgacagtgtgtctgcatttagccaccggctcctgtttccctggcgagcggcaggctctgggccccccaccccgccccaccctctctccatctcacctcagtgctggtggcttcccagctgccctagaaacccctcagccaggctgggtgtcacaggccccgacacgggcaggaaactctgccagaggcaacaggccctgttgctccaggcaacagcctggcccgccgctgtgccctgtgccctgctctgcttccactccacataccaccagcaccgctaatacccctgtagaaggagctctccaggatgaagctccagactgggttgtagggggctcagacaaaagagaaactgcccgtcttcaagaaccttcaatctaatggggagacaggtgaaccctcgcccccgtgggaactgccagttggatagggaagaagggacacagcagagagtcacagcacacaggaagactatgtcacactgccaggtgctgtgggaggacaaagacagtcagtgctgggggcatctggactgggtgtgggcccatgtgagcaggagcagtcagagaggcctccctgggggaggaggcattggagctgatctgggacggaagggacggatttggagaggacagcagaggcccttaactgcaacctgggcagagcagagggcctggccgcctctcagaatggcctccaccctggcccagggcaaggtcagtcccagctttgctgagcaagcaggtgggtagggaggggcttctctggctcttccgggccagcctgtctccataggcacatgttcaaaccacctcggcctctgaagggctttgggtccaacacatctaggttcgaatcccagctctgccacttacgcaactgcgagccccgccctttccaagaggcttcgcttccccgtccgtaacatgggaagagcccctccaccctcccagctgtgtggggatcaaacggggccgtgctggacagcttgcagccaggagcccatgcccagaaggcattctagaactcagggctagaataattgtcttccggaattctcttttacctctgactgaaatcccacctaaggcgctcgcaggcatcacctctgacacagagatggagcagacagttgccgggaacacaaccttctagacctttaaggagaaagctgccaactttgtcctcttggggctgctgaatgttctgagagtcagagggagtgcaggcacagaatccaggtccccatgggggctggc

SEQ ID NO: 497 - DNA, 2300 bp, Homo sapien
ctgagactcagggtccaggggtctcagagctggacatggaaggtttgaaaaagcacagagggagaggggaggaggctgggaagggaaggagaaggcaggggggcaatggtgagtggggccagcatgaccacagcctccctgtgtgtcaggtagagagtcagccttctcccagattaattaccctgagtgcccacggaaatcccacgaggcaggcagcgtgatcccgttgtagagaaatggtgtctcagggagctggggctgcctgtctaagatcacggaggccgaggcagagccaggattcccagcccaggtttgcctggctccaaagcccgcaggctgtgccacacggtcccatcctgatgacccatcttgtccagggctggcgaggaggccgacacctggggcaaggcagtgaattggggtcaggaactcggacttgatcctgtgtccagaccctccaggctcaggaaatgcttctcaaagcacacgtccaagggccagcggctctggtggggacttctgggtaattccacagagtttgtcccaccccaacagaggatggcagcacaggtgtgaggggacatggcgaggaacaagcacctgccgtgtgcctgcgacgtgtcaggagcgtcacatctgcagctcaagtcctccttcccacaccctgtgaatggggagagcctcgccattttgtagatggtcagagaggtgagtcactcatccaaggtcacacagcagaggctgaacccagccccacactgtgcagctcttcccctgcccaaagctcctccagctcctgaggctgaaccagggcaatggtttgggcacagaacagaagagttgtgtctgatgccacttttgggcaagaggttggggacaattgcctccactcccacccagacaaagccaccctctgaagcttatgatagcccttggatgattgttaaaatctgggaccctgggccaccctttgcccctagatgccaggcaagtcaaatcaaaatcaaagatgtgtgttgtgggaggtgggatgggagttgccgctctgtatggactcgagcccaccttcaccttggccaccccgacctgttgactctgcacagcaccagaactggctgccctgtcaacatcccgatttccagtgtctggtctggggcagctgctggctactgtcccacagccagcactgcacgtccacatctaccctcaccccccagccctgtgtgcaccaggaggctgagaagagggcagccagggtggctcagcaggatgaccggtttgaagccagcacagctctgctgaccctaactctttcatcaactagagcctcagtttcctcttctgtatgatgaggtgagcctggaagcaggggcctgtctctgccttattcatctctgagtccttcagagcctagaacagtgcccagcacctatttatagcaaggtttcaatgaatacctactgagtgatgagggcttcatcactggcctatgagctggctgtgtggggagctgatgggaagagatgtgaggtcccttccccagatcccaaatcaaaatcctggggtccaaggaaagggtctgtgtttgtgaaaagctctcctgggtgactgggattcaaaggactgcatcatctttgtagctccttctgtctctgtgatctgaaggtagaggcaggggaatgtccttgatgaccttttgaggtccctctgggtcagtgaagccagaggatccagtatttgtgtgggtgatgcctcgggaagggggaaaaaggggaggaggaatggtgggcgggggtgggtaacgggatctgacatccaggggcagtgactcaggccctcagcaccatgacagtgtgtctgcatttagccaccggctcctgtttccctggcgagcggcaggctctgggccccccaccccgccccaccctctctccatctcacctcagtgctggtggcttcccagctgccctagaaacccctcagccaggctgggtgtcacaggccccgacacgggcaggaaactctgccagaggcaacaggccctgttgctccaggcaacagcctggcccgccgctgtgccctgtgccctgctctgcttccactccacataccaccagcaccgctaatacccctgtagaaggagctctccaggatgaagctccagactgggttgtagggggctcagacaaaagagaaactgcccgtcttcaagaaccttcaatctaatggggagacaggtgaaccctcgcccccgtgggaactgccagttggatagggaagaagggacacagcagagagtc

SEQ ID NO: 498 - DNA, 2300 bp, Homo sapien
tggggcggggtggggggcccagagcctgccgctcgccagggaaacaggagccggtggctaaatgcagacacactgtcatggtgctgagggcctgagtcactgcccctggatgtcagatcccgttacccacccccgcccaccattcctcctcccctttttcccccttcccgaggcatcacccacacaaatactggatcctctggcttcactgacccagagggacctcaaaaggtcatcaaggacattcccctgcctctaccttcagatcacagagacagaaggagctacaaagatgatgcagtcctttgaatcccagtcacccaggagagcttttcacaaacacagaccctttccttggaccccaggattttgatttgggatctggggaagggacctcacatctcttcccatcagctccccacacagccagctcataggccagtgatgaagccctcatcactcagtaggtattcattgaaaccttgctataaataggtgctgggcactgttctaggctctgaaggactcagagatgaataaggcagagacaggcccctgcttccaggctcacctcatcatacagaagaggaaactgaggctctagttgatgaaagagttagggtcagcagagctgtgctggcttcaaaccggtcatcctgctgagccaccctggctgccctcttctcagcctcctggtgcacacagggctggggggtgagggtagatgtggacgtgcagtgctggctgtgggacagtagccagcagctgccccagaccagacactggaaatcgggatgttgacagggcagccagttctggtgctgtgcagagtcaacaggtcggggtggccaaggtgaaggtgggctcgagtccatacagagcggcaactcccatcccacctcccacaacacacatctttgattttgatttgacttgcctggcatctaggggcaaagggtggcccagggtcccagattttaacaatcatccaagggctatcataagcttcagagggtggctttgtctgggtgggagtggaggcaattgtccccaacctcttgcccaaaagtggcatcagacacaactcttctgttctgtgcccaaaccattgccctggttcagcctcaggagctggaggagctttgggcaggggaagagctgcacagtgtggggctgggttcagcctctgctgtgtgaccttggatgagtgactcacctctctgaccatctacaaaatggcgaggctctccccattcacagggtgtgggaaggaggacttgagctgcagatgtgacgctcctgacacgtcgcaggcacacggcaggtgcttgttcctcgccatgtcccctcacacctgtgctgccatcctctgttggggtgggacaaactctgtggaattacccagaagtccccaccagagccgctggcccttggacgtgtgctttgagaagcatttcctgagcctggagggtctggacacaggatcaagtccgagttcctgaccccaattcactgccttgccccaggtgtcggcctcctcgccagccctggacaagatgggtcatcaggatgggaccgtgtggcacagcctgcgggctttggagccaggcaaacctgggctgggaatcctggctctgcctcggcctccgtgatcttagacaggcagccccagctccctgagacaccatttctctacaacgggatcacgctgcctgcctcgtgggatttccgtgggcactcagggtaattaatctgggagaaggctgactctctacctgacacacagggaggctgtggtcatgctggccccactcaccattgcccccctgccttctccttcccttcccagcctcctcccctctccctctgtgctttttcaaaccttccatgtccagctctgagacccctggaccctgagtctcagccttggcagatgacccctctctgtcctgctgtgtgcatgagctcccccttcccagccctcgtccagcagcacccaggagcctgagtacagctgggcaccaccctctgtgcagctgtgatgggtggggaggctcctgctccccttctctcttggcagttctgccctgcacagctctggcctccacagttctggttggtttgtcaaggacgtttttaatctccatggtaaaccccggccggcggggaaggggggtggcagggagagagtgatgattggtagagcatatacctgtccaggtgcactggagctgggagcaaaggaggctctgtgagaggagggccagttcagccgcagcaggaggactgacaggtgaggg

SEQ ID NO: 499 - DNA, 2300 bp, Homo sapien
ctgtgggacagtagccagcagctgccccagaccagacactggaaatcgggatgttgacagggcagccagttctggtgctgtgcagagtcaacaggtcggggtggccaaggtgaaggtgggctcgagtccatacagagcggcaactcccatcccacctcccacaacacacatctttgattttgatttgacttgcctggcatctaggggcaaagggtggcccagggtcccagattttaacaatcatccaagggctatcataagcttcagagggtggctttgtctgggtgggagtggaggcaattgtccccaacctcttgcccaaaagtggcatcagacacaactcttctgttctgtgcccaaaccattgccctggttcagcctcaggagctggaggagctttgggcaggggaagagctgcacagtgtggggctgggttcagcctctgctgtgtgaccttggatgagtgactcacctctctgaccatctacaaaatggcgaggctctccccattcacagggtgtgggaaggaggacttgagctgcagatgtgacgctcctgacacgtcgcaggcacacggcaggtgcttgttcctcgccatgtcccctcacacctgtgctgccatcctctgttggggtgggacaaactctgtggaattacccagaagtccccaccagagccgctggcccttggacgtgtgctttgagaagcatttcctgagcctggagggtctggacacaggatcaagtccgagttcctgaccccaattcactgccttgccccaggtgtcggcctcctcgccagccctggacaagatgggtcatcaggatgggaccgtgtggcacagcctgcgggctttggagccaggcaaacctgggctgggaatcctggctctgcctcggcctccgtgatcttagacaggcagccccagctccctgagacaccatttctctacaacgggatcacgctgcctgcctcgtgggatttccgtgggcactcagggtaattaatctgggagaaggctgactctctacctgacacacagggaggctgtggtcatgctggccccactcaccattgcccccctgccttctccttcccttcccagcctcctcccctctccctctgtgctttttcaaaccttccatgtccagctctgagacccctggaccctgagtctcagccttggcagatgacccctctctgtcctgctgtgtgcatgagctcccccttcccagccctcgtccagcagcacccaggagcctgagtacagctgggcaccaccctctgtgcagctgtgatgggtggggaggctcctgctccccttctctcttggcagttctgccctgcacagctctggcctccacagttctggttggtttgtcaaggacgtttttaatctccatggtaaaccccggccggcggggaaggggggtggcagggagagagtgatgattggtagagcatatacctgtccaggtgcactggagctgggagcaaaggaggctctgtgagaggagggccagttcagccgcagcaggaggactgacaggtgaggggtctctgggcgtggactggagtatgaacctggaagggccaggcaggcagggcataggggatggtaggggcagtagccagcacctcactttggctttgcagaggccttctggtcctggggttttcctgcctctgtgacctgagctgtcggggagaaaggagggtgctccgagattggcagggagagtcggagccatccatgggactctgcagtgagagagtcacagccctgggcagagactgctcccagtagtggaagcaccaagcgacccaggagggtgggagcggtgtccacagtctgctgctggacacagggggacacctaggaatcccaccctcatcccacaaaatgacacacacaggcacacaccctcagtgacggaacctcagggatgagggcacacacagacctagtgtgataacacacacacacacgcacaatccttcctcttcatttgggtggggagagcactggaagggcccagaggcagcgcgaggacgtgcagcagctcacccgggtccttccctccatctgcttctccaggggcctgatggaggagttggtggggctgcgtgagggcttctcaggggaccctgtgactctgcaggagctgtggggcccctgtccccacatccgccgagccatccaaggtgagagccaggtcctcttccctacccgcgggggaccactcaggacatcattcctgcctggctcccaccccacctctctgcccaggaaccaccct

SEQ ID NO: 500 - DNA, 2300 bp, Homo sapien
tgtgggggtgagctggtaaggcctctgtcttgggaaggggtgggagatggggggtctgctagctccccagctgtccccacagttcctctgggaagccaggaataaccagagcctccctcccctcctaggcacctggcagtgggggtgtaaccattggaataaaagcagggcaggggaccctgcttcatgtcacctgccaggatgcaaagtagtgtggggactcagtgacctctgaatgtgggttctctgtaccgccccgctcccacccatacctgccctgtctctttcagcgtgccctgtcccccatcccgtcctcagctgctctgaggcgagggggctgtgcaggtcctgggcacccgacccccactgtcatgagacagagacccaggtctcaggctcagctcatttgacagaggaggaaaacagaggctccggatggtgatggtgttagggtcacagagccgccctgggttctcccctgctgtctctctactgagcccccgctactgctgccaggcgactaatatggaaggggagaaattagggctgatgtggaggcagtgggtttgggagggacctgcattgggtcctgcgccccctggctgccctcttctcagcctcctggggcacacagggctggggggtgagggtggatgtggacatgcagtgccggctgtgggacagtagccagcagctgccccagaccagacactggggatccggatgttgacagggcagccagttctggtgctgtgcagagtcaacaggtcagggtggccaagatgaaggtgggctcgggttcatgcagagcggcaacccccatcccacctcccacaacacacaccttcaattttgatttgacttgcctggcatctaggggcaaagggtggcccagggtcccagattttaacaatcatccaagggccatcatgttattcagagagtggctttgtctgggtaggactggaggcaattgcccccaacatcttgccccaaagtggcatcagacacaactcttctgttctgtgcccaaaccattgccctggttcagcctcaggagctggaggagctttgggcaggggaagagctgcacagtgtggggctgggttcagcctctgctgtgtgaccttggatgagtgactcacctctctgaccatctacaaaatggcgaggctctccccattcacagggtgtggggaggaggacttgagctgcggatgtgacgcttctgacacgttgcaggcacacggcacgtgcttgttcctcgccatgtcccctcacacctgtgctgccatcctctgttggggtgggacaaactctgtggaattacccagaagtccccaccagagccgctggcccttggacgtgtgctttgagaggcatttcctgagcctggagggtctggacacaggatcaagtctgagttcctgaccccaattcactgccttgccccaggtgtcggcctcctcgccagccctggacaagatgggtcatcaggatgggaccgtgtggcacagcctgcgggctttggagccaggcaaacctgggctgggaatcctggcgctgcctcggcctccgtgatcttagacgggcagccccacctccctgagacaccatttctctacaacgggatcacgctgcctgcctcgtgggatttccgtgggcactcagggtaattaatctaggggaaggctgactctctacctggcacacagggaggctgtggtcatgctggccccactcacctttgccggcctgctttctccttctctgcccagcctcctcccctctccctctgtgcttttccaaaccttccatgtccagctctgagacccctggaccctgagcctcagccttggcagatgacccctctctgtcctgctgtgtgcgtgagctcccccttcccagcccccgtccagcagcacccaggagcctgagtacagctgggcaccaccctctgtgcagctatggtgggtggggaggctcctgttcccctccctgttggcagctctgctctgctctgctccggcctgggcagttctgatcggttttcaaggacattctaagtgttcgccataaaccctgggcccaggcgggaaaggggggaggatgttgattgttggaacacacacctgtccaggtgcaggggagctggaggctctgtgagaggagggccagctcagccacagcaggaggactgacaggtgaggggtcgctgcaagatgctggggcctgccagggccagacaggcagggcgggggggggggggtggtaagggcaggagccagcacctcactttg

SEQ ID NO: 501 - DNA, 2300 bp, Homo sapien
ccccactggccaaaaccttctcagatcccaggggggagtcgggaaggggcagcctcatttcacagacaaaggcccaggaagagtcatgtggcttgcccaaagggacacagcaagaaggccagatcttgacttttgggtcactgctggccctacctgctttccaggggctccgctgggacttgatgggaggcctggtgggaggatcttctgcgaagcctgttccagtggccagtgccagggaggggccagtggaggaggcacagctcccccaggccgctcagccctgcctcctgctccaggccagcagaggggagctcaaagctcactcagtggtggcctgagatttcatccgggcttcccctatcctgccacagccttctgccaggcctggcgggaggaacgtgaacaactcacattccctctgtgatgctcggtgtccaaatctgctaaatgagtttaaggaccttaccctaggctgggtgcagtgactcatgcctgtaatcccagcactttaggaggctgaggcaggaggatcacttgtgcctagagtttgagaccagcctgggcaacacagggagaccctgtctctacaacaaatagaaaaaaatcagctgggcatgattgcatgtgcccgtggtccgagctactcaggaggctgaggcgggaggactgcttgacctggggaatttgatcctgcactgagcagtgtttgcaccactgtactccagtctgggggatagagtgagacccctgtctgaaacaaacaaacaaacaaacaaacaaacaaacaaaggaatcctaacccagctgggcacactggctcatacctataatcccagcactttgggaggcggaagtggacagatcgtttgaggtcaggagttctagagcagcccgggcaacatagctagactccatctctttagaaaaataaggtgggcgaagtggtctccacctatagtcccagctattcaggaggctgacgcaggaggataacttgagccctggcaactgaggctgctgtaagctatgatcctaccactgtactccagcctggccaacagagcaagatcttgtccccaaaggaaaataatcctaacttcagagggttctgctgatctggcgagatcgtaatgtgaaaacatcacacaggtagagtgttgagatttttaacctagagattgtccccctcctggccctgcccacccccgccaaggttctggaatcccggaggtgaagaccatgttggcgggtgtggtcttggaggactacctggatatcaagaactttggggccaaagtggtgggcctctcctgcaccctggcctgtggcagcaccctcttcctcgggaaagtggtatgggcaggggtgagggcatcccaaccaccctacccaccccagccaccccagtctcacccccatcaccccacgaaagctgcgtcagaggggacttgggctggtccctgccttccaggaactcagtcttgggggaagaggcaggccaggtccccggagtgtgacaaaagccatctgaggacggccgtgggggcttgggagatggaggagggggtgttggggggaagccgtgctgactctgggtgagaccgtctctgctgccctcacctgggccctgggcccacccttctctctgcagggccctttcgtgcacctgtctgtgatgatggctgcctacctgggccgtgtgcgcaccacgaccatcggggagcctgaggttagggactcgggggcttccttggagaaatgggagtggggagggagggggctgactctgagccctggactcggatcccccagaacaagagcaagcaaaacgaaatgctggtggcagcggcggcagtgggcgtggccacagtctttgcagctcccttcagcggtgagaccccttcatgccccgccccctgggtccctcaagctcctcccctcacaccctgggctccttcggcccagctgagagcctggaggagggggtggggctcattctagttctcacttcagccccgccttgggcacagccaccgccccccaccggggggagggggggcgggtgacttgattggcggtgctaagaggcttcagtgtaacattatacagacttgggtttgaaatccacgtatgaccctggcccgttggcctctctgagcccggcttcctcctctacaaaatggagatcgcaaccgtccccacccgatagcgagagggcgcacacccgcattccaggctggacgggtctctgggcagcgggctcctccccgcccagggcgcatgccctgccctcccct

SEQ ID NO: 502 - DNA, 2300 bp, Homo sapien
actacgtgccagtgattttgcatatattaatttcatcagccctcacagcaatcccacgaggtgggatttttaccctaagttaacagatgaaaaatctgagactcagagaggcgaagcaacttacccaaggtcgcacagcttgtgtgagctaagccctcattcacccaggtctgctgacaccagggccaggcacagaaccgctctccacccggactttactgggcagagagcacctagcttagagaaagagaaagaagtcagcacccactccctggctcagctgctctggcagtgcgccctggcccagatcctgccccttgagaggcctccagccctatcccacgctgctgcctcaaaccttattcattcttttttttttttttttttttttttgaaacagagtctcactctgccgaccaggctggagtgtagtggcacgatttcggctcactgcaacctccactttcccgggttcaagcaattctcctgcctcagcctcccgagtagctgggattacaggcttgtgccaccacacctagctttttatttatttatttattttgagatggagtttctctcttgtagcccaggctggagtgcagtggcatggtcttggctcactgtaccctgggttcaagcaactctcctgcctcagcctcctgagtagctgggattacaggcgcccaccaccaccatgcctggctaatttttgtatttttagtagagacggggtttcaccatgttggctaggctggtctcaaactcctgacctcaggtgatccgcccacctcggcctcccaaagtggtgtgattacaggcatgaactactgtgccaagcccacacccagctaattttttatatttttggtagagacggagtttcaccatattggccaggctggtctcgaactcctgacctcaagtgatctgcctgccttggcctcccaaagtgctgggattacaggcgtgggccaccgcgcctggcccctccttattcattcttcaaaacatttctctgctgccaccagtgaacctggctgcctcaactggaaaacagacacaagagtgcctgccctgcctgatgcacaggtgggcatgaaggagagagcgagatgctatgtgtgagtgagggtctcagacactgacattgagtgctgtgtgcatgggaaattttgctaaaggatcttcacacctcaggagctgggatgtgtgtgtgtgtgtgtgtgtgtaaatgcaagcgtgcttcaatgtgagtgtataactgtcattgtgtgggtgtgagtgggtatgtacacatgggagactgtgtattcatgtgtaggtatgtgagtgtgtgtgcgtgtatgtaaatgcaagtgtgcatatatatgtgtgtgtatgaccatcagtgtgtgaatgaggggtatgtacacatgggagagtgtgtgtgtaggtacgtgcgagtaagtgtgaatgactacagaggccgtccagggctggggaaaaaaacctgtgcctcagtttactctgccctagacaagccctgagaggcagccttgcccccctcttcaaccatcgctggagacccttcatcccgccgccaggccaccagcgcactatctacccgcactctctctaccccacctctgggcatatattattttgcatatgttaatttcaatagctctgaatgaggcgctgacagtcaaaagtcgctgaactcacagcttagggctctcaggcaaggcctctaacttctgcgagcctcactttcatcctctaaaaataggcccaatggaactgttgttcttgcgcgcacccctcctcgctcccaagccttcgtgcccagtcgtcgttggtgtggttaaattcatgttgtttactttgtgccccaaatgccaggagtctccccgccccctctgtccccttccctgaccttcagcccgggcaaccccaggaggtgggggagccccgaagggacagagatggccctcccgcgcgctgcggccacaggtgtgcccgagcctcccggctgcgctcccccgggccccgcccgccgcgccccgcggtgtcgccctcccctggcagcggcgggcactgcgcgggaggcggcggcgcgaggcgagccgggcgcggcggcagcagggacgacccaggctggagctgaggccgagctgagggcgcccgagccccccgccccgcccgtcctctggctccgcagcgctcagccccgggcccgcggagacatgaacgccccgcggccccacgcaccccgggcgcagcggcccggccccgcggccccgtgatgggctcctgcgtgt

SEQ ID NO: 503 - DNA, 2300 bp, Homo sapien
agagtgtgtagcgaagtgcctggcacgcggcggggccgggacacgggggtcattacctctgctcttgttgttattaatgatgtgtccacacttcctctggacacgcaggcaggaatccccgagtagctctaatgggaatgccttcgtcacgactgcttaaggggccattctggggcctagatcctggagagggagtcctggctcgctcacttcctccctgttcctccacccgccttctccgcaccctcggccctgagagtggagcttgggcagcaaaagcggggactgggccgcattctgagcaccccaggtcctcctaggaccaaagtagggccaggaggcttccctggccggagcagacctcactgacctccctgcatttggttccccgtggggctctttcaggaggaagaaccagcgtgcccgccagtccccggaggacgtttacttctccaagtcaggtgagacgcagcccccgctccaggcccagccctgcccgcaccgtccccagctctgtgggggaggtgggggcagccagggtgttcccagggcactggggtggggccacaggcttccgtgggcagctctgaggggtccgtcccccacagcctggtccaagtctctgaagatcacgtgaccttctcctctgactccagagcaccccccatggggcccctcctgagctgcctgtgaccccaccccttctccttccagaacaactgaagcccctgaagacatacgtggacccccacacatatgaggaccccaaccaggctgtgttgaagttcactaccgagatccatccatcctgtgtcactcggcagaaggtgatcggagcaggtgaggttggccccctgccaaggggccctgaggaggcagcggtggtgacacagtgtgggagccctcatgccggggctgaccagggcactcccctgaccctgtctgcccacaggagagtttggggaggtgtacaagggcatgctgaagacatcctcggggaagaaggaggtgccggtggccatcaagacgctgaaagccggctacacagagaagcagcgagtggacttcctcggcgaggccggcatcatgggccagttcagccaccacaacatcatccgcctagagggcgtcatctccaaatgtgaggcttggggcctgcccacactgggtggagaggggccacttagcaggggctctgtctgtgactgtgcccacctcccctatacctgtgcccaccttccccccacacctgcacccacctcctctacaactgtgcccacttctccccaatacctgtacccacctcctaacacctgtgcccaccttccccccatacctgcacccacctccttacacccgtgcccacctctccccatacttgtacccacctcctctacacctgtgcccacctctccccgatacctgtacccacctccttacacctgtgcccaccttccccccatacctgcacccacctccttacacccgtgcccacctctccccatacttgtacccacctcctctacacctgtgcccacctctccccgatacctgtacccacctccttacacccgtgcccacctctccccatacttgtacccacctcctctacacctgtgcccacctgtcctcaatacctgtgccctcctccccaatacctgaacccacctctccccatacctctgcccactcctccgcctgtgcccagctttccccacacctctccccatacctgtacccaccctccccacacctgttccacctctccccacacctgtgcccacctctcctacacctgtgcccaccttcccccatatctgtgcccacctctcccacatgcctgggcccacttacctctcacctgtgcccacccccctacagacaagcccatgatgatcatcactgagtacatggagaatggggccctggacaagttccttcgggtaaggatgtgggttgtagggggcggggatgcctggccattgagcccggggctggcctggcgggttcagggctggcctgcagctgagcgcctgtgctccggcaggagaaggatggcgagttcagcgtgctgcagctggtgggcatgctgcggggcatcgcagctggcatgaagtacctggccaacatgaactatgtgcaccgtgacctggctgcccgcaacatcctcgtcaacagcaacctggtctgcaaggtgtctgactttggcctgtcccgcgtgctggaggacgaccccgaggccacctacaccaccagtgtaagttggggaaggggacctcaagggagaagcggccttcgcc

SEQ ID NO: 504 - DNA, 2300 bp, Homo sapien
tttctgtagtcctggcccctgtggtttacatgcatgactttatttgatctttacagtaactctcctaaataggctttacatctttccaggagcaaactgaggctcagaaaagtgaaataacttgttcagaaactcatgggctgactccacatctactgtgaagtatggcacactcacaaatacatgcatacacaaatccacactcacatgcactcatacacaaatctctcacacccacatgcacactcatacacacatctagacacatccacacaatccacaaaaacacacacagacacacactcatacccaaatcctctcatgcccatgcacacacacttatacacacatataccaacacttttttctttttttttttgagacagagtcttgctggcccaggctggagtgcagtgagtggcgcaatctcggctcactgcaatctctgcctctggggttcaagtgattctcctgccttagcctccttagtagatgggattacaggtgagtggcaccacgcccagctaatttttttgtatttttagtagagacggggtttcaccatgttggccaggcatgtctggagctcctgacctcaaatgatctgcctgcctcggcctcccaaagtgctggaattacaggcctgagccaccctgcccagtcacatacaacacttatgtccatacacacactcacacacagtcatacatacatcaacactctcatgtctatacacacgaatgcacattcaacaaaatctcacaccctcatacacatgcacttattctcacaggcacttgcacactcacaggctctcagaggaccaaggctctcctcccatcctcttggtcaaaggctttaattatccccaacgcctgtaattaacccttcctctcttcctgcaggagagatgtctggacccgcttcccaagagtaggcaccaaggcgagaggccaagatgtccacatccggcagagaagacccacgtacctgggtagcaggtcccgggcatcaaagcgaggatggggtcagagaggaagaggtaggcaaagggagtctggggcctcccaggaaatcaggcctgccacagttgctcttcctggactggtcaaatggtgattggccaacaggcagccgtgggtggctgggcaggcgggccagagcaaatttcccgtttgtttcactcacactagccgcttctgtcaggaagggagatgagctcatgtctgaggaagttttgtgaagaggccttatcaaggggcaggtggtaggcaggtgtcctccaaactgtcaaaacctatcaacccatgccagggtcgggggccaggggtgccccttgcccccttccccaaaaagaagcagtggttcaagcagagaccaccaggattcaaatcctgcttctactacccgtgagctgtgcaccctttgggcatgttgtttctgctcttggagcctcagtctcctcttctgtaacatggggatgatgacccctgcctcccagatgagaattattaataaataagatagtgcatgtctgatccattcccagaggaaatgaacctattctcagatcatagtaggcttataggcttctgaacagagatactctttttgaccatcagcagcttgatatactcttcaagggttttaggaaggagggcatccaggtctatttctgggccactctctcaggcctgctgcttaggaggcaactgcttattggacccccaatccatttcagctcagaccttcaggccagcgttgagctcagtcgcattgagctcagtctcagaggtgaagggcagaatgggtatggctcagcgcaaaaccattaaacgtttccaccgaggataccaggctcagagatccctgggggctaatccgtaggggcgctggcgctttgagacgctcaaactttggaaggcctgcggggagcccgcgagtccagagggccccaaggtcctcctccaaacccctccggacttcccctccctctcctccgggtgccagcccggcccctttaaagacattcctgagggcgggcgttggtgacgtcacgcagggcatgaatgaacaggagtcggttctcacccaacttccattaaggactcggggcaggaggggcagaagttgcgcgcaggccggcgggcgggagcggacaccgaggccggcgtgcaggcgtgcgggtgtgcgggagccgggctcggggggatcggaccgagagcgagaagcgcggcatggagctccaggcagcccgcgcctgcttcgccctgctgtggggctgtgcgctggccgcggcc

SEQ ID NO: 505 - DNA, 2300 bp, Homo sapien
gactgacactgtcactgttcaggccaaggctttccctctaagtgcactatgtatttcagccgtggagcagttaactatcacctcctccaggaagtcttcctggaatacccaggttgagttgagccgagcaccctcctctgatggttcctctggcttggctcttgccaacctggattgtaactgttttcatttttggctctcccactagactggcagcccacgggcatgaaatgtttgtccatctgtctccctgggttttctgggcttcatctgtgtctctgaggatctggttggcctgaaattgtcagtgtctctgtctccatctctgggtccctgaatgtctcagcatctgtggtttttctgtttttgaacgtcttggggtcttggtttctcagttactggctaagtggtctctgtttctctgggtctctctcagtcttcatttcctggctctcctggtcctgccaggctgggcactgcccctttggcctgagggggcctctggggggtcctggctgcccggcctgcccacagcgaggccaggctagggtaggcccccgcccagcccgctgcctgctccctccctccctccctgcttgcctcaccacagggtttgatgaatcaaactctttgtctgggtgggatctcccccagccagctgggcagagagagggcttcccctgccggaacagccaaacagcatcagcagcgggcctgggcccagagaggtgaggggctgcaggagggaggctggcagagggccacagggcaagagctgtgggggcttgggcctctcagatcatcaggcctgccccgatcggagggctggctccccagggataacttcctgcccagaaaggacccatccagcctggcccacccaggggctggaagctggggtgggggacagcccctctttcactccaagccgggggtgctggggcacctctttgaacttcgagaaggcccctgcctgatctgggtggtggcccgcctgccagtccatgaccctcccagccaacttggcatgggtgtgggcaccactcagcactgaaggccgcaactctgggcaagggtcggggagatggggggagaaacatcagagcaaggacctgtgggctggtgtgtgtctgtgtgcatgtgaagggaacaggagggtgagaaatcttgggtgcctgtgtaaatatcggacgggtcagcgtgtttgtgaggagttgtctgtgaatgtatgcggttgtgtaaaaatgtgtgtgtctgtgactgtgtgagcctgagtttgaaatgtctgtatctatgaaagtgtacatgtcattctatacttgggagaaaatgtagtgtggatgtatatgttgggaaatggatttgtgtgacaatgtatgtatttgcatgtctggtgacatgtcagtgtgttttagagaagtacaaggtggttaaaatcatcgatttcaaagctagaacggccaggttagaatcctggctccaccatttaccaaataacctctctgtgcctcagtttcctcacctataaaatggggataataagagcatcaactcacagcgttgttgtgaggattaaatgagatagtatgtgtaaagtacttggcctatcattcaggcaatgccaagcaagtatcagctatttctatataattagacatgtgagtgtgtttgtggagatgtgtgtacacaagtgtacacaggggtttgtccaggcctccaggggtggtggcttactggccagccccactgtcctctgtctaggtctgatatcttctcttctgcagggccaggtgggtggcagagcaaaagaggaatggactgtgggccacctgctaccctccagccccacctgactgggccacctggcactgcccaccaccctgtagcagtgtgccagcaggagagtctgtcctttgcagagctgcccgccctgaagcccccgagcccagtgtgtctggaccttttccctgttgccccagaggagcttcgggctcctggcagccgctggtccctggggacccctgcccctctccaagggttgctatggccattatccccaggaggctcagatacagagatcaccagcggggggatgcggcccagcagggctggcagctggccacactgtcctggtgcccagcccccagctctggagggaccctggagtccccgacacacacagccacagcgccgggccagccacggctcggagaagaagtctgcctgtgagtcaccctggggaaggcgggtgtgggtgccatggcagggggataggggaggggctgggcagctccttaacc

SEQ ID NO: 506 - DNA, 2300 bp, Homo sapien
ctgggtttcaatactagtcctgccccttattagctgtgtgacaagttatttaatctctcaaaccttaatgtcatctgtaaaatagggacttcatagaactgatgagagatttcaaagggataatgctcatgacttaacttgttaagttggccccccatatcctcaggttctgcatccttgggttcaaccaacaatgcatggaaaatgaaaataaaaacaaaaaataacaaaaataatgacaataaaaaataatgcaaataaaaaacattacaggataacaactatttacatagcacttacactgtattaacgtgttataagtaatctagaattgatttaaactgtactggagtgccgggcgtggtggctcatgtctataaatccagtactttgggaggccaaggctggtggatcgcctgagcccaggagtttgagactaggctgggcaacctggtgagatcccatctctacaaaaaatacaaaaattagtcaggtgtgggggtgcacaccagtggtcccagttactcaggaggcttaggtgggagaatcacctgagcccaggaggtcgacgagactgcaagtgagccctgtaattgcaccactgtactccagcctggatgacagagtgagaccctctcacttgaggacattttattttattttttgacaataaatacataaaatagactgggtgcggtggctcacgtctataatcccagcacttcgggaggttgaggcgggtggatcacttaaggtcaggagttcaaaaaccagcctggccaacatggtgaaaccctgtcttgactagaaacaaaaaaaattagtagggtgtggtggcatgcgcctgtaatcccagctactggggaggctgaggcagaagaattgcttgaacctgggaggcaaaggttgcggtgagctgagatcccaccacttgctccagcctgggtgacagagcaagactccatcttaaaaataaataaataaataaataaataaataaataaataaataaataaaataaaataaaataaaatttactggaggatgtacaaaggttatagcaaacactatgacattttgtataagggactggagcagccatggattttcgtatgggagggttctagaaccaattccccacagattctgggtaccaagggacaactgtactcacctgataagtggtagcagtatctacctgacagggtcatggtggagattaaatgagtaaatacatgtgaagtgctcaggacagtgcctggcacctagtaggtgaacaataagttagcttcatgactattagtctgtgtacacatctgcatattaatattaggtgcctggcaattgctggtagctcaaacagatggcaggtagaattaggggaaaatgcagcttcccattccacagggttgggaagattgcatgccgggcatagagcatgcccttcttattggaggcagtttgacttggctatttggcttggtttattgagggctcaattggtatagtctgggaaggcttcatggtggaggcggccactggagatggtggggcaggtcattccaggccgtgggaaaggatggggatttgcaagcagtggctgtactagatgaggagaggctgtccaggatgatgccacatgtcacatcatcaactttcaggactgatttctgtctcccaatcatagggatgagtgttccaatttgatagatgtagtaataggatcagagagggtcatcagggttctcagggtccctaaggagtgcagggcttgggaggctctctgtgaagctcccaggatgctccccagctccaagaagtcccctgagcatgctcatgtttgggaagctccagaagagtggtgacctgtctcctaggagcagaagcactgcctcccccgtctttaggacctgggtgtagggtccttcagagcctcacttgggcataggactcccattgttccagcccccctcttgtaccccagactagccaaaccggttctggggaaggggggcggggagcaggcacgttgagacagccgcctgcctctctctgcaaggttccctcctccttcacctccccctccctgccccacacaatacccaggagcttgccttgctcggctctggggccatgctgacatgctgacatcgccccctgaggacttggctgcaaccccagagcccccagggtgtcccggagccctggaccgtgctggcagctggacggagctccctggctgaggtagggccccacctgggtgccagcagtcccattctcttcccgccagttttccccgc

SEQ ID NO: 507 - DNA, 2300 bp, Homo sapien
attacaggcgtgagccaccgcgcccagccatttttttgtatatttttagggataaggttttgccatgttacccaggctggtctcaaactcctgacctcaagtggtccaccagcttcagcctcccaaagtgctgggattacaggcgtgagccaccgcacatggccccaagaggactttacatcttctctgggttgcagattaacaggcacgttcattctgccaagttgcttcattttctcacacgctcactgagccctccacgagccaaagatgggtggatgtgaagtctggaaatccagaaataattcagatcagagccctgccactgagtgactcctggcccatggagagagctctggacagctgtgaatctccctgactgggcagatgtgacagctgcaggaatgggaaccatgtgacctgggagtatgggcaaaggattccacctgcagaatcctgtaggaatggttattcatctggtttttctgcctagccacagcgtgagcaagttgagagaaagcaccttgtcttacacatcctcatcccctctcttagacataatgggccttaaaaatctgtgagttcgtagtcctctggctgctttctgcttccctaggaacagccctcctagtggctaggggcaaagttttaaaaacacaaaacccaaactggcagaacagataagtactttagagtcaggtaagtgtgggttctttttttttttttttttttttttttgacagggcctagctctgtcactcaggctgaagtgcagtggcatgatctcggctcactgcaacctccatttcccgggctcaagcaatcctctcatctcagcctccaagtagctgggactacaggcgtgcactactgtgcccggctaatttttgtatttttttttttgtagaggcagggtcttactatgttgcccaggttggtctcaaactcctgagcttaagcaatctgcccgcctcagcttcccaaagtgctgggattacaggcgtgagccaccacacccagccagctgtgggttctgagtcggtttcacactgactagctgtgcggtgtgacctcagacaagtcacgttatgtttctgagagtcttcgtcagtacaagagggtaatactatttacacaggtttgtttatagaattaaatcaggtgacccctgtaaagtccccactgtctggcacttgggtggccttaggtaaagcttaactcctaaattattcctttcaaaacagtgatttgccctacttgaaggcattgcggaaagataatggtaaaaattaaatgtaatagacaaactctcagtaatgacccacctgcactctttccaaccagtgggcatttactgagcacccaccttctgggtaacaggcctggtgtccagtgctggaacggtggagaggagctcagagtttcagagctgaaaagtcagctccaggagagcagggacttcttgttggccactgtattcccagctaggtgctcagtatttgttgaatgaatgaatgaatgaaaaatacaatccagcgggcctctgactcattttttaaaacttgagccaagtcccttgacctctctgagctggtgtgtgtccccatcagtgaagccagagatgtttaagtcatctagaggtcctgccaagcaggattaatagagcaataatattaataatagcaacaatcataactaaacatatggagcactgctatggagggaataacatgttacgtccacgttatagaagaggaaactgagacacagagaagcatgaaaggctcctggagggggggtttcatgatgttttggaagaaagactagggatcggacggagtcatagagaagaggatccacaacccagaggaaaaggcctagtccagagccaccgcgcggcgcaggctgcggacgttgtaggagggacgaacgcctcccggaacccgcccaacccaacctccggcgtctccatggcaacaacctccgcacatgcgccgcgcgcacctgcgccggagctgccagcacgcgcagaaggcggacgcaggcggggcggaagtgggcccggcgggctggggcggcgggagtgcgggtgggcgtttaaaggggccttcggcacccaggtcggttcgccgccgggactgctgacggggagggctaggtagccctgggagtcgggatctagaaggtagaggagaagcggggctgtctgacccccggaggtgacaaggggagaggggctgtgtgaataccctccatgggcagtaatgggatgactatccccagggagcattgcgaaggag

SEQ ID NO: 508 - DNA, 2300 bp, Homo sapien
taataaataaataaagactcatttctacagtcagttcctgtggtctggattagtgttggttttatttatgaaagtattcaaaatagttgacacggacaggcacagtggcttacacctgtaatcctaacacttcgaaaggccaaggcggcaggattgcttgaacccatgagttcgagaccagtctgggcaatgcagggagtccccatcactacaaaaaatttaaaaattagtcgggcatggtggtgcttgcctgtattcctagctatttgggaggttaaagtgggaggatcccttgagcccaggaggttgaggctgcagtgagccgtaattgtgccactgcactccagcctgggcaacagcaagaccctgtctcaaaaaaaaaaaaaggaagaagaaatgaaaaatagctgatgccacatggtgttcttagatgctcaccctgtactcttcaggactgatgccttctcagtaaatcgtattgttcccctaagtgagatcacaagaaagacagtcctctgctctaccttctcaaccttgagactttgtaagtgacaccattaaagcagtctgagcagggcttttcaaacagtgttctgtaatgtgctactgaaagaggaagcaaagctctccacctagattggagcatctcgactgctgtcaggttaatgtagtgttgggatttcttctgcttaagatatcctttgaaaaatgagtcctgcagctttaaccaaaaagaaaaaaaaaagattttaaaaaaaaaagtattctcagcgaggcatggtggctcacgcctgtaatcccagcactttgggaggccaaagcgggtagatcacctgaggtcaggagtttgagaccagcctggccaacatggtgaaaccccatctcaactaaaaatgcaacaattagctgggcatgatggcagatgcctgtaatcccagctactcaggaggctaaggcaggaaaatcacttgaacccaggaggtggaggttgcagtgagccgagattgcatcattgcactccagcctgggtgacaaagcgagactccacctccaaaggaaaaaaaaagtattctggtatttactgacacctggatattgggacaagttactttggtcttgaggaaactaaaggtgacatgtagagtgagggatggggaaaaatagcaattgttatttcaaagacaatagattttgaaaaattatgctcctgtaagacatttgttatctctaaagttttccagcataagccaaagtgttttttttcagaatttggtcagtgtagcccagaggtccagtctagatggtgtttggtgtaagacttatggtttcactggaattccttcacaccaatccttgaaggtctgccccatttgtgctaggctgaggctatctggttatgtgaagcccatagctaggggcctggaggtccctatgttaaaatttgactcacgggacaaataagaactgcctcctgcctccttttcttacctgtgttttgtaacgagttatttttaagttgcatccagacatccagcctctatgtatacttctccctggtcctctacattctttcttttctttgtgacctctgttaagtttgttaaagggatgggaaggggtgctcatttgttgagcactttctatgtgccaggcattatgttaggtgctttgaatatactatttaatactcaaaacagccttatgagataggtactctcatccctaattttaggtgagcaaattataaacatgagagaggctaagtaacttttctctaactcatatttctctgttaataataaaagacgtgtgaattagtgatgattttctctcagactcaaacccagttttctttccacctttcctctacactttgtagtattagttccccttttgttgctcttccagggaaaggtgatctatggatagcctaactacggattgttgtgagatcctgaatgctaaccatggtgttactgactttccctagggtcctatccttcccccaaagctggagcaactctggtcgtgtacaaggacttgctagtgctgtttggtggctggacgcggccaagcccttatcccctacaccagccagagagattctttgatgaaatacacacttactcaccctctaaaaattggtaagtcacaaagataaactctttaaatctggaagaaaaggccttaaatcagtggattctttgtttttttgtgtcaagagtccctttgagaattagatggaaagctgtggactcttttcccaggaggggaaaaatgcacatattcacagattttac

SEQ ID NO: 509 - DNA, 2300 bp, Homo sapien
ttctgtctagcatctgcttcctggagaatctaatctgcaacacagttcttacataaaacaccctatttccttcattttactggttttacctcagactttgtgtataatgtcataggagtataaatgagatgcctgcctctatgtgtatgctttctttgtagaaaatttaggaaatacagataagcagaagcaagacatttttaaaattattaataatattcccactagaagtaactgctgataatggcttattttggcaactttatttatttatttaagacggagtcttgctctgtcgcccaggctggagtgcagtggagcgacctcagctcactgcaacgtctgcctcctgggttcaagcgattctcctgcctcagcctcccgagtagctgggattacaggtgtgtgccaccacacccaactaatttttgtgtttttagtagagacgggtttcaccatgctggccatgctggtctcgaactcttgacctcaggtgatccacccgcctaggcctcccaaagttctgggattacagcatgagccactgcacccggccagtattttgacaaactttagagaagtgcgtgagtattcagctcagtaaattttttacaaacaaaaaacatctgtgtaaccagtacccaatcaggaaacagaactttactagtacctcagatacctcacttgtaacagcataaattttgcctcgttttgaacttgatataattgtaatcgtatagtatatattcttcttcttctttttttttttttcttcgagacatggtctaactcggttgcccaggctggagtccagtggtgtggtcatggcttcctgtagcctcaaactcttgggctcaagtgatcctcctgctcagcctcctgggtagctgggaccacagatgtgtgccagcacacccggttaattatttttttgtagagatggtgtctcactttgttgcccaggctggtctcaaattcctgacctcaaatgatcctcctgttttggcttactaaagtgttgggattataggcatgagccactgtgcctgcccattcttctgtcttctgtttgtttgtttgtttgtttgtttgcttgtttgagatggagtcttgctgtattgtctaggctggagtgcagtggccagtcttggctaactgcaacctctgcatcccaggttcaagtgattctcctgcctcatcctcccaagtaactgggattacaggcacatgcatcaccaagcctggctaagttttggatttttgtttgtttgtttgtttgttgagacgatctcactctattgcccaggctggagtgcggagtgatctctgctcactgcaacctccacctcctgggttcaagtgattttcatgccttaacctccctagtagctgggactgcaggcatacgctaccacgcccagctaatttttgcatttttagtagagatggagtttcactgtgttggccaggctggtcttgaactcctgacctcagatgatctgcctaccttagcctcccaaagtgctgggattacgggtgtgagccactgcgcccggcctaatttttgtattttttagtagagacggagtttcaccatgttggtcaggctggttttgaactcctgacctcaggtgatccgcccgcctcagcctcccaaagtgttgggattacaggcgtgagccactgcatccggccttctatcttcttttgcttaacattatgtttgagagatttatttatatgtatataacctgtggttctttgctctatatttcatggcgaatgtaccacaatttatttgctctgttgttgatagacattcatgttgttctagttttttactgcctggatctcttaatgattcatattttctattgtaaatactgccttgtatttggtattttagcaagtgaagtctattcttggaacatttactatcttttttttttttttttttttttttgagagtctttctctgtgtcccaggctggagtgcagtggcatgatctcgactcactgcaacctctgtctcccaggttcaagcagttctcctgcctcagcctcctgagtagctgggattacaggcacgcgccactacacctggctaatttttgtattttagtagagatgggatttcgccatgttgcccacgctggtctcgaactcctgacctaaggtgatctgccggcctcagaatcccaaagtgctgggactacaggtgtgagccactgcacccaaccaagaactactatattttgtaagtggaaataaccactattaaaaacagaatgctataaata

SEQ ID NO: 510 - DNA, 2300 bp, Homo sapien
cgaggcgggtggatcaactgaggcaagagttcgagaccagcctggccaacatggtgaaaccccgtctttactaaaaatacaaaaattagctgggtgtggtggcacatgtctgtaatcccagctactcaggaggttgaggcacgagaatcgtttggacctgggaggcagaggttgcagtgagtggagatcacaccactgcactccagcctgggcgaagagtgagaccctgtctcaataaatacataaaaaggccaggcgccgtggctcacacctgtaatcccagaactttggaaggccgaggtgagtggatcacgagttcaggagtttgagaccagcctgtccaagatggtgaaaccccgtattttctactgaattttgtattttctactgaaaatacaaaaattagctgggcacggtggcgggcgcctgtaatcccagctactcgggaggctgaggcaggagaatcggttgaacccaggaggcggaagttgcagtgagcggagatggtgccactgcactctagtctgggcgacagagcaagactcagtctcaaaaaaataaacaaataaataaaaataagtaaataaataaataaaaactacattggttcggtgcagaaagaccggaaacttgaagtgggggcttccacattataggcagatttaaacattttctgattggcaatgagttgaaatagttattatcaataggcctggtgcggtggcacacgcctgtaatccaagcattttgggaggccgaggcaagtggattacttgagctcaggagtttgagatgagagtggacaacatggcgaaaccctgtgtctacaaaaaaaatggaaaaattagccaggcatggtggtgcccgcctgtagtcccagttactcaggaggctaaggtaggaggatagcttgagcctgaaagacagaggttgcagcgaaccaagaactcatcactggactccagcctgggcaacagagttagaccctgtctcaaaaaaaaaaaagttattatcaatagaaatgaatgtctgggttatgataagggattgtggacaccaaagttttatcacgcacgtgaagcctccaagtggcaggtgggctccagagagaacagattgtaaatgtttcttaccagtcttaaggtctgttgtgttgatgtcaatgctgaaggatgtaatgaggcatgtctcatgtcctgcttcccgtcatggcctgaaccagtctctcaggttggttacattttagactgccctggcctaggaggaagtccgttcagatggtttggtgttggggggggggtgggggcttagttttttgttttgttttgttttgtttttttggcttacagagtttagactgaagcctttgactctgtatctggcatttccttagaccacatgctgtagggctgggctcatgaaggttctcacctacacaccaggttgctcccttgagaagggggactttgctggatcctataacctagctagtaggaagtaaaggagcttgggaaccagacaagcctgagtttaaatcctctttcccgcgccgccccacctccactgataggtgtgtgactccgggcaaataagtgatcgttttctgtgcctcagtttcctcatctgaaaagtggagctagtaagaactcacagtggttgctacgaggctacggttaagggaagacttctcctgcacacctcaagcacagtttccctccccttggcgatatccaagagcactcacatccgccacagccctctctgctcatcgggccctcggggtagaagtgagttaattcctggctaaatgttagtctcaaaccaccgggaaaaccacccagttgccccagacagtgcagcggagggtgggtgcggctatcaggtcgacgctagagacgcggcgaaggcgggtgcggaggcctagctcccccgagcgcattccaccctccacagaacctcggcctgtgaccacggcctttctcaacactgcgccgccccctggccgcccctcgccatcccgccgcgctgacgtgagtgcgcgcgcgtccgccgcgcccgccccggcgcatgcgcgctctgcgctgtcttctcccggcctgagcagcagcagctgcggcggcggcggcgtttgagtggaggaagatggcggctccgggcggctcggggtcccgccagctgtgaggagccccgagcacggctgtcgcggcctgaggcagagcgcctctgctctggccctgtccctggctccctcattaccgtcgccagcggagcgaacccgagagcgtggagcgggctgggcc

SEQ ID NO: 511 - DNA, 2300 bp, Homo sapien
cagaaagattaatggcatactaaaaatacaagaaaaaacacattccaagtcagataacttggttatagcagccaaatgcaacactactgaatgacatgtatttaaaactgagagaaaaacaggaacatgtcagtaagaatataaacacatggtgtttgcttatctccctgcctttttttttttttttgagacagagtctcgctttgttgcccaggctggagtgcaatggcgcaatcttggctcactgcaacctctgcctcctgggttcaagcaactctcctgcctcagcttcccaagtagctgggattacaggtgcttgccaccacatccggctaatttttgtatctttagtagagatggggtttcaccatgttgaccaggctagtcttgaactcctgacctcaactgattcgcccacctcagcctcccacagtgttgggattataggcgtgagccaccgcgcctggcatctccctgtccttatattttaagaaaggatgattacagaagtgacaattataaatcttcctcgggcagacaagacactcccataatgataatagctaacccttaggactcttactatgggtcaggcactgttctaggcatttcagcatagtaactggttaaattcttacaatctacttttgaagtagctatctctaatgtatacacttggggaactgagacatagaatccttatgtaacttgcgttaagatcacacagcttttttttttttttttagtagagatgggcttttgcctcgttgcccaggctggtctcaaactgcagggctcaagcgatccccccgcctcacccttccaaagtgctgggattataggcgtgagccaccatgcccggccacataaataacttttttttgagatagagttttgctcttgttgtccaggctggagtgcaatggcgcaatcttggctcactgcaacctccgcctcccaggctcaagcgatcttcccgcctcagcctcccgagtaggtgggattacaggcatgtgccaccatgcccagctaattttgcattttaagtagagacggggtttctccgtgttggtcaggctggtctcgaactcttgacctcaggtgatctgcccaccttggcctcccaaagtgggattacaggtgtgagccactacgcctgccctgacataaataattttttttttttttgagacagagcctcactctgtcggccaggctggagtgcagtggcatgatctcggctcactgcaacctccacctccctggctcaagcagttctcctgcctcagcctccggagtagctgggattataggcgtgtgccaccatgcccagctaatttttgtatttgtagtagagacggggtttcaccatgttggccaggctggtcttgaactcctgacctcaggtaatccgcctgtctcggcctcccaaagtgctgggattacaggcgtgagccaccgcgcctggccagtaatttttagaggtaatactaacgtatttatctaccattaaagacccaggagaacttagtagctgggaatcccactggttctcccaactgaggtgcaatattatctttaccgtctttaccttacggtagcggatatagtgttaataaatgattagaatactgctttatgagcaggaaatactgtaatgattttcaccctatcagaaataataaaatgttttctgcatcagcagatatttttcatcatttgttggtgtttaaaaatgttttcagaattctgaagataccattatctgtagtttaggaaaactacgactcactttaaaagaaaaaaagttttctttaattgcctgcccttagaaaagatggttccacagaacacacttccggtactcgagatgaggacttcccttgaacgcccattctgtaagacagataacgcgttggcccttaagaaagatggcatctttccgccttctctgcccccttccaagatggctgccctaatgtacacttgggaccttgcctggcgcctcttccgggcttggcagcgggcggggtccattgagtaaagccttgcgtgcctgcgcccgcgacggaggcgcgcttcaaagcgcaggcgcggggagggggtgggggaggagggaaagcggcgagtaagatggaagatgaggaggtcgctgagagctgggaagaggcggcagacagcggggtaaggaggagccgccgtcccatggcagggccgggcgagacctggcgtgaggggagcctccggggagcgggtctggagatagttctccccaaggaagggccccatacgccgggctg

SEQ ID NO: 512 - DNA, 2300 bp, Homo sapien
gcaacctccacctcccgggttcaagcgattctcctgcctcagcctcccgagtagctgggattacaggcacccaccaccaagcctggctagtttttgtatttttttggtagagacgggggtttcatctggttggccaagctgatcttgaactcctgacctcaagtgatccgcccacttcggcctcccaagtgctgggattacaggcgtgagccaccacgactggccatttctactcattttttataagctttttattataggattgatctaaccacttacatttttattgtaaaatatacataacataaaatttaccattttaagtgtacaatgctgtgaaattaagtacattcacaatattgtgcaactatatcatgctttccagaacttttcatcatcccaaacagaaactccacacccattagcaataacttcccatttccttctgctccatcccttagtaacctctgttttactttctgtctctatgaatttgccttttctagatacctcttataagtggaatcatacaatattgggcttttgtgtttcttatttcacttagcatcaagttttcaaggttctttcatgtagcatggatcagaatttcattccttttaatggagggataatattccattgcatgtatataccatattttgtttatccattcatctgtcaacaattgggatgttatcaccttttggtattgggaatcgggctactatgagcattggtgttcaaacacttgttctagtcctgttttccattttcttgagtgtatacataggagtgaaactgctgagttatacaataatgctatgtttagtggttttgttttgttttgttttgtttgaaacagcatctcactctgttgcccaggctggaaagcactggcatgatcatggctcactgcagcctcaacctcccaggctcaagtgatcctcccaactcagcctcccaagtagctgggactacaggtgtgaaccaccatgtccggccttgctcacctttttgaggagcctccaaactgtcttccacagcagcagcaccatttacgttcacaagggtttcaatttcttcacatttttgcaaatattggttatttttcttttcttttcttttctttttcttttctttttttttttttttttagacagggtctctctctttctttctctctctgtcaccccacactggagtgcaatggtgcgatcatcactcactgcagcctcaaattcccgggctcaagggatcctcctgcctcaaccttttgagtagctgggcctacaggcacacaccaccctaccctgctatttttcttactttttgtagagacgggggtcttgctatgttgcccaggctggtcttgaattcctgtcttcaagagatcctcctgcctcagccttccaaagtgctaggattataggcatgagccaccatacctggccttattttccaatttttttttttttgagactaagtctcactctaccacccaggctggaagacagtggcatgatctcagctcactgcaacttctgcctcccaggttcaagtgattctcgtgcctcagcctcctaagtagctgggattacaggcatgcgccaccatgcctggctaatttttgtatttttagtagagacggggtttcaccatgttggccaggctggtctataactcgacctcaagtgatccacccacctcggcctcccaaagtgctgggattacaggtgtgagccaccgcacccagccattcagagcactttcagttctgttcagtctaacaaagacaggcatcgagcacataccctatgccaggtgctgagtactggggtcactgggatgtggccaatccagctcctaccatcctggagctcgcagactggaggagacagagagaaaagcagtcattggcaaagcagaatgaaaggtactgtaatgaagcaaattcacaggggcctgtgggagcaaagagaagaaaccccacacagtctggggagagtcagggaaggctttctgggagagagtaccctggcccaataatcactgtgaggttggcaaggcaacgattgttatcttcattgtgtaatgggggccactgaaccagtgacaagctgggggaaatgacactgtccagtagttggaggtcacacagccccttgccttattctcaaaccctaaccacatggctggatattcctgaaatgcattcctaaacctctgctgctgagaataattggacctgccatctattcccagtttaactgccctgtataccaaacaaatccaattcaagc

SEQ ID NO: 513 - DNA, 2300 bp, Homo sapien
catgccagtgctttccagcctgggcaacagagtgagatgctgtttcaaacaaaacaaaacaaaacaaaaccactaaacatagcattattgtataactcagcagtttcactcctatgtatacactcaagaaaatggaaaacaggactagaacaagtgtttgaacaccaatgctcatagtagcccgattcccaataccaaaaggtgataacatcccaattgttgacagatgaatggataaacaaaatatggtatatacatgcaatggaatattatccctccattaaaaggaatgaaattctgatccatgctacatgaaagaaccttgaaaacttgatgctaagtgaaataagaaacacaaaagcccaatattgtatgattccacttataagaggtatctagaaaaggcaaattcatagagacagaaagtaaaacagaggttactaagggatggagcagaaggaaatgggaagttattgctaatgggtgtggagtttctgtttgggatgatgaaaagttctggaaagcatgatatagttgcacaatattgtgaatgtacttaatttcacagcattgtacacttaaaatggtaaattttatgttatgtatattttacaataaaaatgtaagtggttagatcaatcctataataaaaagcttataaaaaatgagtagaaatggccagtcgtggtggctcacgcctgtaatcccagcacttgggaggccgaagtgggcggatcacttgaggtcaggagttcaagatcagcttggccaaccagatgaaacccccgtctctaccaaaaaaatacaaaaactagccaggcttggtggtgggtgcctgtaatcccagctactcgggaggctgaggcaggagaatcgcttgaacccgggaggtggaggttgcagtgagccgagattgcaccactgcactccagcctgggcggcagagtgagactttgtctgaagaaaaaaaaaaaaaaaagtaaaaaggagaaggagagtgagagagaaaaggaaagaaggggtggggaaagtttggggtattcagtgaatcagaagtttgggatcagcttcacccccacataggggctggcacattgcaggcactcaactcaatgagagaatggtagggaaggagggattttgagaatttggctagggtagacattgtatctcccagaatattctgggagaaatcgaagttaagactggaattcttcttcttctttttttttttttttgagacagagtcccgctctgtcacccaggctgaggtgcagtggcacaatttcagctcactgcaacttccgcattccgggttcaagcgattctagtgcctcagtctcccaactagctaggactacagacacacgccaccaagcccggctaatttttgtatttttagtagagacggggtttcaccatgttggccaggctggtctcgaactcctgacctcaggtgatccgcccgcctcagcctcccaaagtgctgggattacaggcgtgagctaccaagcccggcctggaattcttcttaaattacttgtgttactaaactttacttctttgaatacaactcgttgttgaggtttggccacacggggccctgagcatataagtgggttcccctaggggaagcatggagggtggtagggtaatggcatctatttagtctggtgggtcaggtgccagctgagccttacagtcaggagagggaaggatattcaggcagaggaggcgccgaggcaaaggctggaggacagagatactgcagggtgggctacagctttgcctctcggtcaactgggccccaggcctaagaaactgaagcgatggggatgatccacacccagaccacgggttacagaggggtctgtccatggcgggcgcagggcgctttctttgcgtcggagggtgtctggagggaaggagaagcctctggagggagggagaagcctccggaggtcgcccgccacgtgtcttgagccgggtttccagcagagggcgcacaaacgaggcggtgctgaggcccgcgagctgccgctctagccgaaacctggtcagagagtcgcaccgcttccgtccgtcggacagaggaacggtggaagtcgccggaagttcggtgggctccaggcgtcgcgatggaggagagcgggtacgagtcggtgctctgtgtcaagcctgacgtccacgtctaccgcatccctccgcgggctaccaaccgtggctacaggtgactacccaccgccagaccaggctagctccaatttaaccctttctccgccacccggacacacccactg

SEQ ID NO: 514 - DNA, 2300 bp, Homo sapien
gagactccatctcaggaaaaaaaaaaaaaaaaggtataaatcaaattcctgggctcaagcaacgcaccccacttcagcctcccaaagtgctgggaccatacccactccatgaccctgtttctaaaaaacaaaacaaaaaatactaaaagcaacaacagacgtcagcacatgggaaaaactgatgccagtcataaatgcttgtggaaattttatgttgtgccgcactgtcgagtgctgtagttgacaaggtgatgtgtttcacaagggcttttaaagctagtcacgcttgccctgtctcagattgaattaaatcagcctgcttcagattccctatgggtatgaaaacttcctcccttctttcctcggggctcactggcccctcttatagtcctgcctcaggtactagcctcttcagcaggtgtgattacctaggccagggttcacctgttctaggacactcagggttcaggtaatataagtgggtaaagcagatggaatggatgggctagcagctccaacttattctcaggtgggcttggaggctcagcattaataaagcttaattttaagagaggccaggcagaataccaaactgtgagctaaatttgacctgtaagctctctgacttaagcctttccttgattatattttctgtgtcttccctttagcaagaatggattcgatttgaatcccacagtaaggtttgccgatctgtctcagctggttagagatgccttgcgggcaaaaggcccagtagtgtggtagaaaaccttggctggaagggggctcagggctcagcgctcagcctaacctgtgctttcaggggagctctttgctcaggccccggtggatcagtttcctggcacagctgtggagagtgtgacggattccagcaggtacttcgtgatccgcatcgaagatggaaatggtaggcatgggtcctggtgcttcctcctcttgggaaaggttttctctgcctttggaaggtgggttgatcatgtgttgttccccagggcgacgggcgtttattggaattggcttcggggaccgaggtgatgcctttgacttcaatgttgcattgcaggaccatttcaagtgagtgggtctgggagacacacgctcatgcccctcccttctttccctggacagaatgatctcccaggttaggatacccaagtgtttgtgtgtgatttgtctggcagcagagactcaggagaacccaggacaagccacctctcttctctgccaatgttcatctctgctgtaaagccttctcttttacctgaggctcatctctaccatcccagccttcgggcctgccacctgtctccccttaccagtcccctgagcagccagagtcctcatcaggctcctgtggcctttctgggcctgctcctccatgtaatcaatggcgcttggattcccagggcacccagcagatgccctgatgtccttttctgaagctaagagacagggcaggaagtcctcctccaccatctgcagggctcgaactcaggctgccagtgagtgggctgtgcccggccactcacatgggcgcctctggctcttcccttaccggtgctgctgggtggtgtggtatggagggtgggggacttttgtgttgccctctacttttgggtatctgtcttgtccccccgtctgccttctgagtgtttgagggtgtgtagagaccgcatcttagttctcatgtcatatactgtagagggaagggcaggctctcacgtgtcctagagatagtgttaggaccctctacgtaagtgatctcgctgcattcgtagccatcttgaaaacctatagaattgtgggcatattttgctgatgaggaaaccaatgtgcatgccgctacttaagtgtcagattgggatttgaattcaggcctcactcccaagcctgcactctttccagcaccccgtctcactacgaggctcagcctggactgatagcaggcagtagtgaagtgagccagtgattgcagggcagctggtctcttccttcctcacctttttcctcatgttctctccccaggtgggtgaaacagcagtgtgaatttgcaaaacaagcccagaacccagaccaaggccctaaactggacctgggcttcaaggagggccagaccatcaagctcaacatcgcagtgagttctacccttgcttggctgtggtgacgtgatacttgtggccacccagccccagagcccattgctcttcttacagttcagctccttcagttcagcagatgtttagtgagcatctgccttgtgccaggtcctgcatcggggt

SEQ ID NO: 515 - DNA, 2300 bp, Homo sapien
ttccagccagacccagccaggcacaggctgggtccagttctgacctgagcacggtttttcctcatgtgacttctgggaaggcgctccctcatctgggccaaaggaaggaggacgaagccctcctcagctggcctgtgtttggggcatgaatctctcctctcctccttgtctggctctgttgacaaaccgggcatgtttggcagtaaattggcaccgtgtcacactgtttcctgggattcaagtatgcaaccagaacacaggagaagaaaagctccaggatccctgtccccatctgtcctcttgatgtgagagagactctgagacttcttccatcgcaatgacctgtattaaacacaagccccccaagcaaaagaagaggttgagtttgctgccaggattcagatcagcccttcccagggtctgcaggtgtcacatgatcacagttcagcgggaggctttccgtacccacactggctgtagccacttcagtccatctgccctccagaggaggggtttcttcctgatttttagcaggtttagaggctgcagcttgagctacaatcaggagggaaattggaaggattagcagcttttaaaaatgtttaaatattttgctttgctaatgtgctgatccgcactaactcatctttgcaaaaggaactgctccctcggcgtgccccagctggggcctctgaagggattcctcactgtgggcagctgccctgagcttcaggcagcagtgtttatctctggccagttgtctggtttccatgtattctaggccaggtaggcaacacagagccaaggcgggtgctggaagccagacggaacagtgttggggcaggaaggtggatgctgttgtcatggagctgtgggagttggcactctgtctgctggtggccctctcggctcacatgttcacagtgcagctcctggcagacttgggttttctctttggtggtttctaaagtgccttatctgcaaacaacttcttttctccttcaggaactgtgaatggctagaagaaggagctcagtaaactagaagtccagggttgcttggtttactggtttataagaaatctgaaagcacctctgacattccttttattaactcacctctcagttgaaagatttcttctttgaaaggtcaagaccgtgaactgaaaaaagtgttggcctttttgcgggaccagatttttaagataaaataaatatttttacttctgtcattgtatgtgaaagatgaatgtgtttctggccgcgtggctgttaaactcttcagggtgccacagctagactcacggccacttctctcaccactgaccaagtgtccagattgaaagttcagggctggggtgtgaggctggccaaagtgaggaaatgcaaccttgttgtctaaggcaatcggtaccttctctcctgtgttctctaggatagtacagtcttttcatcatcctttggttgatgtgaaagtagttgcttgaatcactttgtgtggggcttaattctcttgtggcgtctcatgatacaggccgttctagagagcctggccccttgctttccgtcttccaccaaacctaccggcagagcatctccctaagtagtaaaggggtgcagatacccagaggtcaaaagtaaaattaagaggccgggtgcagtggctcacgcctgtaatcccagcactttgagaggccaagacgggaggatcatttgaggctgggagtttgggaccagcctgggcaacatagtaagatgcatttctttccttttttttgagacacagtctcagtctgttgccctggctggagtgcagtggagcaatcttggtcactacaacctccgcctcccaggttaaagtgattctcctacctcaacctttccagtagctgagattacaggcacctaccacaccgagctaatttttgtattttttcagtagagatggggtttcaccatgctggccaggctggtctcaaactcctgacctcaagttatctgcccgccttggcctcccaaagtgctgggattataggcgtgagccacggcacccggctgttagaccccatttcttaaaaaaaaaaaaaaaaaaaaaaattagtgtggtggtggtgcatgcttggaatcctaactacttgcgaggctgaggtgggagaattgcttgagcccaggagtttgaggctgcagtgagctatgatcacggcctcgcactccagtctaggcagcagtgagaccctagagaattctctaaaagaattaaaaatgaaaaaaagccacaacacttcttttgcctgaggattc

SEQ ID NO: 516 - DNA, 2300 bp, Homo sapien
cctcttggggcttcctccgtgcctctgctcggtaaccatagcgatcttccagggaactgtgggcatgggttggtgacactcaaaatgcgagtgatagggaggtgaacaaggtaggccctcccactactgggctggtattctgggaacaacagacaagctaactgatgtctttaatgccacagtcagcttcaaggttcaagcgattctcctgactcagcctcacaagtagctgggactacaggcatgcaccaacatgcccagctaatttttgtatttttagtagagacggggtttcaccatgttggccaggatggtctcaatctcttgacctcgtgatctgcccactttggcctcccaaagtgctgggattacagactaatttttgtatttttagtagagatggagtttcactatgttggccaggctggtctcgaactcctgacctcaagtgatctgcccgcctcagcctcccaaagtgctggaattacaggcttgagccactgcgcctggcctggtctagtctccttttagagatgagaaaactgaggctcagggaggtaacctgttcaaggtcatgaactgtcttgaagaccatagttgcaagtgacagagctgggtctcagatgcaacctcagacctgatactgactccagagctgtgcgcctaagcactagagcacatagcctccttgccccagggaaagaacaatgggaggttgtgggtgacctctgggtctcagggccctgggatatagggactgtgccttttttttttttttttttttgagacaaagtttcgctcttgttgcccaggctggagtgcaatggcatgatctcagctcactgcaacctccgcctcccaggttcaattgattctcctgcctcagcctcccaagtagctgggattacaggcatgtgccaccacacccggctaatttttgtatttttggtggagatggggtttcgccatattgatcaggctggtctcgaactcctgacctcaggtgatccgcctgccttggcctcccaaaatgctgagattacaggtgtgagtgcccatgcctggcaggactgtgccttttgcattttcaaatgaaggaaatgagtatttcttgagtgttgaccgtgtgtccccccggcaccgtgtcatgtgctggttatgcacacacgatattctgtttcatccccggacagctctgtgaggtgagtaccaatattattcacatcttacgtaagaggacactgagtctcagagagaggcagagtcactgtccctggtgcacccagctagtaggggctggggtgggtgtgaaggggccagaagcttcccaataagtgcctgaagggcaaggctagggcatttgtagttcgaggctctaccactctgtctaggtcagacctaggaatgctgcaggtgttgcataaatgctcatcagtccaggctggaccgctcatgcccaactaagtgccaagcctggcctggctgatctcacagcctgcattctttgccctacacctgttgtgggaaaacgtaaatcctctcattcttagctaaccttgtgacccccgttctgggccagcaaagatgatcccaaatacttaggactctggcctttcgcactacgtggctactgaccccaccccctgggcttggagggctctaggacccaacaacctgcggagggtgaagagtgtgtgaggtcctgacctccagctgcctcccctcctttcctccccccattccctcttctctctcctccctccctttctctcccttctcctcccctctcttcatccttcctcttcctttggctccccacctctgcttccctcctctcctgtccttttccatcccctccctcctcagcccccaccccagagcctggagttgcagaggcagctacaggaggagcaggcctcctaccagcgcaagctgcaggcctacctggagggccagcagcggcaggcccagcttgtgtgcagcggctgcagggcaaggtcagggccacccactcctgctcctgccctcccacatgttcattttgccctgcccccacccatgggggtcaccatcagctccccatccccacattctccagtacaagaagaggtactcggagctggagcagcagctgctggagagatccggagagctggagcagcagcggctaagggtgggtgccagggtggggcaggggcaggcctgcccctgccctccacctgccctgcctgatgctttaacctctctcccacccaggacacagagcacagccaagacctgcagagtgccctcatccggct

SEQ ID NO: 517 - DNA, 2300 bp, Homo sapien
ctaggcatgcagggctggacatgctggtccaggggtatttgtggcttcccccctgctctggtgggcaggtgtgcaacctgtagaggggatttttggaggctgcctagaggtagaagagtgggcgtccctggggtttgtagtggcagctctatgctgctggctggattagttttcttttttttttttttttttgagacagagtctctctctgtcacccaggctggagtgcagtggtgcgatctcagctcaccaaaacctctacctcccagtttcaagtggttcttgtgcctcagcttcccgagtagttgggactacaggcacccaccaccatgcccagctaatttctgtatttttagtagagacggggtttcaccacattggccaggctggtctagaattcctgacctcaagcgatccacctgccttggcctcccagtgttgggattacaggcatgagccaccgcacctggccagtggctggtttggttttgcccaaatctggcttgcttgccattgcaacttggcaacatttatctttttggccctgtttcttggttttccatttgcagggcaggttccttagttgggcatgagcggtccagcctggactgatgagcatttatacagcaccgtggcattctgggtctgacctggatacagaagtagagcctcaaagcacaaatgcctcggccttgcccttcagtcactcattgggaggctgctggtctaagtggaatgagctttgggctcaccacttccctgaagcatgtcgccttgaataggtgagagcccaatctctctgagcctcagttttctcatctggaaatgggttgaagtaaggatttaatgagataatgtgaatatgccccctttggggcacagcatggagcagcgggcacccagaggtcaagggctgaggcatagcagtgtagcaggacgagccgcaggcaaaactcctcagtcaccaggttaaagaaggaaggagctttattcggccgggaacttcaggagacttgtgtcttaaaagccgagctcctcgagtgagcaattcctgtcctttttcagggcttacaactctaagggcaggaggccagacacgtgatgctaatgacaataggaacagcagccaccattggctaatagctcaccacctgccaggtgtggtaggtactatcagtcgcatttttttgttgtttttggtaggacagagtctcgctatgttgcccaggctggtctcaaactcctgggctcaagcgattctcccattttggcctcccaaagtgctggggttacagacctgaaccaccacacccagtctagtatcattttattttattttattttatttttttgagacagagtcttgctctgtaacccaggctggagtactgtggcacaatcttggctcactgcaacctcctcctcctgggttcaagtgattcccctgcctcagcctcctgagtagctgggattatatgcacatgccaccacgccccagctaatttatttatttatttatttatttatttatttatttatttatttattttttgagacagagtcttactctgttgccaggctggagtgcagtggtgtgatctccgctcattgcagtgtggcctcttggggcttcctccgtgcctctgctcggtaaccatagcgatcttccagggaactgtgggcatgggttggtgacactcaaaatgcgagtgatagggaggtgaacaaggtaggccctcccactactgggctggtattctgggaacaacagacaagctaactgatgtctttaatgccacagtcagcttcaaggttcaagcgattctcctgactcagcctcacaagtagctgggactacaggcatgcaccaacatgcccagctaatttttgtatttttagtagagacggggtttcaccatgttggccaggatggtctcaatctcttgacctcgtgatctgcccactttggcctcccaaagtgctgggattacagactaatttttgtatttttagtagagatggagtttcactatgttggccaggctggtctcgaactcctgacctcaagtgatctgcccgcctcagcctcccaaagtgctggaattacaggcttgagccactgcgcctggcctggtctagtctccttttagagatgagaaaactgaggctcagggaggtaacctgttcaaggtcatgaactgtcttgaagaccatagttgcaagtgacagagctgggtctcagatgcaacctcagacctgatactgactccagagctgtgcgcctaagcactagagcacat

SEQ ID NO: 518 - DNA, 2300 bp, Homo sapien
tgaggcctttatctgcagccagaaagccggaaagcagggtttacccctggccccacagcgccatactgtctggggaaaagaaggaaacccaagagtacacaaacagtggcccaaagagaaaccttccaagtgctctatgcctcaccgtttagcagaaaatatcaagcaactctcaatctagctggtctgtaccttccacgaatgaaataatgtatttattgcagtctttctggttgagatatttcaaatatttggtggagcttttaatgagagagacactctcgagtgtggaagaaaaaaaagaggggatgtgaagataaggcgactttaggacagaaaaaaaaaaagagacaaggaagccatgtaaacgtttttggatgggcgtgaggcgttgtcagtcttgaaccccgttatgtcaggtaaagagcgcagcctcttctaccacaaacaccatttcccacatggaggaaatcacagggatcagcaactctagagtgagatgaagaagcttcactctgggagaacccccttcgtgaccacggtctctcccctgccaggtaaagtggaaatgagcacatggcttgcagggacagcacagcctcctcgccctggccggtcgctcagggtcaccaccctccccactgccgcccctcgccattcttccaaaccactctccaccaaagattccaccgacagtcaccccacaagacaacccaggccgcctctcagcagcggctcccgccccgcagccaccgcgccctctcacccccgcgcggttctgcccgccgcctctgccgagtctgcgcacttcacctccctggctcccgctctcccctgagcttacagtggactcggggttcttccgaacccctcttgggagtactgaatggaaaagggggagcgtgcgcaagtgcttggtagagtgtagacgtcgtgggatttgactgtggtacaatcgcttcgacgtcctagtgctgatttttccacctgccttctgcttagggcaccggcagcagttttccgtctgtgcctactccacctgctgtccttgttgggtcagcgaacatcgcctccctctaccgctcaatcagcaaacgggaccgccctcgaggacctcacccgccgcttacccccctaacaaattcgcgggcatcgcctccggtcgcctcttcccaaggcctaacgagcgccttcgctggcaacggaggtgaggaggctccgctgactggctggtgcccgtgtccggggctgccacaaacgccacgacttggcttggcctctctcttagttattcgcagctcagcccgatgggcgtctccggggtggcgacgggaaagaaggtgggcttattgggtgcagctccacgggggctggcatctctgccgggctgtgtacacctgagcgagaagctcagtcgctctctaaagctgctcccgcggatgacggacacggagacaaataggaacggtgtgtcgtgagaggtggtccacaagcacttgccctccttcgcccggctttaaccccgctgcggagactgttctgcttctggcccttggagcaggccggctgacagcgtagtgaaggaagattcctgcgggagggcggccagtgtaaaacaattccctgaccgggaatcgaacccgggccgcggcggtgaaagcgccgaatcctagccactagaccaccagggacacacaggagggagctttctctcccttcttctgtcagaagcgacagcttccctgagctctgggaggacttgggccttgtgagggtcgctctttgctcctggagtctctcacaaggccattccctccctgctttcttcaaaaaaagagcctgcaagcgacacaccgagggctccgcgagggacaccgaggccacgagtccgaaggcctggagcgagttgcagcgacccggccgcagctcaccactggactagagatgcgcctttgcgaggtggcagcaagtgaccagtcggtcgtgcgtcgccaggtccggagccgcgcaccaggttgccaggaggaggcgggagcgcggaggcgcccggggtgagacgggggcaccctctgcatcataaaggacccagacgccagcaccctcaacgtcataaggaatcagacggatgcggaaaccgagacgggctggatgggaaactctttccaggaaggctccggggccctcagctggtctccgaccttcccctgcaacctgtgacacctgccattttcccatcttaggcgatggcaacgccacccttccgtttgctccgggcaaaacttcgagagttccctctgact

SEQ ID NO: 519 - DNA, 2300 bp, Homo sapien
gtttctgctttggcttcttcctcattttctcttgctgctgccttgtaagaagtgccttttgcctcccgccatgattctgaggcctccccagtcatatggaaatgtaagtccaattaaacctctttttcgtcctggactatgttatgtatttgtcagcggcgtgaaaacggactaatacactctcatttctgagtggaacacatgctgtcactcacatatgctggttgctgacttgtgacggaagattctctattgtaccctctggggacaatacatctccagttgcctgcggggaggatgaacatgcaaaaaatccacaacactcagcacagagtctggatttagtcccattagtctgaatgggactaatgcccttataaaagggacctcggggagctctctcgccctctttctgccccctgaggatacaatgaggaggtggcagtctacaaccagaacaaaaggccctcaccataaacctaccatgtcggcaccttgatctcggacttccaacctccggaactgtgagaaatcaatttctgttgtgaatcagccacccagtttatgtatggtacggtgttagagaagcccgaactaagacacagatggaatcccatggagagtctctaatttgctaagctggtcatcaggcgggatgttgccagttagaaacaggaaaagctgacattttgtgtatatgaaagaagatagtggacaggcccattgtgtcggctttgtccgccttggcaaactggagacggaaactcgattcaccatcgccagccacgggaggactgggaggacctccagaggaggttaggtcgacttcatggtaactttagatcctgaaacctcccaggatttttcttgtcttccctttgatctctcttccgcctacccaacaggacaggactcgacgcctttctttcctggcagcaagaggtccgttgcggacaagaccaaagtgagcagctggtttcccctaagtgtccttccgggcctgggcatctctggagctcaggctgacccgagacctaactcccggccagtgggaccagcaggagcctggaaaagcgcgcccaccggggtggaggttggtcgccgggggtcgagaaccgcagtcaaaccctcttcttccccgggcaccgcgcacctgcccccggggatgccgaaggaagtggcccataaagtttctctgcaaccgaaagaggcctgaagctccaggagggccgagaggagcctcgttgagcgaacccagccgtctgcctggctggccctggtcaacaggctcggaagaggccgatttggaggacagaacggaagaaaagacctaaaggtttcgaatctcatgatgtagagatgttaaaagcctccaatcctaaggtctgactgtgcgggggagcgagggggtctcaagctggatcgacccctgagccttcatctggagagtcctctgcacaagctcagacagcaggacaacgcgcatcagtggttctcaagagggggcaactttgcccttacacgcctctcacctccacgctgggacactaggtcacgaatgggggaagcggggagggagaatgctaaccccctggcatgtatctagtcagcggaggcgacggctgctgctaaacaccttacaatccacgggagggcccctcccctaccccgaagtagccattccgcagaggtggagagactcgcgtgtagctcaatgcccacgcacttagccgatgggaaattacgaattgatgaccagttggctcttggatctgaggaaaaaactccagagtcagagggaactctcgaagttttgcccggagcaaacggaagggtggcgttgccatcgcctaagatgggaaaatggcaggtgtcacaggttgcaggggaaggtcggagaccagctgagggccccggagccttcctggaaagagtttcccatccagcccgtctcggtttccgcatccgtctgattccttatgacgttgagggtgctggcgtctgggtcctttatgatgcagagggtgcccccgtctcaccccgggcgcctccgcgctcccgcctcctcctggcaacctggtgcgcggctccggacctggcgacgcacgaccgactggtcacttgctgccacctcgcaaaggcgcatctctagtccagtggtgagctgcggccgggtcgctgcaactcgctccaggccttcggactcgtggcctcggtgtccctcgcggagccctcggtgtgtcgcttgcaggctctttttttgaagaaagcagggagggaatggccttgtgagagactcc

SEQ ID NO: 520 - DNA, 2300 bp, Homo sapien
cacagtccctttgaacaccccatggaagtcagcacccctttgaggaacgaggtggcccaaggcctggcttcacatgcaggccattgggtcccagtgggtcctctctgtgcctggtatagccaacggcttcatgcatcttacccggtttcctctcctccaccacccaagctcctcctcgacccccttgctcagctgttctcaggacagcaagatccccagcccttggaaaagccccatctccagtgcttggggagggagttgggttcaggtcgtctaaccacagaaggacagagaacctgaggcaggaggaaatcctttcccttgctgggtctcttggcacaacccatccaggggtctgggtcagggtccaggtatactctaccctcctataggacctggatttttaggcccccgaggttggtcaatgtggagtctttcccactgttcacctgggaactgaaggaatatcccatggggccctctcttactcattagagacacccagaaaatactccatccagcagaaactgggcgcagtgtaccagaccactataattataactgcagggtgtggaggtcagacacgttttgtggctattttctctctgtctgtgacttgcttgccttttcactttcttagtggtatcttttgatgagaaggtgtggctaatgttgatgaagtctcatttatcatgtctttcttatatatgtattttttgtgtcctgcttgttggtagggtgatctttgcctaccaacaagtcacaaactatccttgaaatgctttatatctttaacttttaagttttggtgtgtaatgcggctgaaattacttttgtgtgtagtgtgagggagaataacattgttggtctccccacatccatataaaagtccattaattgaaatgatttattttcttttattgaactgcttttattgaaaacccatttattgaccgtatagctgtggatcagtttcaagtctcttaactcagtctgtttatctatttgtcactcctgatgccttgtctgtaatagcttatagtaagccttaaagtcagatagtacaagtccttgttcttttttacacattgcaataatttttgaaataggtaataactcataaaaccatcacacacatcaggatatgctgtcacttcatccctttctgacatggtttggccgtgccctcacccaaatctcaacttgaattgtatctcccagaattcccatgtgttgtgggagggacctaggaggaggtaattgaatcatgggggtgggtctttcctgtgctattctcctgacagtgaataagtctcactatctgctgggtttatcaggggtttctgctttggcttcttcctcattttctcttgctgctgccttgtaagaagtgccttttgcctcccgccatgattctgaggcctccccagtcatatggaaatgtaagtccaattaaacctctttttcgtcctggactatgttatgtatttgtcagcggcgtgaaaacggactaatacactctcatttctgagtggaacacatgctgtcactcacatatgctggttgctgacttgtgacggaagattctctattgtaccctctggggacaatacatctccagttgcctgcggggaggatgaacatgcaaaaaatccacaacactcagcacagagtctggatttagtcccattagtctgaatgggactaatgcccttataaaagggacctcggggagctctctcgccctctttctgccccctgaggatacaatgaggaggtggcagtctacaaccagaacaaaaggccctcaccataaacctaccatgtcggcaccttgatctcggacttccaacctccggaactgtgagaaatcaatttctgttgtgaatcagccacccagtttatgtatggtacggtgttagagaagcccgaactaagacacagatggaatcccatggagagtctctaatttgctaagctggtcatcaggcgggatgttgccagttagaaacaggaaaagctgacattttgtgtatatgaaagaagatagtggacaggcccattgtgtcggctttgtccgccttggcaaactggagacggaaactcgattcaccatcgccagccacgggaggactgggaggacctccagaggaggttaggtcgacttcatggtaactttagatcctgaaacctcccaggatttttcttgtcttccctttgatctctcttccgcctacccaacaggacaggactcgacgcctttctttcctggcagcaagaggtccgttgcggacaagacc

SEQ ID NO: 521 - DNA, 2300 bp, Homo sapien
tgtttacagaagggaaagatgaatggaacatcatcgaggatcttgcaggagccctctctgatacagaggaagcctgtaaaccattttctattctttctcttggccacagtcattcctttcaacatgtgctgaccttctgcttggaggtctccttgaggacattgtctcagaaatctctgttgcaatatttgaacggatcactcaaccctttccactcttaaattttctctaccgtctcaccttaggcaatataaagtcctggttcactctcaggaacgagagctgacccagttaagggagaagttacgggaagggagagatgcctcccgctcattgaatcagcatctccaggccctcctcactccggataagccagacaagtcccaggggcaggacctccaagaacagctggctgaggggtgtagactggcacagcaacttttccagaagctcagcccaggtaaggtggccataggccctgatgacccaaaaccccaggcttatgagaggctccagacctccatactttcacaatgacagttgtatcagtggggtttttttctgctatacatatgtggccatgacatgaccaggacttcctgggtaagaacagagatgggaaacccatggggttggaggtcacagtattgcaagtgtccctccttccttgatggaaggtggtctttggagcaagaggcagcatctgtctagttttaaaggacaggaaggaggctgtgatgggagggcgcttgttggagtgaaaagagctctgggctaagaatgaaggttcccaggctgtctttttgacaatgttcttagtaactgtcggtgagtgagtgatttatctttccagagtttctctctctccatctgcaaaggcaaacaaattgtctcttgcaagggtctgaagcatccaaatatgggaacacttacgaatgctttttaaaatgagatgaagcccctctccgtttggtgttggagaaggcacttggtgtaggggcatttggtggtaggaagtgcttcagactggagcactccccgtggatagaatgtccctgaataacacagcagaagccacatggagggcctgtgcagtctcatgatgcatagaggactgtgggacaagtttgtcctctcctaagagaaagaatgaggtttgaaatgcgaactgtgacaggacaccaagcctgttcctgggaatcagatatgtggcaggatgggggcgacagctgccaaagtccagagagaggctgcacaagcctccagtgatatgggaagcaaaaggtcttttcaatatttgaccacatcttgatggtggccctccagatcagaaatgcattgcccgatggaccaggaaaccatgccagggcattttgtgaaagataaaatatgacagttttcagtacagtgctgaaccatacatagatgttcatgtctctgtgcacattgggctgactgtgcttgcagaatgtgaagtgggaaatatctgaacgaacattttgtatttacagaaaatgacgaagatgaggatgaagatgttcaagttgaggaggctgagaaagtactggaatcatctgcccccaggtaacactgaatactcgggagcaagtaatgggtggtaacatatgaaaatgtgtaggaggcacaccctctctggcatctatgatgggccaaaagcccgcattcgcttggccacagtatgtgaaattcaacccagcttagacacagggtgcggcagctgtcgtgtttctctatgtgtgccaagtgtcatgtctgtaccatacagggatagctgagtcttcatcctcctcagctcctatctgtccagtgcactgaacaccagctgctctcttcctctctggctcccatggcagccatgctctgttgcagagagaagaggattgcctgttcccccttaaagggaacctccattttgctttctgggaccactgtcttaatgccgcctgtcaaaaccagctaggactccctggggtccaatccctctgtgtttaatcttctgtcatctctgtcccacctggctcatcagggaggtgcagaaggctgaagaaagcaaagtccctgaggactcactggaggaatgtgccatcacttgttcaaatagccacagcccttgtgactccaaccagcctcacaagaacatcaacatcacctttgaggaagacaaagtcaactcaactctggttgtagacagagaatcctctcatgatgaatgtcaggatgctgtaaacattctcccaggtagcctctattttccttgtgtctcatacctctgtctaggc

SEQ ID NO: 522 - DNA, 2300 bp, Homo sapien
tcttttctcagagtatgaagagtgtaaagacctcataaaatttatgctgaggaatgagcgacagttcaaggaggagaagcttgcagagcagctcaagcaagctgaggagctcaggtgaggggaccccatgggggcaggcaggggagcagctgtgtaaatctctgaagtacagcagctcggtggggagacgtaagagctaagctgggccaggggaagggcaggaattgccatggcaggctcgcaacacacaagtatttatcaagcagagaagaaggataataaaaatttatgggttgcagttgtttcttagagccttgttttctctttttcaaacaagtaattgttgatgtgaaatttacataacacaaaattaaccaaaggagtgtgaaccacacagcagcattcagtatactcaaaatggtgtgccatcgccaccccacttacccttagtgagaatcaccttctgactgactgcgtcttctcattctttcactcaatcaatgttgccttctcgaccctgtcattcttttcttctttcgtcttttcaattcgccccatctgcacctggcctcatttctgtacatggctttgtatctagtggccgcaagatgcactatgtgtattttcacatggaaatgtccatggccagagtgaggaactgaaaggatgtctttttgaaacggaattaggaagacacctacttttgtttacagaagggaaagatgaatggaacatcatcgaggatcttgcaggagccctctctgatacagaggaagcctgtaaaccattttctattctttctcttggccacagtcattcctttcaacatgtgctgaccttctgcttggaggtctccttgaggacattgtctcagaaatctctgttgcaatatttgaacggatcactcaaccctttccactcttaaattttctctaccgtctcaccttaggcaatataaagtcctggttcactctcaggaacgagagctgacccagttaagggagaagttacgggaagggagagatgcctcccgctcattgaatcagcatctccaggccctcctcactccggataagccagacaagtcccaggggcaggacctccaagaacagctggctgaggggtgtagactggcacagcaacttttccagaagctcagcccaggtaaggtggccataggccctgatgacccaaaaccccaggcttatgagaggctccagacctccatactttcacaatgacagttgtatcagtggggtttttttctgctatacatatgtggccatgacatgaccaggacttcctgggtaagaacagagatgggaaacccatggggttggaggtcacagtattgcaagtgtccctccttccttgatggaaggtggtctttggagcaagaggcagcatctgtctagttttaaaggacaggaaggaggctgtgatgggagggcgcttgttggagtgaaaagagctctgggctaagaatgaaggttcccaggctgtctttttgacaatgttcttagtaactgtcggtgagtgagtgatttatctttccagagtttctctctctccatctgcaaaggcaaacaaattgtctcttgcaagggtctgaagcatccaaatatgggaacacttacgaatgctttttaaaatgagatgaagcccctctccgtttggtgttggagaaggcacttggtgtaggggcatttggtggtaggaagtgcttcagactggagcactccccgtggatagaatgtccctgaataacacagcagaagccacatggagggcctgtgcagtctcatgatgcatagaggactgtgggacaagtttgtcctctcctaagagaaagaatgaggtttgaaatgcgaactgtgacaggacaccaagcctgttcctgggaatcagatatgtggcaggatgggggcgacagctgccaaagtccagagagaggctgcacaagcctccagtgatatgggaagcaaaaggtcttttcaatatttgaccacatcttgatggtggccctccagatcagaaatgcattgcccgatggaccaggaaaccatgccagggcattttgtgaaagataaaatatgacagttttcagtacagtgctgaaccatacatagatgttcatgtctctgtgcacattgggctgactgtgcttgcagaatgtgaagtgggaaatatctgaacgaacattttgtatttacagaaaatgacgaagatgaggatgaagatgttcaagttgaggaggctgagaaagtactggaatcatctgcccccaggtaacactgaat

SEQ ID NO: 523 - DNA, 2300 bp, Homo sapien
aacaggaatcagaaacatattaagtccagggcataaaacctaaaccactgctcatatttattctttctaaatagagcaaagtgtaaaatcttctccataaaatgcacattgtgcttatgaaaaggccagtcttagtgagaatcattggtattccatagaagagtgaattaaacacagccaagggaagacccaagtctcatacttctcttgtatattccagagttccaggggaattccaggtgatagaggtgatctcccatactgttaaagcaaggttgcagacacttgggaattttggtcccagtactctaggaggtcacacctctgtcctggaaaatactacaggaatgtatactcttcctatgactcattctggtcattcttccagcatcacaaaaaccaaaaaaaaaaaaaggaaatatgtccaaatacatgatttgctatccctcctcttcaggtttcttacctgttacttacggataacagcattaccacaggattatgatgaagatacaatgtccaaatataaacacagttttgagcaaaatgccttgtacgaattggtcaatgaacaactagtaaataattatgtgaatatttactgaattatatggatcctatgaataattactgaataattcatgtgattgcttttattggcagtgctgaaaactcatccccgtgtgacctcaagtaagccatgtaactctgtgaacctgcagttttatcatttttaaaataaagaaacatgacagattttcattatgacacagaatgtcaggtctcccagatgccagaaaatacatttacttaaagccgttgatacgtcttaaagcggtttccttacagtgtcattggaggacagtgtggagtgcagagagacatgctttgaaatgggattgatccagtcctccttccttcactaccacatgaatgctgggcagcccagggtcaacccaccgcaccctcaactcaggcaagtccagcagccaatcttaggagacctgggctacagaacagtctcccaagttccaggctcacaaaacctaggtggggtgaaagctgagaaagcgaggaggtggttcaggggatcactctttcctactcattcctctcatctcaaactcaccttctactgcaacactgaggatcaccaaccaaccgtgaccataaccttgatcttgccatgttctgttagtggaatgcaacccaaaatcaatggtgttaggtcatctcaacaaaatatatatcaaaccatattgcataagaaccgctcatggccctgttcttttcagtatatgggaaaacaaaatggaaacaacaaaatagcatcaggtttatgaaacttcccaagatagatggtcacacatgttttcaggagatctctatataaatgattttgatcacttgataccttgaaaagagctcttgtgacactagaatgacatccataagtgacaagtataaaatgtagcgctcagtgacatcaaaaaccaaatcaacccacatagaggaagagctctggacatagggatgtcaaactggtctagagtgtaatgaaaagcaaagatggtgccccagtgagaaaaaagaaatcaacataacaatgggaaacagcaagaagaatactgagacaggaaagacaacattttttacaaatgaattattcattcactttctagtggatacagacaaaactgcagaagacccagaggaaatcagggcaggctaaaagtttgatatcttacacctgtggaaaggccttaagctctgttttaactgagagcaggtggggtgacttcatgactaccattaagaaaatacaacctgttgggaaactgtttctgccttgatgatgttgtacagacaagagataaacagtgaggaatatgcttagatgtattgggaaagacacgggtctgtggcatcatcacaagggtacacgaatactgagagtgaatgctgaaggaatgatccccattggtggtgaccctcaggtgagactagggtgcctgtgtttcaggaaagcctgggcaattggaatgcagggctcctaagattccatgacacccccaccttctaattctgttattgcaactgcagacggttacctggcacgctggccacagtctacctcactcttatcagagtctgagctactggcagtgctttcagctctgagttcaggcacctcgaaccttgtttttgtggtgaaggatcctaaagtgctgtggggagtgatcacatttttcacaacagtaagttaagaatttcagttactgacatccctcagtcctgat

SEQ ID NO: 524 - DNA, 2300 bp, Homo sapien
gtgcttggattacaggtatgagccactgtgcctggctcagtcttcctctcttaaagcaaccaatgttattagttttatgtgggccaccccatggcttatcattattaattcaggtgtttatacaaggctctttgagaactcagttttaaaggttacccaaagcatcctaagacaactcagcctaaaacgatataaaatcagttttaatataactgaagtttctacattctgactccaactgtcagattgtgacattttctctttctctgactttatgccaaatttacttcaacttctagcatccatcattctcatttatgaacaaatatgtatttaacaaatgtggaaatacaaatcatgaagcaaacaaaaccaaaccctgggcttacgtagccgatagtaaaaaattcaccaaaataaccacccgattacagtttcatgcaatgtgataggagtaagggaccaccatagggaggtcagaaggtgcttttcagaggtggagactacagctgttctcagaagaataggggttagaagaactttccaggcacagagcaaagcatgagcaaaagctctgtggaggccaggaagctggtaaatagggaataaaagaggccagtttggctggagcagagagagcagaacagaattggtctgagtagtgagaagagatgaagaagtgggcaaggcgcctggccattcggggcttggttagttaggaggttttgtctaagagaatgggaaggtgtttaagtgctttaggctgggaagtgacacggtcacattatattttggaaaagccactctgcctgttgtgttgagattagagaggcgataaaggggatatgggtaaaccacaagaagactaggtcagtagtccctcgaccctcactccccaggtgaaggcagcctagactagggtggtgacggaggagatagaagaggacagattcaaggaaaatttggaaggtaaaaaccagtaggatttgctgacggatggagtataggaggggagaggtagattatcagggatgtatcttagttttcttatacaagatagattcagttgcaatgaaattgttaactgaaattgactttaaataatggcatgacctaaagttatgcaaacatttgccttagataaaatatcaagttttcaaagtttttagctgggtggacggcatggctttacttcctatttcttggtattctaatcctgttgaaaaaaaaagtttttctttttctcaaaggcttatttcagtggaagcccatctgcaaaatctgttaataaatttaaattagaaaataactacaagtgccattgacacattggttattctttttgagagtgacctaaggccacctctgggagagctgggggctcttctgaagcctgcccgactgcaccgcgtgcccgtgcctggaagtcagattcggggcggtgcggcagcgcgaggcctgcagtcctaagcgcggggtcgctccagccccagagggggtgtgtctcctgcctcttcaacctggcaggggctgttcaagtggccggggaaaccagcgatttggagggtcgagggctggtgctttgaaagacaggcggaggggagagagggatttccccgtccccgctgcactcggtccttcccctgggttactcctttcctccgcctgcgcggcccctaacctgctcgaacccgttgtgcagaagaggccgccgggtccctttaaggccccgccgcgcctgcgccttgggttatcctgacacgcccatcgggatcctgaggagccagtgggctgcaggcgcaggcgcaggcgaggggctgggtggcggttgagacagcggcggtactgggaggcgtaggtgagggtcgcgaggctgcccgagcttctgagcgagcgcggtgcttttgggaacgcgggacgggcgatctgcggcgccaggagctgggccgaggcgcggcggcgcggctgccggctgccctgtgaatgggaagttacgcgaagtccacccagcgtttctgaggtgagggcgccgcgccaggctgggcgggcggtgaatccgggacccgcgggcgcacagctgggtcgaggcgcggccgtggcaagttttgttgcgcgagcgcgggggcgggtgggggctgtggggggtcgtgcaccgccggggcctgagttccccgcgctggattcttcgcctgccgctgccgcccgcagcccaactctcgtgggcgctggggaagaaactcgctggcgggtgttctgtggcatcccagggggtggagggacggagcagcttcgggggcacg

SEQ ID NO: 525 - DNA, 2300 bp, Homo sapien
tagccaccagtcaccagtcttcatttctctctctctctctctctctctttgagacaagatcttgctctgtcatccaggctggaatgcagtggcatgatcatggctcactgcagcctcaacctcctgagctcaagcaatcctcccacctcagcctcccaaatagctgggagtacaggtgcccgccaccacgcctggctaattttgcttgtattttatgtagagacagggtctcaccaagttgcccaggttagtctcaaactcctgagctcaaatgatctgcgggccttggcctcccaaagtgcttggattacaggtatgagccactgtgcctggctcagtcttcctctcttaaagcaaccaatgttattagttttatgtgggccaccccatggcttatcattattaattcaggtgtttatacaaggctctttgagaactcagttttaaaggttacccaaagcatcctaagacaactcagcctaaaacgatataaaatcagttttaatataactgaagtttctacattctgactccaactgtcagattgtgacattttctctttctctgactttatgccaaatttacttcaacttctagcatccatcattctcatttatgaacaaatatgtatttaacaaatgtggaaatacaaatcatgaagcaaacaaaaccaaaccctgggcttacgtagccgatagtaaaaaattcaccaaaataaccacccgattacagtttcatgcaatgtgataggagtaagggaccaccatagggaggtcagaaggtgcttttcagaggtggagactacagctgttctcagaagaataggggttagaagaactttccaggcacagagcaaagcatgagcaaaagctctgtggaggccaggaagctggtaaatagggaataaaagaggccagtttggctggagcagagagagcagaacagaattggtctgagtagtgagaagagatgaagaagtgggcaaggcgcctggccattcggggcttggttagttaggaggttttgtctaagagaatgggaaggtgtttaagtgctttaggctgggaagtgacacggtcacattatattttggaaaagccactctgcctgttgtgttgagattagagaggcgataaaggggatatgggtaaaccacaagaagactaggtcagtagtccctcgaccctcactccccaggtgaaggcagcctagactagggtggtgacggaggagatagaagaggacagattcaaggaaaatttggaaggtaaaaaccagtaggatttgctgacggatggagtataggaggggagaggtagattatcagggatgtatcttagttttcttatacaagatagattcagttgcaatgaaattgttaactgaaattgactttaaataatggcatgacctaaagttatgcaaacatttgccttagataaaatatcaagttttcaaagtttttagctgggtggacggcatggctttacttcctatttcttggtattctaatcctgttgaaaaaaaaagtttttctttttctcaaaggcttatttcagtggaagcccatctgcaaaatctgttaataaatttaaattagaaaataactacaagtgccattgacacattggttattctttttgagagtgacctaaggccacctctgggagagctgggggctcttctgaagcctgcccgactgcaccgcgtgcccgtgcctggaagtcagattcggggcggtgcggcagcgcgaggcctgcagtcctaagcgcggggtcgctccagccccagagggggtgtgtctcctgcctcttcaacctggcaggggctgttcaagtggccggggaaaccagcgatttggagggtcgagggctggtgctttgaaagacaggcggaggggagagagggatttccccgtccccgctgcactcggtccttcccctgggttactcctttcctccgcctgcgcggcccctaacctgctcgaacccgttgtgcagaagaggccgccgggtccctttaaggccccgccgcgcctgcgccttgggttatcctgacacgcccatcgggatcctgaggagccagtgggctgcaggcgcaggcgcaggcgaggggctgggtggcggttgagacagcggcggtactgggaggcgtaggtgagggtcgcgaggctgcccgagcttctgagcgagcgcggtgcttttgggaacgcgggacgggcgatctgcggcgccaggagctgggccgaggcgcggcggcgcggctgccggctgccctgtgaatgggaagttacgcgaagt

SEQ ID NO: 526 - DNA, 2300 bp, Homo sapien
agcagagaataatatctctgtttcagctattccaggatgttatgccaattatccagagtccttgatctgatgtagtaaagagctagggacattttccctgaaggctttgattgctggcaaaatctcattaaacgtgtatacattcataggttggccataggatggataaaagaagagcctctggcctacatctgccacgatacatgtgcaaaaatgctctctgcagcattatttttcattgtaaaatagcagaacaaatttattattcaataattataaaatggtcaaatgtatgtgactatatttggacaatgaaaaatgcagctgttaaaagcagacaatactgatgattcagatgatgttactgatgaaaataataacagatgacaattattgagcatttatggcattcttacaggcattaccttatttaaagttcagaactaccaaggaaaagagtaacttgtggcaggcgtgagaggttccgaggcacaaaaggaagataggcattcaaggaacaccaggatagaagacccagagtaggagaagagagaggaagaggagtccgccagatgggatgctggaaaccgcgggatagctcggtggagagagggcgctcctgctccgcaagcctccctacgacggcaggcctacccggtcctgctcctgccggctctgggcatctggtttctgccgctccatctccagggagatggtggccaggctgtgccgtgtacccatcaacttctctgacagcgccatcttctcagactccttcagagacaaggcctgggcagaggcaggggacaaagggcttgggggatgggctggtcctgggggcatgctcaggcttcttgctgcctaggaaatgtgcccactgggggcttagaggcctgagtgtgccactgcaggtggacccagggcagacatgcagccctggaaaagggcacaacggcagtcacaagaatcccggacgtggataccactcatagagctcactaacccgccacagcaccctgactgcagagtctttctttctacccatcttacagatgaggaaactgaggctcaaggaggtaaagtgactcgcccaggtacacagctggtgaggagaggagatgggcacagtctgccctgtctccgttacattataggaaagttagggatttgttatttggggggacacgtcagctgatgcctgtgggcatcgtggggactgctcagaaggcagccatgaggatccatgcccagcgtggggtgggacgaggcatgggagaatatggaacagctttcctggtgtcacgactgtcactgtcactcagtaagtgctcactgtgtgccaggcatggagcacagcaaagcctcacgaacccccttctaatcctcccctcctgcaggtaaggaaactgaggcccccaagagggcagtggcctgccccagggctcctagctgccaagtggcagagcagggcccggccccagaactggagcagctcagagagcagcagaggccacgccagggctcacgaacctgctgcttctcgctctcggccaggaggaggccctcgtcatgctcctgctgcagggcagcaatctcctcactcagctgttccttctcagccttccgccgggccagcagctcctcctgctcacgctgcagctgactctgcagctgggcccgctcggcctccagctcccgccatgctgcctcctagggggccaggactggacgcgtgtgacacaccaggaggggcccaggcagaccccccaaaacatcagggcagcaagagccatctggcccccataccctcagagatggagggtgaccaggtaaatacaagggactgataagggctatgacggggacacgccagggccgtgaaagtgccaaggagcagcagtgggctggcctgggggtccgaacatgatcccctgcggagagacaagtaactgtcagccaggtaaggagagaaaagaccaccccaggccaagagcacagcccctggaaaggactacaggatgcagggtgcagagggaaacagggcacggtgagtcacagggccagagccccaggcagtggctgggccaggacaggccgtgtgggccatggggattctaaggacagtgaggggagtgggagagaggactcgagccaaggtgacaaggagcaatctgatttttagcttaggggatgttccgacagctgtggaagagggattggggttgggatggaggagagttaggactggctgtgaggaatgaagggggtcaggggttgccagaggagctggagagaagaac

SEQ ID NO: 527 - DNA, 2300 bp, Homo sapien
agcagggccttcctctgtgagctcagccagccttcccaggcaccccactgaggttccgaaggcagttgcccagtgtttatcataaacagcttagcctcctatgacagaacttgtggccgggtgctgtggctcacacctgtaatcccagcactttgggaggccaaggtgggagattacctgaggtcaggagctcaagaccagcctgcccaataggcgaaaccctgtctctactaaaaatacaaaacttagtcgggtgtggtggtgtgtgcctctaatcccagctacgagggaggctgagacaggagaatcgcttgaacccaggatgtggaggttgcagtgagccaagatcacatcactgtattccggcctggacgacacagcgaaactctgtctcaaaagaaaaccacaaaaaaacaacttgtgccccttactcctgccacctgggtaagtcctccagtgctttcccatgagataaagctggtgggaacctcattcccatttcacagatgagaagtgtgaggtctggagaggagccacaacttgtttaaggtcacacagccagggaggtggatgttagggtccctgcctcgggtttggagaagcatggtggacacagagctagtggatttgagaggctggggtggtcccgtattcacctctgttgctcccccaactccagagtgacagagctgggcctggcagtgaagcgtctacagaagcagaatctggagaaggatcaggtcgacaaggacctcaccgagaagcttgaggccctggtgagcttcagctgcccctgagatggggcagggtgggatggggtaccggccagatccatggacacaggcttagggctgggctgcctgggccacccccagcatcccactcacactcaggttcagcccacacaggtgtgcaggctttgtgggaagcacactcacttcctccatcccatttctccctcccagcagccctgtagagtaatcctaatgacacggatgggaaactgaggcccaagaggggaaatgcttgtccagtctcagagccagtaagcaggagagttgggacttgaactcccatccacgctctccaggtccagatgctgcctttggaatcccaactgtccacccccaccagtgggacactcactcccccagggtccagcctggtttagtcacccctctgtgtggggcctggcctgggttctaggtccagctctcctgcaatcgactgtgtgacctggggcagaacccagctcttctctgggcctggtctgttcattgagggcctcgggcctgctgtggggtctaccaggtggctggcctatggacatggcttcagaggccacctgatcagtggtgggccagggagggagggaaaggggaggtttcaggtaagacagaaccccgaccactctttgtctccctcaccgcactccaggaatccctgcggctacaggagcaggcggccctggagacagaggatggagaggggctacagcggagcctaagggacctggcacaggtgtgagcccagaaaggcgggaagacagggccctgccaggcggtcctgggctcccccgcctcgcctttcggtggcttcggattgaactgcagatgggtggggccctgggacccaggctgtagctgctcagcacccctgctagctcacccggcctctgccctggggagcccccagtctcagaggggaggcacggccctctcggagcccacctgtgagcaatgccaaatgatgtcttcgcaataaatgggatgcctcagcggcgagctgaggactgagctagtggaggaggtgaaatcagaaggcttcttgtaagcgggagcatttgggatgaggcggcccccagcctcccctggtcgtttttgccagctaaccccgaagttcctaactctgcggcctcctgcttccctcccttaccctcaggccgtcctgtctgacgctgagagcggcagcctgcgtccaacagcgtccgaccgcagcctgcgggggctctcgggccagcggaccccgtctccaccgcggcgctcctcgccgggccgaggccgttcgccccgcagaggcccctccccggcctgctcagaagactccacgctcgcttgccctgattctctccgccctgcacttttgccagctgaaggtccaggtaggaaggggcttgagttttctgggcgcagccagaggcccagggggaggggctcgcgccctccaggtgggggtgggggcgtgtctgggggaggagtctgagcgccctggggtgcagccagagccctgagaaatagtgt

SEQ ID NO: 528 - DNA, 2300 bp, Homo sapien
ttttttttttgagacagggtcttgctatgtctcaagaaatgggccaccacgcctggccttaaaatacattttaattttttaaaatacaaataatttttaatgtattttaaggccaggcgtcatggctcatgcctgtaatcccagcactttgggaggctgaggcgggtggatcacctgaggtcaggagttcaagaccaacctggccagcatggtgaatccccgtctcttctaaaaatacaaaaattagctgggtgttgtgacgtacatctgtaattccagttactcgggaggctgaggcaggagaatcgcttgaaccggagaggcggacgttgcagtgagccgaggtcaaaccagtgcactccagcctgggcaacagagcgagactccatctgaaaaagaaacaaaaagaaaaaaaaattttgtaagtagcctttcaaatttttatattttacttttgatgaagtcacctattcacatttcaaaagggtacacagtaaaatggctccctcccacctctgaccccagatattcccattccttccttggaggcaagcagcatcatcagcttctttttctttttatatatacaattattttctttctttttttttttttttggccaccaagttaccgtaagaagcattgtcagtttctttttcttttttcttttttttttttttgagatggagtctcgctgtgctgcgagtctccaggctggagtgcagtggcacgatcttggctcactgcaacctctgcctcccgggttcaagtgattctcccacctccgcctcccaagtagctgggattacaggaatgagccaccacacctggctaatttttgtatttttaatagaggcgggatttcgccatattggccaggctggtcttgaactcctgacctcaggtgaccctcccgcctcggtctcccacagtgctgggattacaggcatgagccaccgtgcctggcctatcagtttcttaagtgaccttccagggttattttatatgagcaaatgagatcacacacgcgcacacacacacacacacacacacacacacacacacacttttttgtatatacgcctggtaaaatttcatcttcacagttcttgaagatgcttttttcacctactagttataactgggaggtggctctggatcaggccaggaagaacttctccactggtttttcttggccacagttctccacttaaaggatgtaccatcatgtacttagtagcagtccccttttgatagacatttaggttgtcaccaggatatcttacatgagcaatgctgcagtgaacctccttgtccacaagccatctcctctgtgctggggtatatctgtaggatccattcttagaggaggagccggtggggaaggtcctatgcctgcatagttttcgaagatctccctcagtgccctccattgtgattgtactcaccctcccaccagctgtgtaggggaaggcctgttgccccagagcctctctttgtgtattatgtgtccctttttttttttcccaatctgatagtggacaaatggcatcccagtgtagggttgttgtttttttcttcttcctctttagtttttgagatggagtctcactatgtttcccatgctggcctcaaattcctgggctcaagcaatcctgcctcagcttcccgcatagctgggactgcaggtgcatgccaccgcacccagcccagtgtagttttatttattttttatttatttatttttttgagacgcagtctggctgtgtcgcccagactggagtgcagtggcatgatctcagcttactgcaacctcctcctcctaggttcaagcaattctcctgcctcagcctcccaagtagctgggaatacaggagtgcaccaccacacctggctaattttttgtatttttggtagagatggggtttcaccatgttggccaggctggtctcgaactcctgacctcaggtgatctgcccgcctcggcctcccaaagtgctgggattataggtgtgggccgccatacccagccccagactagttttaatttgtagttgggagtgagccccatcccatccccatcctgtgttctcttcccaagggacccgctgcagctgggaggggagctgtccaggaggccggcctgggaatgagcacaggcctgcggctggcagagagccgggtcgagccagccctggagaagcaggcccagctggaggagcagctgcgggacaaggtgctccacgagaaggacctgtcccagcagcagatgcaaagcgacctggacaaggctgacctca

SEQ ID NO: 529 - DNA, 2300 bp, Homo sapien
agcctaagcctatctgtccagagcccaggctccctttccctacaactgcagcctccttattctgctctggcccagcagagtgaggaggggccgcccacccagccatacctgccggtggctgctgggggtgcatggtcagaagaggaaagatgcggttcaggtagtcattcagcagcttctcctgcacaatgcctgagccacaagtcagaagggagaaaagggccacacgatgagtgcagctcctggcccctgctggccccagagacttctggtcctaggccagccacaggtgcagcaaggcctgaggcctttgtcccttccttctcctcccaacaagaggagcctccttccttctctgccagcccttacctgtgaccctggatttctcagcatctgaggtcagcctacagctcttgcgggagaaagacacgccggcccccttggatgccatccttcgtctctcatgggcagccagtggtcctggaggctgaggcagacacagagcctgtctactcagggccagccaggggcccccacacctgacctcagtcctgccatggcaggaagtcttgggagcaggtgaggccaggggcatgcacactaacacataggacaggggaatgcaggggctcccagcttcctacacaggcagggtagccagggtctaggcccatgtaacagggaccacttcttgttctccagtgtccctgtgcccagcacagggctgggcagagagcaggtaccagatatatttttgccaaaccataacaaaatgtctcagctctgtggaaatcagaccaaaatgtccaaagtgaggtgtcctaggggcagagcccctgtattcatctcggttgtaagccatactgagtccagctcacaaccagaagcgacaatcctacacattcccccaagtgcagaccaccactggtctggtcatctctagccataagtcccacttactccccacaaggctggagcctctttcctcagccctgggttcctcccttcttttatccatggtcctgatagtttcactgttcccactcacacatgtggcctcccacctcatccaagcaccacccttgcccagccctcatggcaaactccattggtcctcctagtgcatctatccctcacatcatgttgctgctgcagctgctccaaaacctgcactgagtccctggtgctggcctcactgatgtgtagctgtgctgtccaacacagcagccgtcatccacgtgaggttacttaaatttaaagttttaaaaattaacaattcgatttctcagttgcctcagccacatttcaagagttcaatgaccacatgtggctaacggttactctattggacagcacaaaggtagaacattcccaccatcatataaagttctattagacagcgcaggtctagagtttcgctctgcagcactgccttagccagcactccctactctgccgttcagtctcttatctcgccccaaacagaccctctactcccgccacaaacccctgtgggtctgcaccacgcctgctcctcgggaaggtgattttcccgacctcgggccctcggtgggcctccatgatcggtgccccttcactaccacagtagttgaagatctgattaaatgcagtcattcatttgatgagcagaccttccagacacccactccgggtgtcagttgctgaggacccaggtgagaggcggaccttgtccccgcccggggactccctgtcacggctatcccgtccaacctcgccggggtatccgggctcagaactgaacctactccgtctgggagcccaaggatggctcccccaagtcgcccccgcctggccccaagctccagaggacctgccagaccagcttccgctcggagtttcgcactcagatcccggcgctgcaggtgccctcgcagtggactaaactggaccgcgaagggaatagccggaacccgccaggctcagagccctgccgcccctcactcaccccgagcctcggccgccgcgacccggttcacaacatccgcccaacctctcggctacggcgtccgttcagggccaaatcacgcgcacgctcgcgcgctgagcctccagccgcgcacgcgcaccggcccgcgcccagcctccgctaggggaccccctccgtggcttcccaccgggttgttccaggcctcagcttcgccgaaaggcctcaccacctccgacctccgcctgccccggggatgctcccagccctgctgcggcagaacgcgacgtgctaaccggaatccctaggccgcctgtctcctacccatacttgg

SEQ ID NO: 530 - DNA, 2300 bp, Homo sapien
aggcaggtcagcccacgcccggcggcagagcccagagaggctcgctcatctcagccgccagaagtgtcatcccagggaaggtgagcgaagctgtccactaggactaaataggggtggaggtaacaggtagcagggactctggcaggaaccgcctttcagacgttttcaggaccgtctgagcggggcctccaagtatgggtaggagacaggcggcctagggattccggttagcacgtcgcgttctgccgcagcagggctgggagcatccccggggcaggcggaggtcggaggtggtgaggcctttcggcgaagctgaggcctggaacaacccggtgggaagccacggagggggtcccctagcggaggctgggcgcgggccggtgcgcgtgcgcggctggaggctcagcgcgcgagcgtgcgcgtgatttggccctgaacggacgccgtagccgagaggttgggcggatgttgtgaaccgggtcgcggcggccgaggctcggggtgagtgaggggcggcagggctctgagcctggcgggttccggctattcccttcgcggtccagtttagtccactgcgagggcacctgcagcgccgggatctgagtgcgaaactccgagcggaagctggtctggcaggtcctctggagcttggggccaggcgggggcgacttgggggagccatccttgggctcccagacggagtaggttcagttctgagcccggataccccggcgaggttggacgggatagccgtgacagggagtccccgggcggggacaaggtccgcctctcacctgggtcctcagcaactgacacccggagtgggtgtctggaaggtctgctcatcaaatgaatgactgcatttaatcagatcttcaactactgtggtagtgaaggggcaccgatcatggaggcccaccgagggcccgaggtcgggaaaatcaccttcccgaggagcaggcgtggtgcagacccacaggggtttgtggcgggagtagagggtctgtttggggcgagataagagactgaacggcagagtagggagtgctggctaaggcagtgctgcagagcgaaactctagacctgcgctgtctaatagaactttatatgatggtgggaatgttctacctttgtgctgtccaatagagtaaccgttagccacatgtggtcattgaactcttgaaatgtggctgaggcaactgagaaatcgaattgttaatttttaaaactttaaatttaagtaacctcacgtggatgacggctgctgtgttggacagcacagctacacatcagtgaggccagcaccagggactcagtgcaggttttggagcagctgcagcagcaacatgatgtgagggatagatgcactaggaggaccaatggagtttgccatgagggctgggcaagggtggtgcttggatgaggtgggaggccacatgtgtgagtgggaacagtgaaactatcaggaccatggataaaagaagggaggaacccagggctgaggaaagaggctccagccttgtggggagtaagtgggacttatggctagagatgaccagaccagtggtggtctgcacttgggggaatgtgtaggattgtcgcttctggttgtgagctggactcagtatggcttacaaccgagatgaatacaggggctctgcccctaggacacctcactttggacattttggtctgatttccacagagctgagacattttgttatggtttggcaaaaatatatctggtacctgctctctgcccagccctgtgctgggcacagggacactggagaacaagaagtggtccctgttacatgggcctagaccctggctaccctgcctgtgtaggaagctgggagcccctgcattcccctgtcctatgtgttagtgtgcatgcccctggcctcacctgctcccaagacttcctgccatggcaggactgaggtcaggtgtgggggcccctggctggccctgagtagacaggctctgtgtctgcctcagcctccaggaccactggctgcccatgagagacgaaggatggcatccaagggggccggcgtgtctttctcccgcaagagctgtaggctgacctcagatgctgagaaatccagggtcacaggtaagggctggcagagaaggaaggaggctcctcttgttgggaggagaaggaagggacaaaggcctcaggccttgctgcacctgtggctggcctaggaccagaagtctctggggccagcaggggccaggagctgcactcatcgtgtggcccttttctcccttctgacttgtggctcaggcat

SEQ ID NO: 531 - DNA, 2300 bp, Homo sapien
ggagcaagagacagaagatcaacttgggctgaggtcccctgtctcccaccctgcccctctccacccccactcgcctttctcctggaagaggtcacagcgcccagaatgccgcagcctcgtgtggggtgagtgttgagtccatggcagcagttggcaaccatggctgctcacattgtagtggaacgccctggagagaagaaggcacaaggtaacgccacggcccaggctcccctgcccccagtcttatctatgcccagtggccactcaccggcagtccattaagggcccacagcgaccagcacactcttcagcatctgccacatcctcctgccaaggcccgggcaccaccgcttgtagcggcgctgtagctctgtgccccggagcacctagaagtcattcaatggcgagcgctgccctgcagagtgggtgcaggtcaggtgggcatacatgtcagtaatgtgtattggcatgtccacagtttgttcattcaggggatcaaagctacaaggcttctgggatggaccctgtatgcactttcaagggccagtctagcccccctgcacagatacttgtcaaaaaatttcccctgggaagcaggcccagacttggtagttatcaccggtgcctctgtgtagtggcccaggcaccgggctcagatctaacacacacgctctgtgagagcagtgggtgatggagcttgccccatctcatctctcaaatgagaatgctaaggctcagagccatcacattacccagccaggggccctggctaggcattcagactccaaagctgggctctcacctgcacaaaggcatacgctaggttagaggggtagatcaggctcaggaggggtcactgcctgctgtgtgcgtgcatctgtgtggtcctaacactgcttcagtgctagagcagacgtgctaatagaggcctaagtgggccatgtctatgtgttcctagggcttcccagctgtgctcaagaggccaaggtcactgccccatgcccactgagcctctggctccctgacttttttctcatcccagaataggagaatggggccaagcccctcctgaaggcagatggggatcaaggttgggggcactcaccagggacccctaagcattgagtcagaagcagcaggagtgggagccaccccatccttctggctggaggctgcactgtgacccaccacagccccatccgggaagttgtgaaacctgtccctacgggattgggtggctctggctccgcacgtcagctcagggcctgctggaccctgacctgagacctggtgacaggagccatgaggggccaggcctcaggtcccacaggtcagttgcaagggcctagcacagctagccccctgagaggcctccctacttagtggtcaggtgttaggaaggtttggtggggccacttgaggtgccctggggttggggtgaaacccctctgcagcctagtcagcccaagggcattgtgaaagtgacagctgccagaggtctgggttccagcccctggctgacattaaacttttctgaatttcggtttttccctgtaaattggggaaaattacttgccccagcttcaacactgcctcccctccacccttttgctgctgccttatcaggccccagctgtaggcaggtcagcccacgcccggcggcagagcccagagaggctcgctcatctcagccgccagaagtgtcatcccagggaaggtgagcgaagctgtccactaggactaaataggggtggaggtaacaggtagcagggactctggcaggaaccgcctttcagacgttttcaggaccgtctgagcggggcctccaagtatgggtaggagacaggcggcctagggattccggttagcacgtcgcgttctgccgcagcagggctgggagcatccccggggcaggcggaggtcggaggtggtgaggcctttcggcgaagctgaggcctggaacaacccggtgggaagccacggagggggtcccctagcggaggctgggcgcgggccggtgcgcgtgcgcggctggaggctcagcgcgcgagcgtgcgcgtgatttggccctgaacggacgccgtagccgagaggttgggcggatgttgtgaaccgggtcgcggcggccgaggctcggggtgagtgaggggcggcagggctctgagcctggcgggttccggctattcccttcgcggtccagtttagtccactgcgagggcacctgcagcgccgggatctgagtgcgaaactccgagcggaagctggtctggcaggtcctctggagcttggggccaggcggg

SEQ ID NO: 532 - DNA, 2300 bp, Homo sapien
cccttgggctgactaggctgcagaggggtttcaccccaaccccagggcacctcaagtggccccaccaaaccttcctaacacctgaccactaagtagggaggcctctcagggggctagctgtgctaggcccttgcaactgacctgtgggacctgaggcctggcccctcatggctcctgtcaccaggtctcaggtcagggtccagcaggccctgagctgacgtgcggagccagagccacccaatcccgtagggacaggtttcacaacttcccggatggggctgtggtgggtcacagtgcagcctccagccagaaggatggggtggctcccactcctgctgcttctgactcaatgcttaggggtccctggtgagtgcccccaaccttgatccccatctgccttcaggaggggcttggccccattctcctattctgggatgagaaaaaagtcagggagccagaggctcagtgggcatggggcagtgaccttggcctcttgagcacagctgggaagccctaggaacacatagacatggcccacttaggcctctattagcacgtctgctctagcactgaagcagtgttaggaccacacagatgcacgcacacagcaggcagtgacccctcctgagcctgatctacccctctaacctagcgtatgcctttgtgcaggtgagagcccagctttggagtctgaatgcctagccagggcccctggctgggtaatgtgatggctctgagccttagcattctcatttgagagatgagatggggcaagctccatcacccactgctctcacagagcgtgtgtgttagatctgagcccggtgcctgggccactacacagaggcaccggtgataactaccaagtctgggcctgcttcccaggggaaattttttgacaagtatctgtgcaggggggctagactggcccttgaaagtgcatacagggtccatcccagaagccttgtagctttgatcccctgaatgaacaaactgtggacatgccaatacacattactgacatgtatgcccacctgacctgcacccactctgcagggcagcgctcgccattgaatgacttctaggtgctccggggcacagagctacagcgccgctacaagcggtggtgcccgggccttggcaggaggatgtggcagatgctgaagagtgtgctggtcgctgtgggcccttaatggactgccggtgagtggccactgggcatagataagactgggggcaggggagcctgggccgtggcgttaccttgtgccttcttctctccagggcgttccactacaatgtgagcagccatggttgccaactgctgccatggactcaacactcaccccacacgaggctgcggcattctgggcgctgtgacctcttccaggagaaaggcgagtgggggtggagaggggcagggtgggagacaggggacctcagcccaagttgatcttctgtctcttgctcccagactacatacggacctgcatcatgaacaatggggttgggtaccggggcaccatggccacgaccgtgggtggcctgtcctgccaggcttggagccacaagttcccgaacgatcaccagtgggacaaacaccttccctccgtcccggcctgggaccttcccccagcacacactatagtgatgctctgggccctcaggtacatgcccacgctccggaatggcctggaagagaacttctgccgtaaccctgatggcgaccccggaggtccttggtgccacacaacagaccctgccgtgcgcttccagagctgcggcatcaaatcctgccgggtgggtaagcggcgccgggtcaagctgggagagtggagggacaagcccacgcccatccacgaacccactggctctttgtctccagccgcgtgtgtctggtgcaatggcgaggaataccgcggcgcggtagaccgcaccgagtcagggcgcgagtgccagcgctgggatcttcagcacccgcaccagcaccccttcgagccgggcaagtacgcgtaggcggtatcggcgccctgggggccgggctagggaaggtccaggactccaggggcagggctccgtgtagggcaactgggcggggccagataagccagagtcccagggtcttcttcacgccccattaccgcccccaggttcctcgaccaaggtctggacgacaactattgccggaatcctgacggctccgagcggccatggtgctacactacggatccgcagatcgagcgagaattctgtgacctcccccgctgcggtaggcggcggggaccaggcctgggagggta

SEQ ID NO: 533 - DNA, 2300 bp, Homo sapien
cgctgcccgcagccagggccagcgccctcgaggggcagaggcgggaccggcggcggcgaactcgcggcctcgggcaggggcggcggcggcggcggcggcggcagctgctgctccctggacgccttggggtccgcggcgcagccgttaggcacgtggttcccagggagttccgcctgcggggatgaaggtgggggctcacctcccagcttagggagaggctgaggggtctgggtcacatctggccgggggcgcgtgcagagccgcggtcaggtgtggcagagcagttggggcccacgtagcatccgcgacggctgcgccgcctgcgggggagcggaggggccttcgagcgagccgcgggcggcagggccgaggcgcgggcagccggcgggcgcgggctggcgggcacgcacctcctcgcggtgcgccatgcccgggcgtgcgaccagcgtctcgccggggcagcggcccagctgccggtagtagtcccccgtgctgggctgcttgctgaaagcgcggggcttgcggctggagtcctgcctccgtagcccgtcgtggccgtcgcaggagctcggctgcgggaagacagtgaccggtggggctcgggcaagtgcccggtaggcgccccccacgcctccccacccagctcttcacctcctgggaactcgcggccagcggccgtcggggggtgcagcagccgacttcctagaccccctgttctcacggtgggcagcgggcgaggttcatgggggcctcggtggaagggcaggctccgcccgccttacagggaggggttctgggcaccggccaaggggcacagggtcccccactgaggccagaaggggcgggcccaggggcgggccggcccagccccgacgccagggggagctagagaaggggcacctcccagcttagccttcactaggccctcggccgcactccgctctcggctgtcagaaggactgcgggtccccagggctccgcggagccctgtctttcgggggtcccgggccggagggagccccctccagagcctgtgctctccgaggctccggcttgccccggaccccgcttgtccgtctaggggctgctccaacctgccacggtgctggtggtcctgctgtgcacctggcggcgggggcggcaggacccgacacctgctttacgtgatacttcctctcaggttacagacgcccgcgcacggccagcctatgggctccgacggcctgacatcacccggggcccgccaatcccaggccgaaccccccccagccgtcgcggatgccacgggggcgccaactactctgccacacctggccgcggctctgcacccgccccgggccagatgtgaccccgccccctgcgcctctccctaagctgggagctgagcccccaccttcatccccgcccgagaggagagagggctgaccgtgggcagagggggcctctcatatttggctgccggctccgggtcgcgtccccaccgtttccctcctgcatctggaaaccatcgccatccacgaaagcgacaccgacacccgcgctcaagcctcggatttcaggggccgtaaggcggggtcgggtgacagcgcggcttcccgccccgtcgcagctgcccccaactaggcccagctcagtgagggagagtgaggcggccgggccaaagactgagtgaccgggtgggggctgtcccctgccccactctccagcccatgcgtccctgcggtggcctcagacccttcaccccgcccgacctggctcacgttgcaggaaacgcgacaccgcaggattcgttttctgggccagcccgccggctccgcgccccctgcagcccggaggctccgacgccacgaccctgctcccacctgcggtcaggcacccgcgcgggaggcgccgcggcgacacaaagagccctttgtagagcttcccggcccgggccctggcgtctgcggcccagcacgcacacagccgggagggacgcacacagccgggagggggctcgcacagccaggaggtgacctcacagacctggcacttgggctcagcggtggagagggggcactggctgggccacctgtcctgtggatttgggcggggcccacagtctgcgccgggagctcaacgattccagggcccctgcagccctacccgcccggccccctctgcctcccagagatgaaaggggaaagccactgtgggagcttggtctaaggtggcgtgaagagggcagctactggagctggcctgcaggtttggtgtccctcccatgcctcccttgcccactggccttgtgacctgagtca

SEQ ID NO: 534 - DNA, 2300 bp, Homo sapien
ggagatctaaagcatataattaattctacaaatcatccccaatcagggggccactacatgatttgtggaaatgcacatcgaatatttggatgacttggataatgggggaatgattcagtatagccagaatgaatttataagtgacaattacaagtcacaatatttatagagataaaagaaaacagcatgacccagcaacagctgtgggggaggggtggaaaattcagaggtcgaaattgaccctaagttaagtaaaagctccaaatgctgccaccgagaaggaaaagaagccaatgtgacattgggacgtagtaagattcatattggacagacaggcaggaactccttgtactgaagtaattagtcatatgataagtggattatcataactcagattttgatttgcacccttttaagagcacaggaaaagaccaaagataagcccaaaatgaacaataacaaagtctaaaagtgaacaagttcccatttgaggaaaagcgataagatctgctttaattaaaacattgatgaataacttcaagagtgtcctcgagaaatagaaaggtgctgggcaattgttcctgcctctgtttcttccacatgctgagatttgtagagagagtttgtccggcagcatcggcacaaggataataaccaaaaagtgaggttggctgctcggcagggtggcttcacctccacctctcagtagctgcagagtgtgattcttctactgccaatgaaatagttggtgttggcagggcacggtggctcacgcctgtgatctcagcactttgggaggctgaggtgggcagatcatgaggtcaggagatcgagaccatcctggctaacatggtgaaaccccgtctctactaaaaatacaaaaataaaaaaattatccaggcgcggtggcaggtgcctgtagtcccagccactcgggaggctgaggcaggagaaaggcgtgaacccaggaggtggagcttgcagtgagccgagatcgcaccacttcactccagcctgggcgacagagcgagactccatctcaaaaaaaataaataaataaaataaaataaaataagaaaaaggaaatagttggtgttgtcttccctgcgtagctccaccttattctaattctgtgactgggtctgctgactttccccagtgccctgagtcctccctctcagctgcccttgagggagtcggagttacaggcagggcctcaggctttgcgcccagatatcttaagccatcatctcccgccatccaggactcaggtgttgcagagctgatggagcttcctgacttgtgacaaaactcgcaggaccctgtctcctcaggaagagaagaatcaccacattcacaccctccagccctgtttcaaccttgtttgtttgcatttgtttttaatttcttatgtgcttttctccctcaccatctctggattctcttcgcctctatggggaaattcctcctgctcatttggtgtgtccttcctacccaaaccagtccccagggcccttattgcctgactaaggcactgaggttgggttgctggaggcgcaccaaggtggaggtctctgttcccacgtgacacctaggaagggtggagagagagggggcaagtgttggatgcaggggctgccccccaatcctgatgctagcttggtacagccccacagccacccttcctggccctgctcagcccagtaaccctgtgtcactccttcaggcattccctgagcccctgggagtcagggctgtggccctgggcctggagccagtctcctgccatgacaaccaggtgcctgtcgtgtaggcagctcgcagtcaggacctgcagcctctgaaaaccctgcacggtgctgcctattggctacgtacggttcagagagggccaattagttgcccaaggacagaagcaggattcaaacccaggatccgcttgacccaaaaaaaccactgctgagtgaggcctggccaattcttccagggaagacagagagcacagagctaccttccaggcctgtgggagtctgggagcggcccaagccaggggcggggcagcaacaggctttaggacttgaacccgctctcctcccacaggacaaagacaattctggtcccacagtcttgcatctgactgcccgctttggccaccccaaggtggtgaactggctcttgcatcatggcggtggggatcccaccgcggccacagacatgggcgccctgcctatccactacgctgcagccaaaggagacttcccctccctgaggcttctcgtcaggcactaccctgagtaaga

SEQ ID NO: 535 - DNA, 2300 bp, Homo sapien
caggtttcagtacattgagatttttagtgcttatgagatgtcccagtggagatgtctgtccactgggcaactggacatcaggctttggtgctcaggacctatggtgggttgtaaatatgtttttggaaaccatgagcatttagagctgaggctgagaattgacataatgttcagtgaagactaggagatgcaggagggggttcataggctcaaggaagcagtaaaggaattgagtatatgaaacttcatacatatgttgcagtcaacatagtcatataattagttaagatgaagtcatcctggaggagtggctcccactcctgctgcttctgactcaatacttaggggtccctggtgagtgcccccaaccctgatccccatctgccttcaggagggggttggccctattctcctattctgggatgagaaaaaagtcggggagccagaggctcagtgggcatggggcagtgaccttggcctcttgagcacagctgggaagccctaggaacacacagacacggcccacttaggcctctattagcacgtctgctctagcactgaagcagtgttaggaccacacagatgcacgcacacagcaggaaatgacccctcctgagcctgatctacccctctaacctagcgtatgcctttgtgcaggtgagagcccagatttggagtctgaatgcctagccagggcccctggctgggtaatgtgatggctctgagccttagcattctcatttgagagatgagatggggcaagctccatcacccactgctctcacagagcgtatgtgttagatctgagcccagtgcctgggccactacacagaggcaccggtgataactaccaagtctgggcctgcttcccaggggaaatttttttgacaagtatctgtgcaggggggctagactggcccttgaaagtgcatacagggtccatcccagaagccttgtagctttgatcccctgaatgaacaaagtgtggacatgccaatacacattactgacatgtatgcccacctgacctgcacccactcatgcccactctgcagggcagcgctcgccatcgaatgacttccaggtgctccggggcacagagctacagcacctgctacatgcggtggtgcccgggccttggcaggaggatgtggcagatgctgaagagtgtgctggtcgctgtgggcccttaatggactgctggtgagtggccactgggcctagataagactgggggcaggggagcctgggccgtggcgttaccctgtgccttcttctctccagggcgttccactacaatgtgagcagccatggttgccaactgctgccatggactcaacactcgccccactcaaggctgtggcattctgggcgctgtgacctcttccaggagaaaggcgagtgggggtggagaggggcagggtgggagacaggggacctcagcccaagttgatcttctgtctcttgctcccagactacatacggacctgcatcatgaacaatggggttgggtaccggggcaccatggccacgaccgtgggtggcctgtcctgccaggcttggagccacaagttcccgaacgatcacaagtgagacaaacaccttccctccgtcccggcctgggaccttcccccagcacacactatagtgatgctctgggccctcaggtacatgcccacgctccggaatggcctggaagagaacttctgccgtaaccctgatggcgaccccggaggtccttggtgccacacaacagaccctgccgtgcgcttccagagctgcagcatcaaatcctgccgggtgggtaagcggcgccgggtcaagctgggagagtggaggggcaagcccacgcccatccacgaacccactggctctttgtctccagccgcgtgtgtctggtgcaatggcgaggaataccgcggcgcggtagaccgcaccgagtcagggcgcgagtgccagcgctgggatcttcagcacccgcaccagcaccccttcgagccgggcaagtacgcgtaggcggtatcggcgccctgggggccgggctagggaaggtccaggactccaggggcagggctccgtgtagggcaactgggcggggccagataagccagagtaccagggtcttcttcacgccccattaccgcccccaggttcctcgaccaaggtctggacgacaactattgccggaatcctgacggctccgagcggccatggtgctacactacggatccgcagatcgagcgagagttctgtgacctcccccgctgcggtaggcggcggggaccaggcctgggagggta

SEQ ID NO: 536 - DNA, 2300 bp, Homo sapien
ccacagtccctttgaacaccccatggaagtcagcacccctttgaggaacgaggtggcccaaggcctggcttcacatgcaggccgttgggtcccagtgggtcctctctgtgcctggtatagccaacggcttcatgcatcttacccggtttcctctcctccaccacccaagctcctccttgacccccttgctcagctgttctcaggacagcaagatccccagcccttggaaaagcccatctccagtgcttggggagggagttgggttcaggtcgtctaaccacagaaggacagagaacttgaggcaggaggaaatcccttcccttgctgggtctcttggcacagcccatccaggggtctgggtcagggtccaggtatactctaccctcctataggacctggatttttaggcccccgaggttggtcaacgtggagtctttcccactgttcacctgggaactgaaggaatatcccatggggccctctcttactcattagagacacccagaaaatactccattcagcagaaactgcgtgcagtgtaccagaccactataattataactgcagggtgtggaggtcagacacgttttgtggctattttctctctgtctgtgacttgcttgccttttcactttcttagtggtatcttttgatgagaaggtgtggctaatgttgatgaagtctcatttatcatgtctttcttatatatgtattttttgtgtcctgcttgttggtagggtgatctttgcctaccaacaagtcacaaactatccttgaaatgctttatatctttaacttttacgttttggtgtgtaatgtacctgaaattacttttgtgtgtagtgtgagggagaataacattgttggtctccccacattcatataaaagtccattaattgaaatgatttattttcttttattgaactgcttttattgaaaacccatttattgaccgtatagctgtggatcagtttcaagtctcttaactcagtctgtttatctatttgtcactcctgatgcctcgtctgtaatagcttatagtaaaccttaaagtcagatagtacaagtccttgttcttttttacacattgcaataatttttgaaataggtaataactcataaaaccatcacacacatcaggatatgctgtcacttcatccctttctgacatggtttggccgtgccctcacccaaatctcaacttgaattgtatctcccagaattcccatgtgttgtgggagggacctaggaggaggtaattgaatcatgggggcgggtctttcctgtgctattctcctgatagtgaataagtctcactatctgctgggtttctcaggggtttctgctttggcttcttcctcattttctcttgctgctgccttgtaagaagtgccttttgcctcccgccatgattctgaggcctccccagtcatatggaaatgtaagtccaattaaacctctttttcgtcccggactatgttatgtatttgtcagcagcgtgaaaacggactaatacactctcatttctgagtgggacacatgctgtcactcacatatgctggttgctgacttgtgacggaagattctctattgtaccctctggggacaatacatctccagttgcctgcggggaggatgaacatgcaaaaaatccacaacactcagcacagagtctggatttagtcccattagtctgaatgggactaatgcccttataaaagggacctcggggagctctctcgccctctttctgccccctgaggatacaatgaggaggtggcagtctacaaccagaacaaaaggccctcaccataaacctaccatgtcggcaccttgatctcggacttccaacctccggaactgtgagaaatcaatttctgttgtgaatcagccacccagtttatgtatggtacagtgttagagaagcccgaactaagacacagatggaatcccatggagagtctctaatttgctaagctggtcatcaggcgggatgttgccagttagaaacaggaagagctgacattttgtgtatatgaaagaagatagtggacaggcccattgtgtcggctttgtctgccttggcaaactggagacggaaactcgattcaccatcgccagccacgggaggactgggaggacctccagaggaggttaggttgacttcatggtaactttagatcctgaaacctcccaggatatttcttgtcttccctttgatcgctcttccgcctacccaacaggacaggactcgacgcctttctttcctggcagcaagaggtccgttgcggacaagacc

SEQ ID NO: 537 - DNA, 2300 bp, Homo sapien
aaaaagcaagcaaggccgggcacggtggctcatgcctgtaatcccagcactttgggaggccaaggcaggcagatcacctgaggtcaggagtttcagaccagcctggccaacatggtgaaaccccatctctactaaaaatacaaaaaattagctgggcgtggtggtgcactcctgtactcccagctacttgggaggctgagacaggtgcatcgcttgaacccgggaggcggaggttgcagtgagccgagattgcatcactgcactccagactgtgcaacagagcgagactctgtctcaaaaaaaaaaaaaaaaaaaaaaaagaaaagcaagcaaggaccccatggccagcgagatccaaaccagtaaaggggcagctcctcagagataggcatgtgcatgagagaaaaaaagtatccttaacatgactccgtatgataatcagctcattaaaactcatgcatatggactgcacatcatgcatgtacttaaaattatgggatggagccaatgtgcaagcacacaagggccaaagtaactaagcaacccacctatcaatcaaaaggcaaacactggctaacgattaggcatccttgtgaagagaagaaaaaaaaacacacataaaacgacccaaagtacaccaaactaatacttatcttacatcccagaggtcagtccactctccccactctgagagtgttactatgcttaataaacttttgctttgctttgctgctttgtgtgtgtcatgtacagttctttgtttgggacaccaagagcctggaaatgcatggcaccatctggcaagaattaggatttttttcctaagggttaacaaaccaagcctttggagagacttgcttcactactgttatcaaccaacagcctgatgctttccctcccttttgtggttttgacaaaaaaagcaagcagcattccctcctgataagagaccaccgacccaggaatgattctggccagactacggaggatgtacagtgagggttttcatgtccattgcctcagattttgacgtcagagggccacaaactccactctcagatgattgctaacgccaccattttatgaacatgggccccatggagaggcatgcagctcaactgcacatctgcacattttcattttataaatattcatattggaatattatttggtactgctcccgtgaaagacacatttgcagaatggactcaaattagaagcattatataagcactataatgtagcaatggcgcatccagctctctacactatagaaatgtctgcagtgtagacatttccacaatgaccaaagatatctgtacaagaatggtgactgcagcattctttgtaatcctaaaaccatgaaaccaacatcatctcaaaaacatttttttttttttgagatgggagtctcactctgatacccaggctggagtgtagtggtgcaatctcagctcactgcagcctccacctcccaagttcaaacgattctcctgcctcagcctcctgagtagctgggattacaggtgtgtgccaccatgcctggctaacaaaaacattttgaaaagggttaaataaatcatgcacagactgaggaaaaatactgttttcaaaaatgatggagaggatcactatcatgatgaaagattccactggtcacattattgatagagcaatcaggaaacccaggcacatcctggaggtaatactggactcctattactaaaatatgaaaaaatggaggcacgtgaattacttgtttaagcgtataagggactgaattagaattttatcacaccagaagtgggttcctaggtctctgtttcaggattcctaagttacacaggtgtaaacccggcatttcaggagatagccggttaagaatctggtcggggaggtgggcggcccttgacatggatcagtcataaatgagtggcttgggacttcgggaagataaaatcttccccatttacctagtgattgacaatgcatgaatgcttcaaaagttccaataagcgtccctgggtgggctcgaaccaccaatctttcggttaacagccgaacgcgctaaccgattgcgccacagagacaagcgcttccgcttctactggtgatatgggaagggcccactcactgaactaactcccttccctctactcccagagcccgcccggcaggaccaccgagcaaggccttggaaaaccagagagattagagcggtgagtcgcgccggtcacgttggacgcctgcgcgttaggagattctggagccagaacagcggaattgccttcgcccgccct

SEQ ID NO: 538 - DNA, 2300 bp, Homo sapien
gcctgatttctagtaagatgtatgcctccttaaataattaccagccattattccagaagtcacaagattggcagcttccccagttactgctgtgaagaacatcactattgtagaacctaagattggcctcttgagatgtcttttcaggctttggcatttctgactgctggatggcaccatttggcccgaaaatcaaccagtcccttagcccccacccagaagctgactccatgcaggagggccattttccatgcccctgtgatttcatccccaacgatcagcaccacgcaagccctagccccctccccaccaaactatctttgaaaaaccccttacctccaagccttcagtgagattgctttgagtaataactcttgtctcccacatgtcgtggctggcctgtgtcagtgaaactctttcctgcagtgccatggtctccatgaattgattttgtgtgtacattgggcaggaagaacccatcaggtagttacatctgcaggatggtgccagttctttccacaaaggctggtcagatacccagaaaacatttctccactactacctggacaatgtgtctccctgtcaatctccagggaatggggcctggatcaagtatttagtattcagcagttactacactgtcacctaatccctcattttcaatatcttgccatgccttccagtggcctaactggccaccatgccacagaatctttatggtctccaaggagaactctctacttgatgttttgtgatttgagcaatggaatagaatctgatactggtgggctgggggaggtacccggacactggtgggatctcgaccccagccgtggtgtccaggctcttgacaccatcgcgagaacaaagtcaaagatgagtcagcagatagtgaaagaagagatttattgcaaagcaaaaagtacacactcaagaaaggggagttcaggcatacccaagagagaacaatggattctggggtttcatcttgatgggtttctttaaccaaggagtggaatgttcatgaaaattcctgggtaaaggtggagatttctcggaactgtggtgccatccatttttacatcaaatattggtctcagaactgtcatggcactggcgggtgtgtgatttagtatgttaatgagcatataatgagggcctaggtaaaacctccgtcaaatccagcaccacattgggtccactcagccttagccagcttggtccacaccctggtttttcagcgtcttaacagcccacagcctcaagtcatgtaaatctgctgcctagaatttgttatcctgtgaccaccctgtagtattcctgtctgaaatctacttgtaaatattcaaatggtctttcacttgggcattccaactttgcttacttcacagtgtttcctgcgtaatatataagaaaagatgatccagacattgttaaacatctcaaataagatgtagcccaggtatttgtgtcaaatttggattattttgatttcgtctttgcagaatataaaaaactaacatgaggtaagcactaaggtgtggagatggctgtgcaagagatgacaaagtccagcaccacgcttgagagtgtccaatcatctcttctggggcagcatagttttctacaatactgattttggaaaaaaaatcaaaaaaaaaaaacctacaagattcatgaaactggacaactgtctttataacattaccagtgataaaaccagtaaggaaggctggtttgcagtcatctgagcagcctctttactttcataaacatggtttctctcggcttccaattgcaagtggaatgctgcatcacagggataaagatgtgaagagaaccggtttcttctgtaatccgaaacattctagtctgcgaattaaaagccattatttgaagaaggatgccccggctccatctggccaccgaaaggttgctccttaacacaggctaaggaccagcttttttgggagagaacagacgcaggggcgggagggaaaaagggagaggcagacgtcacttcctcttggcggctctggcagcagattggtcagttgagtggcagaaaagcagacggggactgggcaaggcactgtcggtgacatcacggacagggcgacttctatgtagatgaggcagcgcagaggctgctgcttcgccacttgctgcttcgccacgaaggagttcccctgccctgggagcgggttcaggaccgcggatcggaagagagaatcccagctgtgtgtcagggctggaaagggctcgggagtgcgcggggcaagtgaccgtgtgtgtaaaga

SEQ ID NO: 539 - DNA, 2300 bp, Homo sapien
gattatagacctgaatcaccacactcggtctagtctcattttattttattttatttttttgagacagactcttgccctgtcacccaggctggagtgctgtggcacaatctcggctcactgcaacctcctcctcctgggttcaagtgattcccctgcctcagcctcctgagtagctaggattatatgcacatgccaccacgccccagctaattttttttatatttatttatttatttatttatatttttgagacggagtcttactgtgtcgccaggctggagtgcagtggcatgatctcgcctcactgcaacctctgcctcccaggttcaagcgattctcctgactcagcctcccaggtagctgggactacaggtgtgcaccaccatgcctagctaatttttgtatttttaatagagacggggtttcaccatgtaggccaggatggtcttaatctcttgacctcctgatccgcctgcctcagcatcccaaagtgctgggattacaggccaattcttgtatttttagtagagatggggtttcactatgttggccaggctggtctcaaactcctgacctcaagtgatctgcccgcctcagcctcccaaagtgctggaattagaggcttgagccactgcacctggcctggtttagtctccttttagagatgagaaaactgaggctcagggaggtaacctgttcaaggtcttactgtcttgaacaccatagttgcaagtgacagagctgagtctcacatgcaacctcagacctgatactgactccagagctgtgcgcctaagcactagagcacatagcctccttgccccagggaaagaacaatgggaggtggtgggtgacctctgggtctcagggccctgggatatagggactgtgccttttttttttttttttttgagacaaagttccactcttgttgcccaggctggagtgcaatggcgcgatcttggctcactgcaacctctgcctcctgagttcaatcgattctcctgcctcagcctcccaagtagctgggattacaggtgtgcaccaccacacccggctaatttttgtatttttggtagagacggggtttcaccatattggtcaggctgatcttgaactcctgacctcaggtgatccacccgctttgtcctcccaaaatgccgagattacaggcatgagtgcctgcgcctggctgggactgtaccttctggattttcaaatgaatgaaatgagtatttcttgagtgttggccacgtgaccccccagcaccatgtcatgtgctgggtatgcacacacgatactgtttcatccccggacggctccgagagatgagtaccaatattatcacatcttacgtaagaggacactgagtctcagagaggcaaagtcagtgtccctggtgcacccagctagtgggggctggggtgggtgtgaaggggccagaagcttcccaataagtgcctgaagggcaaggctagggcatttgtagttcgaggctctaccactgtgtctaggtcagacctaggaatgccgcaggtgttgcataaatgctcatcagtccaggctggaccgctcatgcccaactaagtgccaagcctggcctgggtgatctcacagcctgcattctttgccctacacctgttgtgggaaaacatactcccagcatgctgtaaatcctctcattcttagctaaccatgtgactcccgttctgggccagaaagatggtcacaaatacttaggactctggcctttcccgccgcatggctactgaccccaccccctgggcttggagggctctaggacccagcaacctgcgcagggtgaagagtgtgtgaggtcctgacctccaggtgtctcccctgtttcctcctcccattccctcttctctctcctccctccttttctctcccttctcctcccctctcttcatccttcctcttcctttggctccctgcctctgcttccctcctctcctgtcctttcccatcccctccctcctcagcccacatcctgctcctcccaccgcggtggtcacatgggggcgccgccggatttaagcttaatctgcctggtgctcagcacagcatcctggctgtggcgcgtgctgactgagctagtcttggggtcctggagaagggggctggaggcatgcccacagcctcccccccatgagcttggggctggcgagggcacaggaggtggagctgacactagagacggttatccaggtgggtcctgggggctgtgcccaccctgtctggggcggggcagcgtggacttaacaggagtggtgagaggt

SEQ ID NO: 540 - DNA, 2300 bp, Homo sapien
cccaggaggcagaggttgcagtgagttgaggatgcaccactgcactccagcctgggagatagcaagaccctgtctcaaaaaaaaagaaaaagaaaaaatccaccttttggccaggcacagtggctcatgcctataatcccagcactttgggaacccaaggcaggcggatcagctaaggtcaggagcctggccaacatggtgaaaccctgtctctactcaaaaaaaaaaagcaaaaattagcctggcatgctggcatgtgcctgtaatcccagctacccgagaggctgggttgggagaacctcttgaacccgggaggtggaggttacagggagccgaggtcacaccactgcactccagcctgggcaacagagttaaactccatttcaaaaaaaaaaaaaaaatcagccattgaaaaaattaaagttagttttattgagtcttactgaggactgcaccctgggagagggtttcagagagtttctgttagactgcgccaaagcagcatttcagcccacagtttagatacagaggcaggcggttctgtgtgtgctcagaagctatggtcaggcacggtggctcacgtccgtaatcccagcacttttggaggctgaggcgggtggattgcttgagctcaggagtttgagaccagactgggcaaacacggcaaaaccccttctctacaaaaaatacaaaaaaaaaaaaaaaaaaaaaaaattagccaggcatggcggctcttgcctgtagtcccagctacttgggaggctgaggtggaaggatcacttgagcccaagaggtgagctgtgatggtgccactgcactccagcctggatgacagagcgagacccggtctcattaaaaaaagaagaagaaaaatttacatcaaatgtcttcagaagctacactagtgcaaatctcgccaaggtttgggttcgaggatgcacctagttatatagattatagaggcataatcgtcaatcctgtcaggtgctatcttatgtacaggaaaaggcacagccaggatcatttaacttatattttctaacaatgcagtgattcaggcaagaggcgtgggagcctgtgttctgccctgcctgccatcttcaaggcatccttccgttgggctgcccccagtcactgagtcagggctttgtcagcttctgacaagcagaaagagcaaatgcggtttcttgggattgcaacttggtctcacagtggcttaggccagggtgggagcagtgaacggagtcacaaaagaaatttttcaggtagcattcacgggtgggtgctggattagatgcagggctaagggcaggggaggaagcctgggtaatggaaggctgcggggccaaggggggactgggaatcctggagggccaggtctgggggagagttaggaggtcgtgaatttggacttggatgcttgttgaagctgatgcatcttgaggacatttgtgggacacataggctgggtcagggctgaaagaggtgctggttatggccgggggcagggactcatgcctgtaatcccaacagcccaggaggatgagacaggaggaatgcttgaggccaaaatttcgaggccggaagttccagacgagcctgggcaacacagcaagaccctgtctctagaaaaggaaagaaagaaccgctggttgtggaagccagccatggcccagagctcagcagtgtaggagaggagggtgcgggcctgagagaggcagcaggcttggctggagaggcagaaggaaaaccaaggcaggagagtgtcctggaagctgggagaaggcagagggagatcgaggcttactttctggctgaggggcctagggtgagtcactttgggaggcttgatttcctcctctgtgaaatgggcaacacacctacccttgcccacctcacccccctcaccccgtcgacgtcgagtgaggagcagctgtgaggaggaggaagctttgcacagacgtgaggacggccccgggcgcctctaccccggggacacccccccccccaggagatggaaccccgagggcacggcgtggcggcccatgcgggcagctcgcgttaggacccagcggctccggggctggagggcgggcgccagccccgtcgggggcccggagggggactcggagcgggccaaggggcggctccggcgggcggactcggagcgggcggcggagtgacccggacaggtaggcgcgggcctggcgcttgggggccccggggggcggtcaggggcgtcggcgggtcccccggcgcgggggcgagggtgccaggctctctgggtcctcgatcctggg

SEQ ID NO: 541 - DNA, 2300 bp, Homo sapien
ccctacaactctcactcccgcctcaggcctaggctcctgggcagggctgaaggctgcccctcacgcagaggatctgcacccccagccagcttctccgggaagagtttagtgtacagttcactcattcattccaccaatgtttgctgaactgctgctctgagccgggctctgaacttaatgagcaaaactgaagatgagcaaaaacagccttggtcctggccttcacggggcaagatgacagtctcatcgggaagagggacagggctcagatggtcacagacataggccaacaagacaactgcaagcagtaaagctagaaagcacaaaaaaaggaaaaagggaaggcccctctgaggaagggagggtttgatctgtgaccccatggaggagacctcagccagtgctcgggaggaagaaacgcctcagtgtgggagggagaggggtttgggagaaaacccccaaaggccagtggctggaggaggaagaggaggcagagccaggctgccataaagggccggggccctggaagccacagggaagttgagcctctaacctgagtgaaaggcgatcagtagaaggggcacgatctgcgggggtgagggaggcaggacccacgtgggagagcccagagtggaggctatcgcagagcccaggcaaatgatggtggtgtcaactaaataagaaatcagccttttgaccaggtgcagtggctcacgcctgtaattccagcactttgggaggccaaggtgggtggatcagctgaggtcaggagtacgagacgagcctggacaacatggagaagcctcgtctctacgagaaataaaaaaaaaaaaaaaaatagccaggcatggtggtgggtgcctgtagtccccactactctggaggctgaggcatgagaatcgcttgaacccaggaggcagaggttgcagtgagttgaggatgcaccactgcactccagcctgggagatagcaagaccctgtctcaaaaaaaaagaaaaagaaaaaatccaccttttggccaggcacagtggctcatgcctataatcccagcactttgggaacccaaggcaggcggatcagctaaggtcaggagcctggccaacatggtgaaaccctgtctctactcaaaaaaaaaaagcaaaaattagcctggcatgctggcatgtgcctgtaatcccagctacccgagaggctgggttgggagaacctcttgaacccgggaggtggaggttacagggagccgaggtcacaccactgcactccagcctgggcaacagagttaaactccatttcaaaaaaaaaaaaaaaatcagccattgaaaaaattaaagttagttttattgagtcttactgaggactgcaccctgggagagggtttcagagagtttctgttagactgcgccaaagcagcatttcagcccacagtttagatacagaggcaggcggttctgtgtgtgctcagaagctatggtcaggcacggtggctcacgtccgtaatcccagcacttttggaggctgaggcgggtggattgcttgagctcaggagtttgagaccagactgggcaaacacggcaaaaccccttctctacaaaaaatacaaaaaaaaaaaaaaaaaaaaaaaattagccaggcatggcggctcttgcctgtagtcccagctacttgggaggctgaggtggaaggatcacttgagcccaagaggtgagctgtgatggtgccactgcactccagcctggatgacagagcgagacccggtctcattaaaaaaagaagaagaaaaatttacatcaaatgtcttcagaagctacactagtgcaaatctcgccaaggtttgggttcgaggatgcacctagttatatagattatagaggcataatcgtcaatcctgtcaggtgctatcttatgtacaggaaaaggcacagccaggatcatttaacttatattttctaacaatgcagtgattcaggcaagaggcgtgggagcctgtgttctgccctgcctgccatcttcaaggcatccttccgttgggctgcccccagtcactgagtcagggctttgtcagcttctgacaagcagaaagagcaaatgcggtttcttgggattgcaacttggtctcacagtggcttaggccagggtgggagcagtgaacggagtcacaaaagaaatttttcaggtagcattcacgggtgggtgctggattagatgcagggctaagggcaggggaggaagcctgggtaatggaaggctgcggggccaaggggggactgggaatcctggagggccaggtctgggggagagtt

SEQ ID NO: 542 - DNA, 2300 bp, Homo sapien
ctctgcaaccccgagacaggtgcagggggaagcccctgagtccccctggttgggcattggcacagaatggggtgggtacccagcctctgtccctgccatcccctccttgtgacacctgcctctccctggcagtgcccaccgacttcgcccagatgctgcagagctatacagctgctggctaccgtgtcgtggccctggccagcaagccactgcccactgtgcccagcctggaggcagcccagcaactgacgaggtgggcctgtctcctgtcccacccactctgaggactaggcagagggaggctctcacgcaggcagagcccaaggaagatgccctgcctggtggctgggagaggggccctggccactgcatgacctctgatccaggtctgcccaccctccagggacactgtggaaggagacctgagcctcctggggctgctggtcatgaggaacctactgaagccgcagacaacgccagttatccaggctctgcgaaggacccgcatccgcgccgtcatggtgacaggtacaatggcatgtaggggcccgggctagcagggcagaatccgccccttcctggcagagaagaggggcaccagggattcctttttggggcatctttttgggcccttgcttcaggccaggtcctttttaaacatttcgtgaatcttcacaatatcccccccgcaagtggtaattgtcacccctgtttgacagatgaggaaactgagactcagaggagtggagtgacttccaaggaacccatgtgcgctgtcagacagcctgggttccaggtggcacctctgagaaatggggataatgatgtcagcctcagaggctgtgacaagctcaaggagcaggaagagaaagattctggccgggcacggtacttcatgcctgtaatcccagcactttgggaggccaaaggagaaggatgtcttgaaccctggagttcaagaccaacctgggcaacatggcaaaactccgtctctacaaagaatacgaaaatggccgggcacagtgtctcacgcctgtaatcccagcactttgggaggccgacgcgggcggatcacttgaggtcaggagttcgagaccaacctggccaacatagtgaaaccccgtctctactaaaaatacaaaaaattagccaggtatggtggtggatgcctgtaatcccagctactcgggaggctgaggcaggagaatcacttcaacccgggaggtggaggttgcagtgagctgagatcacgccatttcactccagcctgggcaacagagagagacccagtctcaaaaaaaaaaagattctagctagggtgagacagcaggagctaagaggtctgtgtccttgtcctccccgcccctgcacacacacatatgtgcacacacattcatgggcacttggcagcagagtcacacagcagtaaggagtatatgtagcctgggcacatggctcgtgcctgtaatcccagcactccgggaggccgaggcagggggatcacctgaggccaggagttcaagaccagactggccaacatggtgaaaccccatctctactaaaaatgcaaaaaaaattagcctggtgtggtcgcaccctcctgtaatcccagctactcaagaggctgaggcaggagaattgcttgagcccaggaggaaggaggttgcagtgagccgagatcaagccactgcactccagcctgggccacagagagagactcttgtcttaaaaaaagaaaaaaaaggagtatatgtggagctccagcccacggctccaggttctcctaagacccttcaatgcctggatctacagatgagaaaactgaggcaaagggatgttggtaacctgcctcagctcacttggctggtggtggcagacggatttcatccagcctgttttcccatctgtaaggatcaggatgaggatggcctccccggatagcctcagaccctcaccttgccccataacccccaggggacaacctgcagacagcggtgactgtggcccggggctgtggcatggtggccccccaggagcatctgatcatcgtccacgccacccaccctgagcggggtcagcctgcctctctcgagttcctgccgatggagtcccccacagccgtgaatggcgttaaggtgaggctaacccagagttccagctgtacctcacccagtgaccccacccctgtgtcacctgacccaggccccaactctccagggtgggcagggggagctaagctgagcttcctgggcccccaggatcctgaccaggctgcaagctacaccgtggagccagacccc

SEQ ID NO: 543 - DNA, 2300 bp, Homo sapien
accccgggagggtccagccacagctcctccttctgatggcttggcctcatcccctcttccaggaaggccatttacggccccaacgtgatcagcataccggtcaagtcctacccccagctgctggtggacgaggtagggctgtccctgggtcttgccccagccctgcctggcgtgctgtgtgaccttggcccagggcttgcctcctctgggccactttacggtggcaaccagaccagctgtccccttctccatagtggatcgtcatctcagaacctgccgcagtcagcctagccagagagaccaggtccaggaattggaggttctgcccaaggcttgggtcacagattggggccccactcatagggattggaggccaagaggcaaatccacgcagcctgagcatctatggggtccccagagacacgccctagagcctgggtcctctctgtgcgtcctccactttcatgctcccaacagtcccgtgggttgggcctgggactgcactgttcacacctgagaaatccaagcttcagttggaggctgtgacatggccaaggtcacacagggacaaagagaagccagtgacctggacacaactagaataaagtgtgaacatcccagccctctgatcgggggcaggcaccatgaaagagatctttgagtctggccccatagaaatcagtctgtcacttagaagctatgtggttttttgttttttgtttgttgtttttttttttgagacagagttttgctcttgttgcccaggctggagtgcaatggcgtgatctcggctcactgcgatgtccacctcctgggttcaagtgattctcctgcctgagcctcctacatagctgggactacaggcgcctgccaccacgcccagctaatttttttttttttttgtatttttagtagatacggggattcactatgttggctaggctggtctcaaactcctgacctcagatgacccacctgcctcggccttgcaaagtgctgggattataggcatgagccaccgcacctggctggaactatgtggttttaggccagtggcttcacctgtccatgccttggtttcctcatctgtagaatggagctaatggtggtaccggccttgtagaattgtcattgccattgtatgacacttagataaagcacttggcgtgtagtgggggttcagtaaatacccttatcctatttatttatttgtttattttttttgagacagggtctccctctgtcactcaggctggagtgcagtggcgcgatctcagctcactgcaccctccacctccccagcttaagtgatcctcccacctcagcctcctgagtagctgggagcgtaggcacaggccaccccatcaggctaatttttgtattttttgtagatatggggtttcgccatgttgcccaggctggtcataaacccttgtcctctttagagcggagaaactgagggccctggggatgtctggttgggtggggatgggattgaccaggagaaaggcctggctccagtcctttggcagccactgggccctctgctcccatgggcacaggagacccagcctgtggctgggctgccctgggggacgcggccctgacgctgcctcccgcccctcccccaggcactgaacccctactatgggttccaggccttcagcatcgcgctgtggctggctgaccactactactggtacgccctgtgcatcttcctcatttcctccatctccatctgcctgtcgctgtacaagaccagaaaggtgagtgccataaggtgggtggggacgggacaggtgggtccccaggggcccccacccactcacggccctcttgtcccctgcccacagcaaagccagactctaagggacatggtcaagttgtccatgcgggtgtgcgtgtgccggccagggggaggtgaggagctagggcccagggggcgggggcaggagtgggagggtgggggggcatggctggggctggccccacctagctgagctcctctcctgcctgcctgcagaggaagagtgggtggactccagtgagctagtgcccggagactgcctggtgctgccccaggagggtgggctgatgccctgtgatgccgccctggtggccggcgagtgcatggtgaatgagagctctctgacaggtgagcccccagcccctggcctgcagcttccttcctcccctgccatccaaccctttgccctgcggcaaaagttttcatttgagtttccttttccttttttgtttttttgtgagacggagtttcactctgttgtccaggctggagt

SEQ ID NO: 544 - DNA, 2300 bp, Homo sapien
tcaggtaaagacaggtgttttcagggtccagctgtcatgtggaggtgaggcagaggggagatggggatggcagcaacagcctctgctgcatgatggggataatagcaaaaatcacccgtgcattcatcacttagcaagtggcaggcacgtccaaagcagtccccgaggcttgccccacttaatctacccatggccctatgtggtaggtgctgtcactgcccccattttgcagatgagaaaactgaggcacagagaggttaagtgacttgcccagggtatcatcagtgtaaatagtgcccttatcactaaataacagctactcttttcactgttcatattattagcatcatctctcgctgttctccttcttcagtgacttggtttggaacccagtgagaggaacaaaagggcaaagccaagccttgggttcaagggggcttacttgctcccaggagctcagtgtggcagaacggggatggggggcctagagcccatagtctccagcctgcacagggtgggggatgcagacctcaggccccatggcccatgcgtgtcccctcgcacccacccccagcctcctggaccatggccgctcttgtgacgacgtccaccgctcccgccatggcctcagcctccaggaccaaatggtgaggtcagtgctgccctggaccggggtgccctgagaactggggctccttgtgttgccccccaatgtggttgccttccagtcacctgccttctctgggcctcagttcccccagctgaaagtggggagctccttcaccccgggagggtccagccacagctcctccttctgatggcttggcctcatcccctcttccaggaaggccatttacggccccaacgtgatcagcataccggtcaagtcctacccccagctgctggtggacgaggtagggctgtccctgggtcttgccccagccctgcctggcgtgctgtgtgaccttggcccagggcttgcctcctctgggccactttacggtggcaaccagaccagctgtccccttctccatagtggatcgtcatctcagaacctgccgcagtcagcctagccagagagaccaggtccaggaattggaggttctgcccaaggcttgggtcacagattggggccccactcatagggattggaggccaagaggcaaatccacgcagcctgagcatctatggggtccccagagacacgccctagagcctgggtcctctctgtgcgtcctccactttcatgctcccaacagtcccgtgggttgggcctgggactgcactgttcacacctgagaaatccaagcttcagttggaggctgtgacatggccaaggtcacacagggacaaagagaagccagtgacctggacacaactagaataaagtgtgaacatcccagccctctgatcgggggcaggcaccatgaaagagatctttgagtctggccccatagaaatcagtctgtcacttagaagctatgtggttttttgttttttgtttgttgtttttttttttgagacagagttttgctcttgttgcccaggctggagtgcaatggcgtgatctcggctcactgcgatgtccacctcctgggttcaagtgattctcctgcctgagcctcctacatagctgggactacaggcgcctgccaccacgcccagctaatttttttttttttttgtatttttagtagatacggggattcactatgttggctaggctggtctcaaactcctgacctcagatgacccacctgcctcggccttgcaaagtgctgggattataggcatgagccaccgcacctggctggaactatgtggttttaggccagtggcttcacctgtccatgccttggtttcctcatctgtagaatggagctaatggtggtaccggccttgtagaattgtcattgccattgtatgacacttagataaagcacttggcgtgtagtgggggttcagtaaatacccttatcctatttatttatttgtttattttttttgagacagggtctccctctgtcactcaggctggagtgcagtggcgcgatctcagctcactgcaccctccacctccccagcttaagtgatcctcccacctcagcctcctgagtagctgggagcgtaggcacaggccaccccatcaggctaatttttgtattttttgtagatatggggtttcgccatgttgcccaggctggtcataaacccttgtcctctttagagcggagaaactgagggccctggggatgtctggttgggtggggatgggattgaccaggagaaaggcctggctc

SEQ ID NO: 545 - DNA, 2300 bp, Homo sapien
ccccgcacccgcccagcttttccagcttagtgagctttttcagaggctcttgtgaaaccacagatgcctagcaccatccctaccccggcctgaggagttgatccagccagtctggggagggccctggcatctgcatatgtaaaaggtgctccaggtggtctgggaccgtagatgaaccctgacagaggctgtccaagggtggggctggtgagctctacccgctctggagccccagaacatccactggctgcctgccctgctaaggccacagctctacagcacaggaggaaggagtgaaaagaatgtctgtggccgggcgcagtggctcagcctgtcagcccagcactcagggaggcaaggcgggtggatcacctgaggtcggcagtttgagaccaccctgaccagcatggtgaaaccccgtctctactgaaaatacaaaacttagctgggcgcctgtaatcccagctactcgggaggctgaggcaggataatcgcttgaacctgggaggcagaggttgtagtgagccgagatcatgccattgtattccagactgggcgacagagcaagacttcatctcaaaaaaaaaagaatatctgcaatagaaccacctgataccattccccaagtctcagtttacccatctgtaaagataggcctgcagggctgaccgtttattagtccagacttgactttgcatctcctcactgccagacctgggctgggcacgggcatggaatgaagataagcatccctgacccctgccctcagggtggggactggatgaggatagaaaagtgagacccagagctccaaggaagctaatggctggatgcacgagcaccatgggggcttggggcactgtccaggccccattctccaattctgggccatacccagcagaaagaccgacacacgcaaggaaacaagacactactggccaagcacggtggctcatgcctgtaatcccagcactttgggaggccaaagtgggcagatcacttgaggtcaggagttcgagaccagcctggccaacatggtgaaaccccatctctactaaaaatacaaaaattagctgggcatggtggtgcatgcctataatcccagctactcgggaggctgaggcaggagaatcgcttgaacctgggaggcaaaggttgcagtgagctgagatcaagtgactgcactccagcctgggtgacagagtgacactccgtctcaaaaaaaaaaaaaagatacggtaagtaagaaccgacggaaagaagagccagataaaggacacaggaagacatgagctttgggctctgtcagaccaggtgcttactgttttgtgttttgttttgtttagttttttgagatggagtctcactctgttgctcaggcaggggtgcagtggtgtgatcttgcctcactgcaacctctacctcccaggttcaagtgattcccctgcctcagcctcctgagtagctgagattacaggcacgcgctgccacgcccggctaattttttttatttttagtagagatgggtttcaccatgttagccaggttgatctcgaacttctaacctcaggtgatccacccgcctcggcctcccaaagtgctgggattacaggcgtgagccaccgcgcccaggctgatgtttattgtttttaaggaagcaagaggagaaggtgcctccccaaatgacctttctcttttctgtccacagacagcagccctctcgtgggcagcacgcccaccggttatgggaccctgacgatagggacatcaatagatcccctcagctcctcagtttcatccgtggtaagtgggcagagtggggtggggaaaagctgcagggggtgaatgcccaggcccacccagacaccccaacttcctactccagccccgttcccaccccgacctgggccctctctcgctgcgttcgcagaggctcagcggctactgtggcagtccatggagggtcatcggctatcacgtcgtggtctggatgatggctgggatccctttgctgctcttccgttggaagcccctgtggggggtgcggctgcggctccggccctgcaacctggcccacgccgaaacactcgttatcgaaataagagacaaagaggtgagagtcaggctgagcctggggctagagaagcgcagtgagggtcagggtcgggggtggaggatgcttgggtgccaacccggccactgactttccatgggacattaggcaggtcccgctcttctctggacctcagctttcccatctgagcattgggcagaagggacgggtcgggtggtttctggag

SEQ ID NO: 546 - DNA, 2300 bp, Homo sapien
cacatgctctgtggtttggaaggaagcttcctctggcctcctccctcattaaggagaagggacgagctgcaggtgcggctccttcccagctggctcagggaatagagcccctttaaggccaggcagccttagcaataaaaagaatgaagggggcacccttgcaaggcagtcccccatgcagtccccaagccctctgcttttatttatttatttatttatttatttatttatttatttattttagagggagtctcagtctttcacccagactggagtacctctgcttttatgaagccgctaatccagtgccaggatctaaagcaagcagctggcttctaccaagttcctgccatctcatttcatcctctccatgccttccattttgtaggtgaggggaaggagagccttagagaaggaaagtgacattttaaagctcacacagctagaaagcaactcatgcatccatgtctttctgatgccagaacccagccccttgccactgtaccatactgcctcttgccaaggccacctgggctagccatttccaaacccagccttcctgctgccctggaggctgggttcctgccagaaattgagctaagccctgggggaggacatgggagttctgaaaagttaagcagcctgcctcccctggaagtgtcaccggaagatgaaagaactcttgtcacctgacccaaggaagccagtcccatggcccaggtggtcaacaggaatgacccgcaactggttggctcgggcagcctgccccagctgagtaaatggctccactggcacccagctgctcaggccaaaaccctggggagcatcttgaattccacacattcctgcacccccacatcctatccaccagcaagtcctgccaacgtgtgttcctgtaccaaatgttcactgggatcttgctatgaatcaggtgctgctttccctcctggggtctatcccctacccacaccctcaccaccatcacagctgtgtctccttccagccccttccacaatagggatcgttggagttttcctttccttgactagggctacttcccagtagacagcagtctccgcagggacaggggcatctctgttttgttcactctcacgttcctggctcccacagtggtgctggcactccataaattcatactggacaaatgaccagtgatcctgcccacgtctatccttggccctaacgtgaaccttcccttgtttgccctaggatctcacagatccactctcccctttggagctcctctgtccagaggtcctggagacagggaacactatgcctgtgccggtcactatggggtagcaggataaatgctgcacgcaggtaagacatctctggtgcctttcaggggtcttcatgaatccccccagtgcaggtgtgtctgcaggtcacgctgtgaggcttctctttctctggcatttcaaggcctccagtgcatcatggcagactctccctgggtctctgtgggcccacatctgaccctgtgaatctctgggcaggtgtgtcttccttctttgcattcatcaagcagcgccaggcactgtctcaagtgcttgatacgcattttcttttttttttttttttgagacagagtttcgctctttttgcccatgctggagtgcaatggcatgatcccggctcacagcaacctccgcctcctgggttcaagcgattctcctggcttagtctccgagtagctgggattacaggcatgcgccaccacgcccagttgacaagcattttcttgtgtgatcctcgcagcagttctctgtgaagcaggcattgctatcctacaggttgggaaaagagggccagagaggatcagtgacttgctcacggtcgcgcggcctggaagacatggagagctggaccagcacgcacagtccctaaccactgggacgtgctggcgggggctacctccgtgaggtgtgtgtctccggtcgccccgcccccggtgtgtgcggaggagcaggcggggactacaagtcccggcagccccggcgcgggcgctgcgagggccgcagagggccgggcggggcttgcggcgcgcacggagggactgcggcagtgtcggagccgcgccgagcctggtggcccaggtgccccgcccgcgtcagccctgctccagccccgcgctagcccagcgcccctcgccccgggccgtccggaccgcgcccccgcccagggccttgcgcacgccggggcccaggccgagggccgcagcgccggggccggcgatgagcgcgaggagccggcatgagcgcaggtgagtgcggagt

SEQ ID NO: 547 - DNA, 2300 bp, Homo sapien
tcaaagatggggaggggcttatccaaggtcacatggccttgaagagaatattccaggttagacctagaggttcaggcctcactacacaccccctttaatgaggccacactggcggtatagcggggttccagtcaaggactccagaaacagcccatccagccaattgacctggccatctcaatgtctccagtagcatccacatcagctgtgagagtggaaaccaaagactatagaaaggcgcccttcacatgtccaaaacaagcagacagaaaggggaaaaaaaaatcactcctacgaaaccccgggacctgcaaggttaacaatctacacaaacgcgtggagtgactgaagaggcaggtgccttggaggctccaggccactcctgcccaaggtaagtcccaagagtgaggccagctctgagcagatccatggagggggctggaaaaagaagctgagatgtctaaaatggaaactcagtaaaaaacaaaaccaaaaaactttcttcacagaactgctgtggggattaagtgggataatggaccataatgtttggcacagagtagaaatggtttcttatattaaatggctaacaaagccaccaaggactgggtgtccttctctgggcacaccctctcgtacagaacagagctcacagtgtctagctgtctgctcacttgccgtctccaccactagagagtaaattcaatgagcagtgaccacctggcttgctcattccctgcagcatcccagcacttggtgcctgccacatagtagccactccattcgtatttatgaatgaatgaatgaacgaacaaaagaatggcacctttgccagccacccttgaaatcacctcagctcattcaccaactgcccagtttgtttgggactctcagtgcagaaacctgggcagcctcgggcaagctgcacggtatgcgacagaaagggctgactcaagccagtaagcgtcagagatgaataataagactgacaaattcttagggaggctaggtgtggtggctcacgcctgtaatcccagcactttgggaagttggagcaggatgattgcttgagcccagcctgggcaacatagccagactccatctctacaaataattttttaaaaaaattatccgggtggccgggcgcggtggctcatgcctgtaattccagtactttgggaggccgaggtgggtggctcacgaggtcaggagttcaagaccagcctggccaagatggtgaaaccccatctctactaaaaacacaaaaaaattagccgggcatgatggcggacgcctataatcccagctactcgggaggctgaggcagggaattgcttgaacccgggaggcggaggttgcagtcagccgagatcgcgccactgcactccagcctgggagacagagcgatactccatctcaaaaaaaagaaaaaaaaaaaaactacccgggtatggtggctcacacgcctgtagtcccagctactctggaggtgggaggatcgcttgagcctgggaagtcgaggctgcagtgagccaagactgcacaccggcctgggcaacagagtgagaccctgtctgaaaaaaaaaaaaaaaattggccgggcgcagtggctcatgcctgtaattccagcactttgggaggccaaggtgggcggatcacgaggtcaggagttcaagaccagtctggccaagatgatgaaaccccgtctctactaaaaatacaaaaaattagccgggtgtgatggtgtgcgcctgtaatcccagctactcgggaggctgaggcaggagaatcgcgtgaacccgggaggcggaggttgcagtgagccaagatcgcgccattgcactccagcccgggaaacagtgcgagactccatctcaaacaaacaaacaaaaattccaggaataaagaggttgaaatcggggcagggacccggataggatggctccgccccatctaagtcttagccccaccccctgaaagtcgccctgcctctcagactcctcccctttctgagaaggtcacgggggaagccaaatgggcatgcgccgctactgcgctattgcgcacgctcgctgtgcttgccccgccttccctccgcccacccgggaaaccggaagccgcctcccacttggttgctcgtacgcggctagtgggtcctcagtggatgtaggctgggcgccgcgatgttcgacgggacaccggcggagagcgacctcggggttaaggggtggggctgacgtcaggagccaagatggcggcggtggtcgccctctccttgaggcgccggttgccggccacaa

SEQ ID NO: 548 - DNA, 2300 bp, Homo sapien
cgaggagctcaggggcggcccttaaagacaaatatttattgagaaactactctgtgccaggcactattctaggctctggggatacagcggtgaccagaacagatgaagtcccagctctccgggagtttatagttgggtaagggcagtacagaaaataaacatggaatcaagtaaatcaattagataattctgaatgctgatacatgcaatggagaagataaaacagggtgacatgataaaacattcctggggacaggggtgccttagctgttgtttttttgaagatgtgactagagttgaggcttggatgttaagaagtaggcagccatcaggagattgtaaaggaagcgcattccatacagaaggaacagcaaagggaaaagccccaagggatagcaagtgtagcaggtggctggagcagacagaaccgggggaagggagggaagcgagggaggagggctggccaggagccagatcagaaaggaatttgttggccaccctaaggagctagggttatcttcggaggataatggagagattgcagaccttggggggtctagaaatgaggaagggctggccgggagcggtggctcacacctgtaatcccagcactttggaaagctgaggtgggcagatcacgaagtcaagagatcgagaccatcctggccgacatggtaaaaccccatctctactaaaaatgcaaaaaaattagctgggcggggtggtgggcacctgtagtcccagctacttgggaggctgaggaaggaggatcgcttgaaccagggagggagatattgcagtgagctgagatcatgccactgcactggtgacagagttagactctgtctcaaaatacaaaaaacaaacacacacaaaaaaagaaatgaggaagggcttcctggaggaggtttctcttgaactgattaaagattaaagtaagtccaggcacagtggctcacacctgtaatcccagcagtttgggaggccaaggagggcggatcatgaggtcaggagttcaagaccagcttggccaacatggtgaaaccctgtctctactaaaaatgcaaaaattagccgggcgtggtggcacacgcctgtagtcccagctactcaggatgctgaggcaggagaattgcttgaacccgggaggcagaggttgcagtgaaccaagatcatgccactctactccagcctgggcaacatagcaagactccatctcgggggaaaaaaaaaagattaaagtaagtagaagttaatgtagcaaagaggcacatggatgagggcagattttggagccctcctgtgccctagccccgtccagcaggccaggtgggactcccgcacacaaaaggtagcctctgcacactcactggcaccctcaagggctgaagcctgggctccctgcccttcacacaggccgcagctgcaactcacacctactctttcccctgggactcaaacgccttactgcctgcgccagggtctcttaacccaacctagtctccttcctgggacttctctgctgatgtcactctgggtccgaggtgggtcccagagaccaaactcctcttgcaggccctctggtgcggtgggtaatttgctgaaactcctcttcctcccttctccaggtctggtggtcggaggatgaccaaggtggtgcgtgacttcctgaaggcccagcaggtgcaggcgcccgtggagctctactcagactggctgactgtgggccacgtggatgagttcatgtcctttgtccccatccccggcacaaaggtaagctagcctcccgaggctggagtgaatggggtagcagcaaaccaatatattacccgcccctgccagcagagggcaagagctagaggaactcgacagcataaaggaaggaggaagtaggctgaagctggtttgcatgttgttgctgtggcaggtaaaattttaaccccataaatccaaaatgttagcattgcaacacataatcagcctaaaaattattaacgagagatttaaattcttttctcatactaaatcttcaaaatctggcaaagattttactcacatgacacacctaaattcagactagccacagctcaagtgttcaatagtcacataaggctagtggctattgtgttggtggtaatgctctagagagaaataggttatgcacctgtggcactggaaagaggttctttcattttcttatgggtacaacttcataccctggaaattctctgcaaattgtgtggctgcttggcaacttggagatgtcctgtccaagtccacctttgactctgagccttgat

SEQ ID NO: 549 - DNA, 2300 bp, Homo sapien
gcaccctcaagctccctgggaagtggaaaaggcaaagctaacaggataggggacggggatggggcttcttatggcacccatgcccagggcagcctgacccccaggatctctcaggcacccgcagagactcaaaaggcagaccacggcaagcaaggcaagccgtgcaacagtcccaccacccccgcacctccccaccaaggatggggtccatttcctatatcttttgaaagccagccccacaaaggaaccctggaatcagacctcactttcccttgggttccaggcaagctgcttgaccattccttaaaacaaaacagtctggacatagcaaaactgacccaaaacaacgcgaaaatgcccacatacagaaaacggcaaggtgccaagggcaaaaacagaggaaggtggggggctggctcagctgttgcgtggggcgatttcaggaagagaagtttgatgggacaagataggacagtggttaagagtgtgacctcagcagctgactgcctgggtgtaaagcctaccatgtggtcaagcacacgggtggctctaccacttaccaaccatgtgaccttgggcggttaacagccctgtgactcggtttccccatctgaaaagtgaggatcatagcagtatctacctcctgcggtggtcggaaggcagaaaagaattggcacatgtgaaagtacttagcacaggcttggtgcatagcaagtcctgaggaaatgtattcactgtcatcagtttcacccgctttgaaaggcaggcaaagaaagcacctgacaaaaccttttgatcccccacgccttgtctcccacacccaggacattcccctgactcccatcttcacggacaccgtgatattccggattgctccgtggatcatgacccccaacatcctgcctcccgtgtcggtgtttgtgtgctggtaaggggtgaccccagcctggagaggcagcgtggcagagtggccaagggccgagtcagatggacatgagtctagttcctggccccgtcacttaccactgtgttaccttgagcaactctcttggcctctctgaaatgcccacatcgtagagtcactgtgagaattaaatgagatgaagcaggcaaagcatttatccaaggcccagcacacagggtatgctctaaaaataatagctgccattctgttctcttgcttaaccctctaccaggcagttagcaacctcctatgcagtggaaatgcagctcatctgactcattcattaaacagacttttattgaccacctattatgagctaggtccacaacagcaagatgagaaccaagggaaaaagtgcctgtgattagatggctagcaacccaaaagggacccttggggtcctcacgtccatcccatcttcatgccaggcagagctcttctttgaaaatctgtggagtcagaggtgtaaggcattgggacaggtgggggtgagagttccccccctcattttatttgttcatgaccttgacaaacgccacatgagtgggtgggtttacttggcctttgattccagcggcctttataaaggtggccgtgagcacaggtgtagactgatctgcccggcacagcccagagataccagctgctgtcaccatctcagggagatgactctggcccctcctcaccctttctcctggcctctccttcttcccccaacttctcagcatgaaggataattacctgttcctgaaagaggtgaagaaccttgtggagaaaaccaactgtgagctgaaggtctgcttccagtacctaaaccgaggcgatcgctggatccaggtaaggagcccaggtccaggctgggaaggacatggcccccgggtcaagcaaagaagagttggcttcatgtgaactgcctggcacccagcagctctgcagatggggattcttctgtcagctcatatctgcacatgtgcacaaagacataaacatacaagtgcactacagtgctgcttcttgtagtagcaaaagattgcaaagcaacctaaatgtccatctgtggaggactgagtaacggccttcccggaagttctgtgcaaccgctaaaaaggatgaagccagtctctcaatatggatacaggatgtgcttcaagttaagttgttactcaacggaaaacatattcaggatgctgcttgctatttgtgtgttttgttttgtttgagacgaggtctcgctctgtcacccaggctggagtgcagtggcatgatctcagctcactgcaacctccgccttgcgggcttaagcaatcctcccacctcagcctcccaagtagctggg

SEQ ID NO: 550 - DNA, 2300 bp, Homo sapien
tctaatacatgaaaagagccgcttggaacagtgcctgacccacagaaagaaagcagtaagtgcccgctcttactccagctcccctgggtattgcggtctgatgttatcactatcttgcccagtgtcctgttatgagctgcccggggtctccgtcagtggggggtacagtgtcctcccccactctggccccagtctccccatgagtcaaatgaaagttagagccccaggaaggtgagaaccctggtgggtgcccgttatctgtcacacagtaagggctccaaagtcactcgtggcagaggggtgcccagacacgagctcacctctgggggcgcctcgaagtctctccaagctacacaagttttgtcccagtttggcaggtggccacccgagagattcctcctgattggaggatgtgctcagccgggtgcctggagttcatcagaagttactggcctcggccgggcgctgtggctcacgcctgtaatcctagcactttgggaggccgaggcaggtagatcacctgagatcaggagttcaaaaccagcctggccaacatggagaaaccccgtctctactaaaaatacaaaattagctgggtgtggtggtgcctgcctgtaatcccagctacttgggaggctgaggcaggagaatcaattaaacctgggaggcggaggttgcaatgagctgagatggcgccattgtactccagcctgggtaacaagaggaaaactctgtctcaaaaaaaaaaaaaaaaaacagttactggcctctccctgggtctgtgagctgtgcctttgggggacaaatgacctcctggctaaaactcgggccttccctcttccccactcacattcctcccaaatccctgccactcagaagcagctgggctcttcaccacctcctaatttgggccgcctcagggagaaggttggagtccaagggctgggtatatcagcactgggcacttgtgggcctcacccctcttgtctgggggcacccgttcctggagctccatcttccatcagctctaactccttcccaaacacacatcccctccgccccactccttccctcccacggcctctgcccaccccccctcagtttctgtcctcacctaccaaagaccacttcctcacacagggctgatgtatgtgtctgaacagcactcccactgggtcccaggggaagggctgggacatgggaggggctggccgaggcccacactgattgtcatcctacatctcagcctctgtgagacacacgatgacctctgggtggcaccccccttcccttggtggcccaggccagaaccggggccctaatccttacccctctcctctccctccacccacacatcctatcagtcaccaggtgccaccaaaatcccagtccctaagcagtggccgggtcagtccccacctctccagctctggccacagccaggggcttccttgcccctccccagcccagaatgacccatttcacgagcacacccgaccacggctcgcggagacaaccactccaggctcccatctcccaccctccaatgccttggcttggcgtcctggtctccctcagctgccgggttccccatccccaccgcttcccgttttctctatggtgaggttcatctgactgttgggggatgggggtaccgggctgcacccggctttgcacaggcagctccctctcctcgcctttaatttgcaaacgcctcctttaagaaggttccaggatcgtcttctctgggaaggcttcctggcccccaggctgggttagggcaccctctttgtgttcccacatttgcattttcagccccactgggctggggcgtccggaggggagctagggccctccaacacctgggcgcccaccgaaggtttgtcgaatgaaagaatgacaatccaaccatggaaagcacaaaactggtccctgatgacttcgccacgacctcagcggggcgggacgagttaggggcgggaccacgcttgacggacaggcccgcagcccactgcgagaggactggggcgggccgccccgcccaccggccgctggataaggctgcgcgcggggccgtggggcgcaggctgctggagaaggcgcacctgctgcaggtgctcccggccgccccggaccagcgagcgcgggcactgcggcggggaggatgctgcgcgagcggaccgtgcggctgcagtacgggagccgcgtggaggcggtgtacgtgctgggcacctacctctggaccgatgtctacaggtgagccggcccaccgtgatgcccgggccgagatctcgagccca

SEQ ID NO: 551 - DNA, 2300 bp, Homo sapien
ttgagctcacgagttcaagaccagcccgggcaacatacagaaatcctgtctctactaaaaatacaaaaattagccaggtgtggtagtgcacatctgtagtcccagctactcaggaggctgaggttggaaggatggcttgagcctaggaggtagaggttgcagtgagccgagatcgtaccactgagctccagcctgggcaatagagccagaccttatctcataaataacataaaatataaaataaaataaaaatcttgtagtgaatgctgtttctggaaggtttttgactctaaaccccaccagttgtacatgtggttacctgacaatggcttttctggtttctatcctggtttgggcgtgttttcactgtacggaaaaaaatgtttaattgcttattgaagttcctatacacaaagtacataaattttaagtgtatagcccaatgtatgtttacatataattacagcagtgtaatcaccactcagatcaagatacagaacatttccaacaccccagaaggcttcttcatgcctgctgctagtcaatgctgcctcctctaaatgtaattacttttctgatctctatcaccacaggttagctttgcctgttcttgaacttcatataaatggaatcacgcagtatttagtcttttgtgtctggattctcttgcacatcaatatgtctgtgaggtttattcttgttgtcacatggaactgtgatatgttctttttcattgttgtatagtatttcatttaatgaagatactacaatgtatgtatccctctctctattgatggacatgtgggttatttccaatttgtggttattgaaagtaaagttgctatgaatgtccttgtacatatcttttggtgggaaatggtctcattcttctacagtgtctaggagtggaattgctgggtcataggcgtattagtctgtttttgcattgctataaagaactacttgagactgggtaatttatgaaggaaagaggtttaattgactcacagttctgcatggctgtggaggtctcaagaaacttgcaatcatggtggaagaagaagtcagcatcttcttcacaagtcagcaggagagagagacagcacaggggaaactgccacttttaaaccatcagatctcatgagaactccctcactatcacgagaacagcatgggggaaaccacccccatgatccaatcacctcccaccaggttcttcccttgacacgtggggattacaatttgatgtgagatttgggtggggacacatatcacagggaaagtatgtattgtgctccaagtctaatagatactgccaacagttttccaatgtgatcctaccaatttccattctcacagggagtgtctgagagttctatttgttccacatccacatcgccaacacttggtattgtgaggctttttaaccttggctatcctggtggtggagtcttctttttgttttcatttgcatttccctggtgactaaagaagttgagcatcttttcctctgtttattggcctcttggtatcttttatgtttttaagtgaagtgcctgttcaattttttttttcttttttgggggaatagagtctcactttctcacctaggctgggatgcagtggcgcaatcttgactcactgcaacctctgcctcccaggttcaagcaattctcctgcctcagcctgctgagtacctgggactataggcgtgcaccaccacacctggctaattgttttacttttagtagagacggggttttgccatgttggccaggctagtcttgagttcctgacttcaggttatccacccaccttggcctcccaaagtgctgagattacagacgtgagccaccaagcccggcgaattttttttgctcgttaaaaaaatcaggaggtctgcctttttcatatttatttgtaggtgttcttataaattctggatgcgagctctttgtcagatgtaaggattgtgagttacctcctctattagcaaatttaacttgcttattcatcaactcattccaagagcaccaataaggaatgggccaggccctgtgctgggtgctgggttatcagaatgagtatgatgtggccctcattcttgaagacagctcgaccgtgatggaggagacaggcatttagaataagcatgaaataaaggtggctgttaaggggtcagctcccctcaccaaagtcacttttgatttacttacaaaagttttcttaagatttcttcagaacccaggtaaggtgaaaagcaagggtttccctatgcttattttctgggctgggttttt

SEQ ID NO: 552 - DNA, 2300 bp, Homo sapien
tatcgttcacctatccatctgtctgtccatccatccatccacccacacatccatccatccatccacccacacatccatccatccatccatccatccatttaatcttctctaatgggaacacacccatgtgctctgcaggaaactgcttgttccactctgcattccattccataagaaatggacacgtttatgtcaataaatgctgttaaacaaaatgactgaggtcctggtaaattgaggtttggggtttgggtgatggaaaaccatccctgaacacctgtttccctgggttctgtatccatggggtaaaattagactttgtcttggtgacttcaggtgtaatgaactttgcagatcaataacatttgcaataagaaagatggtttcaaaaatatcttcaaaatcaaaagtaaccaaataaatgtttatgccattttactatttcctgcctccctaatcaggctggggttcctgcagccagggactgtgtgtcccccacatcttccatcagactgacaactcctcaggcaaggctgtttctctctctctctctctctctctttcttgctctttgctgccctgccaccccagccctgtggacactagagttctggtttatgtgccccttttcccactctgtataagagccccctggaagaagaggaccacattactgaggatgggtgtcctgcgattccagagcaaacggctcttctcatcacccccaatgcccgatatgaagggaacacgtcacctgcaattcaccacctctaccccaagctctaacagacatctcatgtcgaacaagtccaacagagaatggccaagctccctgcccagcttgccctcctgcagccttccctatctctctgatgacaactccatccttctagttgctcgggtcccaaatactccagtgatcgttgaccactctctctcacacccacatccaactcatcagcaaacctcatcggctctaccttcaagatacattcaggatccaaccacttcccaccaccttccctgttaccctgggaccaagccatgccatccctcgcttagataatgggaagaaccttaatgcaccatctgatgtcatacacactttactcatttaacttcacctacggtctgtctcccccagaatataaatgtcgtcagagcaggaatcatggtctcttttgttcatagttgtatccctatcacctaaatgagtgcctgacacataaaagatgattaacaaacacttgtcaaattaacaaatgaagttctacaaagagcctcagaacaggctgaagcttgctgtgctgagctgaaagaagagggattttcagaaatgagtccacgctcccaggtcattgctctgagctctttttcaagttccctcctctctggctccccaagaatgcttgcctggggtggcttctgctgtctgtggagtctgggcacaagggcctaccctcacctgttggggggtggtattgtgtggcgagacgggtgaacctgcgtggaagttataactctaccacttactagcagtgagacctgcagccatggttctcttacctgcaaaatgaggataaaagtcataattgttagtgttttagtgaacacaggtgccaggagctgtgctaatcttcttacacataactcatgtctttcccacatcaacacaatgggacaggtactactgttacagctgccaacttacacatgaggcagctgagtcacagagaggttaaaaggtttgataaggatcacaggtggttataggcagagcccgcacatagtcagcccacagaaacactgacatcattgtaataggggttcaggcaccaggagtctttggaggggagggcagaggctgctggggagctctggagggtctcctgtcagcaggtgagtcctgcttcgcccggggcccccagttgaagctccccttccccatctcccagacaggccttgggcacctcctcccctgacctcctggattgacagccctgagtgaggagggtgtggagccaggaggtggggaccaggctcagccaggctaatcaggtcgcagggtgaaatttaaagggaggaggaggcaccagtccatcagaactcacacttcttcctggcaaagaagtgcccaggacgggagctggggagccagggctgatctaggaggctgggagccaggtgacaggatggccccaaagagagttgtgcagctgtccctgaagatgcctacccatgccgtgtgtgtggtgggagtcgaggcacatgtggacattcacaggtaagagctgggaggc

SEQ ID NO: 553 - DNA, 2300 bp, Homo sapien
atctggaaccagctcaaccctgtgccccgagtaagctctggattgggacattttctgggtcagggcaccctgacacgctcatcctcacacttccagggtatttgtgcttggacccaaatcccttatccaatagtcaggaatgatattgataataattggtaatatttattgagcacctactatgtgccagatactcacatgttttaattcatttaatcctccaacaagcccgtcaagtgggtgcaattattattgtcccattttacaagcgaggaaattgaggctcagaagggcaattaacccatccaagctcacccagcctgcaggtgtcaggataggattcaaatccgggttctgggcctctacagtaagccttgcagaggtggcttgggaaggcatggccagggagccagcagcctgggagaggaggcttcccagtgaccagtggttacagctctgctagggacagctctgacagtgaaggaggagacatctgaattgggtattttgtttgttttttgtttgtttgtttttcgagacagaatcttgctctgttgcccaggctggagtgcaatagcgcgatcttggctcactacaaccttcacctgctgggttcaagcgattctcctgcctcagcctcccaagtagctgggattacaccaccatgcccagctaattttttgtattttaagtagagacagggtttcaccatgttggccaggctggtctcaaactcctgactgcaggtgatctgcccaccttggcctcccaaagtgctgggattacaggcgtgagccacgacacccagccctgaattgggccttgaaggaagaaatcagaatgccctggtgggcaaaatgcgaagggcgtccagggagggagaacagcacagacaaagttctggaggtgggaacctgcttggaggactgggagagttgcagacagtgctttgtggctggggtgtagaccgagtgggagaggggagtcccaagaactgtcaggcccctcctgagtcctgagtctggggtctcctgtgtctaaggggaccctgtccactgagccattctccctccctccgtgccagggcttccggctgctcctggctagccccagcgcttgcctcaaactcttccaagagaagaaagaagagggttatggggaggcagcccagtttgatggtgagtgccaatgacccggtcacccctgggggaccctgccctttcatcaccatccttgggtacagcccctgcacctgcagatctctcagctggactcagaacccaacacccactctctgtttcttgggtccccaggtcctctgatgggtgggggagttcctgggccacaccccaggagaggaaaggcacaggaagtcatgagtgccccaggtgccggtcaatgccaggcatgttcttgttctcactcccctttgatctctctcccctcttccttatccctgttcacagaagtggaaactgaggctcagaaaggtgaattggcttggacagggctatgcagccagggagcagcagggctggggccttgagagaggaaggaggagaagccaggcttggtcagggcccctctgcagagcttcctgcaggagctaacagaccctccaagggcttggttggcccatctcccctccttatcacagcctcagtgttctcatctggggaatacctggggaatagagcattggaatggatgtggtgcagacatccacaaggatagccctgagttcaaatcctgatcttggcatttgctggctgtggtatcaagggtgtgttctgaacctctcagtgcctcagtttcctcttctctgagttgtagatgataattaatccctcctatagttgctttaaatattaataatacattaagtaggatgcccagagcatggcagacattcaataatggtagctgtgccataattattaggctccaagtccagagtcacttcctgaggggttccttatccatcaccaggttttccttgcagccatggcttggtcccttcaggggttctcagtctctggctttctctgtcctggcttctgaccctggcactgaggtaggagggaaatcctggcctggattatgtagccccaggctgaagacggcctccaggcagtgctccctgagctatgtactgtctttctcttcttgcagggttaaaacaccaggcaaaaagaagcattaatgagatgctggcagacagacacctccagagagacaatcttcatgcacaggtgagaggcaggaccaccagctgctctaaggggtcctttcccttccag

SEQ ID NO: 554 - DNA, 2300 bp, Homo sapien
agaggagaagtgaaggcatgagtctccttccaaagacatatacagttctccgagaaagaggcaggtagtgggccagcaccccagggaaagcccctactttctgcatctattccccatctgtgctcacaagaaggctagggagactaaggcttcctcctgagctcgaactcttacccagggctcccaaggctgactcagccatcaagccattccacagctgaaaaaagtgaagctgtcccttgacccagaagcccagcagttctccttgaaaagaacatctttcccaaaaactgagacatgggaatgacaatctcagggtcctgttgaggcccttgaactggtgcagatgtcccagctggagatgctggggagcgggtcctggtccccatcctgtctcaggctgtcagcactgccagggagaagggaggaaacctctattcagcacctcctgagcctccgccaggcagggtgcgtcttcactattatctccgccagggccagtgattagctgcattttctacagatgaggaaaccgagtctccaagaggggggacactgacacccaaggccctatagtgggtgcacggtggagcctgcctctgaacccaagacttctctccccagagcccttgctcctgctcttccaggagcctgaatgcccctctgacttcggtttcccacctgacgactgagctttcctactctgacatgccaagctccccctggctggagagagttctcaccctcatcatttaccgctttcagaggtttttgggacctaataacagcaacaatagtaatacaataacgccaagctccataccagagctctaccaacgctggcccctgaggcctcacagcaaccatttttcagacgagaaaagtgaggcacgaacaattaagaaagttgcccggccgggcatggtggctcacgcctgtaatcccagtactttgggaggccaagtcgggtggatcaagaggtcaggagatcgagaccatcctgactaacacggtgaaaccccgcctctattaaaaatacaaaaaattagccgggagccgtggcaggcgcctgtagtcccagctactcgggaggctgaggcaggagaatggcgtgaacccgggaagtggagcttgcagtgagccgagatcacgccactgcactctagcctgggtgacagagcgaaactctgtctcaaaaaaaaaaaaaaaaagaaacttgcccaaggtcgcccatccaggaagcagctgaggcagggctgaaacccaggtctggctctaaaatccattaaaaaaaaaaagttggtgtttctcaaagggcaccaaaatgctttgggggtgcttattaaaaaatccagagggccgggtgctgtggctcatgcctgtaatcccagcactttgggaggccgaggtaggtggatcacctgaggtctggagttcaagaccagcctgaccaacatggaaaaaccccgtctctactaaaaatacaaaattagccggaagtggtggcacacgcctataatcccagctactcgggaggctgaggcaggagaattgcttgaacctgggaggcgaaggttgcggtgagccgagatcgcaccattgcattccagcctgggcaacaagagtgaaactccgtctcaaaaaaaaaaaaaaaaatccagaggccaggctgcacccctaacctgctggatcagagtggacaacagacctgggaatccgcattttcaccagcttccccagcagagtaagaaagctccccattatagtctctgaaaatgcagaaaatggaggtgaggaagcaagaagcgtccgagatcaatatcatatatctctgcaccccctcaacagcacctgcccccaacagttcctggtgcctagccaggtacctgtggggacttgcttcccaagaaattaacttcctgggtgccggggtcgggacaacaggttcgtatacaaatactgggtcccttccagccaatcctgagctctcagctctgggaaggggctgggctttcatgactggagccaatgaattggcaccctgggctggaggggtggggccaggggcttttaaacctcatcctaaggggcctcaggggcagtgttggggttggcggccacagctaagtccaacaccagcatgtcgctgcagagaatcgtgcgtgtgtccctggagcatcccaccagcgcggtgtgtgtggctggcgtggagaccctcgtggacatttatgggtaagagtcagaggcctagtggtttgcaggcccttggtgctgatgcccttggaccttcctccctgcag

SEQ ID NO: 555 - DNA, 2300 bp, Homo sapien
tgttcctggtagcctttaccctgtcctttttcctttttctaccccactaacatacgatagaatccacttactgcatttattgcttactggctgtctctctcccaacaaaaacaaacaaacaaaaaggctctatgaaggcaggatttttgtccactttgttcacagcgtatccacggtgcctggaacagtgcctggccatcaataggcactcagtcagtatttgttgaattaacaaaactgctttggggctcgtcctctttgtggctcgttcacagcaaatttaaaccccaaactgctgaagaaaataagaaagaaaagaaggaacagaagaaaacaacctcaagagacctaagacttggggtagaggccagccctccctctgatttgctgtgtgaccgtgggcaggtcccactccctttctgtgcttcagtctccccttctgcaaaacgaggactggattgggtgttctctaagggccctcccaactctaacaatggacagctccctcctgccacttcccagtagaagctcaaactagttctaatcatgcggtcagccagagaaattgggtttattaacactgtgtgcaggcagtcatgtagatgcgtcagaacgtcggacctggccacatcatcatctgctggtacagaagataaattttgagcccagagaaggtggtctgaatccagatccccactgtagggcttatgagaccttgggggtctcactcaatctctctaagtctttgtggtctcatctacacatgggcatcctgataggacgcactccatagggatgttgagatgaggcaggatttgaactaaagcctgtttgatcccacagcctgactctgaattaatgaggcaaattctttgcttcaaagccaaagcaagcaaacaaaaaacaaacgcaagatatccaacccacgaaacgctctatgttcacgccagactcccatgcatgcaccctttgagtgctccttgttgggacccatccaccaccccccagttgcctcattaaaggcagagcctggcaccaatggcccaggtgcaaccacagctctgaggccacatgggcatccccctggcaggcgtggcccacacctgcactgtctggtctgacacccagaggccctggcaagaggcaggtatcctggagcatgcagagaacatcaacttccatgccaggaagctcatcttctcttcccagctctgccgcattctagctctggcaccttgggcaagagctagtcacttttactctctgagcctcaattttccttctgtaaaatgggttgtaataataagcccatatacaccttgtattgtagcgagatgtagctgtgatacagtctggaaagcacgtgtcatatagacaggcagctaatgaatctcacactctggaactggacacctttggttccaattctggccctaccactctcgagctgtggaagaactgcacctctgttttctcctctgtaaaatgggtataataatggcaccaacctcagagggctgctgtgagggtgaaataaggggataatggtatgatctagttcacgggtttgtcgtaatgagctattctatgtgaagtgcaggaaaacgtgcctggcatagagaatgtgagctgtcatgtgggtggcccaggtggagagacttgtcccaagcctggttggtctttgaacgtgtagcctggcctgtgactgcttacctaaaatctccccgcttttcccaccttctcctctctgatatgcctgtttgacataggtgagattggatagatcaaggtgttcagggcctctaggcagggatgggactgtgggcatgaggaccaggacccaacccctcagccccactctccaccccaggctttctgagccatccatccttcccaagaaactgacagagccaccctgccactggtaccagcattgacacccatctagaggtccgaggggcagccccagggcagaggagattttgagagcccacacccctgacctgagtggggaggggttgagcctctgggccacagaccgcaggtgctgactcatggcctctgctgggcgatataaaggaaccagcccaggggcttcctacagccagagggacgagctagcccgacgatggcccaggggacattgatccgtgtgaccccagagcagcccacccatgccgtgtgtgtgctgggcaccttgactcagcttgacatctgcaggtaagaggggggccttctggggttttggaggcaggtcaggagatgctggatgacccagttctactgacacaggagcatgt

SEQ ID NO: 556 - DNA, 2300 bp, Homo sapien
ttagagcaaaggctgaaaacaaatgtttatattacagtacaaccctatgtaaaatacacagctgtacaaaggggtaaggctgctttttacgtactgatacaaagaacttctctccagtataactatgaagtgaaagaggcaaggtatggaatactgggtggcacatactaccgtttatataagaagacagtagtaggaggagagaagaaaagagcaaaagcgccccggacatagtaggtgttcagcaattctagtggagcaaatgactaaatgacctccttgtccttcctcaaaaaagataacccaatgggcttccaggggcatctccactgaactgaaaagtttgtaattgtaaccaagcagcttaactttgagcacattttacaacttttctctttagtctcgagatgtaacctcgaaggaacctgcagaagcctttttcccttaaccttaaaatagactccacgtccttccctttctcaccataaagccccttcaaatttatctaactgtatgctagtattggaggaggaagagaagaagaaaaggatacacacacatatttacttggtcatgcataacatttatttggaaagacatataagaaacgggtaacactgtcactacctccacctgcaggtgggtaaggcacagggcaggagggagactctgaacttggaatcatgtgactgtggtacctattcaggagtaagcatgacccagcctgggcaacataacaagaccccatctctgcggaaaaatgtaaaaccattagctgggcatggtggtgcacatctgtagtcccagctgctcaggaggctgaggtgggaagaccacttgagcctgggaggtcaaggctgtgaaccatgatcacgccacttcactccagcctgggtaacggagtgagaccctgtctcaaaaacaacaacaaaaaaaaactcaacccaagcttaagacatgaaatgaacacaattttaaagtcagttatgtaagttccttgtgccagagaagggttcctatttctttgctctgtgggctccgctgagatgagtagcagctgatgaccctggcttgatgtattcattccactaacacttgctgtgcccccacccccaccgacacagctgtaagcaaagagctcaccttaatcactgggggttgggatgcaggttcctggaccacaccctagaccttctgggcccaggaatttgcaatgttaacaagcacccttgataatttttgaaaccaccagagggttaataaccacctagtctaggcaggcgctgtggctcacgcctgtaatcccagcactttggcaggtcgagataggaggatttctgggatcaagaagttcgagactagcctgggcaacatggcaaaacccggtctctacaaaaaatacaaaaatcagctggacatggtggtgcacacctgtagtcccagctacttgggaggctgagatggatcactggagccaggtaggttgaggctgcagtgagctatgattgcgccactgcactctagcatgggtagagaccctgtctcaaaaacaaaaccaaaccaccagtccagcactttgccgagctccttcgtcaatttccaggagacacacaccctagaactgagaccccagagcctgggcatgctgccacacattgccatcctgactgctaccatcaactcctcccaactgccctctgcaggtatttgccccgacagcttccagctgagtcctccagcaacatggccaagttgatcactccaaggcaccgacttcccagagcccctcctcttcccagctgaaggccacagatgcctaagcaaccggcctcagactcccctggcctgcagctctgcaggcacgaggtgcctgataaattggtgatgaaggggttctgatgccacctgctccccagactatcagccaccaggaagctcttagagggaaaatcagtgacacctgggcagctgctgacccctccccttcttaacaagggggtggcctgcacaggcctggactgtataacagggaagggcagggtgagccctggggcgtctgaggctgctgtgctgagtgagggctgcggtgcaggcctgaggatggtcagcgtggagggccgagccatgtccttccagagtatcatccacctgtccctggacagccctgtccatgccgtttgtgtgttgggcacagaaatctgcttggatctcagcgggtgagatgctgggagctctgccagaggtggcaggcagacaggcaggcaggcctgggacccagtccccttgatctgggagttggg

SEQ ID NO: 557 - DNA, 2300 bp, Homo sapien
gggcactcgggatgggttccagttcttctgttagcctctgtccacggcactgtcctctgcagccggccggcccattcctgcccgtgtcctcttccagatcattccaatcatagggtatgggctaaggctcattttatccccagcccttttggtgactcccggcctctgcctccagcggggcatattggcgtttgtccccaccctttgtcgctggtcctctggctagcttttagtccatatgactgcatttttattttgggctgtttgaaccgttttttgtgatttcatgagctgctgtaccaaagtccaaatatattaacatctgttgtcttccctgcacatggctaattttgtaattctgttgaaaaaagctaaagtgtgtctggcccaaatttatactttatagtctcttgatgacatgctgacattgccacagtttttgttttctcccggttggcatagatgtgtgtcccttcccccagagcacccctcctactttgtgttccaacactgaacacagccttttatgtcagtgttccaaacttaaaatacctcagttctgatctctcgctgagcttcacttgcgtggtggctctgaaagcgccctcagttctgaccctgtgggcagggacaatgtatgtcccgccatcaagacgtgtgatccccgagcagacagtgcagttggtgaggacagggttggaaggtgtcacaggcccactgctcgccactctagaaggcagggggcggcgtctggtgtgagtagagtaccacgggagggtggctgacgcattgctcatgtggggtctccatctgtggcccgctcaccctgtcctgccgcatctcagtccactgagacttgcacttgttgctctgtattcacatgcctttcacatgaacttgggcagctcccattggaagctggtgtatctgcctctcctgctcgagtgccagtgctggcccttcagcccgccgttctttaattagagcgagtcagaggctggtttcccttcgtcgcaattccttctgtagtcagaggctgctcctgcaagccttctccaggacagctggaactcatcttaatggctctgctgtctgcctttatcacaacctaagggtgaaaagttcattgctggagaaggttgcaaaaccccctagaattgccctgacttctcaccactgtaagatctccgtcagtttccccacgtcaggttacatgtgtggtttttctcttatcgggagggatccgagagtggccggttgaatttttgttttggaacttggtagtttgtgttgaaacctagatgcggtgtaggggctcccagccctccttttggcccacccaacttccacgtctgtttggagttgaatttggttctgcagaggacttgggggtaggggttggccctcaggcctgccttccgctggaattcacagatacagggccttggtcgcacctgcagcagtcctggaggtggggctgggcgtgttgtgttgagggtggatctgtgctttgtcaccagggttcctgtggctgagagtccttgaggggcgatccctaggggtgggattggcactgttatgtgagcaccatttacagggtagaaaaaggaagagaaatattgggcagacaccaaatggtcctcagtggatgcccagagcaccaaagtgattaaactctggtgagccaggtgtcaaaatggggtgctgtcttaaaatacatctcagagggtagggacggggtggttgtcttgcaggcactctaagtgggaacggcgtgtttctgcgagcatgcccgcctgtgcatggtgtccctaccacactgagcctctcatttccctttgtagcagagacgtgggaggtgtgcacgggtggtcccgctgctgccccagggaaggaggtccggggagctgcagcaggcgccattccagcgggcagagggccggggcgttctttgctctggatcttggctgttgggaatttggagggtaccttccagagacagatgggcatcatttgagagtgtgtttgtactcgccttctcctggtggtgccgcctggaccaccctctctcttttctactttctctcatgtgatctgcaggtcgaaatgagaaggggcagctgggacatggtgacaccaagagagtagaagcccctagactcatcgagggtcttagccacgaagtgattgtgtctgcagcatgtgggcggaaccacaccttggccttgacgggtaaggaggtggctgctggtgtctcctctcagtttggcaagaggccaggtggtctgccttggggatgg

SEQ ID NO: 558 - DNA, 2300 bp, Homo sapien
gtgtctctcaagatctcgaaatgtggagcgtcccgttcactccacctggcctggaatacttttcctgccccctttcatcgggtcttattcatcctttaagttgttcagcataactttccacctgaatgccttccctggccctggactaggataaatcccctcgccataatgttcctacacaggcatcactttgtaaagcttaccactgttgtaattacttgtttactgatctgtctttccgttaggctgtgcgttccactggggtggaaaccttgttcactggctctgcagccccgggcactgtgggtcttgcatgtaccgggggctcagtaaatatttggcaaaaaatgaaaaagttcccctcaaagccagcttccagtgcctccacggccctcaaattaattatgaattaattcactaatacagcaaacctttatgtgattcttccgtgtcacagcaccttgttacatactgaggacacatccacaggcaaataaaactcagcttctctctgcacaggaaaaaattattcaaattgtattcatctttcattccaatcactcaattagggcacgtcccttgttggctgctgcgtgagcgaagtaactattttccagcgagtgtcctcatgtgacctgtctagacgtgcccaggaaaaacaatccaacatcctcctaagccgcaaagaagtccctgacgcgcaggccgcactgcgtggaaggcccaaagcgcgctcgcgggcccgcgaaaggcgcaggagcagcggagccgaggcgggcggcgaggcgcgcggcgcgcggcgcaggctcgggtgggcagggcagggccaggccgggcggggcgggggcgccggcaacgggtccgccggccggcagggggcgcgcgcgccccgcgccccgcgcctcccgccccgccgcgcgctcgcttgccgcgcggccgcacatgtgtttctgttttgtgttgtagcatttgttctggaagctcgtatttacattttaagtgtatctggtgagtgggctggagccctcgtctgggccggaaaaaaaaaagccctccgatccgtcttttagttgcttctcttccttttttctctccggtttctcatcactccaaccaggtagggtctgaaaatcgacagtgatcagtttgtggggtctgggaaagtttttttttttttcctttttttaaagagaaaaggttaaaaaaaaacctgggggaggggggctgggtgattgaaggaataaaaagaggaaggaaggcggatccacgtggtttaatcggagacagacagagatcccattgttcaaaatcaattaaaaaaaaaaaaaaaagcagacaggggagagcgcagggacgccggggagctggcggcggccctggacactttgcagtcgaatcggagaccggccgggccgcacggccggcaagggggctgggagagagttgggcaccattaaagtttttatttttcgtgtctgtgcgagcaggtgtttggggctggggtccagctttcttcgggctcttcccccgtcgccgggggcagtccgccgtagggattcggctaactagagcccgaggtcggcacccctgagctggggccgaacgggggtccagggctgatgcggggtgggggagagcgttgcattaaatgccatgagtgggtttggggggagactgcggagacaaaagcagcaggtggggtagccggggagcaggggctcccttaccacccaggtgccaagggggaatcctggaagtgtcccgaagccttctttaatgaaaatctaggggactggaggctggttttactttccctttacttttggggggcgaggttgcaactgtgatgctttgtgggcaaacctaacttacggataggccgggggtctcaattctccctccaggggattgcctctggggctcccggctgccctgcgggattccccgaaggagccgcgccggggccagggaggggcgcgatttcctctcccaactcgccccctctccgcccaccctgcggccgccactttggggagggcagaggaggaagtggaggccgggtggctcgtctccgctcccctccccccgcgcagtttataacccgtccattgtgcgccgctgccccgtgtctccctccagccgcgaccatgcccaggaagaaggcggcggcggcggcctgggaggagccgagctcgggcaacggcactgcccgcgccgggcccaggaaacgcggcggcccggcgggcaggaagcgcgagcggcccgagcgctgcagtagcagcagcggcggcggcagcagc

SEQ ID NO: 559 - DNA, 2300 bp, Homo sapien
taagtggcagcatgacacgcctaactgatgaatgtctgttgcacacccaattccagccgggagagtcacgcaggctttccctgggagaatagtggtgtggaattgaggcatggagttgcaaaaattacttttgtcttctgacaagtagggccagttccagggtgttatacccaaagtgcttttctactgcagcataacctcaagaaaaaccagtttcaggagcaccacacctaggatcagatgatgcaatatgatattagcgtctcattgcatcagtgtgtctgaggcatgagtcttttaagctggcaaaaagcattataaaggggcaggagaaaaaaggaaaagacttgcagactgaaatctaaaggtactgtcagtggtgttcctaattggccacacagggtgtttagaggataaacacccagccacccgcctcggctgacaagcatcagcatgccatttcctgaaggggacttgatggcatatttaggcgaaattcttttctggttggttctacttatgctttatatcaaagcgtcaaagtttaacctctaaaaaatctttttaaatgcaggtctattaagaataggctttcaaagggtgcttctattccatcttgacttttctgaaaatctctgaaacgtaccagttgatttctcatttccaaagttcttttacataagcactctcagctctcttgacacacagacttttgactttgatcaaataccttagatttgggcctcttggtttctctgtcttcctttacaggacacttgatgcttcccagtcctgtttcttgcactaacaatgaatgaatgaatcacaaaaatcctagaactttatgcgttttcaagaagttgcctgaagaaggaacttccttgtgcggtacgcctcaggaaaaaagaagcaggagaaaagctttgagaggagagcaagtgacggtgagatcgtaatggaagtggggtggagaggtggagggtggagaccggtaggaagcaagcaaggcttttttcacccgtcccaggacacgcgaacgagatcaagcctcactgcggttcactagggtctatgcaggccctcgcacccctgcctacctcctcagaacccagcctcttggctcttctcaccccagccccaccagacagcttccctcccaggaggtgtctctcaagatctcgaaatgtggagcgtcccgttcactccacctggcctggaatacttttcctgccccctttcatcgggtcttattcatcctttaagttgttcagcataactttccacctgaatgccttccctggccctggactaggataaatcccctcgccataatgttcctacacaggcatcactttgtaaagcttaccactgttgtaattacttgtttactgatctgtctttccgttaggctgtgcgttccactggggtggaaaccttgttcactggctctgcagccccgggcactgtgggtcttgcatgtaccgggggctcagtaaatatttggcaaaaaatgaaaaagttcccctcaaagccagcttccagtgcctccacggccctcaaattaattatgaattaattcactaatacagcaaacctttatgtgattcttccgtgtcacagcaccttgttacatactgaggacacatccacaggcaaataaaactcagcttctctctgcacaggaaaaaattattcaaattgtattcatctttcattccaatcactcaattagggcacgtcccttgttggctgctgcgtgagcgaagtaactattttccagcgagtgtcctcatgtgacctgtctagacgtgcccaggaaaaacaatccaacatcctcctaagccgcaaagaagtccctgacgcgcaggccgcactgcgtggaaggcccaaagcgcgctcgcgggcccgcgaaaggcgcaggagcagcggagccgaggcgggcggcgaggcgcgcggcgcgcggcgcaggctcgggtgggcagggcagggccaggccgggcggggcgggggcgccggcaacgggtccgccggccggcagggggcgcgcgcgccccgcgccccgcgcctcccgccccgccgcgcgctcgcttgccgcgcggccgcacatgtgtttctgttttgtgttgtagcatttgttctggaagctcgtatttacattttaagtgtatctggtgagtgggctggagccctcgtctgggccggaaaaaaaaaagccctccgatccgtcttttagttgcttctcttccttttttctctccggtttctcatcactccaaccaggtagggtctgaaaatcgaca

SEQ ID NO: 560 - DNA, 2300 bp, Homo sapien
ggcctctattgctggtgtctgagcagaaagtggggctgggctttggtgtgaaattcacacatctgtgtgcagactgctgatccgtgagtgtgttgagggcaggggttgattacctttgagaccccatcctcggttctcaggagcacattagaagggcagagcaagtgtgtgtggttgaatgacttgttcctgatgtctagatacttgtgctcttaatgatcccagaagatgttggctaagatctgggggtaatcaaaactgacaataagaactcagtgaggccaggcgcagtggctcaagcctataatcccagcactttgggaggctgaggcgggcagatcacctgaggtcaggagtttgagaccagcctagccaacatggtgaaaccccgtctctattaaaaatgcaaaaattagctgggcatagtggtgcacacctgtagtcccagttacttgggaggctgaggcaggagaatcacttgaacctgggaggcggaggttgcggtgagccaagattgttccaagtggaacccactgcattccagcctgggtaatagagcaagattctgtctcaaaaaaaaaaaaaaaaaaaaaaagaaagaaagaaaaaagaagaagaactcagtgtgctggtccctctgcccttaagcagcatcagtgccaggtgcagtggctcacactggcaatcccagcactttgggaggccgaggtgggtggatcacctgaggctgggagttcgagaccagccccagcctgaccaacatggagaaaccccgtctctactaaaaatacaaaattagctgggtcgggtggcgcatgcctgtaatcccagctactcgggaggctgaggcaggagaatcgcttgaacctgggaggcggaggttgcggtgagccgagatcgaactattgcactccagcctgggcaacaagagtgaaactctgtctaaaaaaaaaaaggcatcagcataatcagagccaccattagggccaattctctcggagccaggagccctttccctacacagtctcatttaattctcacaaaaaccccatcaggtagggactattataatcaccccaggttaagaaggaggaaactggatgggcacgtggctcacagctataatcccagcactttgggaggcctaggcaggaggatcacttgaacccaggagttcgaggccagcctgggcaatatggtgaaaccctgtctttacaaaaaatacaaaaattaaccaggagtggtggcatgcacctgtggtcccagctacttgggaggctgaggtgggaggatcacctgagccctggagtttgaggctgtagtgagccgtgatctgatcatcccgccactgtgtgacagagagagcccttgcctcaaaaaaagaaaatgaaaaaaaaggaggaaactccatcatggccaacctggtgaaaccccatctctgctaaaatacaaaaattagctgggcatggtggtgggtgcctgtaatcccagctactcgggaggctgaggcaggagaatcacttgaacctgggaggtggaggttgcagcgatgcagtgagtcaagatcgcaccattttactccagcctgggcgatgaccagagactccatctcaaaaaaaaaaaagaggaaactgaggctcagagagacaaggccggttgcatgatgtcacatggctggagagggcggggattggcacttggatctttctgacttcaaagcatattcctttccaccttctctggctaaaaggggtgcagcccatgggtgaccctccaaccctgccctgtacccaggccctgtgtgccttcccaggccagcgggcagtggtcggagctcagccctactacttggcacccccctctggattccccatcttggttcttgcccctcccttcctcacccaggccagcttcctggtcctcccaggctggttgatggatggctcagccccggctggcttgactcagtctagcttttcctcgtggactgccagggctgcctcctgtcctcctgcttaccgcccttgcccgcccagcaggtcgggcaagtgagtgactcacacacctgggctctgtgtgggcccagcccggggagccagcgtactcaccctctgggctcctgcctgctacttcaactgacagacgggacccttcccagtagaagggggctgcccctgtcacttgtgctcccttcccggaggactgcgattggactgcacaggattgaggtcagtttcctttctctttttaaccatctctgcccctcgctaaattggaggagaatcttttggaggtcgtgg

SEQ ID NO: 561 - DNA, 2300 bp, Homo sapien
ggccgggcacggtgattcacacctgtaatcccagcactttgggaggccaagatgggatgatctcttgagcccaggagttcaagaccagcctggacaacatagtaagaccaccatctctacaaaaaaaaaaaaaaaaaaaagaaagaaaagaaaaaaaaaatgagccaggcatggctacctggcaatataggcactacaggcaccaccatgcccgcacctgtagtgccagctacttgcaggctgaggcaggaggattgcttgagcctaggagtttgaggttacggtgagctgattgtgccagcctgagccacagggcaagacccagtctcttaaaaaaaaacaaagaaagaaaaaaaacatagccaaggaaggggttggagtacactgtgaaagaccgcgatgctggtctgggatgtgtacttggctctggctatgacggcaggactcaaaagtccatttctggtccaaagcttaatgccatgagcctgaggtcactcaatggacatctgaagtcttcttcctgctttgctagcatccccaaacctctcctgtctgctgtcctgccatcatttattcacagcagggcaggggccgtgcctgttgtgttcactggtgtctcctgcgtgcctagaacgatgtctggaacagagcaaaaatgctcaaagaatatctcctgcctacttaaactatgagccagtgttgccctagcctggggctcaggacaactctgtggtgcttatgttcttgtgtcgagagggacaataaacaaaccaacaagtcggtgaataagatgatttcagtgcgtggcctgtgtggcttgtctcactgcactgtagccgtttgtttatttgcgtcttctcctaagcctatgagctccgagggggcggggctggggtctgtctggttctttgtctcactggtagcccctgaggctggtgcctgacaaatagggagtagttaaaaaaaaaaaaaaaaaaaagtttttgctggctgtgggctgtaaggaacacaagctgaaaatgatttcaacctacgtgcacctgtaccctttggaggctgcagaacttatcattatcaacccaggagtaattgctgataagcccgcgtgtgaatttccttgcaaatagaggggtagcgggggagtgtttaacaacaacgcggataatcttaattaatgacctgataactgtaattaattgcatcatatccagaggccctctttggaatttcaggagggagtacctagtgtttggcagctttggagctgcaaaggcaggggaatgctaggatctcagtctcagcactttgctgctcagtgagctttgccaagttactctcagttctgagcctcagttttctcctagggaaaatggggctacatcactggggtgttgccggtctcaaagccgtcaatgcctgaacccgccagggttgttcttggaggtttggctgcatggctgcaaggttccccatgttgccatggcgggggtggggggcaatacggggccgccaagactggttgaggggcaggtcataagtctagggtttcccctggggccggtccaggattctcacccttttgggggaacctcagggcaaaatgttgaagtgggggaggagaagccagcaccctgcgcgcctgcggggtctccccgcggagaaccggggaaggagaaccgggaggcgggaagtggggaccccggggtaggtgaaggagcgaggaggtcgccgtgtggccggggccgggccccatccccgcgggcctcagtttcccccctgtactgtggggggccggtgggctgccgggaccgctgggggctcgcagcgggtcgggggaggccacgtctccctcgcggcgcgctgggagcagggagggggcgcggcggccgctgccccggccaccaggggttaagcggtgacctcagccgcggcgccccgggaccgggcgggcgggggcggcgccgcgtcgcgcacggcggcggcggcgggaccaggcctcggagcgcggcgggcgcgggcgcagtcccggcgggcccggacctcgcgggcgggcgggcggcgcggccattggctcgggtggcggcggctgcggcggtgggggcgccgtcccggccatgggcgcccgcggcggcctgcggagctggaggcgcggcgccggccgccaggcgcctttgtgagcggcgcggacgacaaaggcgcgggcccgggcagccgaggtgggtgagtgagcgcgggggccctgcctccgcgggatcctcgcgtgtgccggagtctgcgagtgcgcgggaggcgctccaggc

SEQ ID NO: 562 - DNA, 2300 bp, Homo sapien
ctactcgggaggctgaagcaggagaatcgcttgaacccgggaagtgcaggttgcagtgagccaagatcgcaccattgcactccagcttgggtgacaagagtgaaactccatttcaaaacaaaaacgaaaacagaaattagctgggtgtggtggtgcacgtctgtaatcccagctatttgggaggctgaggtgggagggtcgcttgaacccgggaggcggaggttacagtgaaccaagattgtgccactgcactccagcctgggtaacagaatgagattctatctcaaaagaaaaaaagaaaagaaaagaagaagattgagcatggtggctcatgcttgtaatcccagcactttaggagcctcaggtgggaggatcacttgagcgcaggtgttcgggaccagcctgggcaacacaagagaacatgtctctacaaaaaattttaaaaattagttggatgtgctggtgcacgcctgtagtcccagctactcaggaggctgagatgggaggatcacttgagcctggaagttcgaggctgcagtgagctgtgattgtgccaccgtactacagcttaagtgacagagggagaccctgtcttaattatatatatgagaaaagtgtactgttacttggggaaatagtatattaattaacagacatttatagtatatgctgagtgccaggtgttgggctagatgctttaagcatgtacctcttacacactgagaaggaacagagtggaaagaatacatgtaatcttctatgattaattttgaaaagataaagtaaatgatatatatgccatgataagataataacgtggatttatattgtactttcatatctgctatctctttgttttgacaacaccctagtagttaggcagggagatgggttcatatccatcttacagatgaggaagctgagcatacagcatttaagtgactgtcgaaggtcactgctgaagcgagtcagcgaaggcgccagcactcagcctgggactccctggccactcagtccttgctttcttctgcacaactgtctccagtgccttttgtattcctgtcacccggctagacaagggtgaatgggccactgttcttgccctcaaggggtctaaagtccaggagagaatcaggctctttaacaactgagtgtgccagagttgttccgccccatggtgccaccttgggcccagctcagctccttccttgcagtgtcccagagagttcttcttctctctacctcagtggagggcatcagagccattttcattcaggaccctggtctgatgacattcccaggagtgactggtccttacagagcctctgccgggtcctgggcagtggtgagttgggagccagctcacacctacacataagagctgattgctaaattttaggaattttatgagccggttgttaaacacaaccattataaaaaattctgaggccaggagcgatggctcatgcgtgtaatcccagcactttgggaggccaaggcaggcagatcccctgaggtcgggagttcgagactagcctggccaacatggtgaaaccccatctctactaaaaatacaaaaattagctgggtgtggtggcccatgcctgtaatcccagctactcgggagtctgaggcaggagaattgctggaacccaggaggcggaggttgcagtgagccgaggttgtgccattgtactccagcctgggggacaagagtaaaactccgtctcaaaaaaaaaaattttttttgagtgtatacattcatcattaagtaaattatatatatatagtttgtttgtttgtttgttttttgagatggagtctcactcttttgcccaggctggagtgaaatggtacaatcttagctcactgcaaccaccgccccctggtttcaagtgattctcctgcctcagccccctcagtagctggaattacaggtgcctgccaccacgcccagctaatttttgtatttttagtagagacggggttttaccatgttggccaggctggtctcaaactcctgacctcaggtgatccacctgcctcagcctcccaaagtgctgggattacaggcatgagccaccgcgcctggctgctattatatatttttgagatggagtttcactcttgttgctcaggctggaatgcagtggcgtgatctctgctcactgcaacctccacctcctgggttcaagtgattctcctgcctcagcctctgggattacagtagctgggattacaggtgcctgccaccacacctggctaattttttgtattttagtagagatggggtttcacta

SEQ ID NO: 563 - DNA, 2300 bp, Homo sapien
caagggaggatggcttgagcccaggagtttgggaccagcctgggcaacagagtaagaccctatctctagaaaaaattttaaaaaattagccaggcatggtggtgtgtgcctgtagtcccagctactggggaggctgaggcgagaggatcacttgacccaggagttccaggctacagtgagccatgattgtgccactgcactccaacctgggaaatcgagaccaaagcagcctcagtacctatcgatgggggctatataaattatacccccacaaaaaacacctacctcaaaacaaaaccaaacctactatgcagctgttaaaaaaagtggggttgatttctatgtattagtactattctgaaatcatcactgagatttaggttaaaaaggcagttgcagcactgtgagtgctgtgtgctccttctgtatgaaacaaggcatatctgcagatatgcaagttggcccatgcatgggagagttctggaaggattcttgagaagtcagtaacagtcatctcttctgggggactgggggattagggcaaccagggtgggaggttgactaacttttttttttttaattttttgagacagagtcttgctctgtttcccagactggagtgcggtggcacggtcttggctcactgcaacctccgcctcccacgttcaagtgattctcctgcctcagcctactgagtagctgggattaaaggcatgtgccaccatgcccagctaatttttgtatttttagtagagatggagtttcaccacgttggccaggctggtctcgaactcctgacctgaagtgatccgcccacctcagcctcccaaagtgctgagatacaggcgtgagacactgtgcccggctcggagactaacttttcattgtctacctgttgtatcgtttgagtcttgaaaggtgctagagtgtagtagctgcttctaagcacagactccagagccccatggcctgggttcgaaccctggctcttcctagctgtgtgatcttgggcaagttacttaaccattcttggtctcattttctcatttataatttggaataatagacgttaatatttgtaaagtgcttaaaattatgtctgaggtatcgttggcaatgcaagaatgtctactgttactaatattgccattaacctgcatttcatttttgtttagtaagccagtttaataaaaataaagcctttaggaatggaaaggaaaacaggaacacagccggtttgtggcctgggcagattagaccagggggctgggtgctttccctccagggtgcattctctcctccacaagatgtctaggaggacagcccccagtgcacaattgaaggtgacagtagggagcgggggcagggttggctccagggcccaggaagcccaccggaggcatcagccttttgcttatgtgagctcccactgtgaggggagggcggtgccaccttgggccaggaggaactgtgcccccacgctgagcatttgggattctgtccctgtcttatgccattggcctctggagccattgctttcctcacacccatgtgccaaggccaggttacctcctgcctgctggtcaacccatggggcaggacaggaagaggcagagtcagagtggccttcagcagggctaccggaagggactgacaggagtgggcagacctaagggagcccatgcttcctgggcagccaggaggaggaagtatccagccccatttgtgacagtcaggtgtgatctgattcctggaaggttgggggctgagcatgatcctggactctggggccagatttcacctgtaagccagaggggatgaggacggacacccagcaggtccctgcaggtcccttggcactggcaacaggaaggtctgtggctgcagggttttctgggaagaaggatttgggctgcacagctgctgatgtttctatgggttaatgatttatgaaggctggaggctggggcctttctggggctgccctgtgctctgagagccactgggctgaagcacaggttgtgagccagtgacttgtctcagtagctgaaactgcagccctgactccagctaatgcgatttctggtcttctttccacaggtgtgtagctgggacggtgctggtctgagctggaccttgtctgatggcttcctccaaccctcctccacagcctgccataggtaccgtacccagggcttcctgtccctctcatcctttcttagaagggggccgctgggggccggcggagggccttgctctggagcagcatggcgccgggtgggaagtctgctctgctggct

SEQ ID NO: 564 - DNA, 2300 bp, Homo sapien
ttttgtctccttcctgtcccgcctgctcctctcacctgctttccttctgcctggccgcttggggctccagctttctccagacctgactaggctaaaggagagatacgccaggactaagagagacatcttggctttgagagttggggggagagacatgcaggagctgaagcacaagtacgattgtaaggtattgtctgtctgtcccctcaagccctggatgggggctgtttccagctgcagctacctccaagggttttcctgctgccctggtaccacgaagcctaccaggcccacccttgagtcccagggctgtcctgagacctggaccctggccacccttgcatctgtgctggaactggcagatgccttaagccacatgttcccttccatgttctcacccctatctttctccccacctgcaagtgaaaccctgatagtccacaagaattcccaggagggttttcaaactttaggacccttgcaatcacctggggtgctgtgttaaaaatgcaggttcctgagttccagccccaagggtgccacttacgtaggtctgggacgaggctcaggaatctgcacatttcataatctgcacagttggggttacacattgaaaaacgtgagtgttgctgacattggatgttcctatctctccacactattcagaggaatccaggataaggaagtctgtaggagaaatcacagtacttgcttaaacttttggatgatgatatcgacaacagtagcttccattaactgagcacctgctctgtgtcttggctaaaggcatggactttcgaggtctgtgggcctggtttgaatcccaatctcaccacttcctcatggtgtgatcctgagcaggccccttggcctctctgagcctcggtttccctgcctttgaaatgggggcattcacagtaccagcccccagggtggctttgaaggtcaacgatcaggcctcttgggtgtacggtgctgtgctgggtctagaagctcagtggacagtggctgttgttatctacatgcctgaccgccctgtccttgtggcactctgggcagtagctgcctttctgcatcttttagtgtcaagtacccggctagtggccacagcagtggttcacgacagagctgggattccaacttgggtctgcagtgtgccagagctcaaacgtcctccatcctgcagtgctgcccgctttattggaatgtgaagccttccaggaggaggagagcagaccctttacagttacgagacctttcacagatacccgcgagaggcctgcaacccagggtaggggcggggctaacctctcaggaagccaaggcttagagaggtgcccagagctagagaagggcagagtctaagactgggcctttcccccgcttcggccacacactgtgggaatgggtggattcggcaggtgtactcggggacaccttctagggtgttggcctgttcttttttgcccaggaaaatgccaagagaagggcctcagatgatcccttgaaagaccactttgggggctcgcaggacagcaccactgatggctttctgccaggacaggaactggattctggaacagaggtttcagatctctgagggtgtgaccccctcctcccaccccccaacaagaagaagatgagcgtctatgccatccctttcgttagattctcaaaggcctctatgattactccccttgcccaaccccagaaaaggccaagcacagcttctctaggattgtcccgtagaaatgcagggcaggcaggggacttccttctttttccctgctgctggttccttccagaaagtcagccttgttccttgaaagccaccacccctgcttccccatgcacagcacctggtggcttttcagcaacccttccttgcccagacccccaagaagtgcttggatacttaagtggggaccaaagggttattggaggtgatagagcagagaccagagacaaccccaccccgcagattagtgctccccaccttcagcagagagttttaggaaggagaaggttttcttaggactgcactgtccattatgatagccacgtggctctttaaatggaaattaactaaaagtaaatataattagaaatttgggtgcttcctcgcaccagcacatttcaagtgctcaatagtcgcatgtggcccgtggctcccattttggacagggcagatacagagtgtttctgtcattgcagagccttctctttgctggtgctgctgtatgctggagaagatgcgggtgctagggctggggcttgggaggacaaaggactggctgagg

SEQ ID NO: 565 - DNA, 2300 bp, Homo sapien
cgagcgggagggtctggtgcccagctctgactgggggtcggggagggtgggattttgctttacaccccagaggtcatgctgggtgggtaccacttggcgtatggttcctctggtggtgggggttgggggctgagtcccaaatatcctggtaggtcccagtgtgcctccccctcctctggcaggcgtggcctgtcccttctgggagagctgggcctcttctttcagcgtccctgctcctgcttttgtcacggccgtcttggcctcctgccccctgcgctgtctggctcacctgtcctcatcttttttgttcctgttccctccttcctttatccatccacccatctctccaaccagctgacatttacggaatcctactaagcgccacagcctgtgctgcatgcagggacccacgatgcatgtatcagcagtgcctctggggccagctgttggcacagcgcgggagacaggcacaggcatgggaaatgacaggacaggttgacaagtggtccactggggtgccctggggggcatggaggaaatgaggatggacttgggggatgaaaggtcagggaaggaggaggcacaggtcaccaggcagagcggagtgggtgctctgggaagaggagcgagcgggtgtgcagagccccggatgtgggaaagtacgagatgttccagagatgctcttagtcagcactgactgagtatttattgtgtgccaggtgctgccctatgagcctacagttcctcacttcatccttatcctcaccacacaaggcgcacagaactctcacattcccacgcagcagatgagggaataggcacagagaggttgtgtcagggctgaggacacacaggcctggaagggatagaggaggcctcaggtggcggaagtgagggcgggcatgataggccagggtccggtcagtacaggctctgtcagccttgctgggcatttgcctttggtcttaaggatgctgcataaaccccattagagggttttacgcagaagcgtcccatggtcagatttgatcaattgatcattcatgtgacaagttttattaagcatctactatgtgctaggaactgtcctaaagccatgggacacagctgtgaatatgagtcctgcccctgatcccctgaagcccccttcaggtgcctacccttgctcctggtccccaccaggctccagtccattcctctggagaatgtctaggtcagggcccctgatgtattcccaggcattggtgggacagggtcaagtaagaccggcccctgctgcccatctcacatctttagaggtgacagacaaggagacaaggaatcccagtacagtgggctcacagctgatggaattctgggatgccagttctctttggaaggaaggaggctttgtctgctgcctgccctcggcacatggcctgatgcagcagaaggaacacaggcctcgagccaggcaggactttgagagcctgtgtcatcctagaaaattctgtaatctccctgtgcctcagtttcctcatccgtacagtggggtggctgtctgtcttgtagggctgtggtgaggatgtcctaggtagtatgaggagagagagagccccatgtagcagacgttattcttggtgggcggtcagtccctaagtggaggcgtttggtgccaggacggcctcgtgctggcctgttcagaccctggctctgcggctttctggctgtgtcgccttgcactttttcccctcttggggcggcagaccataaatgggttttcatctgtaacatgggttgagccccacccgtgcacttggtgcggtgctcagccagagtgggtgtgcacaggcctggcacaggctgggtgctcagtgaatgtccatgttccctctgcattttggggagcactgacccccgatgatggagggagcaggccaagtggccattctaaactcattgagatggtccgaagacaggataacgtggccaggccagctggctgggaactcttcctgggtcaccctcccaaccccaggctggctagggctctcctcagccctccccaccccgcccacaagcccagcgccttcctgaagtgaccctccctgcagaggcgatattaatagccgtggcagggctcgaatcacaggccaagaatgttacccagcagctcgtgggggaagaggaagctgcgaggcaggctggggtgggtgcggagtgatgcccggggcgtgatgtgggcccggcaggagggtctgcaccacccccacccccacgccgtcatccgctgtccctcctcctcctcctcctctgtctcc

SEQ ID NO: 566 - DNA, 2300 bp, Homo sapien
gttacggtgatggtggaagggaaaggagaagggactggggatgtttagccagaagcagagaccactcgtgtggggggacggtaccccaaggcctgtcttgtggaagagggatagctcaaggatttcattcgcaagtgaagggagctgagattcggttcatgctaatgctaagacagaattttcttttctttttttttgagatggagtcttgctctgttgcccaggctggagtgcagtggcgcgatcttggcccactgcaacctctgcctcccaggttccagcaattctcttgcttcagcctccaaagtagctgggactataggcgcgtgccaccacgcccagctgatttttgtatttttactagagacagggtttcaccatgttggccaggctggtttcgaactcctgacttcaggtgatttgcccatctctgcctcccaaagtgctgggattacaagcatgagccaccttgcctggcctaggattttctattagagttgtccaaagatggaggtggtcacccgccaccatggaggagcgtggtgattaccccatccccagatgtatgtgcacagaggggctttccctgggatgtgcccttcctcctccattctgtagccaggcagcagggcatttatttagggttggcaggggctctggaaggaagagtggccaccaggcccagtggtcccaggtgggacctgggagggatgggtttctctgtcctatagttgtcagctccccttcctgtcacttgggccctgtgcagcaggtgtcatgtgcgctgaccgtgctttttggcccgagcaggtggtccggaggcatatcctgggctccatcgtgcagagcgaaggcagctacgtggagtctctgaagcggatactccaggtgcgacttcagggagttctcaagggtctctggggagaagcagggagggccctggagggtaactttatacggagtgtttggggactgtgggcagttttaaggggacaggaccataagccagcactgctttatggggacagtagaacctccaaatgtaggcagcaagaattcctgatgccctggtgttcacgggagtgacttctttgtgaacaaaatgggattctttgaaatgactcctggagagctgagggcatatactcccatttatgactggaaggcactgtgtcctcctgccactctggaagcccctggggcttgggccatgtcttcccatcctcctgggatccttagttgggaagatgtgtaggatggagtcctccttcttgcatcgagaggagtaggatcgagtcctcttttttgcatcaggaggcccaggggttgctgagcagatgcttgcatgaagtgactagtatgtgccaacctgagaatccctgagacagtgtttgaatccctgagacagtgacttttccgggcggttgtgggctaccagagtaaggccaccagggtggggaattgttgctaatgataccctctcttcccctcttgagtttggatcctcagagagggatcctaggcatcaggcaggtagagatgaatatatcacctgtctctgacaaagctaattggagagtgacgcggggtgtgggagccaagggagcttgtagtgaccttaccgctcgtgggctcagtgacaggcagagcttcgccctcaggccggcctccaaggagctccttgcaggcagatggcgcataaaagaccctcttcctcccgaccaattaacacagaagcatgggggtgttgtgtgtggccagtgaggccaggggtgttatggtgatggagatccttccggaaggacgcatgaggagtgagggatgagtgcctcccctccgtgccacgggaaggcccattcatggctggccgagttctgcatgagggcaggtagggagagaggctgcggcctggcctgcggcctcaccccgccctccccggcaggactaccgcaaccccctgatggagatggagcccaaggcgctgagcgcccgcaagtgccaggtggtgttcttccgcgtgaaggagatcctgcactgccactccatgttccagatcgccctgtcctcccgcgtggctgagtgggattccaccgagaagatcggggacctcttcgtggcctcggtaagtgtccccaaactttttccccagcccaccaaggtaaaaccacaaccagtctgaccccggggccatgcagtccagcctcctgcctctgcctgcttgccttgttcaagtcagtgggattagagggtggcagggtcttctgggcctgatctaggggtgagtgtgacaccttgaagtg

SEQ ID NO: 567 - DNA, 2300 bp, Homo sapien
gaataggtctgatgttctgggtgtatatcaaggggctctggagagagagttgattgactccaggccgaccatccctcccttggtaactcaactctgggcacgctgcccggtgagaggccaggagcactttccttaaaggtggagggcaaggggcattcgatttcctgaacgtgaatgcagtagaaggggtgttccccctgcccttctcctccctccacctgtgggcttgggctgctgcactggggatggagacctgggaggcgaaggtcccctgggctctcctgtggcaccaccccatcccacctgtgacctcaggccagcctctctacctctctgagctccatgtccacaccccagtgggggtgatggatttgcacagctcgaggtcccaagggagtgtggggtgagtgcaggcgcccttctgctccctgccttgaggcggcctccctggcccacacctgcctcgtttccttctgctccctgcattgaggcggtctccctggcccacacctgccttgtttcagttttccaagtccatggtgctagatgtgtacagtgactacgtgaacaacttcaccagtgccatgtccatcatcaagaaggcctgcctcaccaagcctgccttcctcgagttcctcaaggtgggcctccatggtggtaccgtgcctggtcagggtgggcagggagattgctcaggaggaagggagcattttggccccagctttgggtatgacatcatagctttggcctggacagctcccctctttcttttggggcagcccagtcccatgggaagaaaatcgttccctcctgcccctgggaggagcgtagccaagtgtctgtaagcaactgggatcctggagctttggcagggtggagggaagacctgtgtcatcttgctgaccctttgcctcctgtgccctggtgagtgggtgggtctgcctggctggccctgtggtgggctgtggctcccgggttgctaagctggttccttttcctcatttataaaagggtgaggaaattccttataggggtatcttgggcattgcttgggagagtaaaggttaaaggcttcgaaaagcttctgagttctcatgtgcccagcctctgctgatttctttgggagtgtagtctggtgagtcagagcccctgcctgtagggagcctgctggctggcagaggatgcaactgggctaggtgccaggacacgcacacatgtgccggcagcacaggttagatgccacggcctcagtggaggaacccactgtccccatcaaagagaacaggggatcaggaggagccaccatctgacatgggccctggcgggggatggtgggattgtgccaaataaagacagaggagagcctatatcaggtgtaaggatagtggagcaaaggttagaggcaggaggagagggatgggcaggtctgtttggattctgggagcactgatgcctgttggggagtcccaggagagaaggcctgagtgtgcacactaagaggcggctgagttcagttgggtggttctagacctccaggcccagggcctaggatgtaatatttcaggtaatggggagccattgaaggattttgagctagggtagatggaagtggaggcaggtggagaaactgtgggattgcagcatatgggggccaggaccaggtaacaggtgtgtggatggagtgggggatggatgcaagagacaggacagaaggtccccctgtgccccgccccttaccctagcccaaatctgtctgcatttagtttaagtggagggaatggttgccttggccacttctagaagtctgacatcttgaataaattgctgagtttcccagttatgcctttagttcagagaccttaagatgactgctttagtctcctgagggtgcgcggccatgcaggggcactggtgggagagggatccctggctgcagaaccacggacctctctcagctcttcttgcaagcccagggataggcagggtcttagggcctggggagaggagcccagaatggggacagtgtctggactctggggcactgggccctctctgcagggggtcagcgaatgacggaaccttgtctccaccagcgacggcaggtgtgcagcccagaccgtgtcaccctctacgggctgatggtcaagcccatccagaggttcccacagttcatactcctgcttcaggtactgctcaggattccagcagcttcaacccacagggtttgcctgtgggctgggaggtgcctcctggggtaggagggaggaggtctgggctcttgtccgtgatccataacccac

SEQ ID NO: 568 - DNA, 2300 bp, Homo sapien
aggtccagagaggcgaagcccccgtccaagttcacacagaagttctgaggccgaggactgccctgctctgcctgcttcccttggtgctcacgctggctggccgggcagagcgctctgtgtgcctggaggtcgaggggagtccctgttcccctgcttctttgcggagcttggattctgcccattttaagtagggcataagggcagaaggggaacctgttttatagatgggaaagaggtggggagggagggaaaactgggcctggcagagcatggggtaggccagggtatggtagggaaggatggggagggggtgggagtctagtttggctcttgtgaccacaccccagcagtggcttccatcacgtaccctggggcccttccggctttggagacagctgtgccccatcgtgccaccaagcagctggctcagaggggaagggtctgcctgtgatgggctgctctgtactcttaccagggacccagtggagggcaggtggggtagcagggctctgacaagctcacagctagctgtgtcctgccttctagtcccccgccactgctgcctgtctctccagagcatgccatggcccaggctgctccaggctgggacccagcttcctcttcaacccccctttcccacctggcaccctgacaagacagggcagccaccggggttctgtgtggcatcaggtgtgacttctgagaagaaacaatcttggcgcgcgccgcttggatgccggagaaaatggttcttgggtgcgctgatcatcccaggggaggggaggaccttgcttgggccaggctcctaggtctgtttggttttcagggatggccgactggggattcattgcctctcagaacatcctctggatcaggcacggtggctcatgcctgtaatcccagaactttgggaggccgaggtgggtggatcacttgaggtcaggagttcaagaccagcctggccaacatggcaaaaccccgtgtctactaaaaatacaaaaaattaactgggtgtggtggcgggcgcctataatctcagctacttcggaggctgaggcaagagaatcgctggaacccggggaggcagaggttgcagtgagccaagactatgccactgcaatccagcctgggagacagagtgagattctgtctcaaagaaaaaaaaaaaaacaaaaaaaaaccaccctccacctcacctggcagcagtggtgtttctggaagagaaagagatcttggtaaatttgacagaagtgccttggagtcggccagaagattcatgagaaatcaagattcagtctagataagctacagcatcagaaaagtcctcagagacaatcttgtcagctccccaccccattttacagatggggaaactgaggcctcgtgaagggtagagatgtgctcaaggtccttagcaagttagtagtagcagaaccagggccagaccccaagtctcccgattccgggtccaggacactttccaccatatcatgctgcctcttctgagaagcctccctggatttcccctggtgcagagttagttccttccatctcagcagttctcaaggcccttgtgcacacctgctcatttgtgcttggcgtgtcatgtgataactgttgattaacctgttggttgctctgaccagtggggcttcctagagggcgagacctgtgtctgattcctttctgtcttcccagcacccagtgcatggcatgggtggagtaggtgcttactgcatgtgtgcggaatgaatgaatgggagagagggaaagagagagagaggcagggaagggaagggggaaagagaatggagggaggaaggaagggacgaatctgagagtaggggtggctgggtgtgggacatgaatggtgggagtcggaggcagatggggacagccaccacccagctgatggagagagaaaggccctggagagcggggagagggtgtggggggccctgctgagccccctgctgctggcctgcgttcccaggagacctgcttgccgctcctggcccctgacctgcctcccctctctccctgcaggaggtgtcctgtgggacctggagagccctcccgtgtgcctgactgtggggcccgggcctgtccgcaccctgttgagcctggaggatgccgtgtgggccagctgtgggccctgggtcactgtcctggaagccaccaccctgcagcctcaggtactgcactatcctttggcttgtggccctggaggcctgccttccttttgctgaccctttcttatgtccaccccggcaccgctttcagctcccagtggcattcca

SEQ ID NO: 569 - DNA, 2300 bp, Homo sapien
aagtcactgccctcacaaagcttgtcataagtaaacaaatagcaaaataaggtcatcacagaccttgaccagggctaagaagagaagtcagctgttgaaaggggctcatggcctgagcctcccatgttggccaactccaggagggctgggggcctgaccctggaccggaggctgccatcatagttctgagccttcacttttggaatggatttaggtgtgggaaatagtcccagctccacagacacccaggtactgtttgtgaaatagcccctgttggccaaggctgtaagtcactagtgggctttttttttcagcctagtttgcatttccacattgcagggacgctatgaatgtgattttttgagtttgcatcatgttgccagactcgaatcccaccgcctgcttgatagctccattcgggtgtgtctaatttgtgtctcagaccacacatccaaccaggagctctgggcttcaacccccaaaccggctcctttgccatcccaggccatggcactgctatgcacccagctgctccaggcagaggagcctcagtgctatcctgggttccttcctctgctccacctctgctcccctctcccagcagctctgtcgctctgctccaaacaggtctaaaacaggttgggctctcctcacctcactgccgccgcccttcccacctgggcagctgcgggagcccctgctgggctccttgctcctcccactcccaccctccacaactgtagctagaacgttccactcaaatcacgtcacgctactcccctgcctaggccttccggtagcttttcactgcagccagaattatgagccccagtcctggccctgacccatcccctcttctgaccatctggagtctgccttctgtgccccaggtgcactggcttcactctgctcggcggactggatgagctcattcctgtcacagggcctttgcatgccctgtctcctgggccttggctcaggtcttggtgtggccacctccgccttgtcacccagcagcctcacgcctgcctccctatccttccaggaagtagagggaggcctgaagacccgggaatcctccactggctctgccctgtcgccctgtttcaatcctctgcctggtgtttacatcccttgtttctgtttttgtttcctgtatctcctctctacacctctgtgtctaatacagtagccattattacaatgaaagaaaataacacattcagtccctcagtgccactagctatatttccagtgctcggaagccacatgtggctgatggctgtcaaattggacagcacggtagggaacatgtccatcatcaaagaaagttctagagtgtctgctccttaagacaggactctatgtacatggtcccagctgtgcccccagcacctagtgtggggtctgccatgcagtaggcatctgggaggtaaatggattggtgatgggatggcacactgtgttaggcaatgctgggtgtaccccgagtcggtaacctgccttttggggtgagagagccacaccatttctctctgtgcctgcactgcagaggaagcacatacacccacatgtatggagttgaagtgtcatgcccaaggagggagaggtgatggaagcactgggcagtggtgagcagcagacctcaactccaccccaccctgcactcaccaggtgggggacctctttgagccttaacatccgtgcctggaaaatggggccggcatttgtgtcttgcatacgtcttggctgttgcaagccttgtgtcagatgagagcaggtatacgagtgctttggaaactccaaagctgtgttttttcaaatgtgatccatggaccagaagcagcagaaagtggaaaccttctggaatgcagcctaagcctctcccagagggcagcaggatcagggcaagaaggagacagccctttagaaaggcagctgcccagtgaagcctaaggaagtgtggcagcgccgtccaccctgtgtgtgacatggtggagggtctgtccctgagccggcagcctgtaccccacgcctctcagccccctcagaaagcctcctgccccctgcactcccagcctctcccttgtgcccattcccattgctagaattgttggcaacagtgcagcagcagcgatgacagcaggtagcgcccattttgccatgtgcaggcacggggttgttttacgttcattcatttaacccaatggagagtatctgtgttccaaacatcaaaaagggacagtaaaaatacggtcctataggactgccattgtatacatggtctgttgttgactgaa

SEQ ID NO: 570 - DNA, 2300 bp, Homo sapien
ctttcttctcgcccttgaatttttgcctggaggaagccaagaaccctcatgggctaagctctgttttggggcctgcctgccctgcatcagtcagttgtcctgcccaagactcatggttagtaagtggaagagctgagatttgcacctaggatggtctgacttccaagacaaagtgataaagagtgtgggccctaggacaaactatacttcagtttcttcatctgtaaaatggggatgataggagtaactaccgcatagattattgtcctatgagagtttgaaaagagtgtcaggcacagagcactcaagacatgctgggttctctggtagaagcagagatttttgcctctctgaagctaacattagtgtaataaaagctgcaaccggactaagaggagaggactatgggagcccagaaaagcaggccaatagcttagtaatttgggggaaccatcagaaatttgctgtgagggagcaaaaagaatgtgtgattcatgtgtgcacttatttattcaacaatatttgtttacccactgtattagtctgttctcatgctgctaataaagacatactcaaatctgggtaatttataaaggaaagaggtttaatggattcacagttccacttggctggggaggcctcacaatcaaggtggaaggcaaaggaggggcaaagtcacgtcttacgtggcggcaggcaaaaagcttgtgcaggggaactcccgtttataaaaccatcagatctcgtaagacttattcactatcatgagaacagtatggggcaaacagcccccatgattcaatgatctccacctggccccacccttgacacgtggggattattaaaatacaaggtgagatttgggtgaggacacaaagccaaaccatatcacccactgtgtacaggtagtacacagtgactggatttgaaaccaagtttgggggctaatttttaaaaattgaggtataatttatctacaatgcaacacacagatcttagtgttcagtatgatgaatttttacaaatgtatacagcaccccaattgcaatagagagtatttccattgccctagaaaattccattgtgccctcttccagctaaatacacccatctccacctgtttttttttttttaatttctgtcactgtaggttgctttgcctgttcttgaacttctgtgaacaaatgtgaacctgaaagggccagaccttcaagatggatcctgagtggctaagtgggctaggctccgctgttcttgcttgtaatcccatcactttggtaggccagggtgggcggatcacttgagcccctgagtttacgaccagactgggcaacataccaagaccctgttctctacaaaataaataaatactaccccccccccaaataagaatgggtaagtgggcctaaatttaaaatagaatgaagcagccacttgctgactatggttacacaactaccctgacttccccagaaaacctgcacctttttatctttggtactttctcagctcacctgaaccaaccaatcagggctcaagtgtataaaccaatcagggtttggctgtatcaaccaatgagagctcagctatattgaccaatcagaactaagcaagtttcaatccttcatttgcacatcttgatctgattgggaacctgggcaggaacttttgcgcaaaacttgatgcttccctcattcttgggaactccccttcattttccagtggagggtgcatctccaagtttgcaaactgttttctgtactaaagtctctttcctctaaatttcttttcagagaattttgtgcataatgtaaatggaaacttacagattgtgctgctttgcgtctggtttcttttactcagcataatacgtatatgattaatgcatttgttttatgtatcagtagttattttctttttcactgctgatatttcattgttgctggttgtcaaattattgcctctccgctccacattcacccttcttgcctgcttggtaaaaatggatctgggccctttaaattttctccctggccagcaggcatgctgggctttgccagtagagggcgctggggagccccagcagcggggaggttccgcttcctgcttgccacgtgctcacagagtaggctgcggcaccacgtgcagccgctctcgtgcaggcgtttgcagtgtgcagctgagttcggcagctcacacagcacccctttcaagttgttttgcagtgggtgcctcttgtgagacactgtttctgagagcagcttttgtggcatcttacagggcagatttctggtacgttc

SEQ ID NO: 571 - DNA, 2300 bp, Homo sapien
gggatggtccaagccttgccccatgactgtgacctttcgatctctcactgggcacccagcaagtgccaggcaccaacactgagcaaagctctcattctccacaaggcctggcccagcagcagctgggatggtttctcatcccttgaggaaccccagagcatatattctctgccatctgagtagccacccacgtggctactcccaatatcatcatcacgctgaactcttccatgacatcagcccaataatgggtacctccatccccccgaccttgtgacaacatttcatagatgtcttctccacaccactcataccacctgcatcggcaccatcattaatttcttccttcatctggcaaatatgtatggagcctctattatgtgccaggtactcttctagccactggggacacagcagtgaacaaaatcaagtgtcagctctcggagtcttccattcatcccattcatcatcctcactactccctccatgaccttgactgccagcaccattaccatcactataatatcatcaaccattgtttcctgagcacttcgcttggagctgagcacataaaaaagttaccccatccttgcagcccatgttctgcttcctatcttctcatcagtacagagggaaatccctccttacacagacacgcctccagtttcccgcagagtgtagccccccaaagcccaatgggtggaggagggctgtctgacctgcttggaaattcttttagtgtaaaaaggagctgatgcttcatcccgagacagctgcatttccccagagcaggaaatgaaataacacaaagactgtggctctctcaaataaaaaaaaaaatgcccatgagatgccagaaagggactggggagaacactgtggcttgtgctggggtctggcagcctctgcccacaagcagcatctcggcaagagccccttaaagagtaactgatagagtaataagggagcatgggttggggggaacagatgatccttaattctctggctgcaaatgagttcatctattcacccacgtggctcctgtttcccctcctccccctgcccagcatcaggcttccttctaacctggcattccatattacagagggctccatcagcccctagggctgggatttatttaaatggtgagtgagctgtgtggccaaagcccgtgttaagcaatgtttattacaatcaataaatcatggtctcgtatctgatccagagacggaaatagctcgtgagcccaggatgcaagggagagtgaggttagcacagcccgagataagacagactcaatcgaggtcagtctctccaccctggctgcaggtggctgggtgctctagagctctggtctcctctcctgacatttcctctcccacctacccctttgagaaacctcccccagggtctgccttgtctccacatgagagaaggctgacctgggagcagaggcacggcttggagagccaggtgggctcctcaggagcagcaggatttgggtgagaaaattgccgagtctcctttggtgacttctttcctggtgggtggaagggtagctccataccctgccactctggaaaggaagcagggtagttaggagacaacttgaaatgcccaaatctgcaagtctgcagcttggaaggagaggagcactaaggaggggtagattcatttagttttaagagcacagttttggtatcaccaagagccagttgggttcaaatcccagcttcaccacttccttccattagttacctaacctctctgtgtaaattggaggaaagaatatgaccttctttatagggttatttaggagaaatgcaaggagttggtgtgggtaggagtacttcacaccggggctggtatatggtttcttctcaatagatggcacttgctgtggtaggctgaatatgctcccccacaaaatgtccttgtcgtaattcccagaacctgcaaatgtcacttttatggcaaaagggactctgcagaatcatgaaggatcttgggatgaggacattatcctggattattccagcgggctctgtgtagtcacaatgggtcctggaagagaacacaagagaatagagaattcagtgtgagaagaaggccatgcaacacgagaggcagaatcagagagagaagatgccatgctgatggcttcgaaaatgaaaaaagggtcctgagtcaaagaatacaagtggattctaggagctaggaaagtcaggaaacaggctgtgctctggagcctccataaaaaaccagtcatgtgaacaccttggtgttagcccgtaagcctc

SEQ ID NO: 572 - DNA, 2300 bp, Homo sapien
catatcctcagatgccattctctagctccttctgctggctctcttttctagctggtgtgaaccatggctgggaagaaacatcactaaggggccctggaatcccacctgctccctggccctcatctccaagggctgggctgcagggagcgcagccaggaagccccaccaattcagggttcacctgaggaactgatgctgtccacctgcctagctgcacgccgatttgcagctggggccagagagtaggaatgcccacacagcgatgcttggcatttccctgcacaactcagaccagcacaaggaaccgcatgaacctgatgctgttccccagccagggagccccttccacagaggatttagaacctgggatggacttttgggtttgttgactttttcttgggtcagagtggggagggagggccagggaggaggcagtaagggactgtgccctgcagcctgagaagaaggtgagggggagaggtgacctcaagctgaccctcagcagcctggagaaggggagacctgggtggatgcgagtgagagggagcaaagaacagcagccaaagggagaagaaaggacctaagactccagtgttcatcaagtgttcaagccatatgcagtccaatcaacctggaaccaattagtctgattcacaaaaaaaaaaaaaaaaaaaaaaaaaaaaaatcccacttagggacaaactgtaatcaaacacctatttataagggtttattatgatcattattattattttactgagaggatcattctaaagcctgtcaggtgaacgtatgctttcagatcttcataaatgcaaatcgctccttctggggtgggtgagcaagctgagccgcagagctgccttgggaggcgatggggtgaggttccagagggcaggaggagggagcagttcactttcatggacatctctgcacaaagctcacccagaggcagcccagcaaccacccattgcccaccccactccctacactcctctcagagggctgctggagatggaactggctatagacccattgcccatgtaggtaaacgatgcaacagcctgactcagcaacctgccagagctagggaagctggagattctccatagaaggcctgggtaaagggacccacctgagttctgagcaggttttgcccctggtcgtgctggtttttctgggctttgccaatcttctgggtccctaccaatggtgaaattctatctcctgaacttcctcatctaaccacatccccagtccactccaagggctagagtacccctccccttcatcctcgcaggaggcctcaaagtccaccgccagggctgaggctcaatggtgtgtgtgtgtgtgtgtgtgtgtgtgtgtgtgtgctcgcgtgtgtgttggtgggagagtaatggtaacatacaagtcccaaacctgttcttctcggacctgggaagaaaagctgtcaggtctggcaaaaaggtggaaacttggtctctgccaggaggaaacaatcagttcctcacccttcctggctggatcctagcacatgggaaaaagacagaacacaccccatttccgtgggtccctgggggaaggagcagccgtaattggggaagtttcagaacatggaaaccccttaatcttgcccaatgagggcattcatcgttggcaaggtcagaactccagagccacaccctgcctgccctgctcccaggatggcatctttccctctcgggagggaggctgcctcctttcatcaggctgagtagcggggagggcgatggtaatcccggggataggaggggctaggtaaaggcggatccgatggagcatagcttccagggcggggtgttgggtcacctgggtaagggttaagaagctggaggcagcaagccagttttgagtgaggggggacctgagtgaggggagaggggaggttaggagggggtgagctctccttctccctgcaataaatcggcttagcggacgagagccgaacagcccagaaaggattaaagaaaagtctgtataatacgcggagagcgcggcgaggggagggcaaggagggcgggggggcggggagagggggagggacggagggagggcgagaggaggggggtgctcgcgccgccgggagaggcgagcgcgaggcagagagcgcgattcggctccaaactccggcgctgcagccgatcggactctgggccgcggtgggcaccgcgcgcagctagggagccgagaaccgcggcgagccccgaggacgcccagagcgcgagggtcgctgcgcctcgcagagccggagccgagtc

SEQ ID NO: 573 - DNA, 2300 bp, Homo sapien
gaccctgcctcaaaaaacacaaaaaaaaaagaaaaagaaaagaaagaaagagagagagagaaagagaaagaaaaagaaagaaagaaagaaagaaagaaagaaagaaagaaagaaagaaaggaaggaaggaaggaaggaaggaaggaaggaaggaaggaaggaaggaaggaaggaaaagagaaagaaagaaagaaagggaaggaaggaaggaaggaaggaaggaaggaaggaaggaaggaaggaaggaaaagcaatcctctcctctcaggaaggttctaggtgtctgatctctgtttgctcagtgaagataagaaagaatgaatgagtgattttaaaggagtcgcctgcctggttctgagcctctaggattcttggaatgtatcctgatacctattcacctgccatcacgagccatgccagagttttatgctaagctctaactgcagaggtcactgatctttggggtaactgagtaactagagccacccacagcatcagttcctgatggaatttgattataaggcatccatggaaggtaagtgaatgttcctggtggttcaaatgtgtacatacacctaaaggcaccaatagatacaagctccctttttcttcccaaaggtcgaggtggctcagcttcatgtcagaggctgggctctggagtcagactgcctgagttcaaatcctggctcttcctcatactggcaccgtgagtgagtctgagcaagttgcttcacctcttaattttccccatctgtaaaatgggaataaataaacccagcctgtagactgatggtgaagacagaaagaatgcacacatgttaagaactcagaacaggtcctgattcctaagagttagccgttgtggattcttgtgtgggatccaggttttcggttgagttttggaaaggttagattgcagaatctgcaatttctaggtaattgacgtgttctgctgtatttttcccttctcggaattcctatccggcttaccatctgttttatgcgatcttacgcttaattacaattctccaactattgttctcccattgttttctgtgtgctctgcttctcttgctgacagcatgggttggctccctgaatgaatgaatgactcatacctgatttcatttcactaggccttgaaatagagttgcccgtgtgtctgtcgcccccacctgactgtgaactttgcaatgcttcacctgtttcatcattgggcacctcctggcagcacctggcattgttcccggcacctagtaggtgtcaggaaatgtttgtcgaatttaattaaacttaactagagtgaaaaccccctgaaggaaggaaaggcccatacctctttattttctctgcttccctccctgtgcgtgtcccaaggctgggtaaatcagaactgacagcttttcccaagtgaggctctaagattctggttcctgtcctgctgattatgaggaggttagggaaataatagcagaaatcacaataatagcaaattcctaccatatgctaagcattttcatatgcattagctagttttgtcctgcaaaaatgtctgccaagtattaatattattcccatttagcaaattgggggactgaggctcacagttttggtgacttgcccaagcacgtggaggtggtggtgaccgagctgagattcagacccaggtgtgcctgatggcccagtccctgccccttgcgatgccccacggtgtctgggagcaagggttttgacaaaccagccaggggcagtgggtgaggagagaagagaggttgagtgggtgggaggggtggccaacaaaaataagccaacttccagaaaggatggaaggaaagactcctggccacaaatagctgtccagctgcccccatccaagtgtacggtaccatcctccccagctgaaattcccactctgttttcagtctcttccaaatgcaagtcagatgatgtcactgctctcactgaaaaccttcagtggctccccattgctctcaggataaagaagaaaaacccaaaacctgtgctttaaagataaatcagccctctgggggctagggcagaggaaggggggaaaaggccccaaagtatagcagttgctgttttttgtgatgtgaagatactcactgtgacaagttacaaacagttaaccgccggttcataaaattcctgaaaatgtcacaacctgctccagcatgccagttcaagtcataatccccctgacagcacaccacgtgctctgtgccctgctcatatgcccagccccgctgggcaccgcattccccctggcctgccccgctctg

SEQ ID NO: 574 - DNA, 2300 bp, Homo sapien
tgtttgaatagatgaatgaataaaatgaatgcttggatggatggaaggatggatggatggatggatggatggatggatggatggatgttttgatggatggatggatatttggatggatgtttggagggatggatgaatgggtggatgtttggatggatggatagatggatggatggatggatggatgtttggatgggtggatggagggatggatggatgagtgtttagatgggtggatggagggatggatggatgagtgtttagatggatgaatggatggatggatgaatggatgtttggatagatgtttggagggatggatgaatagatggatgtttggaaggatggatatttggatggatggatggatggatggatggatggatggatggatgggtggatggatggatggatggatggatgagtgggtgaatgggtgagtgattgtcttagaaagcatccagaattcctaggggaaacttagaggagcttttccttgagattccacagtactatccttgcatcaggatgctcaggacaggtaaggaaggcaacttatatgtccaggatctttttcattccctgagcagatagacatcactttacatttcacattgcagtcttatctccctcctccattgtcattttcagagtatttcctcaagcagggtggtagcctattctccccatttacaagttagaaaactgaagcccaacaagttgaaatgactcatccaagtcatgcagccagaaagtagagggctaggtgtcaatcctgggtctctggactcctgctctttctctacgtccagggcttgagaggcaggaaagtccggagactaagagcattcctttcgggcactctcagccattgtggtctagaagcaggcaagggggtgtaggttttgattgtctggagctgctaatgggccaggctcggagtgtcaggaggctgagggtggaaggagtgaggaggctgacagcagcaggcttggcttccagaagcaacatctcaacacagcagtaaaagagggagtcagggaccatcggctgcaaacgcacttgtctagtggcagctgccaggatagagcttgaaagcagcgagggaggaccagacccctcttctgcccaccctctgtgcccctcaggatcagatgcacacaggagcccaggagccggggtgccctgggtggaagaaggcacccatctctgccccacctccacccttgggctctgagactccctctgaagccctatgtgctatcacgtcttgttactggtacttcctatagcatgaccttggacaagccactgcccccctggagggccagttctatgacctgcacaatgggtttcgtgataacctgcctcgtaagtaccagaatggtgtgactgtcctaaaatgcctaaaatggagtctagcgcatgtttgacacctgagaaaagttggttccttcttcccttagaaccagcaggcccaggcccgggcctgaaggagtaaggcaagccctttagaaagcagggcagtgaggaatctaacctagaagggaaaggtgtctgcccctgccctccagggctctagccttctccaggaccgggatgcccttcagcgccctctcctggctgcagccaacaatgccgccccagcagcacctgaagaacgtaaagagcccccaagattacccaggggcagactgccctaggcctggtttcccatctgcaaaacgatgtctacagcacttgagggttcattttaaaacccagaaacttacttgggctccctgagccttcatttccttatggcgacaatctcaaaggctggaaggctaaatgagattatgcatatggcacttcatgtaggtcctggctcttaggactcgctaaacaaatgttagccatcaaacctgccactgcctgatgttcctaacggccccgcgtgttaggcaaggggtatcattgttcccatggtgcacttgggaatgcgaaggggagccactcatccaagggcgcaaagaacagattagaactcagctcgcaggtatcccaggccagtggcccttccacacgactggctggcagatgcagctgtagaaccagcccttcccttcccagcgattccctctccttggtgcaagccctgctcttcccacggatgcttccctagacccatgtggcatttcagatgtcttgcttatggtttaattaatagtcctttgatttcattctcagagaatgaaattggcagtgcctgggaggccacccacatctgccaactgctctgatttccgttctaagagctt

SEQ ID NO: 575 - DNA, 2300 bp, Homo sapien
gaacacgagacccaaaggaagaaaaggtgatcttggacggatgaaggcaccagggaagaaggcccagacacagccttttacccaactctgatgggccagagggatgtccaccagccttccctgccaagaagtcaccctgagcccggtttgctaggcagtgatcaggagatgcatctggaagagtaaaccgaagctggtacacagagagttgtgaacgtcggcatagggagtcaggattgtctcctagagtcaaagccttcagagccaaattcctcccatgcgtgtgcttcctgtggcccacagtgtttttcagtttcatttttgaatcagatgccaacattttaaaattgagagtgattatgtcactactgggattctaagctttttgcgacagtgggaggatgaggcaatgctgggcctgataccatcggctggggtggggcggacagacgtccttacttgttcactttacctacccagcctccatatgcagcaagagtttgagacccctgcacaggactttggggactctttgaggaccttggtcaggagaagggtagaattagttctgtgctttggaaggtcctctgatgacaattgatactagcgatgatggtgccgatgatcagaaagaggaaaaggaggaagaagcagagaatagttcatatttactaagctttcatgatgggggctctgccccagtgtttattcctagtagcccatttagttctccccacaagctgatgaggtgcgtatgctgtcatcctcctttttcagacaaagcacagagcggtgaggtctcttgcctaaggtcatatagttggtaagtagcagagccaggtagtctgggtccaggacccacagcactggtgatgggggaggggaaatggtgagggggggtctgggagacgtgagtcttccctcaatctttcaccgtaggagattgtctggttttaaaagagaagatgtgtccacatctaaccccgatctgagcactaatgcaatgtctttctccactgttctcagaaaggctggtttttcttaataaacttgtcaggcagggaaggagggcagaggcactcaagggccggctcaggtggcttggctgcatgccctggctccagactccactgccatgttcccgttccctgcttggccagcataaagttgaccccactgtgaggaccagcagacctcacaagaatgaccccatccacgcctactggggctccacctgcccatgactcaccacacccaagcctctgagcccagtggacttgcaaaagagaaaataaagcacacacataaagaataaccaaccccatgcatttcctggcatcgggtgactgtttggttaagagcttcctcctcttttgtatgcccactggatactcctaacatcccctagctgctgaccacagagctggcttaggtggctgatcacaagctcagcccctgggcgggccccccaccccagccaccagggaagcatggaaggaggccagccgctgggatctgccagctctgggccccagcggccaccctctgcagctcaaagtcacctttgctcctctcctctcctcggctggccagccagaaccagcccagaactccctcccctccgctcagcaggacccaggaactggtccctactgggcaattattaatcagattcttgacattcctcagccccaggttggctggagaagcatgttccccagaggagcagaggcccaggactggcatttggatatgcagctgaccggcaaggtggtgctgtcagccgctgccctgctcctggtgactgtggcctacaggctgtacaagtcgaggcctgccccagcccagcggtggggtgggaatggccaggcagaagccaaggaggaagcagagggctcagggcagcctgctgtacaggaggcttctcctggggtgctcctgagggggccaagacgtcggaggagcagcaagcgggctgaagcaccacagggctgcagctgtgagaatccaagaggcccctatgtcctggtcacgggggccacttccacagacaggaagccccagagaaaaggctcaggtgaggagcggggcgggcagggctcggactctgagcaggtgcctccttgctgccccagccaggaaaccagaacagctgttggcagtaaccctgaccctccccatttcccccgcttgggcagcgaaccgaagagctccccagctggactcattgcagcagccgacggcagctgtgccggtggtgagccttctccatggcaggacagtaaaccccgtgagcatcc

SEQ ID NO: 576 - DNA, 2300 bp, Homo sapien
cctggaggtgacctcaaagcagaaatacagacatggaccctcacttagaaacacacatttactcaaactgaccccaaacagacctacacacaaaacccacctgcaccttgacacacagacccgggcacaggcctatattcacacgcaagcacactggcccattccacaaatacagggaagaagtgccttgaaaccttccaggcagaggacagctagtgacgaatgaatggatgaatatgcaatatacctaatatatatgtgtgtgtgttatacgtgtgtatgcataagtgtatatgatacaaatacatgtatatatacacacagagaatatatatccacctatggaggtcaaagcaggccaggtccccagcaaggctggtgatgtaagggggttgctgtcttccctgggcacacatgctatggcttaaagcttgatctcccaatctctcccgggggagggccccataacttgggccaggcaaagtaccccggtgtcccccttccaattcgaaagctacttggcatctgtcttctcagttagagagagtatgagctcaacaagtttttcatcagggcccccattcccagaaggcccccccaaaatctgatgagccccttgtgctaggagagtggggagaggagggagatctgtcacatgctgcaaggggcaaaggtcacaggtgaggcgaaggggagggatggggacaccctggggccagccagcggtgagcgccccaggctaagacaaggctgaccccactgccgagagagggcgggcagggggtgagattgagggctgggttcattttattgtattttgcctccagcgtggggccagagacgctctttcccccgggagacaaaaggcctgcagttgtggcgtcctgccccgctgggagggcgtttcgcccccaggactcggtgtcccgaggttgaggctactggtcaccctggcttcagaaagcgaagaattcaggaacctctgatcaccccaccctgactcctgatcattcagttggggcgtcccctcaaacccaccagcaaggagctcagagttggtgagttcagagctgtatcaagtcttgacgggctccctccctcccatttcccacctctttgggcccccagatcctcacaccagcaccaactccctgtaaacccaactacctgctggaaaggagttataggcccggcctgggggcctgaggaggacggcggcggctggagacgtctgcacggggcggaactggaaggggaggaagaaacctgtgcctagcacttggcagacccactttgccaagcctcggaaccagatacggttactgggggcttctcagagcggcaggaaggtagagtaagaaccggacaccggggctctgacattacacagaaaaggtcagaattcctcccttcaagtcaccctaggccggttcccggggagcctcactggaggaatttcagagggtgtaagacgagggagaagatgagaaatagggcggactctggccctcggaggccagagaaaaggcgagactccagagaggcgccggacccgaggcagacattcccatacagccgggactccgagagcagccgtgggcgacctgggggccggggactcggcggatccggcccattcatcaaaggaaggcactgggacaaagttggccccctccccttctcccccagcccccaactcgccgggatcggctccctctcttttcacggcggttcaaattctcccccaaaacgaggtcgagccggggattagaaaagagggaaaaaaatattcgttggcgatttcttttcgttattggtcctccgctcccttgcgccctggcccccttccctcctcatgaataaaagaaaagtccgaacctatcagatcgcgctcactgcctcctcctcctcctcctcctcctcctcctcgtacttcggtgaacacttttgcacaacttacccagctgatcactcgcgccccctcgcttttccatttctctttccccaaccccgtcaccccctgtctcctccgtccagccctgaaacccgaggaggctccttcttccgtctgtccccgggtctcctaggggacggggctgtgaaagctggtgtggagggagaagcgagtgtggtccggagaaagaaggcgtggagaagagggagggagcgagagcgagagaataaatatataaataaatacgagaacgaaatccactccgcagtctccgggctcggaaactttggccccgagcgccagagcgccagagcgcgagagcgcggcgctcgccactctgaggctg

SEQ ID NO: 577 - DNA, 2300 bp, Homo sapien
ggagaggaggtgagagaaagagcttcatgaagagatggatagatggaaggatggatggatggatggatggatggatggatggatggatggatggatggataaatggatggatggatggacagagaatggataaatgaatgaatggatggatagatggacagaatggatgggtggatggaggcatggatgcatggatatggctggatggatgagaagatgagtggatagaaggatggaaggatgatggatggatgaaagaatggatgagtagacaggacggatggatggatggatggatggatggataaatggatggatggatggatggatggatggatggatggatggatggatggatgggtgtagatagagtgaatggaagaataaacaaaaagaacctcaatttctaggagagtctcttcttttttccagctgctgttgattatctggccaaaaatgtgagcctctccacccagcgtcgcatgaagctcggggagcactctgctgtgctgggactcctgcctgtggaaactggccaggcctactagggcccctggggcgacttgccccagcccaattcccagcccaaccctaactgacccctgagcttcccagccttgccgcctcacccccctgttgtcctaggaggccaggaaaggagcccacctgcttctcatcaccagccccctggaggtagacagccagcttgtcactcacctgtggttagggatccagagtgatgcccttggagtctgctccccactttccccaaggagggtttctggtcagcctgaggtcctcccctgtcaaatcccatggtggcctctgtgccatctcaggcatggagattggggcccaccttgaacaccttgggtgtccagaggaggatggtgcctgagaggaggtcctacagccctttggacccaactccagtgggggccctagctagaagtggaggtgaagctttcagggctgctctcagctggatgtactgggagccagccctgcaaggagggtctctggctcagtgtcagaaccacagccctttcctcctctagacattgggactccagcaaagaggggaccctggccctggggtcttcccaggggagtcagcaggggggcagtctcacccccacccaggaatttgaaggacttcagaaccctccccagacacctctactgggtgcatggggaaatctagcacaggcagggagactggggagaccaggaagaggcttaaccagagggtaggggcacatgggggtggggcttgtcagccgtgggcccgcccaggatacaaggacccaactcaggcttctggaagcagagggctcttatcctgaagcccaagttcccagcatgtccactccatctggggcctggggagcccacagaacttttcagtttccttcattagctgaatcagatgagatggggaggggataaagtcttgaggatacatgagtggaggagcaggaagtgggctcagaaggcactttcataaccagatccctctgtttgtgggagggcaagcctttgttgcccaaggcttcagctctctgcctgcaagtccacaccccagggagttgagattttgcccaaagccttccgcagaggcccgagcccatccttaccatgccccatcctctaggaagaggtctccatcttccccaaacccctttcagtttgtggggatgcagagagctaccctcagagctttggaggagggttgtagactgggcagggatggtttgccccacagacaagatgatcccccctggcatgttgttaggggcaaattgctgtcctgctcagagtggcatctttcaatgttgcctccatcttggccaagaggtccctgcctcctgatccggcacagctgagctgaggcagatgtgaccagttttcaagctaccagccctgggcagaggaagatgtcaacaattccagagcagagggaagaggcaccttccttgaccacaccagtggcctcctgaagttccatgcttttaagagctgggaccttgggaggatgattcaaaccctcaattcctcctccctgggaactttttaccacctttacctatttatcaaaatcatattcatctttaccatcactgtcactgtaatctacattccatcacctttatcaggtgctgctgagtacaaagcacttgggatgggagacacagcactgaattcacaaacattggaccaaactgtttgtccccatctgggttcatgaggccacctctttgctcaatccatgcctcttgccctcagtcaacaagacattc

SEQ ID NO: 578 - DNA, 2300 bp, Homo sapien
tacaggcccacgggatgaccccgtcccaggagaggtcaggggcaggggaggaggcgccacttcggctctgcagtagctaaagacatccaacatccttcagggtaacttcgagaggctttgggacacaaaggggcaatttcagctggtcatggagcccacggtgccccctgcggcagttgatttcgttgtaaaaagaaacaacctcgcactttggcaaactcacctttctccaagcctgctccacaccccccagttttatttaacttaattcccacaccaagtccatgaggctgaaattgttatccttgtttcaacggggaagaaacagagcctcagagagattaaggaacctgcccatgctcatccagcaaacagctgatgtcaaatccaggtgggtccacgtcacgtggtttcaagggtcctcaagtagagtggacacacgcagcaggatccggttaacggtgtaaggctggtagccagtgcccagcgatgacgcagacaggaggcttgttgctgctcagagccggggaggttcccttgaactgggggcaggagtggttcctaggaggaggagaagctcagactgggccctgaaggaggagcagggcttggctggggtggggcaggagagagcatgtttttatttgtttttattttttattttttgagatggagtctcactctgtagcccaagctggagtgcagtggcatgacctcagctcactgcaacctctgcctcctaggctcaagcgattctcgattcttgtgcctcagcctctcgagtagctgggattacagtgtgtgccaccatacccagctaattttttgtatttttagtagagaccgggtttcaccacgttgcccaaggtggtctcaaactcttgagctcagatgatcttcctgtctcggcctcccaaagtgctgggattacaggcgtaagccaccgtgcccagccgatcatggggtttttgatcacctttttctaccttgaagcctctgcccatcagaaccatggagcgcagcagccgggtatgtgcctgtgacagacccattccagccatgtggtgtgtggcaggttccctagggctcggccacatgttggtaggcctggaaaggagcaaaacagcactaaatggacaggggtctctgattcaaatgggtccctaattcactggagccacctccccgcttctgactccttgggcgtattcacctttgaatttaggaattttcaactttctgttttgccaacaaccctgccctttggtgtggggtccaaggggtcggggacccagagtgggtgttgctaggctgactgatggcagccttcagagggagtgagaccacccctcccttccctccttcccccaccctctttgacaccgctgggttttttttttttttttttttttatcaaaagcactaattttgtgatgtaatgtgatgtagcgatgaaggacccagccccggagtcagaccatgtggtttgaatctcagctctgctagtcaggaagcctgggctggatttcttaatttctcagtgcctccatttcttcatctttgaaatggggttagtaatagtcccggttactgcaaccattatatgagatgatgaaccgcgacaccagcatgatgcctggttcttattgacaatggctaccactttctccacacctatacatcactacatgcctggcctaacttggctggactccagagcttgggctcttttggccacagtactctgtttcctgacagcacttatgtcctttactcctgaaatatttgaaatgtcaggaagatgagacttgtccttggacaagtggcagaaggccagggcatggccaagttatcaggatgctctctctttccaaatagggttcccctagaccacctagcccctctatgctctaagaaagaatcatcataattccaccctcctttcctccctctgggcccccaaacctctccacctgctccaggtgccccacagtcggtggcaggaccatcgctatgtaaatgtctgtgcaaataccctggtgtcaagctgccaattctccagtgaggcaggactacctcctgagaccatcacttcccagccatggggcccagggcaaagaccatctcctccctgttcttcctcctatgggtcctggctgagccggctgagaactcggacttctacctgcctggggattacctcctgggtggcctcttctccctccatgccaacatgaagggcattgttcaccttaacttcctgcaggtgcccatgtgcaaggagtgagtctccagtgtgg

SEQ ID NO: 579 - DNA, 2300 bp, Homo sapien
agattctctctggaagggaattttctatgaatggatgatttccaggctcagggtgggctgtgtgttagttctgagcaaatccctcaccaagacccttccctcccaagccctcaaagaaatgaggcaaagcccttccctgcaagaccccttgtggatgtttttgcatctacctgatttttagccccacccagggagactttataccccatgatcctgccccaccgttgctgttgtctgccagctgggtctagcatcacagggaagggggggatttatactcatggaaagactactgatcctaccggaaaccaacctgtttactgtactgttgtaaatatcatgccctttatatcctgtatattggcttcttttaaataaagtgaaatgtcttagaactgatggtgcttttttttgtttttgtttttaaacagaagatgaatctggtgttgggggaggggtaggaggacggaaggccacagaaaccctcaaactcattagttaattagccataaaataggggatttcatatcacctgttacatttgtagctcacaataaaagctttggaagatgacaaagcaggaatcattacacacattttactgaaggggaagagaggacatgagacatcacaggctcagtaactggcttggcctggtttggaactgatgtccttttaaccacaaagcccccatttttccaggctctccaacgtgcccacaggaggtcaccttcccaggctctggatttgacagtaaccaatgttctagtttttcttgtcaatgggcatgttcagggcaacattgcccaaatgtgaactgagcccacctgtctagggttttctccaaaggtgaagacaaatagccgccaccaattccaatttgctttttgccattcctaatacttggcatttaggtaatctccctctcctactcttcatttaaatgtttacattctcccaaagtacctcaaatggtgtaatctggagaaaaataagtggcttaagatcacgggggctttgtgagttgggtactattacttccgttttacagatgaggaaactgaggcccggaaaggatatgtagtctgcctagtgccctgcttgaggaaccaaaatcagcatgggaactgactcctaagcaggtgcgcggttcatgctgctggaagaaatataaacaaattagaacagagagtaaggaaacgtaacattactttaggaatagattgggtccctgagacctcgtcatcagagaagacttcagaatccaagttttaaatagcattctagtgtttaccaagcacacaacattttgcaaagaaagctgaaatttttacttgggggtaaaaggctcaggaacaactggttttgcggccaaaggctttaaatgaaaagctaagcgttggccagctcaggttttatcttgcattgatcgtaatctgcaaggaagctaagaagctggccggccccgcgcctggagggtaggtggagagcggctgggtcctggccaagaagctggaaggcaggctcattccaggggccgcagcccccgggaagaagcagggggctggccgcgctgtggccctgcggggtcgaggagtctggtagcggacaggtttccagccttgtacaagccaccggcagcccgagagaagtcagtcggactcccatcgaacccggggcgcacgccagagggccggacgcagcgagtccttctgccccgcttcagcacgtgtcccatttcggttatctcattggctctattcagcccctctctgctccgctttggaaggctgccgcaggaccgccccgctgattggttcagaagctttggtgtgtcactctgactggtcgacagagttcacgccctctctcccgggtcataccataaagagaggaggggaaaacgcatgcatttcaggacttcgctttcgggttcccttgtcctgtgttgtgtaatgcccccgttatggcactagaaatattttttattagccgaagctaaatatagtgggactttggctgatcccgagctcggaggacagccggggtgatccgtttccccccgaggatcgaggtggtgcgctctggacggggttgtgcattctcgccgcgcccgggcggacgatccagcgaacagccccgcttctaacccgagatgctgctgccggcgcccgcgctccgccgcgccctgctgtcccgcccctggaccggggccgggtgagtgagcacggggcccggggcggcccgagcgcgcgcctggggcccgggagcctgagagtcactgggcgtcccccgcgccg

SEQ ID NO: 580 - DNA, 2300 bp, Homo sapien
tccccttcaaacagtgggcagtacagggggagaccccaccagaaggcagaaggggccagaacgtgggtgactgagcctggcatggctcctggtgtggagggacgtgaagctgggtgtggttggtagaagcctcccaggaccctagttggaggccactgggctccctctcacttgtgtccaaggggatcaaccctgtggtcctcagtgactcccactgccggccttgggaggcatccaggagagagagctgcctgtgtgggggacaggtggggtgtgccggtgggaaaagaagggctgtctttctccagcgggagttgtcttttttcttcgctctaacaaagtgaacacggaccctgtgtctgctgggaggatgccttccagcccttagggagagcagcacacacggcgtcacactggcccctgactcccaaggccccaaccccatcccaccctgaccagtgccgccgcagccctccactccacggaaaagcccaaggcaccctcggactctggaggcctccccgcaccacccctgctgacacctaggggtctccccacctctctgccaagccccccaggcttgctccatccctcgctcatgtaaaccctgctgtcctccctgcagcccatgacagacctggacacaaagatccaagaaaaggccatgaaggtggacatggacatctgccgccgaatcgatatcacggccaagctgtgcgatgtcgcacagcagcggaactcagaagacgtgtccaagatcttccaggtgactagggctgccctgctcaccagccaaccccccactctcccagagcagccctggcctccacccctgcccggccaacccgtttgcctccacatcccactcactccctccccttccccgagaggtagcactacctgaccctgtggcctccccaggaaaacgtagaatcaggcacccgtggactcataggctcgtctgactgcttcatcctatggctggggagaccgaggcccagagggtgatgtgctgtgctcacggaaggaagtggcagaaatcagtctcctgcccctccagggcttggttcaccagcccacactgtacccattgtcccgcttcctgccccttcctctgggtgccagaactgggcatcatccccacggttggggaaccctggccaggttatggggagaagtgggggagctggcctgagctctggtagaggggcctcagagttcagaagaggagctgttggcctttgactatttttcattccaccccaaagaggctctcgatacccccccgacctaacgtgcaagtgtgggtgcccccgagagacggcgatcaggttagcgccagtgaggctgtcttccagagagggcttggggggccagtccagccgaatgaggcacatgtcattctccgaaggctgcttcttgagtttcgggttgtggtttggcttttgcttgagcccagggcaatacggtgtgttgtcgctctgtgtgtgtgactttgacgtcgctgggccagatctgggcctccctggggccctctctccacctccatgccttcttgctgtccctctgccgggaagcaggggaggccaacgcagccttcgtttgctcgtggcttgtctgcttggagtggaagctttcggtgaaccttgggccgtctgtcctttgcctttgcatgtgagcaggagggctctggtcagcatggggccgtatagcctttgtcaggggttctccatctctctggctggctctgagatatcccaggcaactctgtgtcccggtctggcctgctcctctccccaaactgtggggctgcttctgtggtaaaagggcgagccgagccggcgcacccaccaggccgcccagggcagggaagagtccaggccgtctgtgtccccctgcatgtctcccacctcgcgcttcctgctaacgccgcctgcttcttagaggacctgcacctttcctggcactggccggccccagtcacgctcatcatcctgtgagatgccggctcccttcccagttcacccctaccttccatcctagccgagccccccagttaccttgattgcttcctttccggttcaggtggtccccaaaaagaaagagcgtaaggtggcttccgatgatgacatctctgagcaggacggggaggtgaaccggttctcggacgatgaggtcggctccatgaacatcaccgatgagatgaagcgcatgtttaaccagctgtgagtatccccgtggcccgcacactctccgtttccccggattgcttgcacaggggcggtgaatgggaggcttgg

SEQ ID NO: 581 - DNA, 2300 bp, Homo sapien
gcctaagcaacatagcaagactctgtcttaatgaaaaaaacaattgttttaaattagccaggctcacacctgtagtcccagctattcgggagactgaggtgagaggatggcttgagccaaggaggttgaggctgcagtgagtcgtgatcacaccactgcactccagcctgtgtgacagagcaagaccatgtctcaaagaaaaaaaaattaggagattgactatcctttagctcttccatttaattcactgtttcatgcttgtaggccccatctcctagcaagaggcttacggttccctgttgaaaggttgtgtacagctcaccccgggtagctgcagcacagtttaggcaacaggacaatctgtctcttgtcttttctagttctttctcttcaacaatgttatcttttccttccctcccatttccttgtgagttaaaaggctgacctcgagaccacaggcttcattgttaaaacacgcaggggcaggttgacatcagagtgcattacatcatctgctgaactgcttagactggcgggagcagcacctggcagcactgatggcgcagaccttcccactgtccaaatttcgctccttctcagtgttcctggggccctggacagagccctgggtgactaggtgtcagtatgtttctgaacaagccagacatttgtaattgtcaggtcccttcattggaaagggaattggctgtctcacagtttctttggtcagccagaggctgacccagaagcttcacagagaggccttgcttctcggcccagactgcttcccagtcgacagctatccaattgacattggtgggagcttggtcacagtggggctgagtgcctttggtggaatatttgtttatggaggcaagtatgtcacagcatggccaccgtaagccagaccagagcctgagcagatcctgcagcagccaacagcctcagattccctacagggctggaagatcaagttgaatgtatccatccatgcccatctgcaggcagcagaagcaggcagggtgtccttgcaccctctcctcctgctttcccagagtccagcatctgtgccagtgccacctatagacctggtaacttttttttcccggttctagtgttgtgtttgtccccacctctccctaccagtgccccatggagttaggatagggcatcaagcattcatggcatgagagcaccattcaggatctaaggagagagtgtacccagaagcgtgtcatcaggaaggacttaagtcacctctcagtgctgattccgtgaccttttgtcaaagcttcagcgtggagaaggaggtagggttaagatggacaggctacctggcttcagaacacagttttttccacgatgtgagacttgggcagaatccttacctcctctgtactgcagttttctgtttctttaaaattgggatagtggtggcactatcccatagcattcttgtgagtactaagtgaaataatcccgtaaagcacttagagcagtgcctggcactgagtctggtgtggtcatcatcatcatcatcattgcaacttaggacgcatgaggacaagaagcagcgctcatctggaagaggctgttctaacgaaggcgggaggatcctagatcagaagaagacaaaccggaagagggagcctaggaaaggaaccacatgcacatttagtgcaaaccatgtaaacataacataacaagactatgtggagcaagggggagtcaggctgtggacccaccagggaatcttgattcatgtttttggccccatcactcactagcttgctgactttgggcaagtcacttcacttttctgggcctctggagttactagcacagttccatgttggggagattgtgaacgtccctgatatatggtgctcaggaaccagtagttgcttggaattgtattagagctggggtaggagctagacatggggccagggaagaagggaagatgccgcgaagaagggcctggaaggggacgaagggcgtggattatcagaggaagtgggagtagtcggcaaggatgggtggggagtgttgagtcatccaagcgttcagcaaatgtcacaagacaacgacaaattgagcaaattcttcctgctcttgctgccgggtcctgcttccaccctgcttttattttatcatgccgcttttcttctagaacccgagcaacttcccgagaagagaagaacctccaaggctttctggaacagcccaaggagaagtgggtggagagtgcctttgaagtggacgggccctactatttcacagtcttggcccttcacatc

SEQ ID NO: 582 - DNA, 2300 bp, Homo sapien
cttgagtgtcagcagttgaaaagctcacctgggaacagtgaatgaatcatagtgcaacaacccttggaagctgagacttggcattgctggcacgaagatgctggcatgaagaaagggggcttttctgatggcaggtggcaccttgccagggctccagctggatgacttcctttgcttcagtggttcctgtaggaagagagaatagcagaagggcctgggtctttatccttattagaagacagctcaagggctttcctctcatgcacctgtccttttagtggaggtagaaggttagccctgttcctgagcatctccaagctagggtgggagagggtgtgtggaaatccccttgacatgccaccggggttcccctacagacaaatgaaaagggccaggtcgtgaccaagacagcactcctgaagcagatggaagagctgatcgaggagcctggcctcacgtgctgcatctgcagggagggatacaagttccaggtacagctgctgggcctacggtcggtcctgagggcccagcctgaccccttgttctaggtagcatccccctcctccaggccattttgttcttagctaggcaagatcaaggcctgcatcttaggagattaacaaaaggaccagctgtcctctttagaggcaggaaggcgagctcatccgaactttagactttgttatctttatcatcatcatgacaaatgctgctcattggattcttcctatatgtgaggcctcatgctcagagctttgtgtaaactggataattttatttaaacctgtaaaaagtctcaacttgtggttaagcaaacaaaggtcacatggcagagccagaattccagcctaggcttctcagactccagacctgggcttttaaaaacataccatgctgcctccattcagggtaactggggagaaaatcagaactttctaggcttatccaaactagattccacctgaaaggagcagagcagccagtgacctgctggctctcctgaaggctcaaaggtggcctcttctttccagctggaacttactgcttagaatacaggctgtgaaagggcaggtgcctgggccacagggctcgttagtcctgcgtaatgcaggctcttcagagctgcccagcaggttttgaaaagcaagggaatatcaagaagtcacttctgcattttcagacagatgaagcacaaagtaaagaaagatggccgaggcttgcttatgtgtatgcctctgcatctgcaccgcatccccttcttgctggttgctcccataatccttgtttcactagggctgcggccagccaagtgcttcaccaacagactgaggggctggccttacctgctcttctgaacttccctagtgagagcaacctgaaacccaaggcattgcccaagaagggcggcagttcccctctattctgcttctcctgagcctgacttggagtttctcctcccctctccttatgttgtcgtctttgcagcccacaaaggtcctgggcatttataccttcacgaagcgggtagccttggaggagatggagaataagccccggaaacagcagggctacagcaccgtgtcccacttcaacattgtgcactacgactgccatctggctgccgtcaggtaggccctggctcttgcggaatggctccttcagtaggcctgcctgtgggcctggagcgggtgggactgccatcctcgtggttttaaatctgctccttagtctctggagagtagggtgttctgcctgacaccatataggtccccaagcagttatttgaatgataggaaaatatgctttggcctgggcccaaggctagtgagaacagccctgcctacctgagtcagcaaagccagtgtgtaccacattgaggctacaaatagcaaattctcttcgcagggtcaggagcctgggccgactgacttcttagtgttggcatgcccccacccccacccccgcccccccgcccaggtgcctggttgccacgttaatgccagcagtcgcttgtccctgctctcctccctatccaggttggctcgaggccgggaagagtgggagagtgccgccctgcagaatgccaacaccaagtgcaacgggctccttccggtctggggacctcatgtccctgaatcagcttttgccacttgcttggcaaggtgagtgttgagtatttttcatggtggaatggaggggatttgcaggggatgggacaagacccgctatcagcccaatcccctggtgacaccatttcctgttaccttccttgggaatccatgtctgtctgcttgctgact

SEQ ID NO: 583 - DNA, 2300 bp, Homo sapien
gggtttcaccatgttggccaggctggtctccaactcctgacctcaggtgatccgctcccctcagcctcccaaagtgctgggattacagacgtgagccattgtgtctggccatccagatttattcttagttaccaaattgaattactttctttagaataaggctttatctagttagatacttggcatttatgctatggccattcatttttcttgcaacacatcttgttgtgtagctggtcctgtgttagactgaggagacagctgtcgcctgtgcctgttgggagcttactgtctggtggaagatagagccaaatacagagtagtaactaaacagcgagatagatgcagtgtggaaggggcctcaggaaataggattgttaagtagagggcatggcacctgcaaaggttcagaggccaaagagagcttaaagccttccaagaattgaaagcagctgcagtcggaggcgaggcatggcaagagctgccgatggagatccaagcaggggaaaggcatgttctttctcccagaagaggagtgtgggttttctcctgagggcagtgccctggccatattacagagagtgaattgaagggaggtgagattggaggtaggaagaacagttgacaggcttttatcgtaattgaagtgagagaaatggcagcttaaactagttcatggatagattcaacagagattgagctgggaggaagaataaatgggatttggagagtgaccgaacgtgagaagctaagaagctgaatgaatcaagaacctgctcagtttctggaatgagtgatgaggtgaatggtggtgccactgagatggagaagatcagaggtttgcgagtaaggtggaggagagttcattagactatgctatgaatgtatggtctgtcctattaataactagaatgtaagttaaatgagagcaaggtctttgttttcccagcaccgaaaacacacatgtgcaagcatgcacacacagtaaacagccagaatgttgagtttggggtacctgtggaaaagctcagtaggagttgaaatatgggctcagcatttaggagcatgagacatgagggaataggtaatttcgctgagacacagattggaagtggacttgctgtgagaacagatttatgagctactgagtgatctgctggctgtgttattttcagcctgttgtctcatatgtaatcattgctgtcaagtcacttgtgacaggttggtgaggatttcagggatgtggtaatatttctcagtgagctcacctggagtgctttttccaactacacctgtctttagccttctgatgttctccacccccgtttatcacatagcgctatacgtagtgacttccagctttttcaggcacagaggtttcttgttaatatcttttttgttgttaaagtttttcatgtccatacctgcttgtagtcattgcacctctagtatccctagcctgagaaaactgtgctcctaggtttggtggacccaggggctcccgtggagaactcagggcaggtccttaggagaacgtccagtgcctgctctggctgctggttcaccactcagtacacatcaggtgttgctgcttgtcttaccagaatacggggatcttctcctggcccctttccacatcctctgtgatggatgctttgcatatgttatctagtttttagtcatcacagcagcccttgcactatccccattttatagatggaaatactgagcttagagcataggaattggtcagaggcagtggcagagccaaaccctcttccatttgtctgtgtctgtcaaagtgtggaatcaaaggacctgattgcagctgagcaggtgacatgagatggtgcatgctggttgagtttctaaacctttaagctcccgggaagaaggtttgtctacataattggaggcatgtgtctctctggtctcttactggcaggttctgattggaactgattccatcccgaacctgcataagctggagcaggtgtccagtgatgagggcattgggaccttggcagagaacctgctggaagccctgcgggaacaccctgacgtaaacaagaagattgacgcagcccgcagggagacccgggcagagaagaagcgcatggccatggcaatgaggcagaaggccctgggcaccctgggcatgacggtaaagctaccacctagagtccccatatttctgcccacactgttgatgaggaggtggccatgggacagccctggggttggccatggggaaagagaaggctggacagagtaggaggaaggaactaggtgtgttcggc

SEQ ID NO: 584 - DNA, 2300 bp, Homo sapien
gtcctgggtagtagtccctattgattggagacagtttctactcctgaggaaggtccaggcttggaattagacctccgcttatagcttggtaaccttgaacaagctgtgtaaccttatgtaaaaggatcatagaaagtacttaattagcataggacctggcacagagtaaaacattcaataaatatttgttagattattacatagtgttctaatgaaattgaaggagatagtgtctttaaaatgtttcatacaatgtctagcttctagtagacacaaaataaaattagcattctttcccctaagtgaattgctgtgcatttggattctagatgttgtggttgagactttgtagaaaaatagaggctctccacattgctggggctttaagcaagaccaagtatggagtcctttgcatttgtctgggcctgtttttaagtacctttctccaactttctctgctcagggagagcccatgaggattgtttatcgtatgcgggggctgctgggcgatgccacagaggagttcattgagtccctggactctactacaggtagatcatggcactgcacattggatctgaggcttgggactcatgagcggctcacgtcccaggacttaggggcattctcagttgcttctctcttgtacctctgcatcagaattgtggggagattgtttcttcaattgaggaaaaaaagaggtgtctgtggcatgatgcagataccactgagtgttcaaaaaaaaaaaaaagaataccagcaaacttttagaggaaaatgcaatgaacagtaaactggagttcagatttatttttaactccctctccccccactccattgatggtattggtgctcatactttgacatttgagtaagtaattttaattgacttgaaactttaaaaaagctcctactgagagtgggacagtttaatatcatccatcattgaccccttttattggccgtgtctttattggagatacggaaaagggctgtcagccatcagccaggaatagggctgtcttatcctggcctattttattcccatcttcaccttaccctccatttctgcttggcttcccttctcccctagatgaagaagaagatgaagaagaagtgtataaaatggctggtgtgatggcccagtgtgggggcctggaatgcatgcttaacagactcgcagggatcagagatttcaagcagggacgccaccttctaacagtgagttgggggcagcaagttgtgggggccagcctttctgcactgggagaggcccctgtggaaagaagctatggccactgtgtcattttaccctagagggcagcatggtgccgtggagcagtgcgagccagtgaaggacctggcagttaggactacattcttaggcacaccttttcccgtcctgctggcccacttcccttctccaatacctctctatagagccagcatctgactgtctttccccaaatagctgcacttgtgttaactattatcattgttgttgtttttaaaatggattttgtaatgtaactcatttcttgcattgtagggttttgtttgggtattcatccaactaatctccttagtgaggattagagcattccagagaggcaccacaaatactacactgttattttcactactccccacccccactcccccagggtttatgagaatatgtattattgttattattgtgcctttgttttaaatgacctatgtggttctgagctctcacaggccacgagctttgggatcattttctttactattagtttagggtctgagttgatgctgggatttcccccaagacaacaaacagagcatcacctcttccattaggaactgctgtcattgccgttgtattagagatggtagagatatatcccgccattggagctaccagcctaatgtgagagcccagccatctcaccatgtcccctgaagagccgcttctccctcctgtcctcttcatttcaggaggagcccctgctgatggtgtagaccctgcttagacatccctttcctactggcccccatgtcctacactctcatgtggcctcatgggttttgactggcttttcttgtcaggtgctactgaaattgttcagttactgcgtgaaggtgaaagtcaaccggcagcaactggtcaaactggaaatgaacaccttgaacgtcatgctggggaccctaaacctggtaaggagcatggactgcaggtgaagaagagtgggccttggaagtctgggtgtgaaagacctctcagttctgggctcagatgaaatggactcacggcttct

SEQ ID NO: 585 - DNA, 2300 bp, Homo sapien
actgttggtctactgccagtggggtcgttgttgcactgttggctgagggacaggcagagaactgtcccagccagtacctcttgttacagacattgtagcatcaaaacagaacaatacagatttaatccctgatgcatataaaaaattaagaccaagcttctgtgggcactctggtaaatggtggtagtgaacccacagaatgcaccagggtatctcccttgaatggtgaagcaagatagaagttgagaatcatttgcccctcacattgatgtgcttaatccagttagaaggttttctggcaaagttctgagtttgtgatagcctatgttctgggacttcagcttcccttctctaccttgccctccatttccctgataagcagcctacctctgtagctactgactagaactagaacctgctctgtgttcagtgtctgtggtggttctctctgaggaattctcactgggcttctatagccggaaacacttctgcaactggcctttctggcaggttgtcttcctccagggtgtcctgtcctgaagctcagcatagacttggaggcaggctgcttgaattagcgtgctaccaaatcccccactggatttcatcagtggttactttgagctccaatttctagtctgcaaaatgagaataatattaatatatgtgctcagtgccagacatacagggaactttccttattctccaatttagtgaagttgctgtaattttgtcatttataaaagacttgattcttatcattctagtcagattgtgggtttagcttaaagaattgtggatgaaccccctccttgtatggttatataaagacgtctgaatctctgtaggtaaagattgatgtactctcttttcctgttttgattcccgaggcttgagtcaaagctctttgatttaaatggccttgtttgtcctgggtagtagtccctattgattggagacagtttctactcctgaggaaggtccaggcttggaattagacctccgcttatagcttggtaaccttgaacaagctgtgtaaccttatgtaaaaggatcatagaaagtacttaattagcataggacctggcacagagtaaaacattcaataaatatttgttagattattacatagtgttctaatgaaattgaaggagatagtgtctttaaaatgtttcatacaatgtctagcttctagtagacacaaaataaaattagcattctttcccctaagtgaattgctgtgcatttggattctagatgttgtggttgagactttgtagaaaaatagaggctctccacattgctggggctttaagcaagaccaagtatggagtcctttgcatttgtctgggcctgtttttaagtacctttctccaactttctctgctcagggagagcccatgaggattgtttatcgtatgcgggggctgctgggcgatgccacagaggagttcattgagtccctggactctactacaggtagatcatggcactgcacattggatctgaggcttgggactcatgagcggctcacgtcccaggacttaggggcattctcagttgcttctctcttgtacctctgcatcagaattgtggggagattgtttcttcaattgaggaaaaaaagaggtgtctgtggcatgatgcagataccactgagtgttcaaaaaaaaaaaaaagaataccagcaaacttttagaggaaaatgcaatgaacagtaaactggagttcagatttatttttaactccctctccccccactccattgatggtattggtgctcatactttgacatttgagtaagtaattttaattgacttgaaactttaaaaaagctcctactgagagtgggacagtttaatatcatccatcattgaccccttttattggccgtgtctttattggagatacggaaaagggctgtcagccatcagccaggaatagggctgtcttatcctggcctattttattcccatcttcaccttaccctccatttctgcttggcttcccttctcccctagatgaagaagaagatgaagaagaagtgtataaaatggctggtgtgatggcccagtgtgggggcctggaatgcatgcttaacagactcgcagggatcagagatttcaagcagggacgccaccttctaacagtgagttgggggcagcaagttgtgggggccagcctttctgcactgggagaggcccctgtggaaagaagctatggccactgtgtcattttaccctagagggcagcatggtgccgtggagcagtgcgagccagtgaaggacctggcagttagg

SEQ ID NO: 586 - DNA, 2300 bp, Homo sapien
tggagagtgaggagtaggtcagggaacctcgtttgccttattgcccaaaatggaactctttctgatgccattttcatcgtgccatactgagctggtttgtgacttcgtcagggacctttacctttttttttaattttaattcagacccacccagtaatgcaacagtgggactttttttttttcccgaagtttcactctgtcacccaggctggggtacagtggtgtgatcgaggctcactgtaacctccgccttctgggctcaaaccatcctcccacctcagcctcctgagtagctgggactataggcgtgtgccaccacgcccagctaattttgtattttttgtagagatggcatttcgccacattgcctagcctggtctccagcttttgagctcaaagtgctcacaagaccttattttttaaagaccatattttctcaccttcatgttactttaagttgtgttttttcgcttatagaggacagtctacctaatcttttagaatgaagctaaaaactaactgtaacttccttttgatttgactggaacacaggattatttgacattttctgagtgcctgttttgggcaaggagatgctagttaaataaggcacagtccctctccttgaggaggttatatcctgagagagagcaagacatgtacacagccaaccatgatgaagtgtgtggacttgggtgttatgggtttcaaactgaatgtggtctgaggataaaatcaatcagcatcaaatttccaatttgaactattgatattgccatgtagggcatttaaagacttaccaggcagaaataatttgtcagtgatggtacttcagttagaattctcatttcaccttccatgggagaggctctttcctaacttggccgctttgatttctggcaggtacagaatcagaaaccaaggccttcatggctgtgtgcattgagacagccaagcgctacaatctggatgactaccggaccccggtgttcatcttcgagaggctctgcagcatcatttatcctgtaagcagtgcggtgcttcccatggctctcgagtgtcagcacagcccactttgccatgaagcctcttggtgattcattaaagttatggggaattgtaccagctgtgggccacttagtcattagtgaaagaagatccaccgccataaaagtgaagcaacctcataattttcctcttgctaacgatgggacatttaatgaccttccttggtcttatttcctagattcaagtaaagaatcatgtttttttaaaaactaggtctaacctccattaccaaaatcccattgcatatcaatccaacatactgtggaagaagcggtattgagcttgaatataaagatatttttactctcttccttctttagctgccctgtattttgtgcacacatgcagcgtgtgtttttttccctagcctgaactgtgtagaagcacagtatcatccagagaacccttcctgctattgaggaaagatgaacactagtatcatgagctagcaatgagagctcattgggggtgtgtacctgagtgtcatgtcccatagagaagcccttttcttgacttcagggtcatcagtgacaaagtcctctggccccaaattggttagcatcacatgagaccagcaggaggaggaaggaaagtccctcctcgcaccccttccccgattttttaatatatctctcatatgtcactccttgtctgcttgttttgttaggctttatctcctaatccaccctggggtttcagggtagatgcttgatattttagtctacttgagtttgtttagatttttggaagtacctctgagtttcctgtcctttgtatctttaaatgtttggggggcttgctgagtttggtgtgttttcctcgagtgtccatggaacaaggtagcatggtataaatctccacctctgccatcccttctgatgcacccttctgtctgtcctccaggaggagaatgaagtcactgagttctttgtgaccctggagaaggatccccaacaagaagacttcttacagggcaggatgcctgggaacccgtatagcagcaatgagccaggcatcgggccgctgatgagggatataaagaacaagatttgccaggactgtgacttagtggccctcctggaagatgacagtggcatggaggtaatgaccataggacagtgctgcccacgtttacgattaggggcttcctcctaggctaaccaaatccaggtgcttcttcctagtagctgattaacttggggcaggtggccttcagtttctccactctgtaa

SEQ ID NO: 587 - DNA, 2300 bp, Homo sapien
tttgttcaattcagtttttcttcactgtgtgcaaatgtttaatctacctgttgaattcttgtggttctagattttatggtctcttttttatttttcattttttgagaccaagtttcactcttgttgcccaggctggagtgcagtgacgcgatcttggctcaccgcaacctctgcctccaggattcaagcgattcgcctgcctcagccttactgagtagctgggattacaggcatgcaccaccacgcccagctaattttgtatttttagtagagacgggatttctccattttggtcaggctggtctcgaactcccgaccccagatgatccgcctgcctcggcctcccaaagtgctgggattacaggtgtgaggtctctttttaaaaattcacatttccctcctttatatgatctataagcatattaaacatttgtgtctgataattctaaaatttgagatatttacatgcctgattctgcagtttgttattttggctcttgctgatgataccttaaagtcttgttgtgttttatgagttttgactgtgacctcatattttttagctttatctgtggaaattctttaggactgggccaaagatgggtttctccagaggaggtaaagaactgcttctgtgaggcagtgcagggtactgctgtcccagttctgagcctcaggattttcagacctcctaggtagtgagaggtttgagccgcaaacccctataaggggacagctcattacaagttttcagaggagatttttccctgccacttgatggtaaagtttaaggaaagtcaatttcctcagttatttggttgggggaaagggatagctgatctctgcaccaagggtgtagctctttggggtactagatttgtatttgtggggcatggggttgggggttcctgctagactctttgcctcagtggattcggggctttatccacctctcaaatctgggcagggcatggaaaccaaagctcaacgcaaaaactgactcgtgttttgcttatctccctggcttcccgatttctcttagtttatggcttttggctgttctgtgttagtgtggcagttcactgatggatttttattcaacactttaaattgtttttgagtggtggagagtgaggagtaggtcagggaacctcgtttgccttattgcccaaaatggaactctttctgatgccattttcatcgtgccatactgagctggtttgtgacttcgtcagggacctttacctttttttttaattttaattcagacccacccagtaatgcaacagtgggactttttttttttcccgaagtttcactctgtcacccaggctggggtacagtggtgtgatcgaggctcactgtaacctccgccttctgggctcaaaccatcctcccacctcagcctcctgagtagctgggactataggcgtgtgccaccacgcccagctaattttgtattttttgtagagatggcatttcgccacattgcctagcctggtctccagcttttgagctcaaagtgctcacaagaccttattttttaaagaccatattttctcaccttcatgttactttaagttgtgttttttcgcttatagaggacagtctacctaatcttttagaatgaagctaaaaactaactgtaacttccttttgatttgactggaacacaggattatttgacattttctgagtgcctgttttgggcaaggagatgctagttaaataaggcacagtccctctccttgaggaggttatatcctgagagagagcaagacatgtacacagccaaccatgatgaagtgtgtggacttgggtgttatgggtttcaaactgaatgtggtctgaggataaaatcaatcagcatcaaatttccaatttgaactattgatattgccatgtagggcatttaaagacttaccaggcagaaataatttgtcagtgatggtacttcagttagaattctcatttcaccttccatgggagaggctctttcctaacttggccgctttgatttctggcaggtacagaatcagaaaccaaggccttcatggctgtgtgcattgagacagccaagcgctacaatctggatgactaccggaccccggtgttcatcttcgagaggctctgcagcatcatttatcctgtaagcagtgcggtgcttcccatggctctcgagtgtcagcacagcccactttgccatgaagcctcttggtgattcattaaagttatggggaattgtaccagctgtgggccacttagtcattagtgaaagaagatccaccgccataaaagtg

SEQ ID NO: 588 - DNA, 2300 bp, Homo sapien
ctcaggtgtgcccttgagcgccctcaccttgctccacttgcctcctccaggatgtccccgttgaggccctcaccacggtgaagccatactgcaatgagatccatgcccaggctcaactgtggctcaagagagaccccaaggcatcctatgatgcctggaagaagtgtcttcctatcagaggtatatctttctcttcaagacgccgggaagtcctgcctgcgctctgacagccctgccttctgtcactctcatttacttacctactacccctgcaacccttggccttgcagggatagatggcaatgggaaagcccccagcaaatcagagctccgccatctctatttgactgagaagtatgtgtggaggtggaaacagttcctgagtcgtcgggggaagaggacctcccccttggatctcaaactggggcataacaactggctgcgacaagtgagtggccacttctggactcttcaccccctgcgcccctgaccccagactctgagcaatatgtttctgcccctcaccatgtgtctgcactgccatctcttctttctctttgctcttcttgcttcctttcaaatagggagtgagtacaggttcttggttgtagctgttgggctagcatggtggactggccgaaacagaacttcctctgcttatcttaacacgctccttgtgctttctgctttcctccctgaccatagtcccttttctccttccatttttcgtatcttctgctgtcctttctctccctcctctctctagctaaagtaattctatgttaggtaatccatttgtccattgatatataaaataagaaatacttggtttacatttaaatgaaagtattcagcatataagtgtccccaaaaaagaatgatcagcatctttgctaaggaagatccctttttcctacttcacttattgtaggtatgttcttcacatctcctgatggagaagtctccaggcagaagcagggctctttcacagcccctttccccatctaaaacagtagagtcttgtgttagctggtgatttttacctcttaacattttcctagagaggtgcccagaagacctctcctagatgggtggcagttgactgccctgctgggggcctggtgaggcagggcatcctctgagtctacgaccccttctctcccctgtcctgcaggtgcttttcactccagcaacgcaggccgcacggcaggcagcctgtaccattgtggaagctctagccaccattcccagccgcaagcagcaggtcctggacctgcttaccaggtaccatttgggagtgggatgaggagcgtggttagacttgctctagagccttttcatcttccccggggaatccatggatcagggtaatgagaggcacacctctgggtagaagaccccagaaacaacaaagtgttaaaaagctgacttttagtgatggtagtggtggtggtcgttgtggtgagggtgttagcagcagcagcagctaatatttgagatcttatgcagctaatattgatcgagattgagtgcataaatgcttggcatgcattatcttatttaattctctcatagcaatcagtgccaaaatatgaatgcttagattctgtggcattcactccctgcagtgtgctctgaatgcttcctagatgtgggaaattcccatgtgggaattggagctgtcttggatgctgttcctccaccctctaggaagcaggagagacagacagcagaagataggaaagattgggaggagaaaggggagccttggagctgttcgaaatgctagagttcttgactagagtgccctgtccctcttggtggcagttacctggatgagctgagcatagctggggagtgtgcagctgagtacctggctctctaccagaagctcatcacttctgcgcactggaaagtctacttggcagctcggggagtcctaccctatgtgggcaacctcatcaccaaggtatcctaccctattgcccaagagagccccttccctaattcccccttgtaccttgatgtaaactctactatggtgttttgtttgtttgtttttgctgagaagaaatatttgttgaaggtgtttggaaatatttttatgacttcattgtatttattatgtagctgtagcaaactcttgggagcatttggactgtttacagtttttaagcaatcccttaccagcgctgtgactgttggcttcctggaaaggagttctgcaagggttcgattaagaagatgtaactacagagtgtctggtgctgcaagctcctgggacagtggtggaggtaact

SEQ ID NO: 589 - DNA, 2300 bp, Homo sapien
taatagatttactcttctttttcaatgaattaacaaatatcttcagaatttctcagtgttttattttttattttttttttgagacagggtcccattctgtcacccaggctggagtgcagtggtatgatctcggctcactgcaaaccctgcctcctgggtgcaagcaatcctcctgcctcagcccccttagtagctgggactacaggcatatactaccgtgcccagctaatttttttgtattttgtatcgaaatggagtttcaccatattagccaggctggtctcgaactcctggactaaagcatcatctgtctgccttggcctcccaaagtgctgggattataggcgtgagtcaccgcgcccggccagttttagtttttaacatgagaaatggcaatagatacaaccatgtaaagcaaagctctctggagtccgtaataatttttgaagattgtaacagggttctgaggccaaacagcttgagacacgctggactggagtgtcatctgtggctctctctctgcaggctgcttctggttagtgacagtttgcattctggaggctgcttgtgaccctaggaaggtttttgcttaggaaactgcaaatcagccgtgggataggaattagtgtaagtgctataggattgtaggaagccagccacagcttctgctgcacaataaaaatgagtgaccttaagctcaatgtggagatgctgctgctaaattggatcaaaatggtttaacaggaacacatatttgggcataagagatacacgtgttgatcctcctgatcttcttgcctttgcacatcaccccctggggcaccagtgccatgctgttggggctatggctcaggtgtgcccttgagcgccctcaccttgctccacttgcctcctccaggatgtccccgttgaggccctcaccacggtgaagccatactgcaatgagatccatgcccaggctcaactgtggctcaagagagaccccaaggcatcctatgatgcctggaagaagtgtcttcctatcagaggtatatctttctcttcaagacgccgggaagtcctgcctgcgctctgacagccctgccttctgtcactctcatttacttacctactacccctgcaacccttggccttgcagggatagatggcaatgggaaagcccccagcaaatcagagctccgccatctctatttgactgagaagtatgtgtggaggtggaaacagttcctgagtcgtcgggggaagaggacctcccccttggatctcaaactggggcataacaactggctgcgacaagtgagtggccacttctggactcttcaccccctgcgcccctgaccccagactctgagcaatatgtttctgcccctcaccatgtgtctgcactgccatctcttctttctctttgctcttcttgcttcctttcaaatagggagtgagtacaggttcttggttgtagctgttgggctagcatggtggactggccgaaacagaacttcctctgcttatcttaacacgctccttgtgctttctgctttcctccctgaccatagtcccttttctccttccatttttcgtatcttctgctgtcctttctctccctcctctctctagctaaagtaattctatgttaggtaatccatttgtccattgatatataaaataagaaatacttggtttacatttaaatgaaagtattcagcatataagtgtccccaaaaaagaatgatcagcatctttgctaaggaagatccctttttcctacttcacttattgtaggtatgttcttcacatctcctgatggagaagtctccaggcagaagcagggctctttcacagcccctttccccatctaaaacagtagagtcttgtgttagctggtgatttttacctcttaacattttcctagagaggtgcccagaagacctctcctagatgggtggcagttgactgccctgctgggggcctggtgaggcagggcatcctctgagtctacgaccccttctctcccctgtcctgcaggtgcttttcactccagcaacgcaggccgcacggcaggcagcctgtaccattgtggaagctctagccaccattcccagccgcaagcagcaggtcctggacctgcttaccaggtaccatttgggagtgggatgaggagcgtggttagacttgctctagagccttttcatcttccccggggaatccatggatcagggtaatgagaggcacacctctgggtagaagaccccagaaacaacaaagtgttaaaaagctgacttttagtgatggtagtggtggtg

SEQ ID NO: 590 - DNA, 2300 bp, Homo sapien
gtagttacgccagcctgaatcctcttgtgctttagagatttctttattgttgtctgctttttagccattaaactgacgtcataggcaggagacgatctgttttctactcagaaggctatgtatcggggtttgtaacatgaccaagcttgacccttcaggctaaaaaagctcagcttctgctctgggatatgttgggtgatgggtagaggcagcaaatgactatgctgcatctggtaggattgattgtcaaaagtgaaacaaaaccgttcaaacttaacccataattgtggggaaattgaggtaccagagcctcaatgataaacacaggtgcctcagggttttctgctgcttggtaacatgagctgtcatatatccacagaaattccagcaaatctcaacaggagctcctgctagatctgatgtggtccatctggccagaactcccagcctatggtcgtaaggctgcccagtttgtggacctactaggatatttctccctgaaaactccacaaacagagaagaaggtaacagttgctttatggtcagaggggccaacttgccatatttaaccttttttctcttgagttaagaatattatgaacaacccagatatagggagtccatataggaaacctcttttaaatatatctagttttgcatttcttggtaagcactcgtaatatgtctgtgatgtagacagtatacactaacaaatctaacttaacataggacgtaggtcaaggtcaggtggggaaagaagatagaactcattacagttccttggaaaagcaagtgctccttgttttgctagtagccctgattatacataccagaaaatgtttctgcaattagctaaccattttatggcttctccataaaaataaaaatgatcttcctccatcaggtcagaaaagggtactacctatcactaaagctcatggaaacttctaaaggagatagaatccatttaaatgattgaaattaggcccagctttgtatgattctgactgagaagtctggtaggtctagggcagtattcagctagaatgcagaagacaaaagtcttttccaataagacttcaccttgggctttaagttgtttctttactgaattctgtttcagttgaaggagtattcacagaaggctgtggagattctgcggactcaaaaccatattcttaccaaccaccccaactcgaacatttataagtgagctttgttttgctttctacctgtgggaagctcagtcagcattctgaggagttatttgcatggtgataggctcttacataggaattgacaagcgcctgagagaagagcgaatctgcctagttgagattccaatcccctccatgtaggccagggtcttgcaaatagaaggtactcaaaatgtcattgctgagttcagggtttggtgagtagtaatgtagaaaggtctgtatagcctgggcaacatagtgagacttcatctcttaaaaaaaaatttaaaaaagttagccaggcgtggtggcgtgtacctgtggtcccagctgctggggaggctgaggcaggaggatggcttggggccagaagttcgagggtgcaatgaactgtgatccacgccactgcactccagcctgggtgacagagtgagaccctgtctcaaaaaaaaaaaaaaaaaaaggtctttagtttcaagggtttaagttaaataaggtgaaacaaatttaaagaaaatgtcttcctttttttaaaaaaacttctaaaagaggatattggttaaattgacagtttattatttctctggtttagtagtgactgttctttaaaaaaaatttaaaaaaactttattgagataatttatgtattaacctattttaaatgtacagttcaatgatttttagtaaatttaattgtgactcttgagtcaaattttactactttttagaattcctctgaaggatagatcaaagattaggaaacatctaaggtcagttagttgaaatttctttcctgtggcttcgtaaccctattgggatttctcctgtgtccttgagttctcactagggtggggctcactttgggctcactttggctcacattgagccatggctttgtcatgatttttttgtgaaactcagtgcttcctaagatgaaaatgtgttcatgctaagactggtttcttccttagcactttgtctggcttagtggagtttgatggctattacctggagagcgatccctgcctggtgtgtaataacccggaagtaccgttctgtgtaagtaacatctgtacatggacagtcctgaggccaataggt

SEQ ID NO: 591 - DNA, 2300 bp, Homo sapien
aggactttaattaattttcatcatcctcttgaatcagcatattagctagagatccaggggcacatacttagtacagaaggtcagctgtatatctgcagatgaaggctaggtaatggccagttgattatacgggaaaactcatgggtccagtaggacagtgtggcattgaaacagaacattatattaggaagatggtggacaaggtgtgagagagtagagcagtgactggactttataagaatttgggaaacgtgagaaagaaagggctgggtcactgtgcagctgggtgatatagaatttgtatatagcagaattctagaaaataatgtctggaggcagaatagggccacatattagaaaaaagccataaatcttgcagttggaggtttggttttgaaactgagaactactagggcctggaggcttgggaaatactttgaacttccctgtagtaggatttaattcagtgccatcagttgtattttagaatagtttcactttcttttaacagagtgggatctctccttctgtgttgctgactggcataccgattaggcagttcttaacttttttttttaatgctggagattgttcctaagcattaggcttcttgttgaccttggtagcagggtggggttggggagggaactgtattcagctgtgtcctgttggagtacagctcatattttctatcttttccccacccttttaggctgcacatggtccgtctaatgctgttggagagattactgcagaccctgcctcaattacgaaacgttggcggtgtccgggccatcccatacatgcaggtatctcttagctcacctggatctctgtcaggtcatgattggaccgtccttaagcatgcccacatctctcttccagaggacctggaagccttcgtttggtgttaggccacagaataatgaaatctaatttttgagctacaaattatagctcttcattttataaatgagaaagctaagggtcagagaattttttaaatgcacaagttcatccaggtagttattgacagagccagtgcaaaagcccacttctgagattctgagtctctagtctttatgttgatattagagtgtgggccaatagctgttcttccactcactagctgtcttcctcagaggcaaaactgttctttaattcttagtttggtgtaccaccctttctcaagctacttgcttggatataatataggttagtccattaattttacaaactttttacaaaacatttttttgtaatgtcaagtgtggcatatatcagaatttgacttttctgactctgaacactgaagctttggatacctggaatttagaacgctataatggattacagttatgattgatagggatgtcaggaagattaggatttcttctgaaacaccccgtatttcaagtcgttcttctttaggaaattgggttttgtgttttctgtctttgacttctaggtcattctaatgctcactacagatctggatggagaagatgagaaagacaagggggccctagacaacctgctctcccagcttattgctgagttgggtatggataaaaaggtaaaatctgagaggcagactgtgtgagaaacaggattggctgagatcctttctcaggttcccattcgtttcatagaggaacttcacctcgtttcaaggggtaaccatccactgagggctgcattctgttgagtcaacaaaagcgtattcagggcctgctttggcccgagcatagttttggaccctgagcatagttgagggcaaagatgaagttcttaccctcatggcccttttgtgctcagtgaggtgagaacattaaattagttgttcgtatcttaatatggcctcttaagtgtatcgggctctaggtaccccaagtatagtccatggatatactgggggttgttttgtgtctgattcaatctgaggaacattttagggctgatgggcttgacttgaagggatcttgttcagaggatgcctcaagcatcgagtaagtagaggtttctggacttacgctttggcctgcaggatgtctccaagaagaatgagcgcagcgccctgaatgaagtccatctggtagtaatgagactcctgagtgtcttcatgtcccgcaccaaatctggatccaagtcttccatatgtgaggtatttttgctttgggttcatgggtttggggaaaggtaagcggattgtctgggtagtgctagggccagcacagaggtggtagtcctctgtaagaataaagccattgttccctgaggggagtaagattctaagctgt

SEQ ID NO: 592 - DNA, 2300 bp, Homo sapien
caggagattaagactcttcctgctaaagcgaaggtcagtgccagattttcccattcattactttgctgtgaacctggtctctttttatgtttgtatattcatttcactttcccagctctttcaatggaggcccataaaagattttcagtcctttttcttctagatgccttttctttgccacccttctgtacagcccctcaactgaccatgaaaccagttgcatctctgcctctttttctgtgaggatgctgatctgtgggtgtgggaacgaagaccctcctttgtcctctcctcctagatccaagacatggttgctattaggcacacggcctgcaatgagcagcagcggacaacaatgattctgctgtgtgaggatggcagcctgcgcatttacatggccaacgtggagaacacctcctactggctgcagccatccctgcagcccagcagtgtcatcagcatcatgaagcctgttcgaaagcgcaaaacagctacaatcagtaaggctccttctcagatgacttgtgggggagtaggaatggtggtcttctagacagtgactcagaatagactgttgaaaatatctgtgaagaaatgtgactgtcctacttgcacattttgtaaagttaatttcccaaaagcagagttatgtttccaaatgtcaagcacccattggctgcctgtttcaggccagcagttctttggtgcctagtaacgagttatgtcctggaccttatttgagagattgttctctctaggtttaggagaatgacttccctgaagaactgattgaagtatagacctcttcagctggttaatttcccactgagtagtgaagagcccaccacaggtctctgagctggtggtctagcacttgactgactcaggactcttcaggaaagtgaaagcttgagtttagcagtgagcaaatccagctaagcaaagaccattacagggatcatcacattaccttaaatttgctctacagtctattttgaaagaatggtttattcatttacattcattaaagaagtagctcctattgtttattttaaataacccagttacaggagagcctattgttattagctgtacacccaataccaatgccagatttcttggtattgctaggacatgtcatagttagggataacaaccattggagagctaaccacatgtaggcatcatgccgatgcaaatgttataatccagagtttgcttagattagagtgtgagtgtgggctctgtctgggaggagtctttaccagtggtgttggggcagaggtgggagagactcttgacgatctggtaccgttctctgcagcaacccgcacgtctagccaggtgactttccccattgacttttttgaacacaaccagcagctgacagatgtggagtttggtggtaacgacctcctacaggtctataatgcacaacagataaaacaccggctgaattccactggcatgtatgtggccaacaccaaggtaagaatggcactgggctgggatcaatccctgggtagaaggactcaaacaatatggtttgagaacacatctccttttagaaagcaagtatagagtatatactcacagtcacaaccctcggttctagttaaatggttccttagaaaaatggatattcttactcacttggcaaaggacttgtacaggttgggtttccaccaataccagcaggattactgtgtagaggacatcaaagaggtggttaatactggggagaaggaagcctgacattgaagagaatctgctctcttttcctattttcccatttttagaaacaaggaagtcattaccagggagttaaaaggataagttttaatgagcttcacatgttgagacaatgtcagagaagaaggagtcctagttaaaacttaagaacttctgtagtttcttgatgtgtgccttgtctccctacagcccggaggcttcaccattgagattagtaacaacaatagcactatggtgatgacaggcatgcggatccagattgggactcaagcaatagaacgggccccgtcatatatcgagatcttcggcagaactatgcagctcaacctgagtcgctcacgctggtttgacttccccttcaccagagaagaagccctgcaggctgataagaagctgaacctcttcagtgagtcaccaacccctggtgcagactctgtcctcattgtgactgcgaaattgggagccactggcctgtggctgtccaacattctgggatctctccactctgctgatttttctgtcctttcatcaggaaactttgagcttca

SEQ ID NO: 593 - DNA, 2300 bp, Homo sapien
gtctcgaacaactgtgctcaagtgatttgtccacctcagcctcccaaagtgctgggattataggtgtgagccactgtgcccagccaaagttggctatttttaagggaataatagtcagttggaaatatacacatacatacccatatatattctggcattttattaaaatcagtcacagtttttgccaggtgcagtggctcatgcctgtaatccccacactttgggaggctgaggtgggcaaatcacttgaccagaggagttcgggaccatcctgggcaacatggtgaaaccctgtctctataaaaaatatacaaaaataattagccagacatggtggtgcatgcctgtggtctcagctacctgggaggctgaggcaggaggattgcctgaaccggggaattcgaggctgtagtgagctgatatcacatcactgcactcaccactgaactccaacctgggtgacagagagaaaccttgtctcaaaaaaaaaaatgagtcacggttttatttgatactcttggaattaaaagaagtcgtaaaatcagtcacacttttagagcattggtttttagatattaaagatgaagtgaaaaaatacttgggttgggggcccataaagttgctgatttttatgttgccaggttagatcaatgaaaacaaatgtcatctgtcaccacaatttgtaagagattggacattttaacatttttttaaaagaccagtactttgtatttaagtttagctttatgaaaacatttactatgttattcttaatggattgataataactttaacacatttacacagccatccacggtttggaggccgaaatcactgcttttgaatgactgaattgtgcagtgtctcaggcacatgaatagtgcgtgaatccacttgattttatttgcctcattactgcccactttctctgcttccttctttgccaggttcccaccttagggtcccaggaaggtgcctttgagaatgtgcggatgaattacagtggagaccagggccagaccatccggcagctgatcagtgctcatgtgctcaggcgggtggctatgtgtgtgctctcctctccccatgggcgccgccaacatttggctgtcagccatgagaagggcaaggtgggtcctccaattcttgtgcgcttactttaggtcatattgtcttaaatgctaagcaaaacaaattgatgaccacattcggattagccctctgtgggaaaaagtccactgcgttctaagaatgcttcagggacagatcttgttgagcttttcaaatacttgaaccctgaattgatttgattagacctagagctggtatgactaggactgttcctaattagtaaatttccactcaaaacgtattcttcaaagccctcaggaaaaagtaatgattagcagttaccgaggacggcttggctcccagtcttgccctgtttggtcactctggcgggcataagctgagagacaaaagttttcataggaacactcagtgttgcttatgtagtgctgccgtgccatcccagctctgttaagcacataagtaagtttgtattgtgttatagagctagtagaagttggaagagtgctaggtatcttaactcacacttttctgtattctggcctctccatcaccactaatgttgttttaacttttattttaagtgaaaatatggatagtccttcaaacaactctaaaatcattttaaaaacagtttcctagaaaactagaaaaggacagtggtacgtaggtattcttaaactattttgtgaactatataaagagaaattgttttcattacttacctgttctgtcctccatggaaatacattccatagcttttagccaggagtaatagagactaatactgatctaggattttctactagacttatctgtaaagaaaaaagtgtgcaacctgttatccctattgaaagagtttttgttacttgctttgacttctctgagaggaccaggagtaggaataaattagtcattgttcctttgcagatcaccgttctgcagctctctgcactcctgaagcaagcagattccagcaaaaggaagttaactctgacccgcttggcttctgccccagttccttttactgtgttgagcctcacaggaaatccctgcaaggaagactacttggcggtttgtgggctaaaggtaaaaatccggatctaggtttgattgccttgagctgtggattctagtcattttctctcccctgttctcagaactactttttcttattcgttgtggagattaaaatttaaaacctactgaaa

SEQ ID NO: 594 - DNA, 2300 bp, Homo sapien
cattgaattccctgtaacatgactgtatcatgtcttttatcattttaaatttcagttccttggcagacacttgggattagaatggaacaagtattttaagtccttcagttaattcataaaagttatttattgttttttagtttctatcttatttcctggaccagaatattagaagcttgtgtttcatctagaagtcttttattagtctcttttgtcatctaaatttataacatagatgccattccaaatctttgtggcaacacaagaccaaacctccagtactgaaataaatgtggcatttataaaggaagttctttatctggagtgctctctcccaatctattaaccagaaatataaagtatataataaataatttaggtaaaggtgaaaatctccctgtgatagtttgcatttgccttttattctcctggagagggaagggaggacagcagatacatttgatcttttatttcctgaaatttctccaagacagcttttgcagattaattttgtcctctggttaaaataaaattcatgtcccaaagccattataaaattctgggtctccagcctttccttagggctctggttcagtatcttgaaatactgcaatatttatagtgttatggaaagttctttttcatttctgatgtttttatgtttaagaaacttgctgttattattatcctctggtaagtaggcactgaaggaaaatccctactgctgtcatcaaagccacattttcctccaagaccggctttgacttgactgaattttatttcgaatgtaaagatgcaggctgggcgcagtgggtcaagcctgtaatcccagcactttgggagtccaaggtgggaggaacctaggacttcgaaaacagcttgggctacgtagggagacctgtctcttaaaaacaaacaaaaaaaattaagagtggtggcctgcacctgtatagtctcagctactggggaggctgaggctggaagatcacttgagccagggaggtggaggctgcagccagctgcaactctgccactgcactccagcctgggctattgggcgacagagcaagatcctgtctcaaaaaaggtaaagtaggtcatatcttaataaaagtgcagattaatcactaggtaccaattcatttatcagtgttacacaccaagaacaaaagctcttcctaaacttagggggagaatttcagggctttaggaatttgaaaccgtcttcacagttccttcccagtcttatttaggccagctgtaggccacaggctagagcttgaagccgtccaccaatatctcactcacaggactgtccttaatgcacgaatacctttcctcgagcaaactgcttttccctcttagaccttgtagccagatcattttaccggcaaaagtctcagacatctcctgtgaataaaagcttacattctttccttgccagtagaaaaaaggggaacacgtaagcatacgtggcaaattgcaaagagggatgcattgtacgagctggtcagattgttaatgagggcaatccaaacagaagagatttgagtgctaagggaatacggatcagtgattaaaaggtgttgtgagagggagaaatctttgtaaactatggcgctctttagtattactattggggggatctaggcaggggaagaagcaggtgaaagcgttttaggcttcggcctcctcttgtcgtccttagctgtcccaggccagggccattctatacgccgaggcgtagtcaactctgctgccctagacttgcccactgaacccatgccccagactcacctttacccgctgcccggaagccaagtcgctaccacctgcttgagcaactcccaccgcgcaggctcagaagttaacgctctcccgcctttccccgctgcgctaccttctgagcaggcgcagcgtctccgatccgttccctcgccgcggctcgaccccggtgagagcaaaggccgctccgcgcgtcgcgtttttgacccatgacggcggcgcgcagtctgacgcgacagattgcgtcacttccgccccctcctgggaggcggcgctgggccggtggcaagcccccggagggagccgcagtagtacgacggaagatggcgacgagcggcggcgaagaggcggcggcagcggctccggcgccggggaccccggcaacgggggcggacacgaccccgggctgggaggtggctgtgcggcccctgctgtccgcgtcctactccgccttcgagatgaaggagttgccgcagctggtggcctcagtcatcgagaggtaccgggcggcggct

SEQ ID NO: 595 - DNA, 2300 bp, Homo sapien
caagtaagttgagggccaagacttagccactggatttagcgatggggaggggggtggtgaccctcagaagaaaaatatcactgcagcatttgtccctaggtcaatgagtgggcagacctggattttgtcttgggttaccatttgctatctgtgacttgaaaagctgcttaactactttgggacttttctgcaaaatgtggaccataatagctactctgcaagactgtttaagggattagataaaatacaaggtacctggcatggcacccagtacccaatgcacataaaacaagtgcagtgatgagaaattccaaacaggaagctcttttcaccagaaaccctgattcctctgccaggctggagagctccaggttggtctcacagcacaggaatggagtgtgtgatgagtcgtcgtggttctaagggaggttttctctctctctccagagcctgaaccccaacctgctggccgtggtgacagagagcacagacgcgcaccatgagcgcacctttattggcatcttcctcattgatggcgtcactgggcgtatcattcactcctctgtgcagaagaaagccaaaggccctgtccatatcgtgcattcagagaactgggtggtggtaagcggtcactaccagggacccaaggtagctccagaggtctccctgcctcctgagtcctttccagaaacccagttgctgctttggttttcttaggatctcaaattccctggatggcagcaaagcgtgccggttagggcactgggctcaggaatcagattgcctaggtttaatcttacctcttccgtttcctgactgtataaccttgaactagttatgtacacgctctgtgttgcatcattgttaaaatagggataataacagtcaccttcagtctagcaaagaacaatgcctggcacctagtaatgattcaaaggttagctactattatggcttctaagactcttgagaatttcctttgttttgtggtgaactttcgatagcctagataaaactactttgaaagttagtaaacttgatagtaaggaagaaaagtgaggtgctagttgatggttctccttcatggatctgtagctaattagaggggtgccttccagtgcaatttccctttccagttgaagcagctgctaagccctgagctgccacctcctatccctgcagtaccagtactggaacaccaaggctcggcgcaacgagtttaccgtactggagctctatgagggcactgagcaatacaacgccaccgccttcagctccctggaccgcccccagctgccccaggtcctccagcagtcctatatcttcccgtcctccatcagtgccatggaggccaccatcaccgaacggggcatcaccagccgacacctgctgagtgagtgactggggagcctctgggatggctgggttcccttgggcaaccacacttaaggacagagcaagggacacattgctggcagagccttgttgaaccacctgtaagggaaaggtggtgaggagggctatatatcggtggaaaaagtttcttagttcatctttgccacctatgaaggtgaccacttctctctcagttctcatcttttttttgtttttcgagacagggtctcactctgtcatccaggctggagtgcagtggtgtgatcatgactcactgcagcctcaacctcctgagctcacctggctaattaaaaaaattttttttggtagagacagggatttgccatgttgcccaggctgatctagactcctgggctcatgtgatcctcctgccttggcctcctgaagtgttgggattacaggtgtgagccatcgtgcctggctgcctggccttcagtcctcatttctgatataccacctctctatttggcattttcacctagctcaaaaagtcagttcctgatagcattgttaacatagctagcctgtgctgacagcttgcagaaactggcagggtctattgcccaggctggagtgcagtggcacgatcttggctcactgcaacctccgcctcctgggttcaagtgatcctcctcctcagcctcccaagtagttaacaggcgtgcaccaccacgcccggctaatttttgtatttttagtagagatggggtttcgccatgttggccaggctggtcttgaactcctgacctcaagtgatccgcctgccttggcctcccaaagtgttgggattatatgtgtgagccactgcgccagccctaaaatctcatccttatgtaacctaagcccaggacttaggacttagtggttaacaggttcctgtgttt

SEQ ID NO: 596 - DNA, 2300 bp, Homo sapien
aaatgaccacaagagacactgtatcatgcatctctggcttcctaggctgggcagattgctagtcttttctgaatgagctctgtgatgaggttccggtgcattcatggccatatggtttatgaaaccattcttttctgtgaaagaatgaactgtgaatccttctagggaaagctagggaaaaatccctctagggaaagctgagggaaaaaagtctttttttttttctttttttgagacaagagtctcgctctgtcacccaggctggagtgcagtggcgcgatcttggctcactgcaacctctgcctcccaggttcaagcagctctcctgcctcagcctcctgagtagctgggattacaggcatgcgccaccatgcccggttaatttttgtatttttagtagcaacagggtttcagcatgttggtcaggctggtctcaaactcctgacctcatgatctgccagctttggcctcccaaagtgttggggattacaggcgtgagctgctgcgcctggggggaataaagtcttaacttggtattgtaatagctaccattgcctgtgtactaaaaatttgccaggcaccttatactcattgtccctaaagcagcagccatatctgtctggagacaccattgggttgatctgggtattgtggaaacagcccagtgccctctaaagctggccatggtcccaactgccaggatgaacttgattcactctgctctgattcagtcctgccccccaccctctctcttctctccattcatccagccctccaacggatagctgttgagggcctgctctggaccaggcactctgctaggcaatgcacattttcttaagctgaggattaatttgactttactgtttatttctgctgcctggatccagcaattcaaggtaaaacctgcttcttgctgccttgttgctcgttgcctgctcacatggctagcttttggttaattgtttttcttcctaacttggaccaatgaggtacatccttggggtgtgtgtgtgtgtgtgttgactgccatgcttgtgagttgtcctgttgcttctcacttctcttccttgagcagaggtgggtggaaaataagataagcagaggttctgctccttttttagtgagttattaccatgtaccagccaccacgctaaatcctttatgtacatcgtatgatgtaattttggaacagtccagtgggttacatgccactttacagatgaggaaccagaagcaaaaaggtgaagtacatttctcagtgttaccccgcagtgagtggtgaagctgggatcttaatctgggcctgctagattccagagaccatgctctttaccttgcttccttgcatctgtttacaaatctgtggtctccaatggaggagatttggagggcagtggcttcattgacggaatcagggaaagagtgaatgatggtcctgggaactcgttgcaagtacgtctgttgggtgcaggttaaacagctgacaaagtaggaatgaagcaatgggagatggaagtacctgctcatgatacatattcactgacctgcaccctccacccccacactcatacctcttctggctttgtcatggcacccagaaaccttcttttagcatcttggatgtggggctgtggtggagacattcacagcatggctgtctcctgcatgcctgatccctgacctcttagtctcctattccaagattccagctgggtttagttgttaagagccagttaagcagtttttggaagctcctgcatgagcctcacctgagtgtgagactttgggcatcagatacaggactgccctttgggcttgtggcctagagtgtggactttattgctccagaggagaggcagagatccctcattaggaaaatcatgtacctccttatggacccctagtctgatgtagagtatgttacttttcctttacaccagatggcttgctggggatgttcctgaaacgcctctcgtctcagcttatcctgctgcaagcatggacttcccacctctggaaaatgttttatgatgctcggaagccccggagtcagattaagaatgagatcaacattgacaccctggccagagatgaattcaacctccagaagatgatggtgatggtaacagcctcaggcaaggtgagtggggtttaagctccagttactgaaccttttcaaattctgagggtgaggaacaaaaagccttcagtgagggataacactggttctagttttcaaggacagactcagttctttggtttctctttctagtagtgagccaagtatttgtttatct

SEQ ID NO: 597 - DNA, 2300 bp, Homo sapien
tatggtactttgtgccttctgacttctagttcaagttctagttctagttctagttctgactgagcctttcgttcatattaagagttagaacaactcaagaagacccagggtaggctgagtgaggtgtgaaatggtttctcgaggtcctgctggtagaaagcatcgaaattgggaaggaacaagagagaaggaacaagataaaaggatctacttagacaccctgtggccattttcaaagtttagagcaggactcaaaacttcaaattctggcctggcatggtgtctcacgcctgtaatccctgcactttgggagcctgaggtgggtagatcacttgagctcaggagttcaagaccagcctgggcaaccccatctctacaaaaagtacaaaaaattagccaggcatggtggtgcgtgcttgtgatcccagctacttgggaggctgaggtgggaggatcacctgagcctcgggaggtagaggctgcagtgagccgtgatcgcaccactgcactgcagcctgggtgacagagtgagacgctgtctaaaaaaaaacacaacaaagaaaatgctatgaggcgggttatgaaatatccatgagcaacactggctggatgggagctgcagtgctcctggcctgcctggagggggcagccttacccacctgattggtgctctgtatttaggcctagtgttgccacatcttctaaccgtaggaaaatttagaaatctgattgtgaagtataatatcttctaaatgttgacaactaattcaaattaagaacaacaacaacaaaagcccccaaactgtgtgagccaaacaaaacctatttgggaattactagtttgtgacatctggctgaggcctggcagcccctgaggataatcctgtcctgggttgaaagctgacgctgcggtttcttcttccctctcttagtgacagcatccactaccagatggtgtattcttacggctctggggtggtgtgggccctcggagttgttcccttcagccatgtgaacattgtcaagtttaatgtggaagatggagagattgttcagcaggtacaggagggtgacaggagcctgtgaataaggtggggttgggggagacttgatagatttctttgtactggggaacagggaacttggctgggcagatgcaaaagctacttatgctccctcattctggtcacttgccagctgccttcccattaggcctctatttaaagtactcatatttgcatgtgttatcttctggggtggctaaaaaattacatagatctagtctctgcctgtaagtatcttacagtgctgtgaaatcacagtaggacaccacatatggcaaatatagtaaagaagtgctgattctgaagtgccaggtatttaaaattatcggatatatttttccagtgaccagaaagaaaatcctgatattttttccaactttgaaggctctcaggaggttggagggtggggtttcaggggacaggaagaactcctatacaaccaaccatgaagaacctttgagcttaggacccccagtgggatgctggcagcaatattgctgttgggctgagagggaaatgtaaaaatctttcacgagcttcctgttaacgatgacttttctgtaggttagggtttcaactccgtggctgcagcacctgtctggagcctgtggtgtggtggatgaggctgtcctggtgtgtcctgacccgagctcacgttccctccaaactttggctctggagacggaatgggagttgagacagatcccactgcaggtgagaggctgccactgcttcttctggcctgaggcatttcctgcggggagtagaaagtttggcatgattcccctggagggtctttctcctagactcttcctgagcagtggaagccattcaggcctctggctgaactggtgtaagaggaaatcagtcactttcctctttggggaacttgaactggagcatttggagccacctgccatggcccagttacttcccccggcaaagtagggcagaggttgtgagcctgggatgggtcagggagtcgtcagctgttagccataatcctcctccttcttgccttccagtctctcgacttagaatttggaagtggattccaaccccgggtcctgcctacccagcccaacccagtggacgcttcccgggcccagttcttcctgcacttgtccccaagccactatgctctgctgcagtaccattatggaacgctgagtttgcttaaaaacttcccacaggtaactgcaggcaacatggtttgctaggattcaggagatctct

SEQ ID NO: 598 - DNA, 2300 bp, Homo sapien
gcttgagcccaggtgttcaagaccagcctgggcaacatggcaaaaccccgtctctacaaaaaatacaaagaaactggagaggtgtgcaccagtagtcccagctactcaggaggctgagctgggagggtcacttgaacctgcaaggtcaaagctgcagtgagccatgatagtactgtactccagcctgggctacagaatgagtccctgtctcaaaaaattttaaaaagtcttggctgggcgcagtggctcccacctgtaattccaacactttgggaggcctaggcgggtggattacctgagatcgggagtttgagaccagcctgaccaacatggagaaaccctgtctctaccaaaaatacaaaaattagctgggtgtggtggcgcatgcctgtaatcccagctactcgggaggctgaggcaggagaatcgcttgaaccccagaggcggaggttgtggtgagccatgagatcgcgccattacactccagcctgggcaacaagagcaaaactgtctcaaaaaaaaaaaaaaaaaaaaaaaaaaaaagtcttaaacagagtccttttcccccctcatcagcctaacctggccctgggctcagagcagagctgcccaagacactaagcagttaggaaatgccattcattcattcattcattcatgaaaataaaattaagaaaattgcatatatcaagtattctgcaaaattagatacacatatcacccgatatatatgtgtaacatacacatatgacattgtgaacagttgtgcacatcattaaaaatgtaacatgttttatttgtcacactgtctggcataacaggtactcaacatatatgcgaatcaacttttccaagacagaaaatacttcagaggaggagaaatctgacctgggccctgaagaataaagtgtaaatagcaataataacagataacgcttaatgactgcattcaatgagccaggcattgtgctaagtaatttaatgggattgtctcattcattctcacaagtactgtaagagataacggactgttagtaaacccattctacagacaaagaaaccaaggcacagagtggttaagtcactttccccaagatcacacaagtcttaactagtaaaattcaaacaaaagcaagctactccagggccttaaggaagacgtgggtgggtgaatgaatgaatgagtgaatggcatattctagctgcttagtgttttgggcaatcctgctgtgagcccagggccagactaggttgatgagaggggaaaaggactcagtttaggacttttaagacgaaagctcctgttcacttgcctacaagacaccaattcgagtaggaattaaagttcactgacagcttggcgacctctgacacctggtagaccagaaacctcacagtcaaaaaaatcgaacctgacgagggaggacgggatcagtgatctctgaccggcaccccaagcattcctggatggcagggccggcttacacgcaaggatcagcttagaatgacccctaacacttggtttaaggctctgcttccaacgactttaaatccttaataattttttaacaaggggccccacgttttcattttgtactgggtcctgcaaattatgcggccaatcctgttaagtgacaacctttagcaggtaggagacaggtactggggaaacagccacttatctctcgaatatgttccacacgtacgcaccaatcaaacttgcccacttggtcttcgtagaccgcggccgcaggaatcagcagcgtagcccaaagccagaaacgagaagcccactcagccgccatgatgcgagcgcatgcaccacccaccgccgtcccggcatgcaccgcgccgcgggctccgcctccgcgggaccacagagctgggatagcgcgcgaggccctcggtcggacgggacgctcgggattcagggactgcctcggcacacgggaagttgccctacaggcgcgggagaaagcgcaggcggcggcttggcagggagaggcaggctgcagtgcacattgggtcaggcacacgcgaggggcagcccccgagggccgtcccagagtcccccgcgccgccggggtcctaacggggtgcaccgtcttccgccgcacgtggattcagcgcgatgcccaaatccaagcgcgacaagaaaggtgggcgaagggggagtcgggaccctggggggagctccgtgggctggctacccagcctgcggtgagggcttcggggcggcgggggcgcagattggaacgccaggacatcctcgaggtgttccgctgcctcgctgcgagctg

SEQ ID NO: 599 - DNA, 2300 bp, Homo sapien
ttcccatcatttccactgttatacctttggctcaagccagcatcaccctgtcttggattaatgctggtctcactgcttccattcctgccctctgccctgtcttccccaactattctcaccaaggcaaccagagtgacccttcataagtaaaggtaaatcacatgggtcctctgctactcacttcacctgggcaggaaagccaatgccttgccaaggccgaggaagtcctgccctctctgcctaactccctccccaaactctatttggctccttctgctccagcctcactggcctcttgtcccaaacacgtcatatctgctcccatttcagagccttttcacttcaggttccctctacttggaacagcattctcccagataattccacagctgctcaattccacaggttgctcgcttcctttctttattttctgctcatttgtcacttcatcagtgagacctttcccgaccacactatacaaaatatcaacatctcttcaccccattttcaatctgatttttagcattttgcggaatatgtttctcctaaaacgttaggctcgataagaaataggctttccttgtgactgctgtatcctctaacgcctagaaagtgccagacccctaaatatttttgaatattccagggagccgggttaagagagaggccaccacagcaaaggtggtcaaaaacggtctcttaagaggtgcgcaagtcgggtgtagtggctcacgcctgtaatcccagcactcagggagggtggttggagcccaggtgttcgagaccagcttggcaacacactgagtcttctctataaaaaataaacaaaaaaaacctagctgggtgtggtggcgtgcgcctgtagtctcagctactcgggaggttgaggtgggaggatcgcttaagccaaggaggtcaaggctgcagtgacttattttatttatttatttttgagacggagtctcgctctgtcgtgcccaggctgcagtacagtggagcgatctcggctcattgcaacctccgcctcccggattcaagcgattctcccgcctcagtctcccaagtagctgggattacaggcacctgccaccatgcccatctaatttttagtatttttagtagaaaaggggtttcaccatattggccaggctggtcgggaactcccgacctcagatgattcgcccgcctcggcctcccagagtgctgggattacaggcgtgagccaccgcatccggcctgcagtgttacgatcgcgccactgcactccagcctgggcaacagagcgagaccctgtctcagagggatcctattaactgacaactaagaaggcgcaaaccatacgaagatgtaagcatgccaggcagaaacaaccgcagacacacaacgccagacacgggaacaaacctgtgctgaaagaagggaaaggcagccagggtggcgggagcgcaggaagatgagaaagggccgaagttgggaaaagtgggccgaaacggcagcaggcatagccgggggcggtgttcaggagctgcctcccgacccagttggccttgcaagagcacctgaaactaggcaaaacgagtctccgctccccagacccgaccgggcgtcagccacctctggcggttttacagccccgaagcccccattccagctcgcagcgaggcagcggaacacctcgaggatgtcctggcgttccaatctgcgcccccgccgccccgaagccctcaccgcaggctgggtagccagcccacggagctccccccagggtcccgactcccccttcgcccacctttcttgtcgcgcttggatttgggcatcgcgctgaatccacgtgcggcggaagacggtgcaccccgttaggaccccggcggcgcgggggactctgggacggccctcgggggctgcccctcgcgtgtgcctgacccaatgtgcactgcagcctgcctctccctgccaagccgccgcctgcgctttctcccgcgcctgtagggcaacttcccgtgtgccgaggcagtccctgaatcccgagcgtcccgtccgaccgagggcctcgcgcgctatcccagctctgtggtcccgcggaggcggagcccgcggcgcggtgcatgccgggacggcggtgggtggtgcatgcgctcgcatcatggcggctgagtgggcttctcgtttctggctttgggctacgctgctgattcctgcggccgcggtctacgaagaccaagtgggcaagtttgattggtgcgtacgtgtggaacatattcgagagataagtggctgtttccccagtacctgtctcctac

SEQ ID NO: 600 - DNA, 2300 bp, Homo sapien
tatgactgacaactgttctacaactgttgagagtggtgtgttgaaacctccaactataattttgtatttgtctatttcttcttaagttctattattgtttttcatgtatttgatgctctatttttatttgcatatacattgacgattatattttctttgttaattgacctctgtcattatgataggtccctctttgtctttggtagtttttcttgttgttgtttttgttgttgatttgagacagggtctcaatctgctgcccaggttggagtgtagtggtatgatcacagctcactgcagccttgacctcctaggctcaggtgatcctcccacctcaacctcctgagtaactgggaccacaggcacatgctaccacattttgataatctttttaaaactttttgtagagataacatctctctgtgttgcccaggctggtctcaaactcctgggctcaatcctcccttttcagcctcccaaagtgctgagattacaggtgtcaaccactatacgggccagtattttttgttttgaaacctactttgtctgatattgatgtagccattccaactttttaaaatttagttttgtcaaggtatgtcttttcccacctttttactttttttttttgagatggaatttcgctcttgttgcctcggctggagtgcaatggtgcgatcttggctcactgcaacctccgcctccaaggttccagcgattctcctgcctcagcctcccaagtagctgggattacgggcatgtgccaccccacctggctaattttgtatttttagtagagatggggtttctccatgttagtcaggcttggtctccaactcttgacctcaggtgatccacccccctcggcctcccaaagtgctgggattacaggcatgaaccactccgcctggcgcatctttttacttttaacttatctctgtttatatatttcaatagctttctaatatttactatatacttgtgttttgcttttttatccattctaacaatctctgccttttacttgtaagcattttttcatttatatttaatgtaattattgatatggttgggtttaaattaatcttgctattggtttttcatttgttccatctgtctattggtcttttttttttttttttgtatttagagacagatttgccctctgtcacccagggcggagtgcagtggagctatcacagcacactgcagctgggcgttggtccatttttctatcttcttcttctttttttttttcttttgagacagggcctccctatgttgcccaggctggattcaaactcctgggctcaggcgatcgtcctgccttgatctcccaaagtgttgggattacaggcgtaaaccaccacagtcagtcagtttgtttgtttgtttcacttaggtacagaattcaatgccaacagttcttttctttcaagactttaaccatgtcactccacggggacgctgttttgagcctttggtaagcctcatcctccaggaccacacggcaggcaggcaggacagcccttacttaggtccaccacacccgttaagctccctcctggaggagacagagacctgggacagctccggggcgggcgaggccgagggatgggggacgacggggcagggaggagtcccagacctttgggatcttcgccacccttggaccccctcacccttgcggacttgaggagtgttaaaatctccaagacgcgagtcaccggtacgaagccacagccatttcgctgcttgctcggtgcaagtgcagacggtcctcgtggttgagagcggagtccagcgcgtgggcggcgttgggcacctttggccgcgccctccgctccaccaccggtgggcgcggcccgagccagtccctaaagccacgaggccgcccgctccgagcctggtgcttccgaccgctgcgcgcggctcctgggctgtcacagtctcccgttgccgccgtcatgtcccggcagctgtcgcgggcccggccagccacggtgctgggcgccatggagatggggcgccgcatggacgcgcccaccagcgccgcagtcacgcgcgccttcctggagcgcggccacaccgagatagacacggccttcctgtacagcgacggccagtccgagaccatccttggcggcctggggctccgaatgggcagcagcgactgcagaggtaacagtggcccctgatcctccctctgcacggtgcagagctgagcctgtcaccagccgtgcgctgccccgctctccctggccccgggcagcacccacggcttcgtcccccaccccatc

SEQ ID NO: 601 - DNA, 2300 bp, Homo sapien
ccgcacccagcctgtgttattattttctagtttaattccatcgtgttcagagatgtactttgtatgattggaatcctttcaaatttatttatttatttatttatttatttttaatatggagtctcactctgttgcccaagctagagtgcaatggcctgatctcggcttactgcactctccaccaaccaggtttaagtgattctcctgcctcagcctcctgagtagctgagattacaggggcacgccaccacgcctagctaatttttgtatttttagtggagacggggtttcactgtgttggccaggctggtctcaaactcctgacctcagttaatccacatgccttggcctcccaaagtgctgggattacaggcgtgaaccaccgctcccagcctcttttacatttattaagacttgttttatgcctccaaatatggtatatcttggtggatgggcacttgaaaagaatgcatatcctgctgttgttggatattctattcatgttgtttatgtggaattggttcatagcattgagtcttgtatacctttacggagtttccgtaaattatgactgataactgttctacaactattgagaatggtgtgttgaaatctccaattataattttgtatttatctacttgttctttagttccattattgtttttcatgtattttgatgatctatgcttaggtgcatatatatttagaattatatcttctttattaattgacctctttgtcattatggtatgtccctctttgtctttggtagttgttgttgttgttgctgttttgagacagggtctcaatctgcagcttcgacctcccaggcgtagatgattctcccacctctgcctcccaagtaactgggaccacaggtgcatgctaccacaatttgataatttttaaaattttgttgtagcgataagatctccctgtgttgcccaggctagtctcaaactcctggacttaagcaatcctcccttctcaggctcccaaagtgctaacattacaggtgtgggctagtatgtcacccactgtgtgggccagtattctttgttttgcaatctactttgtctgatattcacttagccattccaacttcttaaaatttagttttgtcagtgtatgtcttttcccatctttttgctcttaaactatctctgcttttatatttgaatagctttctggtatttaccatatagtttggttttgcttttttatccattctaacaatcactgccttttacttgtgagcatttacatcatttatatttatgtaattattgatatgattgggtttaaatcaattttgctattggtttttcatttgttccatctgtctattggtctttttttttcttttgtatttggagacagatttgccctctgtcacccagggtggagtgcagtagagctatcacagctcactgccgctgggcactggtccatttttctatctttttttttttcttttgagacagggcctccctatgttgcccaggctgggttcaaactcctgggctcaagtgatcctcctgccttgatctctcaaagtgttggcattacaggcgttaagtcaccagagccagtcagttttttttcacttaggtacagaattcaatgccaacagttcttttctttcaacactttaaccatgtcactccatggggacgctgtcttgagcctttggtaagcctcattctccaggaccacacggcaggcgcgacagccctaggtccaccccaccccgtaagcgctccctccgggaggagacagaaacccaggacagctccggggcaaggccgaggaaggagggacgacggggcagggaggcccgaagagtccccgccttttgggatagtcgccacccttggaccccctcacccttggggacgttgaggagtgttaaaatctccaagacgcgagtcaccggtacgaagccacagccatttcgctgcttgctcggtgcaagtgcagaaggtcctagtagccgagcgtggagtcgagctcgtgggcggcgtcgggcaccttcggccgcgccctcagctgcacccgccggtgggcggggcccgagcccgtctctaaagccacgaggccgcccgctccgagcctggtgcttccgaccgctgcgcgcggctcctgggctgtcacagtctcccgttgccgccgtcatgtcccggcagctgtcgcgggcccggccagccacggtgctgggcgccatggagatggggcgccgcatggacgcgcccaccagcgccgcagtcacgcgcgccttcctggagcgcggccacacc

SEQ ID NO: 602 - DNA, 2300 bp, Homo sapien
gcaacctggccatttcttttctaaggtcactttgttcatcagtaagatgaactctgattctcttctaggtcctccaaactccgtaggaattgctgatttcagtttaatttgtttcagtgtctctgtctctgaaccattctagcttatagacaactcttttgttgctctcgaaacattgtagctagtttttgttcctctggttcctcagccttcactgttcgtgttccaatcttgaaacaaagtcagaaactgcttagaatatttgtaatgaagtttctgcctttcctcttgtgttttcaaaacatgttcaattctcttcttagtggtgtggataaaagcattcatatactcctgtaatcccagcactttgggaggccgagacgggtggatcacgaggtcaggagttcgagaccagcctggccaacatggtgaaaccccgtctctactaaaaataaaaaaattagccgagcatggtggcagcgcctgtaatcccagctagtcaggaggctgaggcaggagaactgcttgaacccgggaggcggaggttgcagtgagccgagatcgcgccattgcaccccagctctgggcaacagaacaagactctgtctcggaaaaaaaaaaaaaaaagcattcatatacattctagcctttttctctgtgtagcaaaatcctgtttaatatcagctccgcttacttgtaacttctgtacatcatcccccacgtcttcctcatctgttcctacaaagtgctttctttctccatgctcatcagttcctgaatgctttcctcccagctcatttcctgggctgccataacctgggcctccactgccttggcaaccttcacgatgcactccctgtccacaggctccatggctggctgtcctggaacttctgaaccttgtgagtgcaatgatgcactggaagtaggtggagatgtgtgtgatctgcaggcttgggtatctggaggccagtgggcacactggacactccctgtgatctaagaacttatttaggcagatagtgagggtaaggaagtccttggtaaggttttccttttaatgaaaagcagcccccgaatcatttctttcctaacgaagtgcagcctgtaaaatcaagctgcagacatagatcagcaagctggaagcttgcaggggtgaatgccagcagctctggcaataggaaaaggccccctggaggctaggcatgttcaacatggtggctccatctcccctttttctttatcaaccacatgtacagtaaggagcaggcaacgtggcgccagccaggtagagaagccatttgtggccaggtgcggtggcacacgcctataatcccaacactttgggaggctgaggcgggcagatcacctgaggtcagaagttcaagaccagcctggccaacacgttgaaatggtgtctctactaaaaatacaaaaattagctgggtgtagtggcaggcgtctgtaatcccagctactcaggaggctgaggcaggagaatctgttgaacttgggaggtggaggttgcagtgagccgagatcacaccactgcactccagcctgggaaataggagtgaacctccatctcaaaaaaaaaaaaaaaaaaaaaaaaaaaaaaatccatttgcaaaatagattagggtggggcggggagcttcttcctgtactatgtaaacatcgcacctgtttcaaccaatctttgagccctatgtaaatcagacactgcctcctcatgcctgtccttgtgcatgctgctgcaggctggaagacccactcaggtgcccctctctctgcaggagagagagctattctctttttcttttgcctattaaacctctgctcttaacctcacttcacatgtgttcgtgtccttgacttccttggcatgacgcagtgaaccttgggtattaccccagatgaacgacactgcttcattccttggcatgaggcaatgatccttgggtcttaccccagatgaacgacactgcttcattttggggccccaggtgggatcaaggtatcatcatcagaacagtgaggacaggagtggacctcaaccatgtcctttcatttcaaggttcttggcctccattttaaaatcaaatcaaatactgggcccccttcagctatttaaaaatgattagtgtggctggcagccttacaagacttgggggacaggcttgctggggagaacattctgaagcagtgggaatttttacagttcaaggaagtaatcctgttaggcaagatcaggaaataccgtagtaactgaggtagagctcaaggcaatgccatttttg

SEQ ID NO: 603 - DNA, 2300 bp, Homo sapien
attaactcgaatcaccatctaaatgtataaggtaaactataaaactcttagaagaaaatacttgagtcaagtgtgactttggattaggcagtggtttcttagatgttgacaccaaaagcacacgtggcaaaagaaaaagtaaagtcaacaccatcaaagatgaaagtgttcgtgcttcagggaacactatcaagaaagtgaaaagacaacccaagaatgggatagtattttgcaaatcacatatctgttaagaatcttgtatctattctagctataggactcttacaacttaataaaagagaaaacccacctgggtgcactggctcacgcctgtaatcccagcactttgggaggccaggcggacggatcacttaagcccaggagttcaagaccagcttgggcaacacagcaaaaccctgtctctacaaaaaataccaaaataattagtcgggtatggtggcgggcacctgtggtcccagctaatcgagaggcagaggtgggaggatctcttgggcccaggaggtggaggctgcagtgagccaaaatcagaccattgcactccagcctgggcaacagagcaagaccctacctcaaaaaagaaaaaaaaaaaagaaaagaaagaaatcccaattaaacaatgggcaaattattggaatagacctttttccagagggcatacaggtggtcagtaaccacatggaaagctgctcaaaatcagtacttatcagggaaaagcaaatcaaaaccccttcaaatctgctaagcactaggatcatcagagtcaataaaatacagaaaataacaagtgttgagggtttggagaaatgggagacttaggacaccgccattgagactgtaaaacggtgcaaccattttggaaaacattctggcagtttttcaaaagattaagcatttatatgacccagaaatttcactccctaggtatacctagaagaaatgaggctgggcgcagtgtctcacgtctgtaatcctagcactttgggaggccgagatgggcagatcacctgaggtcaggagttcaagaccagcctggccaacatggtgaaactccatctctactaaaaatacaaaaattagccaggcgtggtggcacacacctgtaatcccaactacttgggaggctgaggcaggagaagcgcttgaacctgggaggcggaggttgctgtgagccgaaatcttgccgcagcactccagcctgggtgacagagtgagactctgtctcaaaaaaaagaaaaaaagaaatatatgtccttattaaaaattacgtgaatgttatagcagcattattcataatagccagaaagtggaaactgcccaaatgtcaatcttaataggtgaatggataaacaaaatatctgtatgtacaatggaacatttttcaaaaaaaaaaaggaattaagtatgaaacatctacaatgtggatgaaccttaaaaacatgttaagtgaaagaagccagtcacaaaaggcctcatattgtatgattccatttatatgaagtatctggaataagcaaatctattagacacagaaagtagatgagtggttgcctaggactgagagggagtttgggaggaaatggagattcactgctactgagtacagagtttcttttggggaggtgataaaaatgctctgaaattgactgtggtggttgtacaattcagaatacactaaacaccattaaattatacactttaagtgggtcagttgtatatagtgcctcaataatatgtaataaaacaatcaattagctcagaaatctgttagagcagggctcagcagggaagcctcatctgttcctcagtgtctcagaggtgatctagcagctggaggctagggttgcctgaagacattcactcaagcatgtggcagttgctgctgagggccagctggaatatcagctgctgtcatcaaccggcacacacgtgacctctgcatgtggcttccaagggagcacatcccaggcaaactaggcagaagccatgtggccttttatgtcccagcctcagaagtccataacatcactcttgtgtcctgggaggagagtcaaagatacctgtgcaaagagcacgtgagagaatggagtggttatctttggaaaataaactgtaacacttggagcaacagtcctgagtggagaaggtgagccccgggacctgccaggagactgtgtcttgactatccccatcagagatgcattttctgctatgtcacatcccatccgttagaatcttccggatactatatctcatagttgatggtctcttgaattcagcaa

SEQ ID NO: 604 - DNA, 2300 bp, Homo sapien
acagtttctcatccagattttctccatttccccacaacgccccaggcattcttggcatgaactgtgcctcaggcctggcctgaggactttggttcagtgagctcctggccccaaagacggaagcggggaagggttagagaagaaaaaccaactcaggaacaaaatcttcattattaatagtatgtaacgtggccgggcgtggtggcttacacctataatcccagcactttgggaggctgaggtgggcagatcacttgaggtcaggagttgaagaccagcctggccaatatggtgaaaccccatctctactaaaaatacaaaaattagctgggcgtggccgtgtgcacctgtaatcccagttacttgggaggctgaggcagaggttgcagtgagctgagatcgtgccattgcactccaccctgggtgacagagcaagattccgtctcaaataataataataacaaaaacaacaacatgcagccaggtgaactagaaacagcgtgggcctgagattcacatttgccctcttttccccccgaccccccaagcgctatgactcaggaggacccagagagaacctctcctcaggggtggggagcaacagcctcaggatagtccagtgggtgaagcatggtaagggtaacagcccacgttccctgggccctcactgagtgccaggcaccctcccaagggctatcaagggcaccaggctcacgagggacagtcccctccatcctccactcaagccccacctgcccagtggccttcctttcacacatcacgcacattgcatttccaaaccaagtctttgcacagactctaatgttcctttctcttgttctcctccaacctaccattgagcctttaaggctgagctccatccagcatttgctgagccttccctagtgcctctccccggcctgcagctccctaaagtactctctcttctgggctctccagcaatcattacttcaatcttcctcattagactctgaactccctgtggagggctggaatcactttccctcctatggccccaagtcaaagcctggcatagagtggatagaaagtccctacaccctgacccgtccgcactccctaacactcctactctcccagccagccttacggcatcgccacagttctccctgagagaggcagaggtactgccagctgcacaggtcaaattctagtggttaagaaaaggccaggatgagaaaagggtgcccagggtgtgcatgcgtgatgatggtaacgaaggggtagagaaaagggggagagcctgggtggggaccggttgtgggcacctggcaggtttggaggcgggggcatcaatggaggtgggaagcgatgggtcagaccaggctggggggagactctcgcgctgcaactcccaagggaaggagagtgggggaaaggagtcagggcaaagcactgtctagttgtcccggggttcccagagctgcggggtggacctggggtggggagcgagggacgaatccgtcggtgctgcccgcggccgggcccgagcggggtggtgcacggctggggacaggctcagctctacacgatgcatggggaggatctgcagctactgttacctctgcagtcgccaccgcccagcccgagccccaggccgcccaggatggtctcggactggccgtcgctgtacatgaaggccgtgtccagttcggtgtggccgcgctccagaaaggcgcgcacggccgcggcgctggcgggcgcgtccatgcggcgccccatctccatggtgcccagcaccgaggcgacccgcggtggcggtggccgggacatggcgagcgcgcgggcctcgggcggcggagagcgaagcgcgcagtggacggcggcgcgggagactacgcgagacgcggcactcagcatagcagcggcgcctgcgcgttgggagccgggggccccgcccatgccggggaggagcgcggaggcagttgggggcggggacaacaggcgcggccccagcggcgcctccaggcccggtcagcccagcgcgcggcgtgggggcggggcctgcggttcccgcgggggcggtggcgcgcggtcagctgacccggcgggccttgacccagaagctgggccctggcggcggatctggacgtggtgagccggaccgggggcaggtggcaaacttcacggctgggggtcggggctcctgggcttccctgccacatccttccagccctctcctccggccgctggactgtcccggctcctgcgccctccttgtggcgcgatatcgtgggacgaggctccgggccgggactggg

SEQ ID NO: 605 - DNA, 2300 bp, Homo sapien
gacaggacccatgtgcaatgtggagctcgggacactctgagacacacctgatccctgaacagaaaggcctggctctgagggccatcctgcgtagttcctgtcacctagaagccaggcatgggcccacatcctgttcaaacagctctgagcaaatggatgtccaaggttgcaatggagcttgacctcacctgcagggatgggaaggaccccagaagcggtaccctggaatcacccttggagggtgcatgttcaaaatttggagtcagtgcacctgggctggggcttagagattctgggtttaagaagccctccagcgattctgctccatctagtgcactttgagaaaggttgggctggagatgacatctcctgccacacccaaactcctctccctgatcccaagctgagtcagggtgcttcgggcacatgatcacagccaatcatgtgtccacctttgtctacaggatgaagtccaaattacctgaggctaggcctcaagttactccaagaactgccctcccaaccttatctcctgcctcctgacccacgtcttcagtcatttcaggtctccaggcttctgcacgtgccatctcttcccctagaagtgtcctgctccccttcaagggcctggtcatgagataagaagactcacttctaaattgccctttcaaagatgccccatgagagctggctggacaggaccttccacctcctcctctccccttgtccacacacctgaagaacgctaccaccgtcctctgcgaccactgtctttgaaacgtactctccccaccctgggttgtgcatttcttattctccaggtgtaaacacacctagaggttcagcaaatgttgagagacagtgagagaaagagagaggtagagagaaggacagagtgaagaagagaggaaacgggtgagaaaggagaaagggtggaagagagagaagaggaaggaaaggagaaaggaaggggagaaagctgtgagctcgaacagcccagggttgaggagaaaagcactctggaacagacctgcccgatgcctaccagtctggaactcaagtgattgagcttcgtagttctcatctgaaaagtaggggaataatgcaatacccaccacctaggctgactgcagagttaaatgagacaatccaggccaagcgattacaagggtgcctggcactggcactcaacaccaacagcccaaaatgactattatttgttctcattgtagcccctccagcgtccgggcacacaggcgccttcagtaagcgttgattagacatgacctgtgacccaggcccgggacccctcacacttccagactcagactctccatttacacgtttggaaacctaccctaagcacggcgtgggaggaggcagtgtaggccctcggtccctgcagacctggggagattgtggagggaggagcgtcccagctcggggctaccacccactccaggcctcggcgtcctcggccacagctccctcctggtgactcagcccggcgcgggccgcctgtttggagggataatgataggacagctgctggggccagcgccgcgagggcccctcgcccggccggcccgggaaaaacgaagccatcagatgccaaggggccggtcggccggggcagggcaactcctggccaggccagctcgagaggccgcgctggtcgcctttgaggtggggggccactggctgcggattcccgagggccacccagtcccggcccggagcctcgtcccacgatatcgcgccacaaggagggcgcaggagccgggacagtccagcggccggaggagagggctggaaggatgtggcagggaagcccaggagccccgacccccagccgtgaagtttgccacctgcccccggtccggctcaccacgtccagatccgccgccagggcccagcttctgggtcaaggcccgccgggtcagctgaccgcgcgccaccgcccccgcgggaaccgcaggccccgcccccacgccgcgcgctgggctgaccgggcctggaggcgccgctggggccgcgcctgttgtccccgcccccaactgcctccgcgctcctccccggcatgggcggggcccccggctcccaacgcgcaggcgccgctgctatgctgagtgccgcgtctcgcgtagtctcccgcgccgccgtccactgcgcgcttcgctctccgccgcccgaggcccgcgcgctcgccatgtcccggccaccgccaccgcgggtcgcctcggtgctgggcaccatggagatggggcgccgcatggacgcgcccgccagcgccgcggccg

SEQ ID NO: 606 - DNA, 2300 bp, Homo sapien
tctcattttgaactctaccctttcttttttttttttttttttttttttttagcttctctcacaaattttattttattttaataaagcttcaaaaattataaataatgtctaagcagatttagaatctcaacaataaatgcttagccttagagtactgcatttttgtattataatttgatggccacttcttgcatggtttctactctaccctttctgatgctgttcttttcttcctctttcttgattatttatttcagcttccacattttatttcaacaacattagtcatcgtagctgcgtattcctgttttcagtgtagtaacgttgagcatttatgttcctagcactcttccaggtaccctgtgcgttatgaggcaggcacatctctcctgaaagaatttatattcttgtcagggaaataaggcttcagataagaaaaaattcgggggaaagtgccgaattccttctaccctaacctgcctccatttcctccctcctccgagttgagatgattgggtcagagccagctcttcctgggcttgggaagaggagatggggcttgagtgctgctgcccccctcataacctcagagtctatattgagactctcttgctcaaactctcctcgcagagtagaacgaacaggccctggtgcgaggaagggtttgacccaggctctgccattgccacctgcatgactagggtgagccactgaatccctctggcctgaagtctccgtcagaggttgtctgtccctccctgcgagactgcagcagatggcaccccaaagccaccatttgggagcgccagggcgcagcagcagcacagaagcttcccctgcagtgtcaggccctgaacctggggtggatggcccagcgtgggcctgggcctgccagtagaggcctgaagacaaaccgagtgagtcttctccagttggctcgggtgagctggtgcctgccaagggctgctgctgtggctctgggcatctgcctgctctaccatgggcagcagcaaaatcttctcccttggaagtgggactctgggcttctgccctctgggctctttatggtctgaaactgaagtcggtttgtgcttcagttcccaggctgcaaaactggccttgtcatacctgcagctggctccacggtgggaacagtaggctctttgcagaccgtggaggtggggtgggctgtctgccgttctcagaaatctctggctttctctgacttggaatgtttctgtcttttgcagatggagaaggatgaaactgtgagtgactgctccccacacatagccaacatcgggcgcctggtagaggtgagtgacctgggctctggctggctcctgcagtgacccacagcagtgacactgcagccccggagccgctgtgctggcctccttctctgctgctttctctcagctccaccgcagccggcagagcgcttcttggattttgccctggcctcatatttttggagcctctgatttggatgccagcaggctccagcttcagggccacctcctgctccacccccagacctgggctcccagaagactgctcaggcgctggctctggggcgcactaggtcttgtctcccctgatcgcctgggtgtgaacagggccctgcgctgggagaggaagcagatcccaggaatgccagtgggccctggtgtggcttcagttgcggctgccttggccctcctgtcaccacgttgtttgggaaggcagggaggtgctctcgggtttcacagaattgttcacaaaattagtggggagcccaaggggtggtgatgtggtttagagcagctcccaggcatgggcagagctggccgccaatccctgggtactggcttcctccctgcctgtggactgtggatgggaaggtgccgggagcacagatggcaggtggggtcttggcagcctggagcgcgctcactgatgccccagagcaggcgtgtgccaccctccagtggccacactggggactgcagggctggcaggtggagggagggcgtgggcctcagggttcctgaccttttgccactgcgctgaccgacctcccttccaggacatggaaaataaaatcagaagtacgctgaacgagatctactttggaaaaacaaaggatatcgtcaatgggctgaggtaatgtaccagaaagcacaagctttagaagcagacagagggatttgaaccctggctctgccagttactagctgtgtggtcttgggcctcggtgtcctcattggtaggctgcagtgcccctcttctgggatgatcattatgttgattttggaaag

SEQ ID NO: 607 - DNA, 2300 bp, Homo sapien
cttccagcccagcatccccaccaaaacaggaaaagaagtgctctcgtgcagggcttgttcacagtgagcctggctggctcctcatgatctctgagtttaaaatgtgccagcagatgattttaacgatcccatcaaaaattgttgtctggatcagtttcgagctagcgtttccttgcagaggccattcttccttttttgacaaaagttgggtcggccaggtgcagtggctcatacttgtaatcccagcacttcgggaggctgaggcaggtggatcacctgaggtcagaagttcaagaccagcctggccaacatggcaaaaccctgtctctactaaaaataaaaaataaaaataaaaataaaaaaaagccggacgtggtggtgggcacctgtaatcccagctactggggaggctgaggcaggagaatcacttgaacccaggaggcagaggttgcagtgagccaagattgcaccattgcactccagcctgggcgacaagagcgaaactccgtctcaaaaaaaaaaaaaaaaaaaaaaagacaaaagtcgggtcagtgctgccgcccccagtgtcaaggatttcaatcacaggtcggttttgcccgaccctggaagcctggtcgtttaaagtggcttggttctctcctgccctctgctcaccccgctcttaaccaggttggttccacctttcacagcctgaaagtcagtctccctgatgaggagatgtagaaataggtgagaagcaacagagcccgtaccctctgagacagtatctccccccagactccaccctgttctcctggttccaaagagaggaacccaccttttgctggtttttcttctgtgggcctggtctcattttgaactctaccctttcttttttttttttttttttttttttttagcttctctcacaaattttattttattttaataaagcttcaaaaattataaataatgtctaagcagatttagaatctcaacaataaatgcttagccttagagtactgcatttttgtattataatttgatggccacttcttgcatggtttctactctaccctttctgatgctgttcttttcttcctctttcttgattatttatttcagcttccacattttatttcaacaacattagtcatcgtagctgcgtattcctgttttcagtgtagtaacgttgagcatttatgttcctagcactcttccaggtaccctgtgcgttatgaggcaggcacatctctcctgaaagaatttatattcttgtcagggaaataaggcttcagataagaaaaaattcgggggaaagtgccgaattccttctaccctaacctgcctccatttcctccctcctccgagttgagatgattgggtcagagccagctcttcctgggcttgggaagaggagatggggcttgagtgctgctgcccccctcataacctcagagtctatattgagactctcttgctcaaactctcctcgcagagtagaacgaacaggccctggtgcgaggaagggtttgacccaggctctgccattgccacctgcatgactagggtgagccactgaatccctctggcctgaagtctccgtcagaggttgtctgtccctccctgcgagactgcagcagatggcaccccaaagccaccatttgggagcgccagggcgcagcagcagcacagaagcttcccctgcagtgtcaggccctgaacctggggtggatggcccagcgtgggcctgggcctgccagtagaggcctgaagacaaaccgagtgagtcttctccagttggctcgggtgagctggtgcctgccaagggctgctgctgtggctctgggcatctgcctgctctaccatgggcagcagcaaaatcttctcccttggaagtgggactctgggcttctgccctctgggctctttatggtctgaaactgaagtcggtttgtgcttcagttcccaggctgcaaaactggccttgtcatacctgcagctggctccacggtgggaacagtaggctctttgcagaccgtggaggtggggtgggctgtctgccgttctcagaaatctctggctttctctgacttggaatgtttctgtcttttgcagatggagaaggatgaaactgtgagtgactgctccccacacatagccaacatcgggcgcctggtagaggtgagtgacctgggctctggctggctcctgcagtgacccacagcagtgacactgcagccccggagccgctgtgctggcctccttctctgctgctttctctcagctccaccgcagccggcagagcgcttcttgga

SEQ ID NO: 608 - DNA, 2300 bp, Homo sapien
tccagcctgggcgacagagcaagactccatctcaaaaaaaaaaaaaggaaagatcattgtagagtagaaacaaaaaactgttttacacacagttttatgctcaataaataataacttttgccaggcgcgatggctcatgcctgtaatcccaacactgggaggccaaggcaggcagatcacttgagctcgagagtttgagaccagcctgggcaacaaagtaagaccccatctctctacaaaaaatacaaaaattagccaggtgaggcagcagtgtgcctgtagtcccagctattcaggaggctgaggtgggaggatggcctgaacctgggaggccgaggttgcagtgagccgtggtgacaacactgtgctccagcctgggcaacacagccagaccctgtctcaaaaataaaaataaaaacaattactgctactaccatatatcttgcaaggagaggctttttgaatatgtacaattctagattcaaaattttcctaaactgggcaaccgtaactttccctgggaagccgtctgaccaccatcttctggcctggctgcacgccgggtcctgacctccaacccacagcacagtgtggtgaccaggaggatgccagaggccagaagagtgctggggatggagctgtgctttgacaatcggtgagagctgccattctggcaagtcccgctctaggccttttgtgtacatttgtttatttagtgcgaggtgaaggcaaagacatggaggcctagacaagcccaggccctttcctctcgggctgcagcacaggagctgcggggcctcagcgccggtgagtggggcccatgccttagggccacgccctgcgggtcgcgctagaagatgccacgtggcagtgggaggtgtaatacatcccctctgggggaaaggctgccagcttccaaacacttgcctgtgttagggccatggggaggaggagaggcgcctgctggggacacacgggccaggctccggcttcagacgccattggaaccacctcgtggaacatctgcagccacaacacatgaaaatgttttccttccggcagccacttttataaggatgtaataatatatgcagtgcacaaatggttctgtttttggtgggttggtattgccaccgagccgaccctgaccaggtgtggaggggagtgagcaggggcgggcaagggggctgtggaaatacggccgggtgcaccgagccctgtgcccctcactccccaagcacctttctccttccctccccagccgctgcgtggccatttacgtgggctcagcttccctgccatgggctgagggggcctgtgttctaggggatcagtctgctcctggggacagtgtcgcacactgcaagacccagccctctcctccacccgacctctcctacctttgttggccaaggggtttcgcctgtttgttttaagatggctcttgattctgaaacacaaagatggtaaccaagaggccaaattgctgatgtgactggacttgcccaggtgacccaggacctttgccgatggccgcggcctctctttgggctgttggtgcccatttaaaatggggcccacagtgagctcaaaaccctcatcccttccctagggtggccgggaatctgccgtccacatggagccggggaggaggagagactctgatttgctggaaggacctcattcatttccatccaacccccaggcttccctgcctgccgagctgactccacccagccctgagcctaggcacagtaaccaccttcacgtctgggagaacacacagtccccgggggccagcatgcaaaagttctttttgaagctgggtggatggagccccctccctcctgagggtgctccccagctcctgttgagcagacagcccaccccgtcgtcttggcaccagggttttgctagtggcagataaagatgatgttccagcagacgctccagtgctgccgaggttggtgtgtttattagacctgaaatgagaactgtgactctcaagctcatgggcactctcactactcctgttttatggagaccccctggggtctgagggtcgagattcctcaggatgacttgccagagcatgccaagacagatgggagcagagaagccggtctttctagcatttctctccctcttttccactagtcctcagtaaaacagccttgccagaaccagatgtcttttttctgcagatatttactgttatgacttgggaggcagcaggttctggactgttgccctcacctagaccgccccccccccttgtcagatgccacccgttttctcag

SEQ ID NO: 609 - DNA, 2300 bp, Homo sapien
taaaattaagaattgagtctcttggtcataccggtcacattgtaagtatgcaagtagctacacatggctagtgacttgttttggacagcacagatttagaacatctccatcgtctcaggaagttctgttgggcagccccgtttcagagggaggagcgacaggctacaagaactgacaggtcagcccgcgcttggcttctcaggagaactgaggcatcgattgtgggcggcacgcctgtcttcccagccatctggggtcccagcttgttgacagtttgcttcccatggtgtgcgatggcccagtgtgaccatgaaagctggctgctgctcatggggcagcagggggtgtctcaccccattcttgcaaagtctctaccaaaactgcggtgagcagcagaaagtggtcagcttggaaacaaggatttccaaggctccttctgctttgaggtgatcaggagtgtaattcctgcctggagactctttggggacaccaagcacagcaactcttcccctacataccgtttgtgaaccagcctctgagaaagctgcctgcgggtggctggtggaagaggccgcccagcttattctggttccatactccatgatctactgacgtaggtgcctggtggagcatcacttaccaagaagaaagatgtctgcgtgcagaattctttaaaactggggtttggaagatgatgagcatactttttttttccttaacatgcattccacatcacaatgatgtggtcaggaggggatgcggaaaaggcattgtgggtctctgacagtggaaacagcgaggcgtttagaccaagagtgtgaaggactttttctgaattccatgttgtcttctctgtcttttcattcctctctcacctttttaattctgctactttctctgaacactcggccctctgaaccccacctgcaggaattaatgagtagatctttcccttataaccccctttccagttctcagtgtgattaaatgctttcctgatgtggcaaaatacatttcaagaaatacagcaagtcttttgggctgcaaaaagactggttctcattacttagcagtcttcatatgtgtgcatagctcttggatgttggaaaagctatcctgtgttcacgtggagaacctgattgctcaggttttctaatgtaatcagcatttccctgtggagctgtatctcttgcccgcctctgtaactgacagctctcttcttaacgcttactatgtaagaaggtcttaaagtttatgtagagcctccagcaaatcagggaggagagaggggcatctgttgaactataaggtggtgaacacatggccaggcgcggtggctcacacctataatcccagcactttgggaggctgaggcagggagattacttgaggccaggagtttgagaccagcctggccgacacggccaaactccgcctctactaaaaatacaaaaattagctgggcctggtggcttgcacctgcaattccagctactcaggaggctgaggcacgagaatcgcctgaacccaggaggcggaggttgtggtgagccaagatcacgccactgcactccagcctgggcgacagagctagactctgtcttaaaaaaaaaaaaaaaagaaagaaaaaaaaataggtggtgaacacaaaactgagaaagcgggtaagaaagaactagcatttgttgaacactgacagtctggcaagctctgggctgggcgcttgatctgcttgtctcatttctcatgacgaccctgtgtgcggagcaagtagcagccgcattttacgcaggagaaaagtgaggctcagggagttgggacacttgctgagcattcacagccagtgagaggtggagcacgggcgtgtgccccagtctgcccgcatcagagcccttgttctccaaacctccagaaagccctgtttgttgccaggacccagaaaaatctttgctggagttagcggctttgcctccgagatttcagatagccagggctcaggctccctgctcgctggccgtgtcttcatggaacgattcatggtatatacttttccttccttccctccaggtcaccatggagtaacaagtatgaccctcccttggaggatggggccatgccgtcagctcggctgagaaagctggaggtggaagccaacaatgcctttgaccagtatcgagacctgtgagtcattttctcctgttgcactttagcgcttgtgagttttgagaggtaaatcctaagtggcagtgttctatctggaatctgttacctggccaagcattctcccttgaatctgttac

SEQ ID NO: 610 - DNA, 2300 bp, Homo sapien
tgtattaaatgttccacatgcattactaaattattgtcactctctaaggaagatactgtgttcccattttatggataaataaatagagacttctagagattaagaaacccacccaaggccataagttaatgaatggcagtattgggaattgaatatgtctctctagagtcgaatcagcttatctgtgtgttctgcccaagacgtggtgttaaaatttcctctcatgccagtgggccaaacccatcactgtggccttggctgacacatgttggcatagaaatgcgtggcacaagtagggaattcatggttgctggcattcagcaaaacaagtggtagaatttctggtgtggtgtttttcttttctctttgcaggggagccagttcgttgtgtgttccaggatgaactgtcactgatagccatcttgagcaagggacaggctttttcttttctttcattcttttttaaaacagctggctgtatatgccatgtcaatatctttttttaaaaaaatgaaattgactctccttaataatgtgttatgtctctggtgactatgaagtgggtccttgccccacggcctacttgtggttaacagacctggagtgtaaacggtaatattcaaaagttatatttcgttaaggccaaatgtggcattttgaggattactttgtgtattttatgagactgtagcttgttgatttaggccttccaaaaatcctgaaattggtctgagcagagcagattccagatacaaatcagatagtggctgcttgggtagtgttggggactccatctgccttacttggagtcacctgtacttctaagagttgcatacacaggtcttcacccttgtacctggcccacctttctcactttatttcttgtctcatctcctgaggtctagccttctgtgttagaacccactgtgcattgaatttactttgcattttaccagccttgcctccgctctgttcccttcctctccccctccctttatttatttattttttatatgtttatggtgactggcacatggtggctctgagtaaatatttgcagcatatgtactgtgaggagagtatggtgaagcacaggatgcatagctttaaaaaggtgcttgggctgggcacgatggctcatgcttgtaatcccggcactttgggaggccaaggcagttcgactgcttgagcccaggagttcaagaccaccctgggcaatatggcaaaaccccatgttccccccctcccccccaaaaaaaactacaaaattagccaggtgtggtggcatgcacctgtggtcccagctactttggaggctgaggtgggaggatcacttgagcctggaaagtgggggttgtagggagccaagatcatgccactacactccagcctgggtgacacagcaagaccctatctttaaaaaatgaaaaacattttttaaaagagtgcttgataaacaagagtaatggttgtctttccagtccttgcctctgcagtgacatagtttactgcatttgcagtccagtttgctgggtggagtgagctcttgactgtagtgtggttcaggtcttagtgtcctaagtttctattgaatgaatgaagcacttttaaccccgtgtgcatcttgccacttgttctttgcctggcttttctccctcccttggagcttctcaaggaacctggcctggggatgttacctgatgtttacacccaggttacaacaaagggcaaaagtaatccgctactggagtgtgttcaccatggaaccaactggggggcacgacatctgcagccaccagggcctgttgagcaggagcaggggagccggtgagggagctttctgacgtctccagcctgcttccacttctttcagggtcttttggatgcccccacttgagacagagactgctgtcaaaggggagcaaacagcctgcacagtcgccccccgctccaggctgctggcacacagagacctggcggagggcccactgcgtggctctttgggttttagaatgccttgggcaagcatgctttttaaaaggagtttttgatattccttctggcaaaaatgactgacgcacttgtatttctccctccacagagtgatcagcagctggactgtgccttggacctaatgaggcgcctgcctccccagcaaatcgagaaaaacctcagcgacctgatcgacctggtacgtgcctccttcatatggttccatttgagactgcggctaagagttagttgcttttgtgtagctttttccatgcagaattcacaacacaggaaaccttttctctccc

SEQ ID NO: 611 - DNA, 2300 bp, Homo sapien
actacccgacactgtattattattattactattttatttttgagacgaagtctctctctgtcgcccaggctggagtgcagtggcgcgatctcggctcactgcaagctccgcctcccgggttcacgccattctcctgcctcagcctcccgagtagctgggactacaggcgcccgtcatcccgcccagctaatttttttatttttagtagagacggagtttcaccgtgttagccaagatggtctcgatctcctgaccccgtgatccgcccacctcggcctcccaaagtgctaggattacaggcgtgagccactgcgcccggcctcggctaactttgtgtatttttagtagacggggtttcgccatgttagccaggctgatctggaactcctgacttcaagcgattgcccacctcggcctcccaaagtgctgagattacaggcgtgagccactgtgcctggccttggacactgtatttgcctggtggccgactgtctccctgacaacactcaagctccacaaccatgtgggttattttgctcattgctctatttccagagcctagcacagtgcttggcacatagcagatgctcaataagtatctactgcgtgtgccattctcttccttgaatttctgtaatactcatccaataccattcttgcgagacttacccgtatgctttttctgccagtggctacctgtgaaagcttcgacttgtctatgagctccctgaggacagggcctggctcagggaaacaattcctgtcatctgtgcagtttaccatcccctcacagatcgcctaatttgatttaaccaaagcaaacaggccacggaggcagatattgttagcaatccagatctctcctgctacctagactaagcttaacaaatatttgattgagagagagagagagagattgggagagagaaacttgagtcactttgtggagcgaggaagcccttctgggctaatggaatggttctctgtagcacattcaacagtactcataacagctagcatttgttgaacttaattttttttcttttgagacagagtcttgctctgtcgccaggctggggtgcagtggcgcgatcttggctcactgcaacctctgcccccgggttcaaacgattctcctgcctcagcctcccgagtagctgggactataggagcgaaccaccacgcccagctaatttttgtatttttagtagaaacggggtttcaccatgttggccaggatggtctcgatctcttgaccttggcccgcctcggccttccaaagtgctgggattacaggcgtgagccaccgcggccgacctgttgaacttaattttctaatctctacctgtgtcatcctcacagatattctgtctgcagctataccggcagggatctttatgtcttatctgttatcttccggtgcctaaacaaggcctggcacatagtaggtgctgaataaatggcgtcagcccgaggctcctcaattcgtgcccgggctcaggtgcagcgcggcgctccagatcctgccgtagcgagcggcagcgctgggctcctgccccgctcccggcgcgctcccccagtgctgggttgggctgggttgggctgggccgggccggtccgcgctcggcggcagttccgggtgcgccgcaggagtgagcgcgtgcacggggtggggcgcggagggccggtcccctcccagccgcggtgccttccgcatccccgcccgcggggactgtggggtgcggttccctcgccgccactcgctgctgcaggcccagagtcggggactggacctcagacagccaggagacctttccgccccggcccgcaacccgtgccggggactcccggcagccgcgccgcgcagcgccgcgccccgccccgcctcgcaggccccgcccccgcaccccgtcggcgcccgcctctcgcgccgctctccatacttggcgatcgccgcagccccgcgcgctcattggccgcgagctggcggcgtggggggcgggcccgggccgggccggggcggggaaggaaggtggcggcggcccggcgcggggggaggggggtgctgacccggatgttcactcctgggcacccggggaagtggaagcgccgggccctgctgcgggggggagagccactgacgccgggaccgggaccgccgccgccgccgccaccatggtaaaggccgcacggccccctccccggcccgggggcccctccggagctcgcgtccccctccccctgcccatccctggcctgggacgggtggcttcccggggtgggggaggggcggggtcccg

SEQ ID NO: 612 - DNA, 2300 bp, Homo sapien
ccatctctactaaaaaaatacaaaaagttagccaggcgtggtggtgggcgcctgtaatcccagctattttggaggctgaggcagaagaattgctcaaacccagtaggcagaggttgcagtgagccgagatcgtgccactgcactccagcctgggcaacagagcgcgactctctctcaataaataaataaacaaataaataggtgaataaattcaattcagttcaacaaatatttcatagaagaccctactatccaaggcattgtgctctgactggaagtatgaagacgaaggggcaacttctagttctactagcagataatatctacaaccagatgtttcagtactagatagagaaatcaatgcgggtaggcagggtagtgggacaatgagaaggggaaggcagctctaagctctatctgactaggcttcctagaatcagtgcagtgttgaagcttggatagatccagtgtatgaatgggagtcattgacagctttttttttttttcttttgtgatagggtatcactctgatgcccaggctggagtgcagtggcatgaacatggctcagtgtagcctccacttcccaggctcaagtgatcctcctacctcagcctcctaagtagctgggactaaaggcacacatcacattagcctggctaattttttaaattttttgtagagacaggagtctcactatgctgcctaggctggtcttgaactactggcctcaaacaatcctcccgcctcagcctcccagagtgttgggattacaggtgtgagccactgctctcggccttcattgacagcttctaatcagaggcataacgtggtcagatttctatttgttggtaggatggaagactaaaatcaatgacactagccagtaggctggatatacaatctctcttgatagctgtgggcatttggtttcaggatctcgcagttaccaaaatgcaggatgctcaagtcccatatataaaatggcgtggtatttgcatacaacctacacacatgcttacatatccttttttaaaattacttatttttttttaaagagatgaagtcgaactcctagtctcaagcaatcctcccatctcagcctcccaagtagctgggactacggtcgcatgccactgcgctggctcccatatactttaaatcatctctaggttacttataatacctaatacaatgtaaatcctaggtaaatagttgtactgtattttaaattttgcattattttttatttgattcaaaaatgtttctggtccatggttggttaaatccatggatgcaaaacccacagatacagagggcaccctgtgtatgtatgtgtatgtgtgtgtgtgtgtgggtgggtgtgtaaatatatacatggataggaggcctgaggtagacgttttacctggagatataatttggcagtgtttgcaattactcagggagagtctgtacagtgaaaagagaattgatggaagcttgcgaaccaacagtccttaaacagctggcagagaaaaggcagccctggaggaaaccaacagacaacagcagatggggagaagaggaaagagtggcgttaccgggagtgaaacgaatagaggagccagggaggatcagagggagggaaaattgtgtggaatgcggtacagaggtcagaaaagagtccatttgatttggcggtaggtaatctttcccagagcagtttcggtgttagtggttcaggcgggaattccaatgcaagaaaccagtgaacgaatgagagagtgagtagggaaagtgaaggtgagtacgttaatgaatgaataaatcaagtctgtaccctctcttgcccgggggatttccagggccaatgtcgcactttggtgaggaggaaaggcctggtcacggcttggggtgacgcctaggaaactgtcagcctcgcaaacccataggcgcagccccaaggtcagggtcacctcgagcctccagacaactcgtcaccttgacgaccaactgaaaaaaccggaagggatggaagcagcggatcatctcgcgatatctggagcgtctgcgcctgccttcctgacctgggacttgtttccagctctcgcgagactttcaggggtcggagcgcgggggccggccgagaggaaagctggaggcgcgggtggggaacatgtctgagtcggagctcggcaggaagtgggaccggtgtctggcggatgcggtcgtgaagataggtaaggggcttttcgccccagcaggcccggccggtgcagagctgctggctccaggctgcgctgcccaggaggaaggaagg

SEQ ID NO: 613 - DNA, 2300 bp, Homo sapien
actagcaatgtggtcttgagcaggtaatgacacattttggtgcctcgatttttcttacctgtaaaatgggaacaatgatgggactgtggtaaggattagaggagatgaagcagacagagtgaccagcataatgcctggcacaaaatgggtagatattactaccaagttacttcccaggccccctgcccacactgtagctttcccgtcaccagacagatggtgactcaactccaaaccctttgtccctgattagggggttggtgttgttcttgaacctcccggtgtttgagagatggtgggctgccctgtcaagggcactggctggaagttgtggcttctactcctggctctatgtgtgatctgaccagctcatcaggctccacaattagctttctgcaatgtgggagtggattcttacaaaatgtagaactctactttctaccctgctcggggtctgcatgaaagatggcgggggtaagctttggctgcaaaatggtaaatatttcctgagtgtctactgtgtacagtgcagtgaggctggtttctgccgtacatggtatatagttatccaacagacactagctggcatgggctcttactgtgtgactttaggcgagttacttaacctttctcttgacgttccttttttcactttttttttttttttttgagacaaggccttgctggagtgacaagctcattaggttccacaattagccttctgcaatgttgtccaggctggagtacagtggcacaatcatagctcactgcagcctcaaactcctgggatcaagtgatcctccagcctcgggatttttttcacttttattattttatttgtttgtttgtttatttatttatttatttgagatggagtctcactctgcctcccaggctggagtgcagtggtgcgatctcggctcactgcaacctccgcctctcaggttcaagtgattctcctgcctcagcctcccgagtagctgggactacaggcacacgccaccacacctggctgatttttgtatttttagtagagagagggtttcgccatattggccaggctggtctcgaactcctgacctcaagtgatcctcctgccttggcctcccaaagtgctgggattacaagcatgagccactgcgcctggcacttttaaaacagagacaatacttacctcataggtttattgtgagagtggcaacagcttgcaatgggatgaggcacatggtaaggtgctcaatatgtgtgaactattataacggtcatagttaccattaagggaagacctatctgtgctacattaatgggggataataattactttattcgctgggcgtggtggttcatgcctataatcccaacactttgggaggctgaggcgggaggatcacttgaggccaggagttggagaccagcctgggcaacatggcaaaaccccatctctactaaaaatacaaaaactagctgggcgtggtggtgggcgtctgtaatcccagctactcgggaggctgagaattgctggaacctgggaggcagaggttgcagtgagccgagatcacgccattgcatttcagccagggcaacaagagcaaaattctgtctctaataataataataataacaacaacaacaacaacaacaacaacttcattcaaccaaatacattgtacatctcacctggcctgcccataagcaatggagacactgaaataaacacgattcctgccctcaaggtctaatggaggaaagagatgtacacagctattctagagggaaattgacatgaacagaagttctcatcctgtgctccaggatcacactggaggagggagatgctcccagagggtcttgggaaggctttccaatctggagctggaagaatgtttgcccaagagatgtacacagttattctagagggaaattgacatgaacagaagttctcatcctgtgctccaggatcacactggaggagggagatgctcccaaagggtcttgggaaggctttccaatctggagctggaagaatgtttgccagagatgaaaggaggggaagggaattccgggcagagggaagggcgcaggcaacagctaggaggcgcagatgcaggctgggtgtggagggtgcgagtaggctggagtacaccagggagttcccagcaggccactaggagccacccaggatgcccggcaacctcatgagtcagacaagcagggctgtgtctatctggaagtttccagccaagctaggtaaaacacatggacacaggtaactatgctgtaaagcaaaatccccaagtcct

SEQ ID NO: 614 - DNA, 2300 bp, Homo sapien
tcctcctgccttggcctcccaaagtgctgggattacaagcatgagccactgcgcctggcacttttaaaacagagacaatacttacctcataggtttattgtgagagtggcaacagcttgcaatgggatgaggcacatggtaaggtgctcaatatgtgtgaactattataacggtcatagttaccattaagggaagacctatctgtgctacattaatgggggataataattactttattcgctgggcgtggtggttcatgcctataatcccaacactttgggaggctgaggcgggaggatcacttgaggccaggagttggagaccagcctgggcaacatggcaaaaccccatctctactaaaaatacaaaaactagctgggcgtggtggtgggcgtctgtaatcccagctactcgggaggctgagaattgctggaacctgggaggcagaggttgcagtgagccgagatcacgccattgcatttcagccagggcaacaagagcaaaattctgtctctaataataataataataacaacaacaacaacaacaacaacaacttcattcaaccaaatacattgtacatctcacctggcctgcccataagcaatggagacactgaaataaacacgattcctgccctcaaggtctaatggaggaaagagatgtacacagctattctagagggaaattgacatgaacagaagttctcatcctgtgctccaggatcacactggaggagggagatgctcccagagggtcttgggaaggctttccaatctggagctggaagaatgtttgcccaagagatgtacacagttattctagagggaaattgacatgaacagaagttctcatcctgtgctccaggatcacactggaggagggagatgctcccaaagggtcttgggaaggctttccaatctggagctggaagaatgtttgccagagatgaaaggaggggaagggaattccgggcagagggaagggcgcaggcaacagctaggaggcgcagatgcaggctgggtgtggagggtgcgagtaggctggagtacaccagggagttcccagcaggccactaggagccacccaggatgcccggcaacctcatgagtcagacaagcagggctgtgtctatctggaagtttccagccaagctaggtaaaacacatggacacaggtaactatgctgtaaagcaaaatccccaagtcctacaatcgtgtcccagtggtgtccctgggccaccactttccagaagcaaagttattttctcaccccgttgttaagcacacagaatagagaaggtacggccgcaatccacccaagtgcccactgattagataggaacccccgaggtgaggctggaagctggggccaggagctccactcttcccaggagtcagagaagtgagttcatttgctggctttttagttcctaataagtccctggggcttttcgggatgcttaagccaagggcgtggggccgagagcgacactaggataacactaggcaaggctgagcaacccaggctaccaacagcacggacttgaaccgggtcgcatgccggagcggacgggatgaggtgcaccgcagaactggggactcctggtgccgggacgcggcgggctggggcgccccactctcggggcaagtctgcaatgcccggtgcccacaaaaaggacacatccatctttgtcaccccgaggcctggcacggcctgacggcccaggctcggtaaaagtcgggcggagagagtggaagcgcagagaaacccggggagggcgcttaagaacgggccagggcgcccggctgggctgccctgcctctcgggcgccggccaggcgtcccggccgccccaccacgccgtcggagcgcgccgaagctcagcccggggcgggcgggccaggagagggcccggggcccctgccgccgcggcgccccctcctgcgcacccggagggagaggccgcgcgcgcccgcccgctctttctgcgcgcggccctccccgctgcccccgccctcgcgccctgtttggagggagccaccctgacgtcggagccgctcccccgcgccgcgcgcccgcccggggccgcagacagcgcgcagcgcagcccagccgagcgtcgcggggccgccccccgccctgccggccgcctcgccgagcctcctggggcgcccgggcccgcgacccccgcacccagctccgcaggaccggcgggcgcgcgcggtaagtcccgcccgggtcggcacgcgggcgcccggcttccagaggcttcggccgcgggggcagtgccgcgcccc

SEQ ID NO: 615 - DNA, 2300 bp, Homo sapien
gtgtggtggcaaggaggaaggacaggcctcctctatctgcttaaaagatgcttctgtgggcaaggctggggctctgagcaccaaatagcagcttagagttggcgggtgggtgctgcaggctctgaggtgcctgaggggaggtttttgaccatctgtaatgggctctctttgccatgggcatcgagcagatctgggtttcaggtccacttcaccacttgctgctggtgatctggggcaaggcccttggcctctctgaaccccagtttaacgtctacctctcagcattattgtaggggtcggaataaataactggaggagtaggaaccgtacaacaaagcccctggggacagcgcaggagccttcgatttggaaagtattatttttctgtttctgtggagaaaaaatgatcccaccccgttctctttatactacattttctttttctctttctcttctttctttctctttctttcctttctctctttctttctttcctttttttttttttttttttttttttttttgacagagtcttgctctgtcacccaggctggagtgtgcagtggcacaatcttggctcactggaacctctgcctcccaggttcaagcaattctcctgcctcagcctcccgaatagctgggattacaggctcccgccaccacgcccagctaatttttgtatttttgatagagacggggttttaccatgttggtcaggctggtctcgaactcctgacctcaggtgatctgcccacctccgcctcccaaagtgctgggattacaggcgtgagccacctcgctgggcccactttctctgttgattatgcttattgtttattgtctgtttcttccactagaatgtaagctccatggaggtgcggatctttgttttggccactgtagtgtcctgatgggtcagaacagtgcctgacatctagtggatgcgccttaaaagatgcattgaagtatctgttcaatgaatgaatgaataacagtattaacctgcacagcagtgttaggcagagactcttctcagccagaggggagacgtacagagggaggtcacacccaggggaaaccacaccccacgcctctgcctgcagcgactcttaacacacctggcctggggattctcaaatctgttcacgctctgttagactaggagcgccaacagctcagggacttcatccttagtacctggcccctttggggatcgggatggtttctgcgggaaaggccctggggaaggttagcttcttgctcaaactaacggtgaagaatgcccagaattactaacccattttacagatatggcaactgaggcccagaggggtgtcaggcgatttgtccaatatttcccaactcctggctcccctgaaagcccggtgaccccgttgtgagtgggcaggcacccattagagagcagcccctggataagggcaggtcacagccccctgctcccagttccgcctgcgccgccgccacgtgtgggttgggaggggcatctgagggtgtgggggctgccacagcccgggaggtgacccctcgcagctggggcgctctgatcttcggcccacaggcccggggtgccgggaccccgccctcctgcagggccagggctcggctctccccgcccaccgcgaggcggggcgcacgctccgcggcgcggggaccgcgcgctccaggctgcacccggcctctcctccgcgcgtgcgggcccctcgcggcgcctcccgggctcgggagacccggtcccgccgcccgcccggcccgcggccgcctcttcctctcgcagccccgcggcgcttgccgcagtcgcaggcggcggagcagccagagcgccccaggtaccagtgcgggcgggagacggaggcgaccctgctgccgggtggggagggggcgccgcgcggccgctgccctcctcttcccgcggggcctggcggccccggcgaacccccgcgccgcacaggccgtgtgcgccggatcccggtgcctccgcgccagctgagacctgcctttcccaggggcggctttgctccggcccctaggcccccgccctggtaccccacacgcccaccggccgcggggagcctgctccggcccgagagcgcccattcacccccctcacccacctccccgcgttcccacttccccgcactctgacccggccggacgcccctcccctatcttgccgcccgccccctccagggggctctgctcccaccccagggagcccatccgacctctgcttgacttcccgccgcttccttcaggggcctcggctcatcgggtgcccctcc

SEQ ID NO: 616 - DNA, 2300 bp, Homo sapien
taagctgtaactacaagcacaagccgacttcagcaatcaggggaccctgagaacaaaatctttggtttctagttattatgttgctggctgccatttatcaagtgccaagtgcttcccacatgtaacccagtgtattagtccattttcacgctgctgataaagacataccaagactgggtaatttataaagaaaaagaggtttaatggactcaatttcacgtggctggggaggcctcacaatcatggcggaaggtgaaaggcacgtcttacatggcagcaggcaagacagagaagagaaccaagtgaaaggggtttctccttataaaaccattggatctcaggagacgtattcactaccatgagaacaggttgggggaaaccacccctatgattcaattatctcccactgggtccctcccacaacacataggatttatgagagtacaattcaagatgagatttgggtggggacacagttaaaccatatcacccagtttccactcatggttgtttgagcagctgcttcctgcagacagactagactcctttctgggcatctaaaaatcccctggtttgaggggcattctggcttccccattcaggatcagcagctgcctgttctgatcactccaccactgcatctcaatggccaatgaagctaggcctcagacccacccgtgccaccacagtgtggctcacactgggctgcatgtgttttgagacttgactgagcatttgataacatgggggaattattgcacaaaaaaacaaaatcaaaacttcaccaggtgctgctgtccataaagtctgtcagccatgtccctgcccagaggtcacctgggcctctcacctggcctgacaccaggtcgctggggccagttcacttgtatcttcacccctaaacttccagggccttaagacaaaattcctaacccaccagaggatcacaaatgaagccaccctgtgccttcctaactgggagctttggggactggggtagaataagagtcatttctaggctcatccatttatgaaactggttgctcctggttaaagagtcttcacaggggccgggtgcagtgactcacgcctgtaatcccagcactttgggaggccaaggcgggcagatcacgaggtcaggagatcgagaccatcctggctaacacagtgaaactccgtctctactaaaaatacaaaaaattagccaggtgtggcggtgggcacctgtagtcccagctactcgggaggctgaggcaggagaatggcatgaccccaggaggtggagcttgcagtgagccgagagggtaccactgcactccagcctaggtgacagagcaagactctgtttcaaaaaaaaaaaaaaaaaaaagagtcttcacagatagacttggctcacatgctgtaaacctcgcaactccctagaggaggtattaagcatccccagatcatagattgggaaactgagacttgggagcatggagtcatagccagagttgtaggtctggactctgagcccagcttggaagctgtgctgcccacttctctgtgggaatgaggtaagctgagtcacaagaccagcaaaccacagtgacaggaattttctctcagccccttggccacacttgcagcaggggcaccccatctactcggtccaccacactcagccccttgcaggaggaagcacatgaatgagcaagtgtgggctctggctgaccactccaaacaccgacacaagagcaagctccatgctgggcctgtggccagaccaggcgtgttgcctcgaggggaaagtggcagcacctgggcaggggtacccacaaccctgaagccccagagggggcgttagtgtgctaattagctgttttagttccaccattgacggcccaatagacggtggtgtattaacagctcagtcggcccctgaccccatcacgtggggcagctgccctccactgatgagggcaaaaggccagtatgacagcctttctgggtacccacactcagtgggtcccaagctcttgtccagcatccaagaagaatgaggacacgctgataattgaagagtgagcaaggcgaggagttttattgagtgatgaaacagctttttgcagagaggggatgagtggatggttcccctacccaaaggcaggaaagtccccacaatgtggctgagtctggggcttttatgggctcagaataggggaagtgtgggcaaacaggaacagaagttctcactctgggtcacaggtttcatgtgggaccagcagtccagtctttcagccttcaggctgtttttttgg

SEQ ID NO: 617 - DNA, 2300 bp, Homo sapien
gtttactgtaatagctcaggaggctggagttggtggatcttagctaggcctgtgggtcagccaaccatccaccgatcaatgctagccttgtctggggcaactcagctctgctccatttgtctctcatcctcctgggatgagcaggcaagcccatgtcaatgatagaagcgcaagaggctagccctggtgcacaaatccatttcaagcctcacatctattaatgtctttggcaaaagcaagtcacatggctgagtctagaggggatgggcagggcaggggtccccactgcagagttatgaagcaaagtgggagggtacagggtgtggagacgaattggggccatctcacacgtgacaagggcttgagcagaagggattgagtccatatatcagaaattcatgagtttcggatttctttgttctttagcagtttgattggcaaacttgcaggtccaagttggagactgcatgcatttatttgagcatctgttagccagtcacttccctagtaggaccctaggacaggggccattcccttcatcactatctcacctccccaggcattgtggctgccctgacctggccagcctcactcctcagtgtcgccaatgtcatcgacaacccctggggggtgtgtctccatcgatcagcagaggttggcaagcacctggcccacatcctgctctcccggcagcaggtacctgggaatggctgtgtgggcgtggcattgagcaagaggggaagtcaggtgctgacttgttcacagatatcagccttagaggcaaggctacttggagataactcaatggttttgggggtgtgggcagtccttgctgcctctccagttcaagtaatgaatgtgtcctaggatgaacagtaaaaattatagactctgcagctctagcaggtatttaggtaaggactgaataacagggcatctgcaggtaggaacaagtctgggggactctggcagaagcaaaagtggctcctatgtatcagctcttcattcaagtgtttaggataatcactgggctcatttgggtgatatttcagtggaaacctctgacgcagtttgcagtgaagccagtaaagtgaatgagaccaggtgcttcagctggccaccaatggaattcccacatgctggtggcctggtgttccttcccagaagtataaagctactttgtgaggtcatctttggtggtctaaataccatgtaaaatggttaggaagagacatcatcataatacttttaaaatttgaatctagtaaagatgtacttaccaagagaataaaaccatccccttcagaataaaacttgagtgaatggagacaaaagcttgagaagcagtaccagaaatgactgcattgtcaggatttgttttggctggaagtgggagaaaacccaaaataacagtggcttaaacaaggtagaaatttattttcctggagaagcctagcaaggttgtctaatagccttccatggtgcagaggcccaggttcctgctaccttgttgctctggggtcttgaccttgtatcaaagatggcatcatccgagctccagggagcaggagaaaggaagaactgaagaagaaacagcaaagccttacaacatttcagttggtgtctcactggccagagcctagtcacatgaccattcctagctgccacagaagctgggaaatatagtatttattctgagtgatgatgaacccagctgaaattcaattactatggaaaaaagggaggatggatattgagggatgacaactagcagtttctgccatgcagctaaactgcttgagcaactggccacccccttcaatccctgcgtctttgtcaaaagaaacagaaaatccttcggcaggcttgactctaaggcaaaggccaaagtggcattggcttagacaagatagaattttgttctctcccaagtaagagtctgggtgtcaatatctggagcaagatgatgtgttagtttcctgctgccactgttacaaattaccacaaatttaccagctgaaaacaaatgtactattttacagctctggaggtcaaaaggcaaaaatgcatgccttagggaggatcccctttccttgccctgtgctaagtctcagccctgtggccacctcaagctacggaggagtcagggaaacttcgtctttggctgggtggccgtgtgcccagtcaaactcaggagtaaaggacaaaggggagaatgatattgggcagtggccagcagggttggcacaaagctcctgcaggattcgaatactgtttaacagaggattttctactgtggt

SEQ ID NO: 618 - DNA, 2300 bp, Homo sapien
tgttggccaggctggtctcgagcttctcaactcaggtgaactgcctgcctcagcctcccaaagtgctgggattacaggcgtgagccactacacctggctgaaacatggttgttgttttttttaatttaatttttttttttttgtgagacagagtctcactctgtcgcccaggctggagtgcagtgatgcgatctcggctcactgcaagctccgcctcccgggttcacgccattctcctgcctcagcctcctgagtagctgggactacaggcgcgtgccagcacacctggctaatttgttgtatttttagtagagacggggtttcaccatgttagccaggatggtcttgatctcctgacctcctgatccacctgcctcggcctcccaaaatgctggaattacaggcatgagctaccacacccagccgaaacatgttttaaaaacataactagagtcatattgtatatgcagtcgaattctgttctactacctctctagaacaaaattatccctgatttgtagcatttgctaatttctgtgatgtaaatattcccaacatgccaatctcgggctgccagtgtcactggacacagggttggaaggagaagcacaaaacggattgtcaccagtgcagcatgttgtaattttaaattattttttttctgatctcaaaatcgacacttattgttaataattcataaaacacagatatataaaaaaattaaaatcatccagaatccaatcccggtccctgcctacctggagttagccactgccagcatcctggtgcgtgtcctaacagtaccctctctatggatagagacctacacaaaataactttctagagagttcaaaagcgatacaaatttgtggcagaaaatttgggggaaatacagaaaagtctctgatatctgtaaatggcaattcagagataattttggaggctgttcttccagtcatttttctcctctccattgctttaacacgattggactcatggtgtgaatattcagtttttaggcacagtacaggtacattctcatgctggggaggaacgcaacatccaggagaagggtgttcccactgataacttaataaaaaccccactgaagcttaaagaggtaaaaagtattgttttcactagcattgaaaatggcactaagggctgggtgcagtggctcacgcctgtaatcctagcactttgggaggctgaggcaggcagattgcctgagctcaggagttccagaccagcctgggcaacatggcaaaaccccgtctctactaaaaatatgaaaaattagccaggcatggtggtgcgtgcctgtaatcccagctactcaggaggctgaggcacaagaatcacttgaacttgggaggcggaggttgcagtgagctgagattgcaccactgcactccagcctgggcgacagagcaaaactgtctcaaaaagaaagaaagaaaagaaaaagaaaatggcactaaggatgaagctcaaattagttgaggttttggttttgaagttttggtttgaagttgcggttttgggtcctgagacctcctttgggtaattccagatgcttggcccttcctccatctcccttccccatctgatgctccattggcatgtgagaaagggagtgcctttagggagaaatataggaaaatctagctcttgcttaagcctgaaagctagttcattcctcggttcatgtaactgacattttctgagtgcccactctgtggttaggcaccaggtacagatgtggaggcgacagggtgcccgctgaggaactggatgcagtgaccacagctcagggtacagagagttgaacaaggacattcaatgagacaatccatggaaagtggcagggccgtgcccagcacatggtgagtgctcagcagtggtagctgcctgccctaccaccctattgagaagagcaccccacgtcaaggaacgtgcagggcaagggcccaggggagcgacggtgcagtgccaggctcccctgagctttaactgaccagccagctccctctgccgtagcctcccccagatctcacactccgtggacccacaggctggtttttctggttttctcccgcagggcaatttgcatatttctccaaagaaccatccagaacctgagcagcctgtcttcagacagagagaggcccacggctgtttcttgaaatctgggtaagtattgaaggtttcttttccttcagtagccccttattactatttaaaatggtcttctttctgagttcacattttctgtctccctctctagaatataatctccc

SEQ ID NO: 619 - DNA, 2300 bp, Homo sapien
ccatttgaccctcacaataacttcatgggtgggtagagctgcccttcttggtcctgattggccagtggggagatgagcagatgaaggaaggaacatttcacaggtgcgtgagtcccaggctctgagctgggatgctggtctctgacccccgtcggtaccttttcctcccataaccctagattgtcttcactgggagtaagggcaacagcttctgaggccacgatgattcatgccctagctctggcactcattagctctgtggcttctgcattgtctggacctgagcctcggtttcctctccttcagagtgggtgtgatgaaatttcacagggttgctaggggaaagagatccattcattaagtgcttcttttgagcacctgcaagtgctaggcacagtccctggggctgggcacacagcggagagcaaggcagcctaaacccgcccacctccagggcttttaaagtctagttggggctgcgcggtggctcacgcctgtaatcccagcactttgggaggccgaggcgggtgggtcaccagaggtcaggagttcgagaccagcctggccaacatagcaaaaccccgtctctactaaaaatacaaaaattagccgggtgtggtagcacacgcctgtagtaccagctaccagggagcctgaggcaggagaatcgcttaaatccgggaggcggaggttgcagtgagctgagatcgggccagtgcactccagcctgggtgacagagcgagactcttatctcaaaaaaaaaaaaaaaaaaaaaaaaagaactgtacctggcgcgtagtaggtgctcggtaaatttgttcaatgactgaatgtgctgggtgctcagggaagactctcagatcccatcccaagagaccagaatggaaagcaggaaatggattgggggaaagggaggtctgaaggcagagagtcccaggcacgggagcctccaggcagaggccctgagacaggaccaaacttagcgttagggaaaatgaaagtagaatcaggaagaacttagatatctgaacactttgcaaactacaaagtgctgcatacacgtgcgggaaggcggtttctgcggctggttctttgtttacattatacatttttgaagactttgtcttcaaaatgtggctttggggcatgccactctcggggccgagtccttcgcgggcagtttctgcaaagtccaaccctgcagggcccttctcccgcgccgcgctgtctcgctgcttcctggagggtaaatggacccacacacagatgtggcgccgcgggcttgccggtcacctgcagaggccggcacccctgtcgcgatgggtggtggaggtggggcagaggtgggacgagccaggtcgggacccgcagctggcgagtcagagcctggaaggccccgcgcccccgcgccgcgctccctaagtgctccgcccggccggtggcgaccaggcgcgctcggggcaggcggcgggacgggccgggaccggggccgggacgcggcggggaggggaggggccgggccgggccgggcgggaggagccgctcgccggttttgccgcctccgcctttgccttcgcagccgcctccaggtaagggggccccggaggagccgccaggccacggtggcgcgcacctcgctgggccactccccgccggccccacgcggggcactcggagcccggcccagccccggggccctttgccctgcgccccgccctccaccccggggacactggacccaccaggaagcggccgcgcgctccctggcgctgcctgccctaagcccaggccgcctgctggtggttggtttgttttcagagccggaagtgcttttagaaatcttggggaggcagagggggaaactgaggctgggcggagcactcgggcgactccggcctcggcctccgagttcttagaggtcacccagccgctcccttgacaaatgaggacgctggtcaaggtcagagaggaagggggcttgcccaaggtcacaagaggtccctgtgcttccccttgccccacgtggcccctccacgcccccgtcaggaaggcctctaggactcccccgcctcctgtctccctgtccccccgcagactctcaaacagagaattccaggagggcttggggagcctctggagaaaaaccaggctcctcatgttacaaggaggccatgtcttctggtgcccatgcctgaagttacaggagggaagaattactgctgctgacttttgagtggattttacagctgggtaaactgaggctcagagaggtgaggtaacttccccaagaccacacagc

SEQ ID NO: 620 - DNA, 2300 bp, Homo sapien
agaatgtaagctccatgattttgctggaaacactttgattctcctgctataccctcaacatctagaaccccaccagccactccacacatcctggttgaattagtcaatggttcattagaaggcttccccttccacaactccctaaacattcctttgggggagagttacttagaggaaacaaaattcttcaatgtccaataccaaacctaacaaaatctcaaaagcatacaccaaaaggggtaaacatattttctccatctttcccacccatagcctcaatgatgggatcaggaactgtgtgcagtgggggcgactagggtgagggttgggtgccgggcaatggctgaacagggtccaatacccaaagacaagtgtgttcaacacaaggtctctaatcaaattagagacagggcaaagcaggggagtgcagagtggtgcctggtcccacaaagctgatctgctggaaggggctgccagacattaagaggagggctggctgcagttctcaatcttgacaaagctcacatgctcagatataaccccttattcccctaaagcctgcacacgattgacccatttgaccctcacaataacttcatgggtgggtagagctgcccttcttggtcctgattggccagtggggagatgagcagatgaaggaaggaacatttcacaggtgcgtgagtcccaggctctgagctgggatgctggtctctgacccccgtcggtaccttttcctcccataaccctagattgtcttcactgggagtaagggcaacagcttctgaggccacgatgattcatgccctagctctggcactcattagctctgtggcttctgcattgtctggacctgagcctcggtttcctctccttcagagtgggtgtgatgaaatttcacagggttgctaggggaaagagatccattcattaagtgcttcttttgagcacctgcaagtgctaggcacagtccctggggctgggcacacagcggagagcaaggcagcctaaacccgcccacctccagggcttttaaagtctagttggggctgcgcggtggctcacgcctgtaatcccagcactttgggaggccgaggcgggtgggtcaccagaggtcaggagttcgagaccagcctggccaacatagcaaaaccccgtctctactaaaaatacaaaaattagccgggtgtggtagcacacgcctgtagtaccagctaccagggagcctgaggcaggagaatcgcttaaatccgggaggcggaggttgcagtgagctgagatcgggccagtgcactccagcctgggtgacagagcgagactcttatctcaaaaaaaaaaaaaaaaaaaaaaaaagaactgtacctggcgcgtagtaggtgctcggtaaatttgttcaatgactgaatgtgctgggtgctcagggaagactctcagatcccatcccaagagaccagaatggaaagcaggaaatggattgggggaaagggaggtctgaaggcagagagtcccaggcacgggagcctccaggcagaggccctgagacaggaccaaacttagcgttagggaaaatgaaagtagaatcaggaagaacttagatatctgaacactttgcaaactacaaagtgctgcatacacgtgcgggaaggcggtttctgcggctggttctttgtttacattatacatttttgaagactttgtcttcaaaatgtggctttggggcatgccactctcggggccgagtccttcgcgggcagtttctgcaaagtccaaccctgcagggcccttctcccgcgccgcgctgtctcgctgcttcctggagggtaaatggacccacacacagatgtggcgccgcgggcttgccggtcacctgcagaggccggcacccctgtcgcgatgggtggtggaggtggggcagaggtgggacgagccaggtcgggacccgcagctggcgagtcagagcctggaaggccccgcgcccccgcgccgcgctccctaagtgctccgcccggccggtggcgaccaggcgcgctcggggcaggcggcgggacgggccgggaccggggccgggacgcggcggggaggggaggggccgggccgggccgggcgggaggagccgctcgccggttttgccgcctccgcctttgccttcgcagccgcctccaggtaagggggccccggaggagccgccaggccacggtggcgcgcacctcgctgggccactccccgccggccccacgcggggcactcggagcccggcccagccccggggccctttgccctgcgccccgccctccaccccg

SEQ ID NO: 621 - DNA, 2300 bp, Homo sapien
tttgtttgccaggtgcggtggcccacgcctgtgatcccagcactttgagaggttcaagagttcaagaccagcctggccaacatggtgaaaccccatctctactaaaaatacaaaaaaattagccaggcatggtggtgcgcacctgtagacccagctactcaggaggctgaggcgtgagaatcgcttgaacccaggtggtggaggttgcagtgagctgagattgtgccattgcactccagcctaggcgacacagcaaggctccgtctcaataaaaaataaaatataataataaagtaaaataaaatcagttggtttcttgtccatctccctccacccatcccccaaaccagaatgtaagctccatgattttgctggaaacactttgattctcctgctataccctcaacatctagaaccccaccagccactccacacatcctggttgaattagtcaatggttcattagaaggcttccccttccacaactccctaaacattcctttgggggagagttacttagaggaaacaaaattcttcaatgtccaataccaaacctaacaaaatctcaaaagcatacaccaaaaggggtaaacatattttctccatctttcccacccatagcctcaatgatgggatcaggaactgtgtgcagtgggggcgactagggtgagggttgggtgccgggcaatggctgaacagggtccaatacccaaagacaagtgtgttcaacacaaggtctctaatcaaattagagacagggcaaagcaggggagtgcagagtggtgcctggtcccacaaagctgatctgctggaaggggctgccagacattaagaggagggctggctgcagttctcaatcttgacaaagctcacatgctcagatataaccccttattcccctaaagcctgcacacgattgacccatttgaccctcacaataacttcatgggtgggtagagctgcccttcttggtcctgattggccagtggggagatgagcagatgaaggaaggaacatttcacaggtgcgtgagtcccaggctctgagctgggatgctggtctctgacccccgtcggtaccttttcctcccataaccctagattgtcttcactgggagtaagggcaacagcttctgaggccacgatgattcatgccctagctctggcactcattagctctgtggcttctgcattgtctggacctgagcctcggtttcctctccttcagagtgggtgtgatgaaatttcacagggttgctaggggaaagagatccattcattaagtgcttcttttgagcacctgcaagtgctaggcacagtccctggggctgggcacacagcggagagcaaggcagcctaaacccgcccacctccagggcttttaaagtctagttggggctgcgcggtggctcacgcctgtaatcccagcactttgggaggccgaggcgggtgggtcaccagaggtcaggagttcgagaccagcctggccaacatagcaaaaccccgtctctactaaaaatacaaaaattagccgggtgtggtagcacacgcctgtagtaccagctaccagggagcctgaggcaggagaatcgcttaaatccgggaggcggaggttgcagtgagctgagatcgggccagtgcactccagcctgggtgacagagcgagactcttatctcaaaaaaaaaaaaaaaaaaaaaaaaagaactgtacctggcgcgtagtaggtgctcggtaaatttgttcaatgactgaatgtgctgggtgctcagggaagactctcagatcccatcccaagagaccagaatggaaagcaggaaatggattgggggaaagggaggtctgaaggcagagagtcccaggcacgggagcctccaggcagaggccctgagacaggaccaaacttagcgttagggaaaatgaaagtagaatcaggaagaacttagatatctgaacactttgcaaactacaaagtgctgcatacacgtgcgggaaggcggtttctgcggctggttctttgtttacattatacatttttgaagactttgtcttcaaaatgtggctttggggcatgccactctcggggccgagtccttcgcgggcagtttctgcaaagtccaaccctgcagggcccttctcccgcgccgcgctgtctcgctgcttcctggagggtaaatggacccacacacagatgtggcgccgcgggcttgccggtcacctgcagaggccggcacccctgtcgcgatgggtggtggaggtggggcagaggtgggacgagccaggtcgggacccgcagctggcga

SEQ ID NO: 622 - DNA, 2300 bp, Homo sapien
tcagggccccacttccagagagctggagccagacatcaccctctccgtgagcacagaatgacggtgggaagcagtggttgcccaaagtgaaaacagagaactgttacccaaaaaaggggaaagaatgctaggcatgggggaaaaaacatgcctagatccaaggccaccttcagcttgatctgggggaaaacgtgatatagatgtgtatctataccttagtatctgagacaggtctcagttaatttagaaagtttattttgccaaggttgaggacacatgtccgtgacacagcctcaggaggtcctgatgacatgtgcccaaggtggacagagcacagcttggttttatacgttttagagggacatgagacatcaatcaacatatgtaaaatgaacattggttccatctgaaaaggtggagcaacttgaagcaaaggcaggaagacctgaagtggggaaggggcttccaggtcacaggtggataagaatggttacattcttttgagtttctgattagcatctccaaaggaggcaatcagatatgcatttgtctcagtgagcagagaggtgactttgaatagaatgggaggcaggctggccctaagcagtttccagcttgactttcccttgtggcttagtgattttggggccccacgatttattttcctttcacagaggtaactgatggtctagctacaggttgagaagaaatgggatgggatggtgagagtattggatttcagagatagagggcccagggggagtggggaggtgggagttaccgatcccacaagggagggagcccctttggggctggtgactccaggacacagagggtggcctgcagtgccagctactggggtaagggaaagagctgaatcagaggcacaggactctgtgtggcccttggcaggtgacatgagcaccaaaggatccttcacacgggcttctgagttcagagtggcctgaatgaaacatttgtttgagggagtgcacatgccaccccgccatttgcccttgagggcaaagtaaggaaatcacgttttcctaactgctgtgttactaatatctgcctgtctcacatgagtcctcttagcctacgccacccggctggggccagttgtgtccaaatgaaccaatgaaattgattcaaccagaccttggacgctggtagattccacaaggtcctgctccatggaaggccccttggcaggcagccagcagcctaccctgaccacaccctgcccttgtttcccagccttccctacaaggctgtatcagggttccgggaaatgggggctggggaccccgggcacagggcttggcttagagtaggcccaaataaatggcagctgttcttagtactactggatacgcagcatgcctagcacaaaacaggacacctgtgattaggcatgtgaagtgtgcagcagggcaccgatgggaagttcatacacccgtaactgtgaatacaacagctgtggctctaaggaaatgaatacagtagcaggtgccaaacacctgtgcgctgtatgtggttttgtttttctgcgttgggttgggctttgtcctccttccactcacttttcttacctctcccctcctctttccaaggccacctgcctgtaaatgtgctccaagtgcaaacaaacttttttccactcatcctgacatccaaaagtttgtgtctgagaaagcagtgtccaccaatccacctatgtccgactcatagggctgtctgtttattgtgcagatttgtagatgccagtgagccaagatcgggccactgcactccaacctgagagaacgagactccgtctcaaaaaaaaaaaaaaaagttaaataaaaaaaattaataaaaggttcagggacctgggaagtgggggtgagagagttggattctgctgcctcctaaagcttgagccacagttctgtgggcacccaccaggtacctggccccaacaggaaagtcctgattcactagacccttgcccactttgccctcctatcaggcaattcaaagtctccagacccgcaagttactgattaaccctaggttttgagaaaataaataataataactgaagggacgacgtaagccaagaaacaagctgggcagctctgggagagaggagtgtcagacagctgttgtcaacaggcacctggccagagtgaaaaggaggggcagattccatccaagtcccagcggcgccagctgacactctctgccaatgcccaggtgctgagcgacagtgtcccaccggtccctgtgcccagaatggcctgcaccaagaccctgca

SEQ ID NO: 623 - DNA, 2300 bp, Homo sapien
cgcctccacctcccaaagtgttgggattacaagcgtgagccacacgcccagccaaaaagatttttacaagacgggcaagtgttcgcttttctatcaatatgttagcagtctgtatttacttatttgctggtgagaaacctttcttccctggtttctaaagtttgaaagtctttgcccctgagctcatgagatttccagagaactgattcaaacaacttcattaaataggtacttacttcatgcctggggctttacatttttatttaatctttacaactctcttttgcattcttattgtcatcagaaaaatgcaaatcaaaatcacgatgaaataccatctcatgccagttagaatggcttttgttaaaaagaaaaaatagcagatgttgctgaggctgtggggaaaaggggaacatttttacactgttggtgggaatgtaaattagttcagccactgtggagagcagtttggagatttctcaaagaactaaaaattgaactaccactcgacccagcaatctcattactgggtctatactcaaaggaatatatatcgttctatcaaaaagacagatgcacccgtatgttcactgcagcactattcacaatagcaaagacatagaatcaacccaggtacgcatcaacagtggattagataaagaaaatgtggtatatatacaccatggaatactatgcagccataaaaaagaacaaaatcatgtccaggaagaggggagaacagcaacatggatacagctggaaaccattatcctaagtgaactaaggcagaaacagaaaaccaaatactgcacgttcttataagtgggagctaaacattggatacacatggacacaaagatgggaacaatagactctggggaatacaagagtcgggaggcagttgggggaaagggttgaaaaactacctattgtgtattgtgtactttgctcactacctgggtgacagattcatttgtactccaaacctcagcctcacgcaatatagatggggtttcaccatcttggccagctggccaggctggtctcgaactcctgacctcaggcgatcccctggcctcggcttcccaaagtgttgggattacaggcgtgggccactgcacctggcctcagtttttgtttttgtttttttgtttgtttgttttttgagatggagtctcgctctgtcccccaggctggagtgcagtggtgcaatctcggctcactgcaagctccgcttcccgggttcatgccattctcctgcctcagcctcccgagtagctgggactacaggcgcccgccaccacgcccggctaatttttgtatttttagtagagacggggtttcacagtgttagccaggatggtctccatctcctgactttgtggtcagcccgcctcggcctcccaaagtgctgggattacaggtgtgagccatcacgcccagcctggtctgtctcagttttaaaacggaaagtcctgcatcccaagaaaacctctagtccaggcaaacctaggtgggtcgctctaggatggaattaggatttccagtggtcttggacagaagggcgacctctcccttgagttacgaaggaaggcggagagatgaagggcaggattaaataaacaagtatgcgggctttggagccagggcaaagctctgccttttagctgtgtgatcttgaaattatttaaccactcagattcagtttcctgtaatttggggataattaaacaagaatgagccgtgtgaaagtgcctatccaactgtagtaggctcgcagcaagagtttaaatcgtttttattcatctccggtcctaacttttgccgctgctctgtgttccactcttctatcatctttaatttctctgcttgacttgttcctgctttgttctctctggtccctctccggtcgctcctgccactcacgttgagtaccatccaccactagagggcggaatagaacaaaccaagatgggtgcccctccagctctctatggcgtctgctcgccgagccccgcaaaagaggcggggattccatcatgtgaccggggtgctgggcgccggcgcaggcgcggttgctgcgtagtcgtcgccgggctccgttgcccgcgctgttttaccttcccaacgcttgaggcggacgctggggggtcctgcgcctttccctcctgccgctggggactgcaggctaaggccatgtcccgaaagcaggcggcgaagagccggccgggcagcggcagccggaaagccgaggccgagcgcaagcgggacgagcgggcggcgcgccgggccctggccaa

SEQ ID NO: 624 - DNA, 2300 bp, Homo sapien
ctgtcctagccaggccaggattcaaaatgggtcacaaaaaggatcgtctcagaaacctggcccttcctgggaaacaccccttatgccaccacaggaatggctgtgggccaaacctactagggaatcgacgctaattttcagttgtttagaaggtaactcctcagtgattcactgtttgggctctcgtaacccaggccaggagaggcaggggctgccaggagatcaaaaggaaatcgtgaacaaaggtctctcttttcaggagaccatgactcacagctgctaggtgatcctgggcaggtggactcacctctctgaccccttctccccgcaagtcttctctgaaacagggtgagaagagcccagcatgaagagagtcccaggaggagttattagcaggaaatgaatgggaggggcagggagaaaagggtttcctgggctttactcttattttatttatttatttttttctgagactgagtctcactcttgttacccaggctggagtaaagtggcgtgatctcggctcactgcaacctgctcctcccaggttcaagcgattctcctgcctcagcctcctgagtagctgggattacaggcgcataccaccacacctggctaatttttgtattttcagtagagatggggtttcaccatgtaagccaagctggtctcgaactcctgacctcaagtgatccacctgccttggcctcttaaagtgctgtgataacaggtgtgagccaccgtgcccggccgataaaaggtttttaacgtaagagtatgaacactcagccctcctctccttactccaaggcgaaacctccccgggcctctatcctccggctggttggggtcagggaatttgtgtcgggattccttccagcctgtagggtgagacccagactcagtgggtttagtctcctctcctggaacggaggctggcaccaggccctagaccagctcctgaagcctggagcccgctggttaggccgagggctgcagtacaccggttgtcacgggccctgggcacatcagcctttgtgggctcttcctccatatattaaatgttatgactgtcttggtttgaagacaaatataatccaggtgggatggtactggtttttctcctacttttataagaaagtaacacattctgttggggttaaaagtagtatggctgctaggcaccacctccacttcgtgctggatgagttggcccaggtgaagccctttatgttgcctgggtttaaattctagctcatcacttatgcatgtgcctcagtttccctcctctgtaagatggggatgactgcagcacccacgtgatggggctgtggtcctgcttgaaaggggcttggcacagcgcctggtgcatagcaagtacttggtgagggctggctgcctggttgcgtgtgagttttccatcctcctgtgcgggaggcaagagggacaccttctatcctcataatacaggcaggaaaactgaggttccaagcaagggaaaggacctgcccacggccgcctaatacgcagtggaaccaggactccaaggccacagacccagcgactcccaggccctgaacggtgacggaggtgcagggtcagtgatcccagtcacagaccagagcaggagggtcggggaggggaagcgccaggccaggccagggcctcctgcctccggttctgcccgggtggaaactctgaaacaggacggacttggccctgggcacctccaggctgtgagaactgaggtttttcagtctctctgagtctcagtcaagtggagatgaggaaaagataccaagaatgacaagcacctggcacagcccgcgcctcacagcgtggtcaatggatgattttttggaaagggtgggtgatgggaagggtgtgagtagaaagagccacgagattgcccgccatcccccacactgcctggaagcagagcccacaggccccagctggcccctccccggggacttggccaaagtgtcagacctggaagaatcgttgcatcactgggcactcacgggttaatgacagggagtggacaggacctgggtatttaactaattaggaggctccctgagatcagaggtggccctgctgctttcttctgctgccttttatgctccttgtgcacctcccttccccccaacctgggatgaaatctccccacgtgctggtgttcctttgcctcctgggtaagtgatctttgtgaccttcagccttctgccccatctggcaaccccaagctccctggatgcccctgagcctggccctaccgagggtgtggtggatgccaa

SEQ ID NO: 625 - DNA, 2300 bp, Homo sapien
cctactgtaagaattaaggaaagaggaaagaaacatgaaagctggcttggcagtcaaggacaggtttattttagagaggggcagctgtctgagttaggtcagaggcacacacttacagactaagagtttttaaggattcagggtgggagagtttaacagaggcttggactgcttctgtgtctttttgttgtgcctatctggaagggagagtttctgtgtctgttcccatacatctttctgcagcctcaggcatactccccaagtctgcttttagctttcctatcttagtgcacctgaagggaaaagaatgtgcttattaaggctcactgttttactggggcccattttatgagggtgaagtttggcagttgccagagaaactttccgaacacctccctctctgcccgagctgtcttatctgtgttttatctgtgttttatctgtgttttactgtctactctttctggctgtttgtagtgagaagagaaatgatttccttgaaatgcatgaggctagaaagggagctggaacttaaagtggtggtgtttgtccgagatgacggtgctcctgccctgtcacctactgcctctctccccattgcagtgtcaccacctatcacatgatgtcatttactagtatgtcttttgctgattgtctgtctctttctgcttaagcggaagccctgtgaaagtagaggtttctgtttggcttactgagtccaagggcttggattaggtctgggatggaagatgaacaagaggccaattcatggactttgaattcctgtaaaacagcctgaaatgatgggaaaaggagaggctctatccgacgtcaccagagtccttgagcgttggagtatttctttcaactgaagcctggaccagggctatccagatatacagagagggaggcggttctgcctattggaggaactactgtttccgaaagtgcaatgtttaacaaaggcagtggtctaccccggggggttgagacctctgaaccctgacgtggccataaagccaactgctataggactggcaacccagaataagaagagtgaaggaagccaacagagatccctggaggttgtgttagtttgcttcggctttgtattaggtactttgtggcttacacaacagacattttattgtctaacagttccagtggcagaaatcaaagggcccaacagggttgattccttctgagggctgtgagggagaatctgctccatccctctctcctagcttccagtgttttctggtaatctttgccattccttggcttgtagaagcttcaccctgatctctgccttcatctttgtatggccttctcccagtgtgcctgcctgtctccaaatttcccatttttgtaatgacatctgtcatcttggattagggcccatcctagctgccctagtgatctcctcttaactaattatatctgcaatgaccctatttttaaataagatcacattctaaggtaccgggactccaacacaggaactgagagcaggaaggaggaccacagtccaaccccttacacagtcgagcactggaggtaaatggtattctcgagaggaaagctgtttgatggctcttgggatagattaggttatgctccagcaactgcccatctcaattatcatcagcttaatacaacaaaagtctatttctcactcacactaagacccctgtgagctgcaggactttctaggacaactgtcttccgtgccatgattcttacaccccagattgctttcatcttctggttctaccagtggggcagggaagggctggggagttgcatctcatagtccccttgctggagaaacctggaagtgacccttcataccagtgctcatgttttaccagtcagcagcagggccctaggtctccatccctgcaaggggctctagagtgtagggaacagatggaatgttcacaagcaccacagcccctgccacagtgacttttttaggactggtatcgcagagtgtttacttaaggcggtggaagctaaattcttagcatgtgctggagagcaatgaaaaagatatttactttatgaattaaagctggagtcagtgtcagcccgaaggctgaaggaaaaagagcaacagatccagggagcattcacctgccctgtctccaaacaggtgaggatggggaataaagtgaaggcagtgctttggtgggaacttcaaggatagcctctggctttttccaggtttagaagctcatatgagacaggggtggaggaaaagaagaaagaagaataagaagagaaagttgaggccctgg

SEQ ID NO: 626 - DNA, 2300 bp, Homo sapien
ctgggaattgtgctgttataaacatgagtgtgcaagtatgttttttgtataatgacttcttttcctctggatagatatccagtagcgggattgctggatcaaatggtagttctacttttagttctttaaagaatctttacattgttttccatagtggttgtactagtttacatttccaccagcagtgtagaagtgttccctgttcaccatatgcatgccaccatctattattttttgatttttggattatggccattctttcaggagtaaggtggtatcacactctggttttgatttgcatttctctgatcattggtgatgctgagcattttttcatatgtttgttgaccatttgtatatcttcttttgagaattgtctattcatgtccttagcccactttttgatggggttgtttttttcttgctaatttgtttgagttcattgtagattctggatattagtcctttgtcagatgtatagattgtgaagattttctcccactttgtgggttacctgtttactctgctgactgctccttttgctgtgcaaaagctctttagtttaacgaagtcccatctatttatctttgtttttattgaatttgcttttgggtacttggtcatgaaatccttgcttaagctaatgtctagaagagttcttccaatgttatcttctagaatttttatagtttcaggtcttagatgtaagtccttgatccatcttgagttgatttttgtataaggtgactgatgaagatccagatttattctcctacatgtggcttgccaattatcccagcaccatttgttgaatagggtgtcctttccccattttatgtttttgtttgctttatcaaagatcagttgactgtaggtatttgggtttatttctgtgttttgaaaaaattaccatttttatctcgctgcttgttattggtttgttcagagtttctatttcttcctggtttaatctaggaggttgtatatgtccagaaatttttcagtctcctctcagttttctagttcatgcacataaaggtattcatagtagccttgaatgatcttttgtatgtctgtggtattggttataatatctcccattttgtttctaattgagcttacttggatcttctctcttcttttcttggtgaatcttgctaatggtctatcaatattgttcatcttttcaaagaacaagcttttgttttatttatcttttgtattttttgtttcaattttatttaattctgctctgttctttgttatttcttttcttccactgggtttgggttggtttgttcttgtttctctatttccttgagatgtgaccttaggtctatttgtgcccctttagactttttgatgtaggcatttaatgctacgaactttcctcttaacactgcttttgctgtatccctgagtttttgatagattgtgttactatcattcagttcaaggaatttttaaattttcatcttgatttcattgttgacccactgatcattcacgagcagattatttaattttcatatatttgcatggttttgagggtttcttttggaattgatttccaattttattccactgtggtctgacagtacttgatacaattttgattttcttaaatttgttgagacttgttttgtggcctatcatatggtctatcttgaagaatgttccatatgctgatgaatataatgtatattcctcagctgttgggtagaatgttctgtaaatatctgttggtccatttgttctagggtatagtttaagtccattgtttctttgttgactttctgtcttgatgacctgtctagtgctttcaatggaatactgaagtcccccactattattgtgttgctgtgtatctcatttcttaggtctagtagtaattgtttcataaatttgtgagctccagtgtcagatggatatgtatttaggattgtggtattttcctgttggattagtccttttatcattatataatgtccctctttttcctttaaactattgttgctttaaagcctgttttgtctgtgttaggttttaagtgcaggctttatgtccagcataagacctaaagaggcaggagaccagcttaatgtcagtgcccgcccctgcttacaggctggggccatctgtaggcttggacaggaggggtttggggagacatggcctgctgtctgggaaaatattgataacatgttcccaggatgaggcatttctgacccttgttgtggtggaacgtggtgttccttgtactttctcccagcagaatatgataagaggcaggctatttc

SEQ ID NO: 627 - DNA, 2300 bp, Homo sapien
aaaactaaatttctgcctcatactacacatgaaaataaactccaaatgaattaaaggattaaagccctaagtgtaaaaccccgaaatttagaaccaataggagaaagatactgagaaaaatattgttaaactcatgttacagagaggcatgcaggactttgcaaacaaggtactaaacattactgattgataacttgtatggcatgaaagttaaaagtggtagttttttttttttttttttgagatgggatcttactctgttgcccaggctggagtgcaatggcacaatctctgctcactgtaacctccgcctcctgggttcaagcgattctcctgcctcagcctcctgagtagctgggattacaggcatgtgccaccatgcctggctaattttatatttttagtagagacggggtttctccatgttggtcaggctggtctggaactcccgacctcagctgatccgcccacctcggcctcccaaagtgctgggattacaggagtgagcccccacgcccggccaaaagtttttatattataaaaatgccataaataaaagacaactggcatgcttacagaatatatttgcaacatatatagcaaacacttgttgtcttgttttccaatgtgttgcctcctggaagccgctgatacagaagcctgagggaacacactcccccctacgtccttctccaacacagcagagccaggaaggacccggatggaagttaggacaaagaggcccagaattggcacagataccaacagaccattcgttgaagaagaaatccaaatggccataaggtgtgtgtaaaaatgctcagttgcaccaacagctaggggaagcaagtgaaaacaatgatacgcaattttatactcatcagattgggaagaattgacaaatgtgatattatcaagtgctggctatggtgccgctaggaatgtaaactggcacatccattgaagagagtattttaggaatgactggtaacgttgaaaatgtgcatgcccctcatctgacctatgcaatatgcttacaaaaaacatttaacctgataatcatgaggaagcaataggcaaatccaaattggtgagtattctgcaagacaactggtctgggttcaagagcatcaatgtcattttaaagaagaaaccagattaagtctggccgtggtggctcacacctgtaattccagcactttggaaggctgaggcaggtggatcatttgaactcaggagtttgagaccagactgggcaatatggtgaaacccctttccacaaaaaatacaaaaaattagccaggcatggggtggcatgtgcctgtggtcccagctactgggaggatcgctgaagcccaggaagccgaggctgcagtgagctgagattgcaccactgcactccagcctgggtgacagagtgagacctcagctcagaaaagaaagaaagaaagaaagaaagaaagaaagaaagaaagaaagaaagaaagaaaccagattaaagaactttctagattaaaggacaccaaagagccacaacaattagatgcaatgcctgattcttgttgggattctggatcggaaaaaagccaacaaattggatataaaaaccattattgggacaataggggaaatttgtatattagatagttttactgtatactagatacagtattgtgttcatgttcttgtccccgccaagactgatgagcccccagggactcagatagtcaagattctaagcaggctgtcagagccttaacaaggttctgagcccaggactgaggtaggggttacttcgggctgaggggattagcaaaggcttgtgaagtggctaaagccgtgacctggatatttcaggactcaaatccacccgcattggaattctctgggtgactgcccagcccctttggcaggacagccagccacaggccctgattgtgcaggacttcctgcctctgcaaaggcagtcgggggctgagcagggttctacccggctgggtccaggcagaagtttttcctccccacctccgggtttgtcctcatcatcggtcactcccattcacagctttaagattctggaggccaagaatttgactccccccggatccatggtctgtggataccaatgttccgactggagacggggagcccgcgagacccgggtctccagggtctgcccaaggaagttgctcatgggagcagacctctagagcaggatttgaggccaggccaaagaggttagttactgatgggggctgcataaattgggggttgtggagggacgccagctgggagggaga

SEQ ID NO: 628 - DNA, 2300 bp, Homo sapien
cccaaaccttgcctgttggatgtgccctggggcttctggatatgtctgaggtaactctgaagatggggcttttgaggacgctttgtagcaccaatatggtgccttctctccctttagggaaaagtcttctggaatcaacaaagggcttgtggctacttttgctcccatccctccataccagatggagggtggcgtgagttctgacaggtagccacgtggcccgccaagagtccctgtctggaggattgtctatagggtaaggtaccacactggtaagtgcacaagactattgagcctacatgggagggggtgcatcaaaaaatgtgccagaggcatctgctttgcttgctgttgaattactttgtatgtagattgttgacacacatatgagctggtcagttggttgactgagtcaaggaacaaaggcaataatcagatttaaaagggagggaagagaagacagagagagggaagctcctagcagtggctgctgctggcatattcttttggatgagctgatttgctggtaacagaggtcagcctgggcattctgtccttagacagccatctaacaggcatcaaagctgtgggaacaaggttctcggtggagccccagtggctgaccttctctgtgtcgtggccatgtgtgtcctcccgtcagctcctccacccaagttgggccggcttcaccccatttgcctcattaggattctcacatgtaaactagggcagaccttctgtagggtaagttgtcaacacatatcaattgcctgccttcaaattgtgtgtgtgctttgattcagcaagtctacattaggagtagatcctatggaagcaattctggacatgaactgactgaaatttggccttctttcactctacagtctagattagtaaaaaaatatcagaagccacccatatatccatcaatggggcttcattagataaatggtatagcagtataataatatatataatagtataatgaaataggaacctgcctttttctttttgagacggagtcttgctctgtcgcccaggctgcagtgcagtggcacaatctcagctcactgcaacctctgcctcctgagttcaagcaagtctctgcctcagcctcccgagtagctgggattagaggtgcctgccaccaggccggctaatttttgtagttttagtagagatggggtttcaccatcttggccaggctggtcttaaactcctgacttcgtgatccacccgcctcgggctcccaaagtgctaggattaccatcacgagccaccgtgcccagccaggaacctgcctttcacaatgttactagagaggaatatttagtgacatagaaatatgtgcaagttatatcagcaaatgaaaaaataggctacgaagctctgcatatataacattttcctaatttggttggggaaaagtatggagagagagagagacagaaagagagacaggcagcaacgggaccacagagggacgtacaccaaaatgtcaatggtgcttaataggtttgcaggtgattttaagtttattgtttaggttttccaaatcttctacactgagtgtatgtttcttttatcaaaaagggcatggtggggaagctaaggcatggtgctcacacctgcaaccccagcactttgggaggttgaggcgagatgattgtttgaggccaggagttcgagagcagcctgggcaacatagtcttgtcttaaaaaaaaattgccaggcatagtggctcatgcctgtggtctcagcttcttggaaagctgaggcaggaggattgcctgagcccaggaggtcgaggttacagtgagctatgatcattctactgcactccagcctgagtgacagagtaagaccctatctcaaaatatatatatatatatgaatataaataaataaatacattaaataaatagaaaaaaaatgtgtttaaaacaaaacaaaaacaaaacaaaactccccagtgccagaaaagtggaagtgaaagaagcatgtgttgcctccatgagagtgggggctgggagggagggctgggcaaggctgggtggggtgcatctgatataagggggcagcctgcatggaaagggactgccagcatctgcctccactgctctgtgctgggatcatggaacttgcactgctgtgtgggctggtggtgatggctggtgagtcggggacgggacccaggctgggaagggaaggagggaggccagtgtacccctgtgctctctttcccagattagggggctgctgctctgatccccaggagcctggcccccactccccaatc

SEQ ID NO: 629 - DNA, 2300 bp, Homo sapien
ctgagcttggtagggggagggtggagggagagggaagagcccgtcctcttcctcaaggatcaagcctctctgaagaccagcccaaccagcatgtccagtgggaattccagttgagaaagtagcagtgatgctgctcagaggctctcaggggtccccggccccagccttggcctcctcgacctacgttggagtggctctagttatctgcaggttggaggctgtatcttcaggatttggacatactgggccttacttctcgattcttccttctttggagtgtggtgacatcattaagtggtgtttgagaaaatggaggcaaagatagaagccaaactttgtgcagacaagtgaagacagagactagtcttgttttccaatcactcccagtctgatgaagcagatgcagccttgtcccaagggggaagccctaggcttttggaagaaacaaaggccccttccttccaggatccccagtttgaaggaagtgtcaagattcataaaccaaaacatatacaggtaacatcacctgtatatgttttggaatgcatcaccaaatgcaaacaaacaccctcccatgcaaggacctgtgactggatgcagtggggtttttccgggataacttcctggagaggagatggacttggatccacagagaggcagctgggcagaggaagggtgggggctgggtgagggggatgacatgtggactgtggtttggtatagccagaagaggaggctggcaaagctaggggcaggaagggaagccccaggggtctcttctgccccttgttggcaggtttgaggacattgagagagatggatcaacttgaaggtgaggggattatttgcagtgtcaacttccaagagtcaccttctcctgcctcccttaccatcccctcccagtatctcaattctccccaaggctggagatcagcccctactttgctattgtttgtagacatggggtctcactatgtttcccaggccggtctcaaattcctggcctcatgcaatccttccgtcttggcctcccacagtgctgggattgcaggtgtgagtgatcacgctgtgcccagccctctactttgtaacaatcagatctttaactgggcacttacacctgccccaacccaccacatgacacccgacttgtatgagcatcaccctcattcggtgaggccttgttatgtgcacttacagctgagaactcagagaccagggaagggagctctcctaccaaggcctcacggctgggaagtggtggtactggcatgggatcttctatcagtgcgactgctcaaacccccaagctcagcccaggtgacccagccctgagaggggctcccagagctcacactgccttggattctctccagtcccatctttctcatacataccaccccccttcaaaaaaggcaaatggtgctgacaaccaggccccccaggatctccgtcagataattgtgcccccttcaagggcaaatttggcaatgtcacaacgctgctaagttggtttaggtagaatcctcaattttgtcctccatatctgattgggtttcttgtcctccgtggcccccaggtgatgtctgagcaacccacctgccttcagcaggaatcctggtggatcggtttagccagagtctcccaaccccccatgacccctgatgtttcttctggttaactttccaacctcagaccccaccctgctccttggctatgaattcccgctttttcttattgtatctgctgttgagtccagtctctcttccccactgcggaagccactgccatggccctacacctgtccccatggcccctttgaacaaagcctgccttactgtgtttcaacaagtgtcactgagtgatgttttatctttaacatctttcagatggggaaagagaggcctttgggctaatttcctttcagatgcatggggaaagactgactctcctatcaggtatgtaaacccccaagtcaggcagaccagagcacccagcggtggggactgtaccagctggctgtgggcagggctgtgggggagggaggaggaggtggagcctcctttttctagggcatgtgtcacctgccactcccctgccagtgtgcgaggcagcgtgaagctggggcctgctccccgcagcctctggagcgcatctcagaccttctgagacctatgttgctggccccccagaacccgcaacatggcagatggggcaaaggccaaccccaaagggttcaaaaagaaggtgctggatagatgcttctctgggtggaggggcccacgcttcggggcctcctg

SEQ ID NO: 630 - DNA, 2300 bp, Homo sapien
aggagcagggggtcacattttgtgaggagggggcccttctaccgcctggggatctcctcccctggggacccatgaagactccatccgggggactgaggtcttccacgctaaagcgtgaggacggcgctgttagtgctcctccctgtcctggggctgccatctctgcccagacctaggtccgcctaccccctcgggacacccatgcccctcccggctcctttccgggttcctcggacctgtggggcgtcgctgacagcttttccagaacgcgggcgacacctagtggacatcacgggtcacaaccggtgctccactgcacccctcccgcccctctgccctggacccagagtggaattctgttgagggcctgccccaggcccacagtgtccaggagagcacaggaagccgtcagtatggcctccaccatcctctcattgttgtcatcaccgcctctcgagaagcgctgcccttaaagcaaacagcacaggctgggtggcaccctggccctgtccctagcgggcagtgtagatgtggcaagtcgcttcacccctctcagcctcagtttcccccttctgtaaaatgtggttgataatgaagcacaccccatagggtttgaggatgacatgagctcagggatgagaatgcccctagcatagggcctggcgtggagaagggaaattttctagagtgggtgactggtgccctgggcaaaagaccttcaggtcggggtggcagacagcggcaggtagaagaaggtgttgctgatggaagtggactgcctgtgatattcttccccaaacagaaaactggcagaagcaaagctgttatttagcaagacaatctggctccctgcctgtgagtgtgagggggaaagggagcgggtgggaggaggaggagggagaggatgtagaaaggaagggtctgtggacccttgctgtccctaagccatagccaggcacccggggccttgactgaccctgcccccagctgggcctgagagccgccacttcctcggcccggccctgactatgaatgcagagaggcagcccttcctccagaggctgccgcagtaacactagctgttggcttccctagttgtggcttcctgacaagcagctgatgccacccactgtgacaacaaggaaagttctggagaaaaacaccaaggctcctagcaacaggagacaggggtgcacaattaaaaaaaaaaaaaaaaaagacatattgggccaggcgcggtggctcactgctgtaatcccagcactttgggaggctgaggcgggcggatcatgaggtcaggagatcaagaccaccctggctaatacggtgaatccctgtctctactaaacaaaatacaaaaaaaaaaaaaaattagccggacatggtgggggggcgcctgtagtcccagctactcgggaggctgaggcaggagaatggcatgaacctgggaggcggagcttgcagtgagccgagattgcgccactgcactccggcctgggtgacaaaacgagcctccgtctgagaaaaaaaaaaaaaaaaaaaaagacacattgccctgccaaagtcaacccccctaaaacacccatgctctgccaaggaagggggtctgtgatctcaggatgtcagggcccaagtaagaaaagcagagtgcatcgatcactgtgcccagagctctgtgtgtcctctcatttaaccctctcagcagccctaggaggtgggtgaggagagaggccatttctcttactgtctcctgtctctgaagagaaggaggaagtaaaagttgaaaaacaacaggaatgaagtcagtggcaagaccagccagtgccactgatgaccaggcctgaggttaaaagtttaaccacctccccccaaccccgccactctaaccacatgtgctctcaatctaccacgaccatttcacgtggaaccccttagaggtgtaagcccttaaaacggccaggaactctgtcttcggggagctctgttcttgagacgcgagtctgccgaaactcccaggcgaataaagccaaatccttccttaacctggtgtctgaggggttttgtccacggctcatcctgctacctttcttagttccctgaccgggaaatcgggtgactgatggacggtggaggcagccccttaggcagtttaggcctgccctgtgaagtatccctgtgggcggctctggccagcttgagtgacgcagatcctgagagcgctcctgggtaggtatttgccccggtgggatgccttatcagagtggtgcatggcaggcccccgtggaggatcaacgcagtgg

SEQ ID NO: 631 - DNA, 2300 bp, Homo sapien
tctttatagaaggtcgggcacaaaggcagcagaggcacagcaatggactggcgccttcctttcctcctctcctgcctccccctggggctgggcattacacaacactggagagcaaaaggcaggtactgctgacgttaactgcatgtactgctgacattaaacagaccgccatttcactgtgcactggcaaaggcgcgcgtgcgtgcgcacacgcacacacacacacacacacacacacacacacggtgagaagccaatttgattctccaaaggattgtataattcttaggtgattttaaaatagctgatgaagaatccactttaatcttttttgggtgggtgatgaagggctgaagagcatcgctaagacacttttgacagaatcattaacaagaaataagccgtcagcactcagttgcaaaaccagcagctcctaaaaccaccatcttttacacattccgagggccacagaggcttcctggatgaccagagtgtgtgagggggcaacccaaagaagaggcctggcccagaccaggccctccccagcaactcccacgggtcacagacttcccttctgagacgagcagaaacaccaccactgacatgatcttctttcacgacccatggaggagcaattcaccttggagagaatcagaagacattagaactggagggagggaggaaagcaaggaagtgtaggcaggcaagtttgcaggtctgatggcagaaggctgaggaagtttccatatgatggcttctattttctctctgaagagggcagtaaaggtatcttctaagagggaggagggagggaggtgggagagggagaggtgggaggtttcgcaagcaaaacaacgttttgaaatagccattgagaagaaaggagaggctgggcgaggtggctcatgtctgtaatctcagcactttgggaggctgaggcgggaggatcacttgagcccaagacttcaagaccaccctcagcaacatggcagaaccccattctacaaaaaataataaaaattagccaagcatggtggtgcacgcctgtagtcccagctacaagggaggctgagctggggaggtccaggctgcagtgagctgtgattgcaccactgcactccagcctgggtgaaggggcgagaccctgtctccccttaaaaaaggaagaaaaagaagaaaggagggagagagaacccagtggtcggttggggatggaagtgcagggctgagagtctaactgaggttagagacctcgtgtttctgttacaccaaggtgtgtggctggccaagacttcttcaatacccgtgtgtaggtggactggtttggcttcaggtttcatcagatggaaggagagtaggactcgggcagggaggatccttttgagaatgccgaggtaatgggccaggatagggaagaagcagattgatatcgagggggaaagcggagacagcaatggacaggaaacccaaagatggtgaaaaacagatacagcggaagtgactcaagtggctggaagtggaagagattgtggctggggacatcaaaggaggtgcagatgctgttgataaggttcccagtgtggccccggagtgggaggctgatgtgaaaagaggtcagggaactggcgctgaaagggctgtactgaggatgggggccctgctccccgcaactcagataccctagaagcatccactcagagtttagggttccgagaatccatcagtcccacagcctcattttaaaaccagggacactgagagggtcagggcctgacccaaggtgagaaacggattttgagactagtggtgctgctccccgctcctccatgccccggccagggctctccctctcccagacactctcccccagagagaaacagaggcggtgacgctaggaagaggaggagagaaggaggccgcgggtccctgtcgcctccaggccaggcaatccactccaggctcgcaatccaccgacctggagttcacggcctccgccctcctggcccagcggcccccacccgaccccacccgaccccacccgacccaggccggttccggtcacgccggaagcacgtggccccccaccctgcggcgttgcccgggagaccagggttgtttaccagcaggacagagcccgggcgcaggcggcggatggagcggaacggctaggtgagagcggctgcccgatcccgcggcctgcccttggcctccgccaggcctggaaggggccgggggaggccagtccccgagaccccagcacatcacccgggagggcctccccagacccagcccgggggacg

SEQ ID NO: 632 - DNA, 2300 bp, Homo sapien
gtttgaatcccagctctgccacttcttggctataacaaaaggccagtcacttcacctctcaggctcagtccccaccccctgtggagcggggctgatggtacctgctgcactgggtgattatgagggttaaataaaataatgcatgcagaaaggcttcagggaactgttgtgtgggacaaaatctggttgggaacctgtgtgccaggttcctggaaatctgtgtcttactcatcatcactttccccaagcactggctccaaggcccagctcaaggtgagcaagtgtaagtatcgaactgaaggtaagctttgtctcatccttggttagttcttgtatgacagaggcacctttccattgcccaacctatcattttctcctcagcctatgacagcagttttgcttctctctggagactgatccaacaccccagccggccttcagaggtaatccaggcaaaacagccaagcctgagaagttcatttgcccgtgtctagttcaccttcctctcacctcctccattccctctgcccagcagtccccccaaattccccctccagaatgttctctaaggttcttttgctggggcttccctttcaactgtctgacaccttcatggatggggaagtcctgagacttcaggtagcatgtttcatgaagttctggggggggattcaaaactcttttggaaccctaaggtgtgactgcataatggggaatcactggttcatggacttctggctaagatcacatatcatctgttaccccagcagggagttcttgcaccccacctgacatctgtgctcccttttgccattgcatccacccactacccctatcctatcctcaggctcctctctccttaggcagagagtccagaagaggggctgatcatctgtcccagatgaagtctcttgtgtggagaaggaggtagggtggagaggtggcatcagacagacctgggttccaactttggctcctccacgtcctgtgtagcctaaggaaactcacgtcacctctctgaactcatatttgaaatgaacatagcatagcatccacctcccagtgtttggtacagaacaagtgagatgcacttcttccaggctatgtgtgcggtgcccagctcacagtgacagctataaaaagccaataagatatggtggagtttccggtgttgggatcactgtgaatttgaatccctgctctgtcatttcatggctctgtaccttcagcaagtcactctgcctctccaaatcacaatttctctgtaaacttggaagaaaggccctcttcttgaggatttttataaggcttaaatgagatgtgtgatcatttgcttcatcctgtacctctgaagcatctttcaactttgaactctttaactctaggctctgaatttagattttgcagtcctaacccagctggccactggcttccttgattatagcaagcccctggctctctgggctacgcaactttgtatctccaaaggccagacctccagtctgatgcccccaggggctgcacctagaatcctagcaatttcccgtgtggctttggcatggccaggagcagcaagggatggcttgggactctaagggtgaataggcatggccaaaggccccggcagaggacctgcccatgaccacggtcaccaatactgtctgttcactacaccgtggcctcatgggggagaatggattggcagcttgtaacacttggctaaaaaataaacttgctggggggcagggagatatagaggggccagctcctgcacaggcagtaggtacccctggcccaggcagactctgcacagtgttgaaataccctggaggcagccccactccccagggaggagctgcccgaaggactgttatcacaggccaggccctttccttcagcctcagcagggattagctgaggctgctaagtggcctccagctttctcctgtgctccggagaaggggggagggaagggcgaggggtggggaaacagcaccagcggtgtgtgcgtatggggtgattgtcatggttacgctctgacaaaacaaatggctcggcctcctgcaggccacctaaacagctatcgcaatgtgggcattgatcaagccagctgccagggcagcgggcgcagggcttgggcactggagcccagccccggaccgcacctccagcagtgctgggtgcagaaggcagtcactgtggcagtggagagacagagtgtgtacccagacacgtgttgcttctggggtaaggtaagggctggccccacttgtgtcaggaggagaggctggacaaggggg

SEQ ID NO: 633 - DNA, 2300 bp, Homo sapien
gcaaagatgcagagaggataagacatagcagcctctcttctccctttccgccaggtgctatagctttggaattggacccaacgtctgccacagactggtgaaaggactggcatctgtgtccgagggcagtgctgagctcctgatggagggggagcggctgcaacccaaggtaggcagcagaacccacgcagtcccttctggtgctggaacctcagaggctcagaccagtcacatggcaactcagtggtggagctgggatgacaccccaaatctgagctcttcactaggccacactgcatcccaatgagaaccagagacttgcaagccacagagcaggcaactcttgaagcaatgccaggacgctagatcccctggtctccagccactggacacacactccatccactgctggacaagatgaggctcctggaaaagctaccacctatatggattgaagttgtgtttgaggtccatatctggacatgttcctgatgatgacaaatggtggctcagaagaatctaaagaacccagaaataaaggaggctatagtctgctttccatgtcctgcacatttgacacgaataatctaacccttagaaaatccccttgtcagtccagtaaacaaagacagggctgggattaagagtgaagatgtttattggggatagtgtctatgaaaggtggaagaggaggaagcaggaagaaaaactcttcaggccaagaggccagtccaacagctgtgaaaggaaaatgggagcagaattgggcaagagagcctcaaactgtgatgccctggcagggtctcagccatccagcagggagctctggagcaaaggttgcccatcaaagtcagggatgtgctgaaatgagcaggatctagtatccctgccatgctgaatcattgacttggggcttccagggagagagatggtcttggctcaaaagctggggtgctgcatctggaagctgtcacctaacggcatttcttgcagcaagaaggcatggtctttcttgaagagagatttgaaagctcacctctatacttgccacaacccccaagtcattttctccaggtttgcagtacagaacatccaaggaaatcagtctaggtgatgaccacagctgtcatttactaaacacctaccacacctagcgcatgtcatttactaaatacctaccacatgtcaaattcagtattgcaaataatccttcaactacaccctcctactttaacagaagggaaaactgaggcccagagaggtaaataaatttgctcaagatcatcatccagtccatggtttggcgcaaacctgtgtgcccttgggctagtcacagccctactttgagcctcagattttctcatttataaaatgctaaactggccaggtgtgcagtggctcacgcctgtaatcccagtactttgggaggcctaggaaggtggatcacttgaggccaagagtttgagaccagcctggccaatttggtgaaaccccgtctctactaaatatacaaaaattagctgggcatgatggcgggtgcctgtaatcccagctactcaggaggctgaggcagcagaatcacctgaacccaagaggtggatgttgcactgagccgagatcatgccactgcactccagcctgggtgacagagccagactctgtctcaaaataaaataaaataaaataaaataaaataaaataaaataaaataaaataaaataaaataaaataaaatgctaagcttagaaaagatgaagcgaagatgctccccaactctgacattctgtgagtctaagaagctcagaagtgtgctcagtgctaggcaagtcaccacaaggcctactgtcccctcttccctgctcccactccccactaagctgatacttacatgatcttctgtacacatctcttctcatacatcccccaactgcattctgaccctgccctacagatggtcaaatccttgaagaaggccatggccccagtcctgagcgatgtgactgtggagtggatcttccctgagaccactgaggtcctggtctcacccgtcagcgccagctccctcttccctggagaacggctggtggggtatggcattgtatgtgatgcttctttgcacatctccaatcccagatctgtaagtatcctagaaattccacgggtccgtgtgggcccagaacccatgcctacaaatcagccttagctggaaagactatttgtgacagctagaaaccaactggaagtgggtttgcagctgtgggtttacagttttcccagttgtgggtttacagttgccaggc

SEQ ID NO: 634 - DNA, 2300 bp, Homo sapien
gagcagggatgtccctctcaggcccccagggctaggccagctggagggcagaaacccagggtggcaactgtcagagggagcaccagagaggagaagggactccagggcccaggacaaagtgccccacttgcctcctcttgctcctctccccctccctttctcagctccacctttctcttcccatctcttatcctctctccccttcctcacctcctccctcccgcaacctattccctttccccttccttgccctccccacagactcttcctgccaccactagagggcgctggggcgccacggtctccctgggagggatttagcagcctaagaccctccatgggcacctcaccgggggtgggtgggcagaagcaggaggccctatagcaactgggtcgtctgcagagcggggctgattctagcctgtttggagcctggggcaggtctgggctgtccccaaggactgaggatggatggcacgaccaccttctcctaacagccttcaggggaaggggatttgatggggagggtgcttctgtgggacctgaatttgcatcccaaccctcacacctagtgtgaccttgagcaggtcacctcacctctccaagcttgtcttctcttttgtgaaaggggggtaaccactccctgctcagaggctgttgtgaggactggatggaatcacgtacaggaactgatcgcaacgctcaagggggagcatatcttggccttagaagtgaatcagtcagtcaacaaatgtttattgggcacctccaatgtgctaggggctctgctaggcactggggatggcggggatcaaggtggaggagggcttagcatcatggatctttcaacctaacagggatgaaattattatataaaagagaaaaataatttagaaattagcagcaaattcttgtttttgagatggggtcttgctgtgtcgcccaagctagagtgcagtggcgtgatcacggctccctgcaacctcgacctcccaggctgaagcgatcctcccacctcagccccccgagtagctgagatgacaggctcacaccaccatgtccagctaattttctatgtttggtagagatggggtctcactatattgcctagactggtcttgaactcctgagcttaagcagtcctcccaccttggcctcccaaagtattgagataatagacatgagccactttgcctagcctgtaaattcttaagtagttgctaatatgtggactgtgttacaaaagagaagttctgggtgcagaccaggggatcgtcttggtctgatatttaagctgcagctgaagggtgaataggttccttctttcccacgagagaggcaagagggaagggcttccaggctgaacgaagggcagatgcaaagccagggtggagggagggagaataggatggatcccaggccccaggggttttgtggagggttgagagtgaaggaacagggtgtgagataaactggggagtactcgggcaggggccaggctgcctggaggatatgggagcgtgtatggctctggagctgtggcactgcaaagtggaaggcccagctgcctttttgtgacagacggaggaggcgttttcaaagtgatgacaatgtttctgaacaggaaagtgggtctcttcttcttccccaacagtcttagagcatctaaaaataaagcaggcatcaagagagcatcccagcagtgccatcacaacacagggctcgaatgtggacaggaggaggacctaagtggacccggaggctgagctggcctcgcagcactggtggtgggggagggctgatggtcaggactctgggtctttggcactgctgcctaggccgtggccctcagtctgcccatctgtgaaatgagggggagctggtcctgactgcctcccagggaccctgtgaaaagccgctctgaactccttgccagagaggaggtttgccggtgccacaatccaggtctgtgggtttccctatcaagctggtctttctgtaataagcagggagacaaaggattttggggtccccactatgatgtaaaccctgtgctgggtggggtaggggttcagaagcagaagttgtgttttcagcctcagggagctctagtggagagacaagattcgtgcatgaaataattacgactgttgtagaaaaaagaaaagcctgtaggtctcccttcctccctccttctctctgtctacctcagcatttctggggttcactctgctctgggtactgtgtaaaggactccacagccatcaacttcccttcatccttgccgtgtctttgaaagg

SEQ ID NO: 635 - DNA, 2300 bp, Homo sapien
ctgaatggagtccttcggaaaggaggactgtcttcccaagcagaggatccggcattcgctggcggggtggcctccagcaggaatgttttaatacatcacttattaaaatggacctggagccttggccgagggctcccatactccctgcttcccaacagaggacagccttaggccttagctgaccacttccaagccctgccccccttctaaacccttacacaatgactatcagagccgacagggcctcaaaccaacaaaccaacaaaggacctttaaggctgaaggacagtgactgcagctgggactgagcctggtcctggggtcagatgaccctgcatccccctcctgaagggtggaccctgggtttcagtcctggctcagtgacttactagctgagtcaccttatacaagttacttcacccttctgagccccggtttctcctgtacaatcaggataataatagtgcctatttcacagggttttgtgagcctggtatacagtaagagctcaattaatgcagaggctgtgcgatccttttggcctctctggggcctcgatttccttacctactgaagagagcaactcatgggtttctaggggtgctgggatgattgcataggaaaacaggagagaaaacaccttgtaattacacagtgctttgatcacgtcagtggcaattactcctgggtgtggacacaaatcgtgtcttctgaaagaatcttttcacatggcttctgcccctcggcagattgatgccttgtccccctcagcctatcagcgggaatgccaggggatggctgagctccatggtgcccatcagctcccaggtgctgggagtccccgggtaagcagggaggagagcaggttctggaggagggtcaggtgcctgggaaaatcaatctggcattcccactcctgttggccccgccagccccagcttgctcaccattcccaataataactgcttgcatggagagctctctgctgggacctcctgagcccttgggcctccactgcctgggaaggaggttgagacatcacccactctgggccctctggagcccctcttcctcctgcctgcccccctcccctagcctctcacctgaagtctgagtcactcttaggctcctgtcactgtgagctgtgttgtgacgcctggctgacagctttaccacaaacacattaaaagctcccagcacttctgggtgtgtaatagcccaggagaaaaaaaaaaactctcccagtctttcttcagccaaaatcctcctcccaaaccctcctcccccaggggcctgctccacgacctttgactgccccaagcctaacaaggggctaagatttgtcttcctatcaagcccttctaactgatgattagagaaaggctgataagtgcaggtgcctgagacctctcaggccgtgcacccccaggagcagcgcatcccttgacctgtgagccccggaaggtgaagatgaagacagaatgcaactcatctgcagccccgcctctgaggacagggggcccctggcgaagtatgaaaggtgcgtagagtggcctgatactgagtgttcccatgtgctggcactgtgttcatcctcctaataaccctatgaggcaggggctgagttatcctcactttacagattaggaaattgaggcacttgctcaagtctaaagacctaggaagtcgggtagctgggactcgcatccaactctgccagcctgcaaagtcactcttaacaagactgcctgcttccctgcacagtatccctctttctcccctcaccccaccagagatggcagaaacctcagggatgcagtgagagctcaacctgcaaatccaaaatggaataaattcaccttagggggatggccttgccagtccagtccatctttcctctcatctgagcccacccataggggaccccaacattgcctttttgcctcgcagaccaaagccaccatccctccttcctgtctgcagccagcccacaaacagcaagtcatgtcccccccaccccacccccccagccaaagcagagaaaagagaggagtgagacacaggaacaattcttttattgtacattggagaaatagccctgtgtgctggttcaaggtgcaacatacagaatattgaattaagaaaagagggaacggggaagggaagggaaacctcttgaggtccaaagttgcaaacaaaaaatggtaaaagatttcctcacgcaagaggcatttttgcaaataccatgcaaaacaggcagctggtgtgccttaagagaatccctataaataacagaaaag

SEQ ID NO: 636 - DNA, 2300 bp, Homo sapien
gtgggggagtgaggccttccaggtcggactgagccggggcgggaggagagtgtgaggccccagtggctgggccctcagggtctgaattggggagcaagtgtggtggggaggaagggctccccggtttgcagatggcgggggaggctatgtccgcgggtcgccctggagccctccgatctttgccccgcagcatctgccccccaggggggtcagcatgcttccgcccttccccgcgtgtgcgtcgtctgtccgctccctctccagctcccggaacccccactccccccgaggtcccctcgggaggcaaagccggctgcggggcgggcgcgcaccagctccgggccccgtaaacacccgtgagcgggacggcgggggctgggggcgggggcaggaagctagcggcagcccgggccggccggcgcggccccgtgacgtcgctccgctcgcagggatctctccccgaggcccgcgggtcccctcctccccgcctcctcccgccctcctccccgcgcctcgcctcggcgccgcggccggcatttctcctcgcagctcgctgcctcctctatccctgcctccctctcccccctctgtttttctcccttccttccctctccgaccctcttcctctccctcccgatcctttccctcctcctctcatctttcccctgtctctccgttctagctcgtcccccaccccaccttttcttctttctcctcctctccttcctctccccctctcctctgtctccttccaccgtctcccctgcctccctgtctttcagtccctgtttttcagccccgtctccctctcggtttctctcccccaccctccctccgggtttcctccccggtgccctccctcctctctccctcccctccccctccgcccctcgcagccccgccgctcgcagctcccagtctgcctccccgaaccggcgccgccgcccgcactcgccgcaggaccggcccgcccggctcccggggtgcgccctcctcggtcccgcgccctccgggctcgcagggacgtctcctccctcccggctcgcggccccgcccggcccggcccccgcccagagccccagcgcgccgaggatgtgagtcctgctcgcctctggcggagcagcagccactcgcgcgcggagccggagcgcagcgcagcgcagccgcgggcgctctccgggccgctcgcgcgagtgccgcgctcttgccctagcggcgtcccccggcctctcgccggcgccaccgccgcagcagcccgcgggccgtccccggccggccgcccccggccccagcgccgctgaccctgtccgccgcgggcggggacgcgggcggaggaggcgccgcggcggagcccccggacgcgaccatgtcggaggtgctgccctacggcgacgagaagctgagcccctacggcgacggcggcgacgtgggccagatcttctcctgccgcctgcaggacaccaacaacttcttcggcgccgggcagaacaagcggccgcccaagctgggccagatcggccggagcaagcggggtgagttcgcggcccccttgtctgacaccccctttttcccgcgccgcggcctgaacaagggttgcggaggtctcccacccgctggagcccgttcagacctgacggaatcccttcttgcagaattgggggatcccgcactgcgggtccggctgaagcgggtcgcaggaacgcgtccccctaagccggatccccggctgggtcaccctgggggcgtggcggcttctagcagcagctgggggtctccacccgcgcggcaaagtttgctttttgatttgcgccccccacccccgccttttgcgcagtgtagtcacagctgcactcgctccataaccctgtggggagggggtcccagggacccccaggggacggcgtggggacctgcgtggggaggatcccattcctgcggggaaggctagggtgttcgggtcgcacgggcttttcattgttacttggcttgggagggggtttgccaggcctgggcgatccgcgcgagagctggaaaagccccagagaggcggagacgcagagaggctccgagaggagctccagagacgcggggacaatgagggggaccgacggctgcagagagagactgagacgcagggatggaggggagggggtacgcgggagaccgagggtggcagagaccgagacaaagctcccgagaggggagctgaagcgggagagacagagccgaggacgcgcgtttggggaggacgcagaagccgccgaaacaataagggcgaccgacaccttagacagggagag

SEQ ID NO: 637 - DNA, 2300 bp, Homo sapien
ctgtttccccatatggaaatgagggataggcccagctcatctctaaggattctcccagctcatgtggtcctgaaatggaaacaaatgaagtgctaccgttctttctcactcattaagtcatctctcaaatgtctattgcacatccactctcagccaggcatcagagcctgattttatttttgttttcataactgtcctgcagggtacacaggtactggctagccatatacccatttgacagctgagaccatggaagctcagagaggagagatgacccacccagggtcacacagtcagcaaaccacggggttgggattcaaacccagacctaaatccaagggacatgcttattccacctgccacattgcttcagtctcccttttctctgctcccttcctcctccccccatggattctggcttcccgaggccagccaatccttttacaccgtttggagagggggctggactgactcccccctccaccagatgttataccaggaaaaaaccttccccttctgcctccagctcccacccgccagagttctagataggaggggagagctcctttcactgttgatgggaccccttgcagggcagcaggatgagccaggtgagactcacctgggccacctggatgtgtttcctagccctgcctccagcagctggcatgaccttggggtggttgcccctccctgtggtcaggccggctctactaagcaaagacggtctccagcggagggcaggtgctgttggctccggcgaggataatgagcgctcctcatgcaccttgccccctcggagttaccatctgcttggcagatgcgcctcccaggcctctggggctgccccagtctccctcccggcatcgaggagcccgctcctcctctcagaggccatagtctctccacagggcgcacggctgttgctggaagggagacccccgagggcagagggcggcagacccgggacgtccccagcggaggcagcggacgccgggagccaggcatcccgggcgagcccggcgtaatgaggcgctcccttctcctgcgggaggcggggctgccccttccctctccccctccccctcctggaggccctgcgggagccggagtccagcgcagttgggcgggggcgtgggggagtgaggccttccaggtcggactgagccggggcgggaggagagtgtgaggccccagtggctgggccctcagggtctgaattggggagcaagtgtggtggggaggaagggctccccggtttgcagatggcgggggaggctatgtccgcgggtcgccctggagccctccgatctttgccccgcagcatctgccccccaggggggtcagcatgcttccgcccttccccgcgtgtgcgtcgtctgtccgctccctctccagctcccggaacccccactccccccgaggtcccctcgggaggcaaagccggctgcggggcgggcgcgcaccagctccgggccccgtaaacacccgtgagcgggacggcgggggctgggggcgggggcaggaagctagcggcagcccgggccggccggcgcggccccgtgacgtcgctccgctcgcagggatctctccccgaggcccgcgggtcccctcctccccgcctcctcccgccctcctccccgcgcctcgcctcggcgccgcggccggcatttctcctcgcagctcgctgcctcctctatccctgcctccctctcccccctctgtttttctcccttccttccctctccgaccctcttcctctccctcccgatcctttccctcctcctctcatctttcccctgtctctccgttctagctcgtcccccaccccaccttttcttctttctcctcctctccttcctctccccctctcctctgtctccttccaccgtctcccctgcctccctgtctttcagtccctgtttttcagccccgtctccctctcggtttctctcccccaccctccctccgggtttcctccccggtgccctccctcctctctccctcccctccccctccgcccctcgcagccccgccgctcgcagctcccagtctgcctccccgaaccggcgccgccgcccgcactcgccgcaggaccggcccgcccggctcccggggtgcgccctcctcggtcccgcgccctccgggctcgcagggacgtctcctccctcccggctcgcggccccgcccggcccggcccccgcccagagccccagcgcgccgaggatgtgagtcctgctcgcctctggcggagcagcagccactcgcgcgcggagccggagcgcagcgcagcgcagccg

SEQ ID NO: 638 - DNA, 2300 bp, Homo sapien
atttactcaaccaactgactattgataacatttagtttactttcattattttgttattaaaaacaatgttgggcctggagggacacgttttacatacattgaatcaggccactaggtaagatgtgtctaaaaactacagatgatgtatctaaaaactgtagactgctccacaaaagtaaaatttctttattaaatcagcctgttatatataacagtttttaactccattccttaaatacaattggggtcaaataagaattactttctataagaatagggctagaatcattagattgttaacactgtgagatatctttgatgattttcaacccaagggatgatcatgaatttggtaaacacacacacacacaaacttaaaatgaggtctaaccttaaatttttaatagaacttgtcaaaaagtttgttagcaaaagtgtgggtgaaaagagattcccggccaggcgcagtggcttactcctgtaatcccaatactttgggaggccaaggcgggcgaatcacttgaggtcaggagttcaagaccagtctggccaatatggtgaaaccttgtctctaccaaaaatacaaaaattagctaggcgtggtggtgcacgcctgtagtcccagctacttgggaggctgaggcacgagaatcacttaacttgggaggcggaagttgcactgagccgagatcacgccactgcactccagcctgggctacagagcgagactctgtctccagaaaaaaagaaaagaaattcccacatattgctcataaatgtaaaattggacattatggagaaaaattagacaatgttgatcaagattaatggtgccaacacccattgacctagcaattctacctctagaaattctccctacataaatacttatacatgtaaacatgaaaatacaagaatttaggcttggtgtggtgactcacgcctgtaatcccagcactttgggaaggcaagtcaggaggatcacttgagcccaggagttccagaccagcatggccaacatagtgagaccttgactctacaaaaaattttttaaaaaattagccgggggtggcatgcatctttagtcctaactactggggaggctgaggtgggaggattgcggggtgggaggctgcagggagctatgattgcaccactgcactccagcctgggcgacagagcaagaccctgtctcaaacaaataaaaaaattaaagcataacctgtaggagatagctcaatgaatgctgatgtttagaagaaagatttgggttatctccgattattttagaaaggagatgcattacagagatcagggaacagtctctgagaaggatcccctgggttttatggccatacctattgcttttagctgtataaccttgagcaagttacttacctgagcctcagtttctttatcggtaatctgcattatagctgtgttgtgaaggttcagtgggatggtgcctgcaaaacctcccccgcctcgaacctgacacataataggcactaagcgtagccgtaattattatttaataaatatgttgttctatgtggtgatggcagattaaggggctactttggtgatataatctgccctcctggggtagagttgagggctttggagttgggtgaattcctctctagcactcactagacttcgagcacatcattccctaacctctatggcctcacttttctcatctgtaaagtggccagaataaattccaagtcttgagagtttgctctgaaacttaaacgtatattactcataagagtttaatacacaattattttatttcctgccaatctaatggcgaagacatggaataacccatcaaacagcccagtaaccccaggaaaccagagggacggaaaccagggcgatgggcgagtcagtcatggccagtgcgccgtgtttcgaaggggacggccatggagcggtgggtggtcgctcagctccccaatcgctctccgacacccggctggggagacaggacctccctggaggccgcagcagcttgattgtcacccgggcaaccccaccttccggttccctctacaaccccttgccccgcttccggttccggcgtcgtgcgtcatcgctgggcgactgatttcgagtttccggtcaggttaggccgggggggtgcggtcctggtcggaaggaggtggagagtcgggggtcaccaggcctatccttggcgccacagtcggccaccggggctcgccgccgtcatggagagcggagggcggccctcgctgtgccagttcatcctcctgggcaccacctctgtggtc

SEQ ID NO: 639 - DNA, 2300 bp, Homo sapien
accacgtcgggctatttttgtatttttagtagagacggggtttctccatgttggtcaggctggtctcgaactcctgacctcaggtgatccgcccacttcggcctcccaaagtgctgggattacaggcatgagccatcatgcccggcctctacagaaaaattttaaaaactagccagccatggtggtgcatgcctatggtcccagctactcaagaggctgagatgggaagatagcttgggcctgggacgtcaagctgcagtgagcagtcatctctgctctccaacctgggagacagagcaagaccctgtctcaaaaaaaaaaaaaaaaaaaaaaaaaaaaaaagcttgcagttttctctgccttgcaagctgaggctttgcttctgagcactcccaccagcccactgccagcggggagagggaacccccagtggcaaggtccagagaacagccctaggagactcaagacaggatacggcagaattttacagtgaactgactttcaggtcaaaaccacatgaagtcctttccataaagggatttggttgagttaatgtctccactggcccaggagacaaatgtagcgccatggaaagcactgcaatgatcactggcttctcagagcctgttctctccccctgggaaatgagaccacatctgcagggtggggaacagtaggagacttactttcatgtccttcttctgtgaatttttaccacaagcacatcttccttttataatcagcaaaaggtgataaagatatttccatattaaaaatgaaccgaggctacaaccaaccagatcatctgggaggcaccctccaaaccaaagatactgcaattcggagtaatttcctgttctttatttgcatattattttcttgttgtggtttgttattttacttatattcccccagggattctgacccagacactcactcctacccactggcaggatgttgctggccgagatagcacacactgtcttcccaaatcttcccactgctcccactctcggaggtcatgtggtttggcttggcccagcccaagctctcaattcagctccagcccagacctgggttcactcctgacctggacaccaccccagatgacctgttcagaagccaaggaaagagcttgagtgttgactctgtgagagcccaaggcaacaagactcctggtcatatcagagcagtcctggagttctagggagcttgtggcttaaccaatcttgaaagagggagctgtgtccccacacccagggacaactgtctctcagtatatcagaacttcctccctagcaggtcctcatcacttctcattaggaggtcccggggagcatggagggttgggggcagcccctgggtcaccagggcctgagtggagccctagttttacctcctaccagcctgaagaccttgggccagtcatttaactgagcctgggcttgttccaagaattaaataagaaaatgaatgctaaacccctgggaactcacaggagttcacaaataggagtttatttaatcatgcgcccagaggctgccctttcgccagaaggagcttttcaactgcaattaccacagaccctgttctgaaagtttcccccaccctccaagagtaccctccctgcttcagaccaggcgaggggcactgccagccactgcagcagcggccaggtctctcagctcaggcccagcggtctggcccacgaccttggaagaacctgggagaaagcttcaccaagcgacagtacttttccactgcactgctcggccacctcggctggctttgtgctgtgcagacgaggcaaagtgcgccaggccagccccttcaggaacaccccctaactcccactctcagagatgggggtaatgacatgctgtgggtgaggggcagcaggaatcgtggggcgcgggggttcccgaatgcgccaaggggagcttggagaccagtagcgaggccaaataaattagcatggacgaagccctcctgtatatttcaggggattcctagtacttaacagccctctctacccccacccctccactaataatgattaaacccgttccaccgcgcctgtgcagggtcccgggcagcgcgagcctgcgtggggggaggggagaagagggcaaggggaggggacaagagagctagcggtcccgcccggtgatgtaggcagcccggggaggtggagccgcgacgcctgaaggagtccccaccgcagccgcgctctcggtctgccccactaagcagccgccagcggctccggcgacccaaattgcggcggcagggaccgcgga

SEQ ID NO: 640 - DNA, 2300 bp, Homo sapien
ctgaggcacaagaattgcttgaacccaggaggcggaggttgaagtgagccaagatcacgccactgcactccagcctaggcaacagagtgagactgtctcaaaaaagaaaaaggaattctagagccaccactggcacccacgctccatacagctgggtttggaatgagcgctgtcctcacgtatgaccacgtgcaggtaaagagctttgaaggtgccaagggccatgagtagcttgggaggtcatctaggttctcccagcactgtggagtcaaggagtcctgaaggccggtcccaggcctgggcagggctgggtggggcagactgagacagggcaggggacaggaacgggatgacttattgaggtctctgacaggcctggcagaccagcagggcactacaactcttttcccagtagtaattatacttggcctgaaaaagctttagaattattcccacgttgagtgggcacacagtgtcctgagacatccttggccctctgagatccaggaaactgctctagatgccaaagttatagagacagtaggaaagtgcatgggtggagaggccctcagccccagcaggaggcaataggctgcctctctgagggctggatgcagtgggaggggaggggatctgaagggagaggaggcaaggaggaaaggaagcaaactttacccaactcttcagcggcccagctgggtgtctgcgatgtccacatatggctgagagctccaagtctgggacacagagatgccagcatgcaggacacgagatactgccttgttttctcctcctttcccctgcctttccccctgccccttccccattccccatccaaactctcctgctggccaggggtgtggaaacagttggatgtctttggccactctagctggagttctgccctatgtgatcttggctgagtcacttaatgacaataacccagtttgtgtggagtcacaaatggtgttcacatcataacgtcaccagactctccagccacacccattgtacacgcattatctcattcaatcctcatgacaactctggaagtgaaatcatgttagtgcacccattttgcagatgaggacactgaggcttagggagatggtgtgtgaccttcccaatgtcatatgtctaataaatggcaggaatggaattcaaaccatggtttactaaactccaaagctggagcccttctacagtctcaggatctagaacagggattattactatctctgctgttgacatgaggaaactgtggttcagggaggtcaagtgacctgccaaagcttgtacacatggaaagtagtagaaccaggatgcaaacacatttctttaccaccaacaccaatatctattttgccaacaaaacaatgagggggcctgagtaaataatctcaacggttaactccaccctccaattgagatactttttttttttttttttttttttgagacagggtctggctctctgtcacccaggctggaatgcagtggtgcaatctgagctcactgcagcctctgcctcctgggttcaagccatcctcccacctcagcttcccaagtagctaggactacaggcacatgccaccatgcccagctaatttttgtattttttgtagaaacagggttttgccatattgccaaggctgttctcaaactcctgggctcaagcagtcctcctgcctcagcctcctaaagtgagccaccacacccagcagctgagacactttttaattctgggctagggcaaagagaagttggaaggaaaatgggtgaaaataaagaagttctcagttatactgcagcttgttcatgcctcctgcctcgggatgccgcagtggctgccccagccctgccctttcagcctcagcccttccctcagtgaaggagagaaaaagtgatttaacaaagtgaggactgtcagcccttggagcttggacctttgagatctcacactgccccacccagtagcttccccttccagtagcgtggcaccaccttctgacccacccctcagtgtgtccaccagtgagagtggttcctaagggagagtgtgaagcacacgtaggcactgtcttacaccacacctgctgagtccaaaccatgggaggctcctctcctagaccctgcatcctgaaagctgcgtacctgagagcctgcggtctggctgcagggacacacccaaggggaggagctgcaatcgtgtctggggccccagcccaggctggccggagctcctgtttcccgctgctctgctgcctgcccggggtaccaacatggcccagaagcgtcct

SEQ ID NO: 641 - DNA, 2300 bp, Homo sapien
ttctttggcccagagggggtccatttagtcagttggggagcttagaacctcatttttagtttacagtaatgagacacagcagatgagtagattgattttattttaagacagagtctcactctgtcacccaggctggagtggagagtggagtggcacaatcacagcccactgcagccccaaccccctggactcaagcaatcctcctgcctcagactcccaagtagctgggacctcaggcacttgccaccatgcctcgctggggtcttttaaattattattatctgtagtgacagggtctccctatgttgcccaggctggtcttgaactcctggcctcaagcgatcctcccacctcagcctccccacgtgctggagtgaaccactgcaaacctggcttcagacgagtggatttaaactttaaatccactcatctgtgccccaactaagtttccatgagtgagcctgtggttactggaatgtgagatttctccaactttctttcccttatcattcttcaaattacaacttcagtggagcatttaaaattataattaaaaattccctgaggttgatccaaaaaattaaatatctgatattcatgtgcctctatacaaatgggaaattcatctatgcctctcccaaataaatatgattggatatcacaagaaccataaaattcctcccttaaggaagattatgagagagaccagcacacacacacacagtgcaagctaaagcaaccccgtcttggatgctaatccaccaagttgatgtgttttgttggttttttggttttgttttgagacagagtctcactctgtcgcccaggatagagtgcagtggtgtgatctttgctcactacaacttccacctcctgggttcaagcgattctcctgccttagccacctgagtagctgggattacaggcgtgtgccaccacgcccagctagtttttgtatttttagtagagatggtgttttgttggccaggctggtcatgaacttccggactcaagtgatccacctgcctcagtctcccaaaatgctgggattacaggctgtgagctaccacacccggccaaccaagttgacttctgattaaccagcttttagggaaggcctctaagatttccagtttatctattgttccttgtgtaaaagtatgtacttaccataaatcctgcccttaggcagattcacacagcattcttgcctttccctgggggactgacttcaaatgtccgtcacattcctttcctatagcatataggccctgggtcttgggggtaatggcatggggatccaccatcttgtctccctgccgctgaagccagagactatggcttctgttcataaatccctttctccttaaatatgaagtcaaaggtcatgtagataggagctgctgctgaagaagggattttttgtctgaagagttctgtcccctgggcttacttggctatggggtggacccctggccaggagacagcaaactgtttcagtaatgtgcgtgtcgtgcgtgtgtgtgttctgtggtgagcaggcctatgccattaaacaaacggtgtggctttgggcaagctgctatcttgggacctcagcacactcattcataaattgtgtcttttgggtgagatttgtcttggggtcttcaaaacccctgagactgtggacacatacagcagcctaacggcattgaggagggcaagcattcaacagttaggacaatgtgaactgtagctcagctctgctaggtaccttcacaagacctcgaatgctgccccttactatgcctcggttttcttatctataaaaacggcatttttatcttgttggtggagctgttaaataaattaaaagacgtaaagggtctggcaccatggttggcaaaaaatatcagtttcccttctcgacttctcgattttgcccaggaccagtgatgttcacattcaggacctgcctgaaccggcaagccctccacgtgggtccaaagtgcaaagggaaagtcactgctagaggcgccagtaccagcatagcgcccccacgcgccgagtcggggaactgccgcgggggccggccccgcccaccagcgcctgcgcctgcgcagaggcaccgccccaagtttgttgtgaccggcgggggacgccggtggtggcggcagcggcggctgcgggggcaccgggccgcggcgccaccatggcggtgcgacaggcgctgggccgcggcctgcagctgggtcgagcgctgctgctgcgcttcacgggcaagcccggccgggcctacggcttggggcggccgggcc

SEQ ID NO: 642 - DNA, 2300 bp, Homo sapien
ctagaggacagagtgagactccgtctcaaaaaaaataaaaaataaaaaaataaaaaattctgaagccaggcatggtgactcatgcctataatcctggtgctttgggaggccaaggtgagagaatctcttgagcccaggagttgaagaccagctgggacaacatagtgagaccttgttcccacaaaatattaaaaagttagctaggcatggtggcacatgccgatagtcccagctacttaggaggctgaggtgggtggattgcttgagcccaggagtttgaggctgcagtgagctgtagttgcaacactgcaccccatcctgggcaactagcaggagtgtgctagtagcaagctctaaaaatttatattataaaaatatatatataatgtgtatatatatgtatatgtgtatatatgttgtgtatactataatatgtatgttccatataatagtatatagtatattttatatatatacacacacacgttgcttctgctccatgaagtttataagggaagttggattttccttttttttttttgatacggagtctcacaccgtcgcccaggctgtgcaatggcacgatctcagctcactgcaacctccacctcccagattcacgcaattcttctgcctcagcctcctgagtagctgggattacatgtgcacaccaccacacccggctaattttttgtattttttagtagagacggggtttcactatgttggccaggctggtcttgaactcctgacttcatgatccgcctccctcggcctcccaaagtgctgggattacaggcatgagccaccacgcccggcctggactttcatttttttaaaaggttcaaagttatagtgcaaggttaagttgcttacagatagcaggtgctttaggaaccctctagaaggaaagttgccatgggctgggtcatcagggctggtcacagaggaaggaggagcttgagttgggcttgatggctgagcagggatgagccagacagagcaatactatagaaacaggggctggaaggatgctgtgagcagctttcagagggaggcgtccaaaggatgagtgcaggcagcgtgcagaccagcctggcagcagccagaacacagataacctcctgggcagtctgatggacagccgagtgacacatgaaagcaacatattttgatgtggctcagagcagggaaggcacggcactgagagtggggtagtctagagatggtgcctggtaggctatggccaaggggcatatgcagagctgtgcctggcacccaggggtgactaaccttggaaaggaagagctcagcagatcagaccatttgagagggaaagcggagcctgggtgactggaagagtgacgtcaccgctgcctgaagcaggggaagacccaccagatttttgtcacatggcctctttcccagtgcagcactgcccccagcacctgcacctccatctatttctgtctgaactcttgtactcttgctacctttctggacagagtagcctcatcggggccctaagaggcagagagagaaagacagtactgaatccctctgctctggggatgcgcctgatgtcacccacttgcctgagagaccctctgagatcactgtggatcacacactcctgctagttgcccaggagccgtcagccaaggtctttgcagagcgagctgtctccataatcagacacctccagaactctgctggagagtgaaggcagcaaggagaggtgcactggctgcgggacgtggggtttctgacctctcagatcattgagtattgtgatcccagtgaagcaacagagtttgagaaaaatcattctgaataatgagaaagaagatggcctggacccaggctgagcagtagaacctggttgggttgtgtttttctggtttattgatctggtcgacgtggaccacgccttgctgcacctctctctgcctcccctgtttcccttttcttgggccttcctaggctccctggctcacggtgcattcttttctcatcacaggcaatttttacccagaaaagcaagccggggcctgacccgttggacacgagacgcttgcagggctttcggctggaggagtatctgatagggcagtccattggtaagggctgcagtgctgctgtgtatgaagccaccatgcctacattgccccagaacctggaggtgacaaagagcaccgggttgcttccagggagaggcccaggtaccagtgcaccaggagaagggcaggagcgagctccgggggcccctgccttccccttggccatcaagatgatgtgga

SEQ ID NO: 643 - DNA, 2300 bp, Homo sapien
gcagcagccagaacacagataacctcctgggcagtctgatggacagccgagtgacacatgaaagcaacatattttgatgtggctcagagcagggaaggcacggcactgagagtggggtagtctagagatggtgcctggtaggctatggccaaggggcatatgcagagctgtgcctggcacccaggggtgactaaccttggaaaggaagagctcagcagatcagaccatttgagagggaaagcggagcctgggtgactggaagagtgacgtcaccgctgcctgaagcaggggaagacccaccagatttttgtcacatggcctctttcccagtgcagcactgcccccagcacctgcacctccatctatttctgtctgaactcttgtactcttgctacctttctggacagagtagcctcatcggggccctaagaggcagagagagaaagacagtactgaatccctctgctctggggatgcgcctgatgtcacccacttgcctgagagaccctctgagatcactgtggatcacacactcctgctagttgcccaggagccgtcagccaaggtctttgcagagcgagctgtctccataatcagacacctccagaactctgctggagagtgaaggcagcaaggagaggtgcactggctgcgggacgtggggtttctgacctctcagatcattgagtattgtgatcccagtgaagcaacagagtttgagaaaaatcattctgaataatgagaaagaagatggcctggacccaggctgagcagtagaacctggttgggttgtgtttttctggtttattgatctggtcgacgtggaccacgccttgctgcacctctctctgcctcccctgtttcccttttcttgggccttcctaggctccctggctcacggtgcattcttttctcatcacaggcaatttttacccagaaaagcaagccggggcctgacccgttggacacgagacgcttgcagggctttcggctggaggagtatctgatagggcagtccattggtaagggctgcagtgctgctgtgtatgaagccaccatgcctacattgccccagaacctggaggtgacaaagagcaccgggttgcttccagggagaggcccaggtaccagtgcaccaggagaagggcaggagcgagctccgggggcccctgccttccccttggccatcaagatgatgtggaacatctcggtaagcaccaggcctttcatctttaaaggagatgttctcaaaatgcccatcttagtgggcctggtgaggattttttccaggaagtaggtaggaaaagacagattatccacaggaaaggtgcctgtatagtcaggttacctccccctgttacacagaagtctaaaccagaatgtttgaaattgtattctgcccacagatcacccagagatcaggttcaaaggtagattttggccaggcctggtggaccatgcctgtaatcccagcactttgggaggccaatcacttgagctcaggagtttgagaccagcctgggcaacatgatgaaaccccatctctatgaaaaatacaaaaattagccgggtgtgacagcttgcacctgtatgtagtcttagctacttgggtggctggtggctgaagtgggaggatcacttgagtgcaagaggcagaggctgcagtgatccaagattgtggcactgcactccagcctgggtaacagagtaagaccctgtctcaaaacaaaacaaacaaacaaaaaaaacccaaaggtagattctgattcagcaggtcagggatggggcctaagattgtgccttcccaataagctcccacgtgataccaatgccactgctctgtcaaccacactttgagtaacaagtgcctaaaccactgatttctaccttgattggttagttcaccatcccctccttcctgcaacctgcctcactggagagggggaactggatctctttcctttaagctcactctgcaagcccacctccagctcagaggcttgcatgtcaactccctactctcaactcttggaaggactcaagactttgggaaattgaagagtatttttcccccacgaaaacaatttctgtccacttaatttatttaccttgccattgctaggtaggttttaaaaatgtattaagacccgatgctctgtctcctgcccatccctgggcccatccattcaaggccgcagtgggaagtggccacagccgttcatggtgggccctagaggatgcagtttcttgttctgatttggggaatgaaggttattagactgttgcactccaagctgggt

SEQ ID NO: 644 - DNA, 2300 bp, Homo sapien
catgcacagttatctgttcatgccaactcatgggtcccctgtgcagatttgggaggagtgagtatgaaacgtgcagtggcaattcaggctttgacatcagcaaacttgttctgtgcaagctgcaattggccttattggttccaaccaatttcagccagttcttttatctcataagcagagggagtttcagcctttcagaaagtggtttctgcaaactcaaattttcttttatttttctgagacagggtcttactctgttgcccaggctggagagcagtggcgtgatcttggctcactgcagcctcaacctccctgggctcaagtgatcctcccacctcagcctcccaagtagctgggtctgcaggcacatgccaccatgcccagctaatttttgtagtttttgtagagacagagtttctccatgttgcccgggctggcctcgaactcctgggctcaagcaattgcctgcctcagcctcccaaattgctgggattacaggagtgagccacgggaatttccatcagttactgattcttgaacttgtaggaacgtggttccactgtccacatgctgttctttcctcgcatctcctgttcctgcttccctttggcctgctcacctctggctcctcatggccccagtgaagtatcgtggcttcctctccactgcagactggcagatttcttcactcacactcccaaaaagagaatctacttccctcccttcccttcgtccaaccatctgggtctcgagtgtcactgtaggttcactgccgttggggcaggtgactccttgggccagtcagctttggctgaagggcagggctggcacacagctggcagagccaccccatccaaaatccagccactgtgcctcagcagggctgtggtttgggggtcggggggcgctccccacaggataaggagcagccagggcaggcagatgacactaccactactagctgcatctggatctattcacttattcaacaaaggtttattacacccatattctatgccaactactgtactagacttggaataatggagaaaattcaggcacagtccttgctcttagggagctcacatgattactcattgatgaatatctctctcccctgatagactgcaaatccatgaggacagggactctgtcttgttctgtgccatagttccacagcattccagcatgatgtctggtactcagcatgcaaacagtgcgtattggttgaatgaataatagtacagctaatagcagctgagagcttcctctgtgctagacacgattctaggtgccttccacactttgacaaccttatgcagcgtgttaacactgcattccccttgcaccctggagattgagcccagagaagataaggacagaggggacacattccaagatagatcccccagtggatgcctgaagccacagatagtaacaaaccctatatatactgtgttttttcctatacacacatacctatggtaaagtttaatttataaattaggcacagtaaaaaattaaagataactaataaaatagaataattatgacaatatactgtaataaaagttatgtgaatgtggtctctctctctctcctctctctaaatatcttcttgtactcacctattctcaaactgtagataactgaaattgcagaaagcaaaactgtggataaggttggggctactgcaactcagccaaggacttacagtggcagacctggaatgcaaacccaggcagtctgataccagggtttctccacctgtgttctgccacatgggatggataggatggatgggtgtacggatggacggacggacagacggatggacaaatggattgaaggatgggtaggggagtcatcagatgtgttctccaacaccatgtacagtacctggcacatagcaaatctatgataaacatttgatagtaagtgaataatgaatgtcagtgccagtgttggtgtggccttaggttattctttccaggtgttgtatctgatgctggcctcatatgtttgtctcacttggctgactagaaaatccaagagaggtcccaagcaactagcccctcaccccaacatcatccgggttctccgcgccttcacctcttccgtgccgctgctgccaggggccctggtcgactaccctgatgtgctgccctcacgcctccaccctgaaggcctgggccatggccggacgctgttcctcgttatgaagaagtaagtgacagcagcgcggcagggcctggagctgatacatctcccaaggggagctggttcctgccctccatgtg

SEQ ID NO: 645 - DNA, 2300 bp, Homo sapien
ctgcatctggatctattcacttattcaacaaaggtttattacacccatattctatgccaactactgtactagacttggaataatggagaaaattcaggcacagtccttgctcttagggagctcacatgattactcattgatgaatatctctctcccctgatagactgcaaatccatgaggacagggactctgtcttgttctgtgccatagttccacagcattccagcatgatgtctggtactcagcatgcaaacagtgcgtattggttgaatgaataatagtacagctaatagcagctgagagcttcctctgtgctagacacgattctaggtgccttccacactttgacaaccttatgcagcgtgttaacactgcattccccttgcaccctggagattgagcccagagaagataaggacagaggggacacattccaagatagatcccccagtggatgcctgaagccacagatagtaacaaaccctatatatactgtgttttttcctatacacacatacctatggtaaagtttaatttataaattaggcacagtaaaaaattaaagataactaataaaatagaataattatgacaatatactgtaataaaagttatgtgaatgtggtctctctctctctcctctctctaaatatcttcttgtactcacctattctcaaactgtagataactgaaattgcagaaagcaaaactgtggataaggttggggctactgcaactcagccaaggacttacagtggcagacctggaatgcaaacccaggcagtctgataccagggtttctccacctgtgttctgccacatgggatggataggatggatgggtgtacggatggacggacggacagacggatggacaaatggattgaaggatgggtaggggagtcatcagatgtgttctccaacaccatgtacagtacctggcacatagcaaatctatgataaacatttgatagtaagtgaataatgaatgtcagtgccagtgttggtgtggccttaggttattctttccaggtgttgtatctgatgctggcctcatatgtttgtctcacttggctgactagaaaatccaagagaggtcccaagcaactagcccctcaccccaacatcatccgggttctccgcgccttcacctcttccgtgccgctgctgccaggggccctggtcgactaccctgatgtgctgccctcacgcctccaccctgaaggcctgggccatggccggacgctgttcctcgttatgaagaagtaagtgacagcagcgcggcagggcctggagctgatacatctcccaaggggagctggttcctgccctccatgtgcaccttgatcagggggttttggagaacagggtcatcacccttccggagaagaaagccatgcaaagggaacatatctgccctggagagcattttccctgtaggacgatttttcatggaaacaaactctcatcttcatccagaacatacttgtcacctagtccttttggtccatttgactgttaaccttttctgtggctggacttatctgtttttaacataaaaaccgttctccttcctcaccctctgtatcccctaactttgctatagtgggtattttattttaaggaaataattatctgcaccattactttgaatatagggagccccaactcttacttcctaatttgaggatggtgagtgggagggaacagaaaggatgctggggaaaagtgggaatcaaagtgctcctggaaggggaagaggaacggcctaaccctaacagtgattaaggttattaggaggccgggaatggtggctgacgcctgtaatcccagcactttggaaggcggaggtgggtagatcacttgaggtcaggagtttgagaccagcctggccaacatgatgaaaccctgtatctactaaacatacaaaaattagcctggtgtggtggcgggcacctataatcccagctactcgggaggctgaggtaggagaattgcttgaacctggaaggtggaggttgcagtgagccaagatcgtgctactgcactccagcttggcgacagagtgagactccatctcaaaaaaaaaaaaaaaaacgtattgggagtcgtcgatgtgtggtagccagaggccctctcccctctccgccagctatccctgtaccctgcgccagtacctttgtgtgaacacacccagcccccgcctcgccgccatgatgctgctgcagctgctggaaggcgtggaccatctggttcaacagggcatcgcgcacagagacctgaaatccgacaacatcctt

SEQ ID NO: 646 - DNA, 2300 bp, Homo sapien
ctgattaactctgcccaggaagttggacttaataagagaaataggtcattaggttgaatttgttaggcaagagaaagcgaatatggaagcatgaatacttgaaagtgcctggcacatgtcggggcaggagggtggtttgggtccagactttgatgggccatgaatactgtgtgaaggaatctaggccttcagagaagaggcagagatgctgtgttgggggattaaccttgctgaggagagagactggttactgatcagggccgggtggcaggggcatctgcaggtcttctgaactcctgggcattcctgccatgttcgtcgggtgggaattaagtgcagctctgcctgcaggtggtggaaggcctccagtcatggccagccctggctaacctggccttttatctcaggagtatagcatcgtgatccagcagctctcaaatggcaaatgggtcccctttgatggcgatgacattcagctggagtttgtccgcattgatccttttgtgaggaccttcctgaagaagaaaggtgagtgtagttcctgcacgaggatgctgccagaaacggccccaggcctcacttgctctcgaggcccaaccaggaaaagctctgggaaacccctcccggttattcttgttggttcttccgcaggtggcaaatacagtgttcagttcaagttgcccgacgtgtatggtgtattccagtttaaagtggattacaaccggctaggctacacacacctgtactcttccactcaggtaagcacaggtgacagcttctgttttcagctagcatgtgccctgcctgggctctgcagtggccaggtcctgccacctctgtcctcctgcaggtatccgtgcggccactccagcacacgcagtatgagcgcttcatcccctcggcctacccctactacgccagcgccttctccatgatgctggggctcttcatcttcagcatcgtcttcttgcacatgaaggagaaggagaagtccgactgaggggctagagccctctccgcacagcgtggagacggggcaaggaggggggttattaggattggtggttttgttttgctttgtttaaagccgtgggaaaatggcacaactttacctctgtgggagatgcaacactgagagccaaggggtgggagttgggataatttttatataaaagaagtttttccactttgaattgctaaaagtggcatttttcctatgtgcagtcactcctctcatttctaaaatagggacgtggccaggcacggtggctcatgcctgtaatcccagcactttgggaggccgaggcaggcggctcacgaggtcaggagatcgagactatcctggctaacacggtaaaaccctgtctctactaaaagtacaaaaaattagctgggcgtggtggtgggcacctgtagtcccagctactcgggaggctgaggcaggagaaaggcatgaatccaagaggcagagcttgcagtgagctgagatcacgccattgcactccagcctgggcaacagtgttaagactctgtctcaaatataaataaataaataaataaataaataaataaataaaaataaagcgagatgttgccctcaaacttcacctggccccggtcctggtttgctaatggctgtgggtgggggttgctgtgggtgatgactgactggatacaaaatcctaagtggcttcatgaaattttgcctaggactggactgtctttcttttaactgtgaaatgatggttctccctaacgtctcctcaaaggatacaagaaagttgttgttgctagtagaccgaggggtgggaatcactgaaatggaaaatctagatgacagtgctggggaagagaaaactagaacagctcagttgaagacaacctttactgcatgttgacgctgatttaggcaatagcttcctaaaaatcatgtataaagttagttagttagacatgaaatctcttccccaatgttgatacctgcccacaaaatattctcaccttcagagtataagaatcattcttaaagccaaatattcagttcaaggcacatacgtcatctgcagttgtaaatttgcatttaatatttcacaattcctgtaagagaggctagtcaggagggaaaccctcaagtttaaatccccacacttacttacttactgctcatccgtcactttcgctaagtgagattaataattcagtagctggtccagaacgcacagcttgggaacgcagaggcccaggcctcatgtaatttcccactcccgtaactgaacgtgctgacccatgttgatgtctgc

SEQ ID NO: 647 - DNA, 2300 bp, Homo sapien
ggctccctcgacttcttcagcgactccttcttcaactcagcagtgcagaaggcggcgcccggctcccagaggtagctgccaggaggcttaggggccggggatccgggtggtgcagtgtgtgtatatggggaggactcagaaggggaagaaggaggcttttagctaaaagtgtcagaggctgagtgtttcaggtgctgtcagattatttcagggctttattgctatattgctggtattggcacttccaattttttaaggtagtagtgacttatctagagatccctaacctccaccgttccttttagaaatttgtgtatttgttgtgcagatgacaagcaaccagccatatcttttcgtttgtttcctgcgttccctttaaccatgagtccctaggtgcccaaggcctacaggcagaacttcgctagggtactgtcatggtggacatgagtggtcctgcccatcaggcaccactggaaaggtggctctggtgcccaagctgctcctgtttccctcctgcaggtattcccagacaggcaactatgaactagctgtggccctctcccgctgggtgttcaaggaggagggtgtcctccgtgtggggcctgtgtcccatcatcgggtgggcgagacagccccacccaatgcctacactgtcactgacctagtggtaagagatgtttggggtgggagggcccaaagggtttgccaagctgactgagctcagctcagaagcacttattgaacacttctttgctggcctaaagggcataaataaagatgaataagttaatccctacacctaagcatgccaggtgagatgcagagcctggcgtgaaaactgatgtcctaataggagcacttcttttgaagaggtgtgtgtatttgctatggggggcagcagtgggaggggcttcactgattaactctgcccaggaagttggacttaataagagaaataggtcattaggttgaatttgttaggcaagagaaagcgaatatggaagcatgaatacttgaaagtgcctggcacatgtcggggcaggagggtggtttgggtccagactttgatgggccatgaatactgtgtgaaggaatctaggccttcagagaagaggcagagatgctgtgttgggggattaaccttgctgaggagagagactggttactgatcagggccgggtggcaggggcatctgcaggtcttctgaactcctgggcattcctgccatgttcgtcgggtgggaattaagtgcagctctgcctgcaggtggtggaaggcctccagtcatggccagccctggctaacctggccttttatctcaggagtatagcatcgtgatccagcagctctcaaatggcaaatgggtcccctttgatggcgatgacattcagctggagtttgtccgcattgatccttttgtgaggaccttcctgaagaagaaaggtgagtgtagttcctgcacgaggatgctgccagaaacggccccaggcctcacttgctctcgaggcccaaccaggaaaagctctgggaaacccctcccggttattcttgttggttcttccgcaggtggcaaatacagtgttcagttcaagttgcccgacgtgtatggtgtattccagtttaaagtggattacaaccggctaggctacacacacctgtactcttccactcaggtaagcacaggtgacagcttctgttttcagctagcatgtgccctgcctgggctctgcagtggccaggtcctgccacctctgtcctcctgcaggtatccgtgcggccactccagcacacgcagtatgagcgcttcatcccctcggcctacccctactacgccagcgccttctccatgatgctggggctcttcatcttcagcatcgtcttcttgcacatgaaggagaaggagaagtccgactgaggggctagagccctctccgcacagcgtggagacggggcaaggaggggggttattaggattggtggttttgttttgctttgtttaaagccgtgggaaaatggcacaactttacctctgtgggagatgcaacactgagagccaaggggtgggagttgggataatttttatataaaagaagtttttccactttgaattgctaaaagtggcatttttcctatgtgcagtcactcctctcatttctaaaatagggacgtggccaggcacggtggctcatgcctgtaatcccagcactttgggaggccgaggcaggcggctcacgaggtcaggagatcgagactatcctggctaacacggtaaaaccctgtctctactaaaagtacaaaaa

SEQ ID NO: 648 - DNA, 2300 bp, Homo sapien
gtcctgtggggggctccacaatctaagggaaaaggcttggcctttggcacagtcctggaacctcatttcactctgagcctcatctgtgaaatggggataacgcccacctcacagggttaatgtgaagattaaatgagatagtatgtaaagctcctggggcatagcaggtgctctgtgttagtcctcctcctccctattttgtatcaatttctatggcaggccccacaagccacatgcctgggccaaggagcacacactcttgagaagctggggtgggggtgtttagacaactacagagatatccagccagaggcaggcagcagtacgtcctgagtcagagccggtgagatcaggtcttttaaaaattatttttattttctttgagactgagtctcgctctgtcacccaggctggagtgcagcagcgggcaatctcagctcactgaagcctccacctcctgggttcaagcgattctcctgtctcagactcatgagtagctgggattacaggcgcccaccaccacgcccggctaaattttttgtattagagatgcggtttcaccatgttggccaggctggtcacgaactcctgacctcaagtgatctgcccacctcggcctgccaaagtgctgggattacaggtgtgagccaccgcgcctggtcgatatcaggtctttatggggaacaaagagtgcctttctgaagggagcagtgctgggtggggctcccagaaaggatggagaagatcccaggaggtttaagatgggggtgtaaggagggcgctcctggcggagagcgctgcaaagcaaaaggcaggaggtgtggaactcagggtgttaaaggctgggccattcctgttccatggaagccctgagcaaggactgagaggggacgaggctgctgagatgagtgtaggtggagacctgagagcaaagagccttggggtgtccctgtgccgtggccgactcttaacagtttaacactgttggctctgaattagaggcgggcggatgtggtactgtgtgtcgagggtggaagggcaggagttagggtgcaggagccaggagctctgcagaggcttaacttggggcagagccagtgggaatggagaggaagtagagtccgttaagaagatgtatggagggaggttttgatttttgctccattcttgggttggtggacaagtgtccgaaaggaactgctaccttctgtctctacagttgccgtcaccattggcctcaggattgtggttgggacccagaggacggtggaagtcttgctgcttgtggtagtttttacttaaacccctggtggacaaaggcaggtctgagatgaaccgggtggcctctgtattaacctagaagaggtgggagccacattattgaatggatgttcactctagcccggcgctaagtgcttcaaaacctgccatgttcctcccaagagcccagagatgaggtaattaaatggctgttcctaaggcacacagataaacagcggagctggacctcgtccttagtcctatttacagccagggaaactgtcctggagagaagtgcaatgcccgggtaacggctagtgagagatgcaacttggaaatggaaccatcgctaggccagtctactgcccatccacagtctccagcgtgggccaccgagctgggcagcacaggcccgtccatgccatggcccctggagccgtgagcggcaggaaggaggctccaagtgccctgaccctgatcttattcttccaactcctcctccctagaaatggtggaggtggggcctagttcctggtcccgagccttcccaggcccagtgaagaccccgccagcaagaaggtggccaaacaccctgtccaggacgcgacggtcaagcccggggaggaccccgcaagctccagagggaagtgggctccagactagggggcgggaggccggcctgggcggagcaaagggcgctcggcctcgttgattggccgcggctgcagagctgtctctctaggattgagccttttctttagggggacggggccttgattcactcccaccaatagggttcaaggaatccacctcccaccagggcacttccggcggcgctctccgcgccttatcgccaaagctgcggctctggacgcccagccgcggcgtatcccgatcacttccgggtagtgctccacgggcacgagccgcgattgggctaccgtagatggggtacttccggtgtgcacgtgctgggtccttcggcaggaggaggaagatggagcccagcaccgcggcccgggcttgggccctcttttggt

SEQ ID NO: 649 - DNA, 2300 bp, Homo sapien
ctgatgtcacgcatggtgccatgtgaacactgagcaggcagagcttgcccagggcccggagctcactgtgcacacactgttcacacacatggcctccgacactcaggccgtggctccactgtgtctgctgcggctctggcactggtggctggctcaggggcactggtgtccaggggttagggaaggagaagctctgtctcatgctctgtaattcaataagaaagttggggtcgcgatgcaaggttatgccaggtgggctcccgttctgcagatggagggacagctgtacagggcgtttgcccagttgccatggttacagtgagtgtccaggcctgacggagccctgggcgacgctcactggctcgtgagctctgtagtgagctgggtggggggtctgtgggaatccagccacctttcagtgaccacgaggcttctgggatactgctcttcctccatctggccccctgaccaacatcttctcccttttcaacaaccctcttgtttttaaaacaatgttcctcttggccaggcacattggctcacgcctgtaatcccagaactttgggagaccgaggtgggtggatcacctgaggccaggagttcaagaccggcctggccaacatggtgaagtgaaaccccatttctacctaaaatataaaaattagccaggtgtggtggcgtgcacctgtaatcccagctactcaggaggctgaggcaggaggatcacttgaacccgggagacggaggttgcagtgagccaagatcgcaccactgtgctccagcctgggcgacagagcgagactccatctcaaagaaaaaaaaagtcctattttctcctctctttgttctctgctttcctttcctctgtgtgtgtgtgtgtgtattttgtgtgtgtgtgtctgtgtgtgtgtatttagagagagagatcccaggtctaccacttccttggttgtgtgacctttctgggctgggtttcctcatctgtaaaatgaggttgcttcagaggagtggatgcaggcaacgctcctggcacacagcaggtgcccaccacacgcctgtcttccgtttcctctcttccctgttctctccctcatctcttccctcctttgtgctccttctctcgggagtgacaggcaggggaggttggggggtggtgggaggccttggggagttgaagtgaggccaggggtgagggagtaaaggatggttctggcccaaatcagccttctttctcctccatcccctctttcctcccaggtccctgcgccgacagacctgctggagcccagtgatgccaggcccgaagccgaggcggctgatgacttcccgcccaggcctgtgagtacctccccgggcctccatgtgggggacggggttctcttcaacttcctgggaaactccagcttgtcttctccctccctgagcttcagtttcctcatccatgagctgagaacaacaactccagccttccccgggcttgtggcccgtggccaggcagtgtgcagtgggaggaaccatcatcttcttcttatggagtgaaagtggcctgttgttctagatggtggctttcaaaccttccttagccttgtcgccctttgtgtaaaggaattgaggcccagtgtgtgcaaaggacgagggctgcaggtcagggctggtggcccctatgacaccatcggggaacccaatttgaacaccccaggggagcaaaaggagaggaagctttaaatctccctacatttatagaggaagaagacagtttggactcaagtgtgggctgggcaccgggcctgcagcaggctctcagcagggcgtagatggagcagccggggcagccctggctaggaagtgactctggggtgggacccaggcgtgaaggagggacggggggaagcagcaagcagaggggatagcaagtgccaaggtcctatggctggaaagaccttgactttcttagcaatggaaaaggaggccacggtggcgggggaggccgtggaggcagggagccggcagggaggaaagtggactttcctgcgaacgtgacgggaagtcacatggggctcatcgggaacgggatgtgatcggtttctattttaagatggccctggctgcctgtggagactggattgtgggaggtgagagaggaagctgggagccttcctcctagcgtgggggtgtcagtgggaatagcggcagtaagaactcaacagggcgtgtttttgtgtcactggtgtccctgagctggaggtgatctgtcggggctgcagcaggcggaatggccccgtctgggattgagccacctg

SEQ ID NO: 650 - DNA, 2300 bp, Homo sapien
tgggcccccaaatctgctaggctgcagctccccccaacagctgacagaggcaactcaggtgttcaaaccagacacttggggtcgcccctggcttctcacgttctctcaaatctacatccagttggtcagcagatcctgccatctccaccttcaaaactggctacagcctggccgggcgcagtggttcacgcctgtaatcctagtactttgggaggccgaggtgggcagatcacttgaggtcaggagttggagaccagcctggccaacatagtgaaaccccatctctactaaaatagaaaatattagccaggcgtagtggcgcacacctgtagtcgcagctactcgggaggctgaggcaggagaatcacttgaacctgggagagggaggttgcagtgagccgagatcacacgattgcatctagcctaggcgacagagcaaagaccccgtctcaaaaaacaaaacaaaacaaaacaaaaactggctacagccagttcactgctgccctccagactgagtttctgcacgcccccgcaacgggtctcctcgtgcctaaccctggttcccctcagtgcactctccacgcagcagccagggagagcctgttcaaatgcaaggcctgtgactgccctgtgcacacctgcctcgttcaacccagagtcacagccaaagccctcacccggccctccacagctgtcacaatctggcattatccctcttggacttctccacctgtcctgcccatcactccctcccctccagccacactggcctcctggctgggccaggaacagtgcagtctcacaaccgcctcagggccctcgcactcaccgctccccctgtctagcaagctccccctgtctagcaagcgcctcctgtctagcaagctcctcctgtgcccgccctctcctcgctgcttccttcatgccttgactaaaaggccttcaataaataagctatttatttatttatttttgagacggagtcttgctctttcgcccaggctggagtgcagtggcgccatctcagctcactgcaacctccgcccatctggttcaagcaatcctcctgcctcagcctcctgagtagctgggattacaggctcccgccaccatgcctagctaatttttgtatttttttggtagagacggggttttactatgttggctgttggctgggcttttcttgaactcctgacctcaagtgatccacccgcctaggcctcccaaagtgctggggttacagacatgagacactgtgcccagcctaacacactatttaaatggcaacttgggccgggcaaggcagctcacccctgtaatcccagcactttcgcaggccgagatgagaagattgcttgatcccaggagtttgagaccagcctggacaacatggcgagaccccatctctacaaaaaataaaagattagctgggtgtggtggtgtgtgtctgtagtcccagctactcaggaggctcaggtgggaggatcatttgagcccaggaatttgaggcctcagtgagttataatcccaccactgcactccggcttgggtggcagagcaagaccctgtctcgataaatatataagtaaaaaaattgcaacccttctaactgcttctgactcccaagcaccctccctacttgctttttcttctcagtacacatcgccttgtaacgtgttacccattttgcttatttattttgatgggaggtgcttaggcagggctggagtggagagggcctcgaacaccaccacgaggcatttcaccttgtccatctgcttttctcctctttttcccagtggaaaactcagcgtgggtgtggagtttttgtctttgttcaatgccgcatcctcagagtctggaacatcgaggtgctccataaatatttgttggatgactaacagccttttacatggagatgtgtttgaaataagctgaatactttaaagtcttcttgaatgaccatgaggtcgtctttttatagatttctgcttagttcctgcacacaatgtgcccctcatcctggctgctaatttctgtttctcccccagccctgctgtccaggcaggtgcccccagaccctgtgcaggtggaggagaagctgttgccccaacctgtgatccagcatgacgtggaggccgagaagcagctgatccgggaggtgagacccaagcgggtgggaacatggagaagggacaggcaggtggggcccagcgggaagggcagggctgccgctggggtccaacgcgatatcaccgtaccttcaccgtgggtttggtcctgagaaagctgaagctcaa

SEQ ID NO: 651 - DNA, 2300 bp, Homo sapien
caaggagagagaggtttagccatgtcctgggtctaggattacagcccagagatgggcacttaagaagacctggtcattggtccagacttgggccaaggctctcctctgtgagggatgggttttactggtgaattacctgtgtggagaagctatcagggccatgtttagcacactgaagggaccagtctccaccaagcactttaacatccctccagccagcatagattgatctcgtgttacagagagggcaaggtttttggcccctgtttgcagactccatgtcttaatcagagaccacagttttctctttgttccaatctgcgccacctcggtagccccactttccttgctgtgtggacttgaaacaaaataaaatgtgttgcttcagattgtctgctacagacttttctttccttcgaaaggtgaggtttttgtcgtttccctatttcgtttttgccaaacgtatcttcagctggtgctgaatggtgaaccagaggtcctgtcctcaagggctcagaaggaattgcgcagggagactcaatcaatttacgttcctcttctgctgcaactttcagtggatatatctataggaaaaagactcaagtccttctgcactggcaacctgggcttgctttctgcttctgcaatgtgccacaggacctccgcacagcccagaccggcgtcctcctcctcctcccttcccttcaccttgttaaccactcagccatcatatttcagctccagtcaatctcaggatgcctgccctacaccctgggctgagtgaggttccttttttagatgttccataggctgggtgcagtgattcgtgctagtaatcccagcacttttggaggccgaggtgagaggatcgtttgagtccagaaattggagaccagcctgggcaacaaaatgagatcccatctctacaaaaaattagccactcgggaggctgagttaggaggatcgcttgagacctcctgaggttgaggcagcagtgagctatgattgcactccagcctcagtgacagggcaagaccctgtctcaaaaaaagatatgttgcatggaactgattattcagcttgtaattacattttcgttttcgggattttgtttgtgggattttgtttcctgtgtctgtctctccagctagatcatgcaggagggctgtctccctaacatctgtcacggtgcctgacatgtagccgacactcagtgtttcagtgcaaggaagagcccagcgcccagaggtgtgacggaggtgctcttttggctggggaacttgcactgagccaggagggataggccaggcagccttccatccaaaagacttgtttttgtttgtttgtttgttttagatggaattttgctcttgttgcccaggctggagtgcaatgatgcaatctcagctcactgcaacctctgcctcccgggttcaagtgattctcccgccttagcctcctgagtagctgggattacaggtgcccaccaccagagacgcgggtttcaccatgttagccaggctggtctcgaactcctgatgtcaggtgatccacccgccttggcctcccaaagtgctgggattacagacgtgagccaccgcgcccggcccaaaagacttgctcccaaagtgtttgttttacaatctcgggtcttagaaataacacgggtggcatgagaggaagctgtccaggggctgtgggtggtgggcagcctttccctgagccagtacggggacgtggataaggggcaacaggtccttgccgcttttcctaggtccctggcccgtgcctgaggcctgggatctctgtagccccgaggtggagtcaagcctggggccccgggccccagtcttagccgcagcctcgggcaagctgcgtaacatctctgaactgggactgtgcggattcgagaaggcagcggacgcgaaaggagcccagccagggctggcgcttcccgcaagcggccgcgcgtggctgcggggatcactcgggcgaagctcgcgggccaggcggggcgttcccggggccgctcttgtgacgccacgggcgttgcccagcaaccgcgaacgccgcggcggtgagcttgcgggcaggcggctggggcggctccgggctcgggttctgcggcggcgcctgcagcgcggatcccccacgtccccgctcgggccgggcctcagaaacgggcgagcccgggcgcgggaggaagcggcggccccggctcgggtcctgcgacgcccagctcccctccggggcgccccccgaggggtccccgccccccgccgcggccccgcccctgcctc

SEQ ID NO: 652 - DNA, 2300 bp, Homo sapien
gtcggactgaagaccaacaaaaagaagacccttcttggtagtagaagtcagtagtcaatgtcacacactttgaacatacttatctttctagatttttttttttttttttgagacggagtcttgctcttgttgcccaggctggagtgcagtgatgggatctcagctcactgcaatctccacctcctgggtttaagcgattctcctgcctcagcctctcaagtagctgggattacaggcgcccaccaccatgcccagctaatttttgtatttttagtagagacagggtttcaccatgttggccaagctagtctcgaactcctgacctcaggtgatctacctgccttggcctcccaagtgatgggaatacaggtgtgagccaccgcacccggcctctagatctggtttttgcagcgctttgtatgttttattgtaaatctctgtgtccctgggatctagcacagtgcctgccactcaaatcttgaccctctgtttccttctgagaaaggtttagaaagcaggattctccctctggttttgactatttcattatctgaatttaagcttttgtcattttgacctcaaacaaattcctgccactattttaaaaattgcatgtatcagaatgaattgtatgcatcagaaaacttgttagagttagtatttaatggagcttgcctcgtgttgctgtctctgaatattctcaaaacggggactgtggagctagaaattgtcgagtcctctatttaaaacttacgcgcttttctccccctgcccccacccaagaaagctaggaattaaccgtttattctttgtgaactccaagtttaataaactggatttgcagagaataggggtgacttgtaaaccatcttgttccctcttgtcactggactcaaggctggcagatggctgtggtgaagtgttgcccagagcacttacatctagaagtcaaagagcccttgcttcagcctaggcaatatagtgagacctcgtttctactaaaaaacaaacaaaaaaattagctgggtgtggtggcatgcacctgtagtcccagctgcttggtggctgagacaggaggatcacttgagcctgagagatggaggagtgagcattgattgtgattgtgccactgtcactccagcctgggcgacagagtcagaccctatcttaaacccttgctgtactgtcgctccagcctgggcgacagagtcagacgctgtcttaaacccttgctgtactgcactccagcctgggcgacagagttagaccctatcttaaacccttgctgtactgtcactgcagcctgagtgacagagtcataccctatcttaaacaaacccttgctgtactgtcacatacaaaagaaaatcaagactaaaagtaaggtctaatgtcagctaatatttattgggtgcctcacttcctgtgggtcaggtactgcgctacgcactttgctcgttggaatcctcacgtggctgtgagtcaggcgttagtaactctcctttccacacgaggcgctcaaagaatgaaagtgatgaaggcgtttgcccaaagccccacgtttgtaagaagaagagcccagatttggggccacgcctcactgctgcctctgggtttccagatcccctgaggaggagtggccagcatggcctcttggcgcaaacccgcctcccctggaactccaggggccctcaggccctctgcgctgtgcccacctgtcagggtgccccgctcccggtctgcagcctttgcgcccccactggccctgagcccctgtgtcctggtttctctgtggtgtggtgcatgggcaggttccgggggggtttcctgcagatgtcaggttggatacacagcagccttggctcatcgcccggtctcctgggacgatagcgctccccgtcccagtgccgtggctggagctgctagcccgattccccacctaaagggcccgaaggatggggccacggcccatgtgcggtgagcaacgttccttcccagatttctcagtgctgggccccgggctaagcaggatctgtcagttcccggctgagaacgtcccggcaggaagaaagtgaggaggaggatgcgcaacgaccctccactcacaagggccgggcccgaaccaccctgagcgcctcctccgagccaggctcgatccttcacactgggaacggagacactccggtccagtgtcacttgtcctcgagtaagaggagagggatgacaggcgagcaacggagtcacaagggctctgcagagaatgaagcgtgagtggtggtcgtggaaggcttcccggagga

SEQ ID NO: 653 - DNA, 2300 bp, Homo sapien
tagtagagatggggtttcactgtgttagccaggatggtctcgatctcctgacctcgtgatctgcctgcctccgcttcccaaagtgctgggattacaggcgtgagccaccgcgcccggccaaaaaacattttttttaagtaaaactaaaaaccttcaaatatataaatgcacttggttttgaaaccttgtatttctgagtcggactgaagaccaacaaaaagaagacccttcttggtagtagaagtcagtagtcaatgtcacacactttgaacatacttatctttctagatttttttttttttttttgagacggagtcttgctcttgttgcccaggctggagtgcagtgatgggatctcagctcactgcaatctccacctcctgggtttaagcgattctcctgcctcagcctctcaagtagctgggattacaggcgcccaccaccatgcccagctaatttttgtatttttagtagagacagggtttcaccatgttggccaagctagtctcgaactcctgacctcaggtgatctacctgccttggcctcccaagtgatgggaatacaggtgtgagccaccgcacccggcctctagatctggtttttgcagcgctttgtatgttttattgtaaatctctgtgtccctgggatctagcacagtgcctgccactcaaatcttgaccctctgtttccttctgagaaaggtttagaaagcaggattctccctctggttttgactatttcattatctgaatttaagcttttgtcattttgacctcaaacaaattcctgccactattttaaaaattgcatgtatcagaatgaattgtatgcatcagaaaacttgttagagttagtatttaatggagcttgcctcgtgttgctgtctctgaatattctcaaaacggggactgtggagctagaaattgtcgagtcctctatttaaaacttacgcgcttttctccccctgcccccacccaagaaagctaggaattaaccgtttattctttgtgaactccaagtttaataaactggatttgcagagaataggggtgacttgtaaaccatcttgttccctcttgtcactggactcaaggctggcagatggctgtggtgaagtgttgcccagagcacttacatctagaagtcaaagagcccttgcttcagcctaggcaatatagtgagacctcgtttctactaaaaaacaaacaaaaaaattagctgggtgtggtggcatgcacctgtagtcccagctgcttggtggctgagacaggaggatcacttgagcctgagagatggaggagtgagcattgattgtgattgtgccactgtcactccagcctgggcgacagagtcagaccctatcttaaacccttgctgtactgtcgctccagcctgggcgacagagtcagacgctgtcttaaacccttgctgtactgcactccagcctgggcgacagagttagaccctatcttaaacccttgctgtactgtcactgcagcctgagtgacagagtcataccctatcttaaacaaacccttgctgtactgtcacatacaaaagaaaatcaagactaaaagtaaggtctaatgtcagctaatatttattgggtgcctcacttcctgtgggtcaggtactgcgctacgcactttgctcgttggaatcctcacgtggctgtgagtcaggcgttagtaactctcctttccacacgaggcgctcaaagaatgaaagtgatgaaggcgtttgcccaaagccccacgtttgtaagaagaagagcccagatttggggccacgcctcactgctgcctctgggtttccagatcccctgaggaggagtggccagcatggcctcttggcgcaaacccgcctcccctggaactccaggggccctcaggccctctgcgctgtgcccacctgtcagggtgccccgctcccggtctgcagcctttgcgcccccactggccctgagcccctgtgtcctggtttctctgtggtgtggtgcatgggcaggttccgggggggtttcctgcagatgtcaggttggatacacagcagccttggctcatcgcccggtctcctgggacgatagcgctccccgtcccagtgccgtggctggagctgctagcccgattccccacctaaagggcccgaaggatggggccacggcccatgtgcggtgagcaacgttccttcccagatttctcagtgctgggccccgggctaagcaggatctgtcagttcccggctgagaacgtcccggcaggaagaaagtgaggaggaggatgcgcaacgaccctccact

SEQ ID NO: 654 - DNA, 2300 bp, Homo sapien
aatttcttttctttcatagctaaaattagaatttttgcttaatccaaagaaagataaattaatcaggttccaaagataggagaccttaactataatcccaaatttttaaagtttctcttagttaaatgcagtatttaatgaacatggctggtgagtttcgttctcatgacgtatcaagatggcaagagggtcacagcctgagagagaataatttcacaggctctttaaagtaagtattaattaagaattggttagcaaaccttgacaagggctaacaaaatttggaaaaacagcaatgatgaaaaaacaaatgtcaaaaggtgttagcagattgtttagttttgttttcatgtcattttcctgttaattatacccaaaagacatgattaaaacatacacctgtttcctaagatttatacaggaccaggtttcctttaattaagtccatgtggatgcatagtcagaatccatgtgcaatgaatgcttctgtcatagtgctaaggaaaggtctccacatttctcaacaatagtatctttccttcctcattttgtaggttaagaagccaacaatctctctcccagcactttctgagactcatttatcaaaggtagcttgtaggtagtttcagagtgtatgaaacactgtaaatgaggtcactaagccaccaacagagtactgaagctattgatccatgctagagatttctgggattacctctggggtttgttgttcccctttctgaacatggaagtaaaaattataaatgtgttctgctcctttggaatgcctggaagggaaaaatcaaacattcttttatctcaatgtaagtaaggcgtatgtctttgacagttgtggatgttcgtggaagagtgcgatgaccttcctgtcttttccctttacatcacactgaaacaaactgtccttatagttaacagaacgttagagttggaagaaactttaaatgatctaaacttctcagcctgtgcttaagtgcctggtgtgcaatacagccaccaggtgattattcagtaagtctctttaaaagcagtatcataaagcaaagaaaccaaccaaaatctcccaacttttgattccagaagagtacagaattctgagcacaggtacctaacatccatactattaagaatcattacttgctagagagcacaggagtaattactacaattacttctagaatttgatgtctaggatttatctgttatcttttgcagtactgtaattttttctagtccaaggacttatctgaatattgaacatttattgaacatgattgtactctatgatcttggaagcagtctttaataaaatacaaaatgattttttaaacctttgattcattaagtaattagcattcaatgtatctggaaacatcgtttaccctctataagaattccaaaacacatgaactggagcttgtatttaaaaaggaaaatgatggtgttcatttcaaggagtagaaaagacttaaagtgagggcgacacttagctacttctgaggatatactatactcaaaacctttaaatataagctacggttcagcagcttttaaaatttcatgtttattcatatttttcaaaatatatgtacattaaaaaaggaagatttacaacaggaaagattgccttacatgcaacacaaattccaatgaattcatgatgggatcacacatgattatgatctaattcaagccaatcttctcaagtccatttcccagccatactttaggctacagaagggatcccaggagacaaaagtggaatgaataagaaacaaacatcttttgcctctggcagtactcaaggggccagaagatgtacttcaaaaactttaagacaattaaaatgtcaagtgccacagggaagagaaatgataaccagaaatttgtatttctagctagtactatttaacacaacttcacaatactaaaacaaatacaaataagaaagggttaggtagttgggcttcatttacttttttccttttctttttttttttaatatctcaaaaaggaagccacttgcttgatatcaaaagtgctgtggaaagaaaggaggggaaaaaaacccacaaataaatgtagaatctagtttattttaccaaactgtatatttttccacttaacatttctacattagcaatgatgtaactctccaacatttccttataaaaaaggcaaacaagaagtgacaactcatgctccaaatattaaaaaatatatttaaacatatgatcaagaagatttgggccgtgagtggtagctcacatctgtaaccccag

SEQ ID NO: 655 - DNA, 2300 bp, Homo sapien
atcattcttaacaaaattaataatttcttagtattatctagtacccagtccatgttcaaatgtccttaattgtctccagaatgatattttacagttgtttttcctaacatggcccacacgttgtatttggttgataatgaccaaccaaaacctctctcccagccaggtgctgcggttcacatgtgtaatcccagcactttgggaggccgaagcgggaggatcgcttgaacctacaagttcgagaccaggctgggcaacatagtggaaccccctctgtacaaaaaaaaaataacaaaaattagctggtgtagtggcatgtgcctatagtcccaactactcgggaggctgaagcagcggaagggttgcttgagcctgggagatcaaggctacagtgagccatggtcataccactgcactccatccagagtgacacagtgagatcctctctcagaaaaaaaaaaaaaaaaggccaggtgtggtggctcacacctgtaatcccagcactttgggaggctgaggcgggcagatcatgaggtcggaagatcaagaccatccttgctaacacagtgaaaccccgtctttactaaaagtacaaaaaattagccgggcgtggtggcacgcgcctgtagtcccagctacttaggaggctgaggcaggagaatcacttgaacctgagggggcggaggttgcagtgacctgagatcgcgccactgcactccagcctgggtgacagagggagaatgcgtctcaaaaaaaaaaaggagtgtttaacccatagggtttaagtctcttagtatgtgcgaagcacttcttagaatagtccttggtacctagtaaatgttcaactaatgttattcttactagtctcagttccagcttctcatagtatgaccattacagcatgctaaataggattctaatatttaaagacataatttttttgttttgttttttattttttatttttgagacagagtcttgctccgttgcctaggttggattgcaatggcatggtctcagctcactgcaacctccgcctcccgggttcaaatgattctcctgcttcagcctcctgagtagctgggactacagttgcctgacaccacgccccgttaatttttttgtatttttagtagagctgaggtttcactatgttggccaggctggtctcgaactcctgatctcgtgatccacccgcctcggcctcccaaagtattgggattacaagcgtgagccaccgcgcctggccaagacattggtttttaatataacatgcaagtcaccttcttaatttgataacagtgatttttttgcaaccctagaagaagaactgggcatattgggtatatagagactcagagttggccttgaagaaggtgtctttggaaattttctaggtctgtcatacagcgttagaagtcaaatgttaaaatctaatcttcagccaggcgtggtgcctcatacctgtaatcccagcactttgggaggccgagtcaggcagatcacctgaggtcgggagttcgagaccagcctgaccaatatggagaaaccccgtctctactaaaaatgcaaaattagccgggtgtggtggcgcatgcctgttatcccagctactcgggaggctgaggcaggagaattgcttgaacctgggaagtgaaggttgcagtgagccaatatcgtgccattgcactccagcctgggcaacaagggcaaaactccacctcaaaaaaaaaaaaaaaataataataataatagtaatcagaactctagatctgggaataaccctgtatctatttctttacatttttctttcattaatgtatttatcactattttttttttgtttttctttgcaggcctcagctgttgaagaacgctctgcagagagcagtagagaggggccagttagaacagataactggcaaaggtgcttcggggacattccaggttagagatcagaggcctggttgtggagaagtgcttcttaaagtttttggtttcaggacctccttatactgtaaaaatttattgaggacctcaaagaacttttgtttatgtgggttatatctgtcaacatttactatgttagaaattaacattgaggtctgggtgcggtggctcacacctgtaatcccagcactttgggaggctaaggcaggtggatcacctgcggttgggagttcgagaccagcctggtgaaaccctgtcgtctccactaaaaatacaaaaatgagctgggcgtgggggcacatgcctgtggtcccaactacttgggaggctgaggcaggagaatcacttga

SEQ ID NO: 656 - DNA, 2300 bp, Homo sapien
gtgagccaccatgcctggcccttttgtgtttttttttaaattattatttttttttcttgaggcaggctctgctctgtcacctaggctggaatgcagtggctcgatttcaggttactgcatccaaaaccttctgggctcaagcagtcctcccagtctcagcttcccaagtagctgggactacaggcgcatgccaccattcccagctgatttttaattttttttttttagagacaacgtctgtattgcccaggctggtcttgaactcctgggctcgagtgaacctcctaccttagcctcccaaagtgctgggattacaggtgtgagccaccacacctggcctgtttttaaattttaatttatttacttttggtaaagaccaagtctaatgttgactaggctagttttgaatttctagcttcaagggatcctcccacctctgcctcccaaagtgctggggttgcaggcatgagctactacaccaaatgggaaagtatttttttaaagatgcctatgaacggagactcctgaaggttgttgacttcacggtagcattttcagcctagctagtgttatcgtgggttaagaaagataaattcattagcaatataactttactaaggataacctgattgtgatattgttttatttccatatcatatttgcatgtaaaaataccagcagatttgcataaggctttttatcattaagaaaaatgggccgggtgcggtgggtcacgcctgccatcccagcactttgggaggctgaggcgggcagatcatctgagatcaggagctcgagaccagcctgaccaacatggtgaaaccccatctctactaaaaatacaaaattagctgggcatggtggcgcatgcctgtaatcccagctactcaggaaggtgaggcaggagaatcgcttgaaccaaggaggcggaggttgcagcgagctgagatcgtgccaccgcactccagcctgggcaacagagcaagactccgtctcaaaaaaagaaaaaaaaaatttaatattaatggatattctggttccctaagtatgagtgtgttacactgcactgaattctttcagctgactgaaagatttccttgcagctgactgacaattgacaagtctggtattgttcttggtgttcccataaaaatattttcccgataagtgtgaatgcatcctctttgtttcaatcttccggatttatcctagttgttgtaggttgggactgttacttgccaagttgaaagctcttcaattcttagacaaggttagaccttaatgtagaagttgcatgactgtcattccctactcattgttaatagttcattagcacagagatctagatacttaagtggtcttttttttttatattgaggaatttttgtataaaatgtcattgagtctcagatgagatttttggggaagagggggtgttagtgatcaggtaaacttgggtgactgcatgggtttttatctttgaatatttaattatattcttctgtactagttttccttacattaaaaatatgacagtcttagaagcatacttttattctcctaggtgatggtctaaatttgcttctgtgggtctggaagctattagaatgtcatgttattcagcagtatttttccccttgtgttttcccttaatagaaggaaaaaaaaagtactttaatagagatagagtttaagattacagttaattttcctgactctttcgagaacagtaacaacaaaagccttctcttggtaaactgatctttgactaactgttccttagtctctttattctatccttctaagttcctgatggtggcaggaggggatggggttaggttccttaggagcttccttgcccttgttgtctttgttcatgtggaaggtgcaacagctgccgtggcttatgcattcgtcttagttgctgctttatgtagtctatattttggtagttttatctttctgagtaaccaaatcatctgtcacttacctataaattttatagttatattttttccctttggatgtgtattaaatttagacgttttagtttagttttgtttctgttaatcttcacaccaggtcttttctgtgctttaggttgattcttcaccacactgaaaccattaggaaaaatccttgtggttaacagcagaggcttcagagtgtaacctgtactcgggcctagaaattatttaaaatggcgactgatacgtctcaaggtgaactcgtccatcctaaggcactcccacttatagtaggagctcagctgatccacgcggacaagttaggtgaggtag

SEQ ID NO: 657 - DNA, 2300 bp, Homo sapien
tggagcgcagtggtgatcatagctcactgttgcctcaaatcctcggcttcagcgatcctcctgcctcagcctcccgagtagctgggactaaaggcctttgccaccattcctggcttatttatttatttagagatggggtctaattatgttgccctggctggcctcgaactcctggccccaagcctcatgcaatcctcccacctcggcctcccaaagtgcagggactacaggcgtaaaccaccatgctcggcctaagttttgttgttgttgttttaagcaaaaatctgtggaggaggaaacatctcccagtttgctctcatctgagtctgcttcttacatgagatgggtctaaagacattttagggtaaaagaagaacggtaggatgttttaaatgtacgaatacataaaaatggaagtctttgaaaaggaagacaacagaaacgttaacaacgaagggagtgagcagaatgaagaatggcataaaagagcaaaaccccttctgaacagctggaatatgacaccagagtactaaagactggtaatgccatcaggatatgaatgataacgcacacctcgtaaagaattttttatgctggctgtgaaatttgaactgatagagtggggtggctgtggcagggaaagctggtgagacaattatgctaatggcagggccagacgactgggtgagtgcttaaatggtgtcgtaagtctttataaaccttggcacatacgtttgagtactggtcatctactgtaagcttgggacaattctactggtatttccttacatttattacccagtccctcccctgtcccccaacacctgaaactttaaaaacaatctttccaaactagctttgaagagctgtacttttccttcgtatgtacgttgtttaagtacgctgatagcaacgcaatatgacaattcaaagggaatcccgtcttctaatctcagggttttcattctggggaactctccctgcatgtgaggattagggagcccggaaagcccgtttcaacttttcagttctgagtcccgagtcactactctgccctgtaccgtctggagacttaatgggagcgagtgcgaggcagtgaattctccgctctctagttttccaattctacggtcttcaaaaaaaggtttgctcttgagctgcgcctaaactgagaagcgggaaaggctagccccgctaaaggcggacgagtggcagaagcggaaacccagttaagagaagggactgccctggagagcacagaaagcgaaggttagcgggggaaagcggcgcccctccgaggaaaccgacaccgccccgccacgccaaggcaatgggcgccaccacgcagcgccgggaacgcgcgccgacgccccgcgctccgccggcgtccgcccgtccccgcgcgccccctcgcaccccacgcgcgggaggcggggccggcgggggcgcgcgcggggccgcgggtaggggggcggggcggcagagctcggcggctgggactggaggacagcggtggcggaggcgactagcggcggcgggagcggcgccgagaggccgtgcgggacgcgggcgccaggaccggccgaacgcagaggtaacgcaggaccgaacaggcggccggggagtgggcgcgggctcgctgggccccgaaggcgagtggcggaggccgctcgcccggggcgccgacgccgctcccagagaggagggggcggggcgcccgggtccccggaggtggcgccttttgtctgccttacccggccgctccgccccgctcccttcctctctcctgcgacctagccccctgcccttttggtggactcctcctcaggggccctccggcgcgcgcgctcccgcccttgttttgtttggatttgggggaggagggggagctcttctctggccgtgcgaccctgcgtcccagcgcgcctgcgtcggcgtcctctgcccgccccgattggctgagggctgcgcatgctccgaggcccgccgcggtccggcgtccgcccgcgccctcccctcaccccactccctcagcggttttcggagccggttcgaaagatgccggcggcggtgactggctgcggcgggcccgccccccgggttctccgcccccgccgccgccattacggagctcccagtggtgagtgtgcggagcgccgaggctcgcgttccgccgctgcttccgtcgccggggcgggcgccgcggtgtccctgccgagcgtgagccccgaactgtcaccgcgccgagccccagcctcatccgtcggtgtccgcggtccgagctttccccgcctcgctgg

SEQ ID NO: 658 - DNA, 2300 bp, Homo sapien
ttgttgcccacgctggagtgcagtgtcatcatcacggctcactacagcctcgaccacctgtgcttaagtgaccctcccatctcagcctcccatgtaggtgaccacaggcgtgtgtcaccacgcccagctaatttttttttttttttttgatatggagcctgtcacccaggctggagtgcagtggcgcgatctcagctcactgcaacctccctctcctgggttcaagtgattctccttcctcagcctcccgcgagtagctgggactacaggctcgtgcaaccatgctcagctaattttttgtatttttagtagagacggggtttcaccgtgttagtcaggacggtcttgatctcctgacctcgtgatccgcccacctcggcctcccaaaatgctgggattacaagcttgagccaccgcgcccggcctaatatttttatcatatatagaaagggggtttctccatgttgctccagggtggtcttaaacctcctgggctaaagagatcctccttttgggaacctaggcttcccagagtgctgggattacaggcatgagctaccgtaccccaccaagattgttttgagacagggtcttgctctctctgggtggagcgcagtggtgatcatagctcactgttgcctcaaatcctcggcttcagcgatcctcctgcctcagcctcccgagtagctgggactaaaggcctttgccaccattcctggcttatttatttatttagagatggggtctaattatgttgccctggctggcctcgaactcctggccccaagcctcatgcaatcctcccacctcggcctcccaaagtgcagggactacaggcgtaaaccaccatgctcggcctaagttttgttgttgttgttttaagcaaaaatctgtggaggaggaaacatctcccagtttgctctcatctgagtctgcttcttacatgagatgggtctaaagacattttagggtaaaagaagaacggtaggatgttttaaatgtacgaatacataaaaatggaagtctttgaaaaggaagacaacagaaacgttaacaacgaagggagtgagcagaatgaagaatggcataaaagagcaaaaccccttctgaacagctggaatatgacaccagagtactaaagactggtaatgccatcaggatatgaatgataacgcacacctcgtaaagaattttttatgctggctgtgaaatttgaactgatagagtggggtggctgtggcagggaaagctggtgagacaattatgctaatggcagggccagacgactgggtgagtgcttaaatggtgtcgtaagtctttataaaccttggcacatacgtttgagtactggtcatctactgtaagcttgggacaattctactggtatttccttacatttattacccagtccctcccctgtcccccaacacctgaaactttaaaaacaatctttccaaactagctttgaagagctgtacttttccttcgtatgtacgttgtttaagtacgctgatagcaacgcaatatgacaattcaaagggaatcccgtcttctaatctcagggttttcattctggggaactctccctgcatgtgaggattagggagcccggaaagcccgtttcaacttttcagttctgagtcccgagtcactactctgccctgtaccgtctggagacttaatgggagcgagtgcgaggcagtgaattctccgctctctagttttccaattctacggtcttcaaaaaaaggtttgctcttgagctgcgcctaaactgagaagcgggaaaggctagccccgctaaaggcggacgagtggcagaagcggaaacccagttaagagaagggactgccctggagagcacagaaagcgaaggttagcgggggaaagcggcgcccctccgaggaaaccgacaccgccccgccacgccaaggcaatgggcgccaccacgcagcgccgggaacgcgcgccgacgccccgcgctccgccggcgtccgcccgtccccgcgcgccccctcgcaccccacgcgcgggaggcggggccggcgggggcgcgcgcggggccgcgggtaggggggcggggcggcagagctcggcggctgggactggaggacagcggtggcggaggcgactagcggcggcgggagcggcgccgagaggccgtgcgggacgcgggcgccaggaccggccgaacgcagaggtaacgcaggaccgaacaggcggccggggagtgggcgcgggctcgctgggccccgaaggcgagtggcggaggccgctcgcccggggcgccgacgccgctc

SEQ ID NO: 659 - DNA, 2300 bp, Homo sapien
gctactgatttgtgtacatttattttgtaacctgaggctttactgaactcatttatcaaatctaggagtcttttggaggagtctctagggttttctaggtatacagttatatcatctgcaaacagtgatagtttgacttcctcttttccaatttggatgccctttatttctttctcttacctaattgctctagctaggacttccaaaactatgttgaatagaggtggtgaaatgtaggcatccttgtcttgttcctgttgtcagggagaatgctttcaactttttcccattcagtatgatattggctgtggttttgtcatatatggattttactattttgaggtaagtcccttttttgcctacttggttgaggattttatcataaagggatgctggattttgttgaatgctttttcagcgtctattgagatggtcatatggtttttgtttataattctttttatgtgatgtatcacatttattgacttacatatgttaaaccatctctgcatccttgaaataaaacccacttgatcatgataaattatctttttgatgtgctgttgcatttggttagctagtattttgttgacagtttttatatctgtgttcatcatggaaattggtctgtagttttctttttttgtgtgttctttcctggtttaggtatcagggtgatactggcttcatagaatgatttagggaggattctctctttcccagtcacttggaatagtttcagtaggattggtaccagttcttctttgaatgtctggtagaatttagccatgaatccatctggtccaggctttttttgtgtgttggaaattttaaaattactgattcaatcttgctgcttgtcattggtctgttcagggtttgtctttcctctgatttaatgtaggagggtggtatgttccaggaatttatccatttcctttaggttttatagtttgtatgcataaagttgttcatagtagtctcgagtgatgttttttatttctctggtgtttgttgtaatgtctccagtttcatttctaattgagcttatttggatcttctctcttttcttggttattctagtgaatagtctatctattttttcaaagaaccaatgttttgtttcattgatcttttgtaatgctttttttgtttgtttgtttgaatttcatttagttttgctgcaatttctgttatttctttttttttttttttgagacagagtcttgtttagtttgtgcttgtgcttgtttttctaattccttgaggtatgacattaggttgtcagtttgcactctttcagactttttgatgtagacatttagtgctgtaaactttgctcttggcacttcttttgctgtactccagaggttttgataacttgtatcattattatcatttgattcagataatttttccatcttgatttcattattaacccagataccatgtagaaacagattatttaatttccatgtatctgtgtagttttgagggttccttttgcccccaagaactttaaaaatcattttcttaagccctcttaagtctgccttcaagcttttattttgagtgtccgggtttcctctcatcatttctgaccttggcaacctttcattgctttcaaggatgttctctattgcagatgtgtattgtcttgtcaggtcagtgtttaaagaaaaaacaatatttcatcaatctgaatgctgttagcccaagcatacaccctctagtttgttaagttgttctgttattatttactcccttttgcatcacatattaaggtttctgaagggatttgagtttgtgaccccttcgttataaactatttcagggctaggcgcggtggctcatgcctgtaatcccagtactttgggaggccaagctggggggattgcttgagcccaggagttcaccagccctggcaacatatcgataccctgtctctgaggcaggaggattgcttgagcctgggagtttgaggctacagtgagctgtggtcatgctactgcacttcagcctgagtggcagagcgagaccctgtctcaaaaaattgaataaaataaaatatttcaacaggtgtttgatgtgctctccttgttttttttttttttttttttgtaaattatactgtagtctacctaagttgctgaggttctaagcctaggactcacctttaaatcctcttaatttcactctccacagtcattacatcagcaagtcccatttgactcattcccaccaccttcactgctgttattgtagcctaagccactttgctctccttagacaacaggaac

SEQ ID NO: 660 - DNA, 2300 bp, Homo sapien
gtggcggccgggcagaggctgcaatctcggcactttgcggggccaaggcaggcagctgggaggtggaggttgtagcgagccgagatcacgccactgcactccagcctgggcaccattgagcactgagtgaacgagactccgtctgccatcccggcacctcgggaggccgaggctggcggatcactcgcggttaggagctggagaccagcccggccaacacagcgaaaccccgtctccaccaaaaaaatacgagaaccagtcaggcgtggcggcgcgcgcctgcaatcgcaggcactcggcaggctgaggcaggagaatcaggcagggaggttgcagtgagccgagatggcagcagtacagtccagctttggctcggcatcagggggagaccgtggaaagagagggagagggagaccgtggggagagggagagggagagggagaggagggagagggagaggagggagctaggaatttgttttaatatttttatacctgtatttcaatatagatcatttgttgtcataatcctatgtattttatgtatttaataacacgattctgagaagtctgtattttatgctagattggcaaagggtttgtgttcctctcaaatttaagaactattccttaaggagaatgacttctttcattttagcagaggacagaactgcccataattcatgaaagtttgcaaaaccatcagtgttaagtctgcattagtgtatgagagggaagagctggctaggattgattggtagacacttccactaggggtctgagtaaagtggtttcatatccgtaatgggctgatgagcaatttattgcctgcaaaaaacggagaaaatgaaatttttggttacgtaaaaacatgctgattatttttcagttgtataaatttgtgattattgtattatattagaaaatataaatgagaaaataaatacctgtaatgctttctgttaagattttggtatatctctttacagatctttaaaaatattacatatacatgtttttagatgtatgtgtgtgtattatatgcatacgtaaacaaataatgtatatagaaatattcctacacatgtgtatgtatatgtatatttagatgtcctttttaaaaatttttttgtatttaaagagatagggttttcctctgtcactcaggttgtagtacagtggtgtgatcatagctcactgtaagccttgaactcctgggcccaagcagtccttttgcctcagcttcccaagtaactatttctacaggtggatgccaccatgcctagctaatgaaaaaaaaatttttttttataaaatacagttgaagtcttgctatgttgcacaggctggtctgaaacttctgttcttaagcagtcttcctgtgttggcctcccaaagtgctgggattacaggcataagccacagcatctggccagatatatgtttttaaagacaaaaatgagattatgtcgtataagtaacttgccatttttggagtttagatttattgagatgtaatttagtaaaattcaccctttttagtgtatacgtccataagtcttgacaagcagagacattcaattctcactataagcatgatacagaacagttctgtcaccctcaaaaatctccttgttcctcttctgtagtcatctccttcctctttcaaccatttatttcttttctgttccttttacaaaatggtatcatacagtttgtagtttgaagtattgtttctttcctgtagcatgtgttttcctttatgatttttggttttgagatcatgcttcaagaatcttttatcaaattgatgagaatattcatgtatatatttttaaagaattctgtttttttcaattttaaaaattttaagtgtttgttcagtctcgtgcttattttagtgtaagttgtgaggtaggaaatccaattaaaaatcagatagttcagctgtatttattaagattgatttactaatataatgttcttactaaatattgatttcctcacaggtaacacaagtggcaagacagccgggaacccctaccccatccccttattcagcacatgaaataaacaaggggcatccaaatcttgcggcaacgcccccgggacatgcatcgtcccctggactctctcaagtaagataaaccttttttaaaaaaataagaaatgtccctgtaaaggcatcatttttgtttttctaaagagactcctaagcagtaacataaaacattacttgtatagtaatttcaagtttgtctttggcatcttttcagacttaaccgttcataaagatggcta

SEQ ID NO: 661 - DNA, 2300 bp, Homo sapien
aaaaaaaagcccaatatttaggaaagagtgttaaaatactcttcttttttcctggtctaagaccaggttttttccacagacttcaaaataacatgtaacagattaaatgcagaagcacatgtaagaattcattcttctgtctgaatccatttgatagaatttaaaaaaaaaatcattcagcctaagaaagcttattaaaaaaagaaaacaagaattcagctggtctaccattaaaccagacatgaaagtgatttgcaaaaaatgtacagtgctactcttctccctgcattaaaaaacattacatagctcttttttttttttttttttttttttttttgagatagggcctctatcagccaggccggagtacagtggtgcaatcatagctcactgcagcttcgactcctgggctcaagccattctcagcctcccaaagtgctgggattacaggcatgagccactgcactcagccctttttctaaatatttatatgtttctgatttttaccactcacatttattttaaagtctttataagttggctatctttgagaaatggcatttgatttttcaaaactttttttggtagagttttaaatttggacttacgatactggataagtagtgattagattgtgctgaaatttatggaagaaagtcactttgagtatgccccttctacataagaacatagaatgtgctgaaaagctttctatttgagaatatttttattataacatgctttcctttaggcgttttattttgaaatgaaatgctgctgaatgctataagaaagaaaacatctttgtgggaattgggtatatctagaatgagaaagtaaaatattgcctgtagaatttttatacctcagaaaaaccaaataaagtaacattgacttcacatgggtatccatcttaagaaattatgtttagagttttgatagtttgtaggatttttttttctcagtaagggcattttaattgaatttaggaagtaaattataaatgatgtaaaagtttgtattcttcctgttaatgttataaccaaaagctaaaagataatgtagttcactgttttgcttagtgatcaaaaattttattttgtttattcattgctgttcactggaagacctgctgtcttgggtggctctgagtggggtgagattgacttgtagaatggttttcaactcttactggttgtgaatttacaaatacaggtagtgaggaaaagtttttccagtgtactctgatattattgagaatgatgactacaggatgaaggaagagaattatattttctgagtggtggtagctaatattttatgttactgttgataaccatcagatcattcttctttaaggggaaaaatagacttaattaaaaagtgtaagtggaggcctttggagaagagtcttgctaataaagggggtaatgattttttccataattttccttcatagctggcatggtgagaacaagtatatttaataaactagatctttggcctgtgacaattgggtgaattaatttggctaatgacactagtcatctagatgtaagaaaagcagttttctctctgacccttctgtgaaaaatactttgagcagagaactgttattattctgtagttgataagctgctcaccttgggaatagctgttaaatcagaattaacagctttcatggcagagagacattctttcaggaagtgaataaatgcatgtaaaagttcaccatgcaaagtagcaaaagtcaatcagtatctttcagaattttgtcaaatgtgtagcagattgcattctttttagtttcttttttgtatgtcatgatatgtatatatctatctcacatgctcccacggacctacttttccttgtaataatattttattgtagcttttctaagctctaaagaatgaagttaggagatccgttggtgctcttaattaggaatctgggagagatgtcttaaaggctgtgtcacctggatagtccacggaaaggaaaactcatgatctttatggaagagctatgtataataatgaaatactgcttagtatgtgctaagcccatcataagccttattttgctaattctttccagcaatcccacagagtattgatgaggaaactgaagtttggagcgatcacatcattttcccaaggtaatctagctggcaaacgaatctaggattcaaatttttgtcttttccagcttcaaagtctatgccttcgtagagtgccacttgttagtactcaggaatgtgcaacacattctaaaagcaacagaaattgttcattttg

SEQ ID NO: 662 - DNA, 2300 bp, Homo sapien
agtgaagaaaatccaccggcatcgcctgagccccgctaccgagaagggcgccgcttcctccggggagggggataaagatcccccgccgccggcccatgaggatattgccgtgaaaggtccggtctctccgcctcctgcccccgccgggtccggccccccccctggggtcgcgttgtcacggagaccggcagccggtggtgctggcccgcggggcggctgctgctgccggcggcggcggcggcggaggcggcggcggcggcggcggcggcgtcgggcgtgtgtgaccggccccggccccctcctcctcctccccccaggctccccccagccccccgctcccgccgcctccccgggtctgcccccatcccgcccccccgctgcccccggcccctgcaccccggcgcgcccggtcccgctctgggggggttggtggcttcgctttgccatgagtttaccgcagaaaccggctctgaaatcaggcacagcgactgcagcaggaaccggacccggcaccggagcggcggcggcggcggcagcagcggtaccgcctcctcacccggcggcggcagcagcggcggcggcggcggcggcggcggcggcggcggcagcggtcccccctcctcacccgaacatcagggccctccagactcaggcgccccaacagtatccttttcaccttcctgtcggcccttcggttctcgtcgtcgcagtccagggggaccccgcagcccaggggaccctcctgccggccgccacagcccagccaggaaagggacagcggctcaagcccctgcatcgggcttgggcggagcttttggggtgccccggcagcagcactgcggggggacccccagaccctctgcaatactgtgaaagctagccccacttggccatgcttctgcagccccttccttttagagcttggggtcccttctcccctcctcccctaaggtaccctccccccctttattgggcagaatttgcttggtgcctgggaccaaccctgcagggaaggcttttctctggttgttgtgaggattacaccctcctgctcttcacctcccctcggctccccctacagcgggacacagtgggcttccataattattattagtacataataaactttatcggtaaatttcttgtttgaaaccaatcagctcgtttccgaggtatgttggattttcagtctaaggtgaaaatgtacagaaagcagttcctctggataattttttttagtaatgggagagttgtgatgtggtttgtggtagagatctgaggaggaaatgtgacgccggacgcttccctgtctttgacctttttaaaggaagaggaagttcaccgacattacccatcacccacaaaagtctcacttcttggaagatttgtgttaggctgaatatttttaatgggctttaatttactcctcataggcctgatgtctagagagttaccagggcttctggaggaaagtctagtattgaatgtttctaatttcatgttatttgctcgattgtagaattttggagagctttgattgaaaagacttggtgatggggtattttagtcaaaaactagccggtgaaggtaaaacgttgaattcatgtattccacggagatttagaaaggtattgcgtacctgagaataacatttcatcatgcatcacctcctccctacacccactgtatttgtgtaaatcaataaataatgattggatgttagatgtgttgtgtttttatgtttgtgtcatcgtgcgtttgacttttagagattgtaggatgtttgagcaagtaagaagctaactgctgtgaggtccccagattatttcacagtctgtagtttgattcttgtctgtatagattactttgagaagggaaagcaatctcccttctagagtcatttcaggtcattgtttgttttctgccaagtgtcattttctctgttctttaaacctagttcgtgattttcaatccaggcaccgcggtgcagtgtaaagataaattccattccagtgtgacgtgtgtactgatttcataatgtttttatcctgcatgattctgttcaattaggaattgttcaccgatgagaaagtgtggtgataacttagcgttgcttatggaaaacctggttggttttgttcagtgtctctggggtgggggaagattggctggtttgcctacttaaaggcagagttcagtgttgaatcttttaaacctgtctttgcttactactttgtgagtttaaattcctttctaatttcattttttaccttgattgcctatactcggttaggactttt

SEQ ID NO: 663 - DNA, 2300 bp, Homo sapien
atccagacagtttaagatgccacagtatgaagtagctgctgtcttccagtctggagatggggatgaggcatccttttcaatgtcagaaactgtggagctctagctagaaagacgccgtaggggggttgtggtatcactctctttcagatgctcttttatcctagaaggagcatttggggctcccagggattgtcacgaattaagcatccactatgtgtagagctttatatgaattaaaaacaacaataggccaggcgcggtggctcacgcctgtaatcccagcactttgggaggccgaggcaggcagatcacctgaggttgggagtttgagaccagactgaccaacatggagaatcaccgtctctactaaaagtacaaaattagccaggcgtggtagcgcatgcctctaatcccagctactcgggaggctgaggcaagagaatcgcttgaacatgggaggcggaggtttccgtgagccgagatcgtgccattgcactccagcctgggcaacaagagcgaaactccgtctcaaaaaacagcaacaacaaaatagtaaggcagtgtgtgaagcaggatagcaggagtcagaactagactctaatcttagctctgccagccacactgtcggtgcgacctcggggaagtcttttgtgcgttttgagcctcaattttctcagcttttctgtggtttgatggtattgagcctccccagtctcagtttattcatttgtaaaatggatactacctatttcacaggactgcttgagataatgaagggtacagcgcttagtgccatgtctggtaaatattatattaaaacttgattgctccatgacgcctgccattttttttttttttttgagacgaagcctcactctgtcgcgcccaggctagtgtgcaatggcactctctcagctcactgcaacctccgcctcctgggttcaagtgattctcccgcctcagcctcccgagtagctggtgcctgccaccacgcctggctaatttttgtatttttagtagagacgaggtttcatcatgttggcaaggctggtcttgaactcctgacctcaagtgatccaccggccttggcctcccaaagtgctgggattacaggcgtgagccaccgcgcccggccgatgcctgccattctttcccactcaatgccactgtgcttaggacaaggcacctgctaaggagtggggtgtgcggggttgggggtgggagtgatcttggcaggtctagctgggaagaaaatccttatcaacaaatgtcacccagcataggacattggggagctgatcactggctgctggtcaaagggcgctccagtcctggggaaggcctaggtttgaatccatccacagagctcagttaaggctgctgattagatatggcggctcaggtcatgtccccagccaatatgggaggcggcaaggttcatccagatgaaggtggcatttagatttaggctctgtcctttcccgatagggtgaccttgggctagtcacttttcctctgtgtcctctggaaatggggctcctcattcacctctcagagcgtctgaggaagtgtcgacacaatgggtgtgaaatgcgtgggttacaggccggcgggtggcattggttacgcgaagtccccgcggggggtccctatccaacgggttccattccggttaagcggttccttctccaggggtttttcgcctcgccgctgcctctccgcccctgcgagcggggctcagcgaacagccgactccggggccattaccattgttcttcgaggctgggccgcaggggaggactctcgcaagccagacctcgcctttggtctttccctccgccccgcacccgcgccgctgtaagccagcgaagcctccctcgccgatctttgccgaggaagcgagttagcccctgagccctcccgaacggcggccgaggacgcacccgagcgtctccgaagaatcccgacccctagcagtctccggaaagagccgaagaggcttcccaccctcggtttcccgagccattccgaaaaagtccgaagttttccgagcagccgtcctgccggactgctggaggcggccacagcgccatgttggatgctctgctcgttgagtgaagaaaatccaccggcatcgcctgagccccgctaccgagaagggcgccgcttcctccggggagggggataaagatcccccgccgccggcccatgaggatattgccgtgaaaggtccggtctctccgcctcctgcccccgccgggtccggccccccccctggggtcgcgttgtcacggagaccg

SEQ ID NO: 664 - DNA, 2300 bp, Homo sapien
tgagacaggatctcactctatcaccgaggctggaatgcagtggcacaatcacagctcactgcagccttgacttctccagctccagtgatcctcccacctcagcctccccaggagctgggaccataggtgtacaccaccatccctggttaattttttttttaattttttgtagagatggggtcttgccatgttgcccaagctggtcatgaactcctgggctcaagcagcccttccaccttggctcccaaagtgctgggattacaggtgtgagccaccgcacctggcctcccctgctgttataatgggggcagtctggcagcccgagggccccacagtgaccctggcctctccctgttgccccttcaaaggtctggtgctccgtccgcacacctgagagctcccacgaaggcctcatcaccgatccccacagcccctctcgcttccgggtcatcggctccctctccaattccaaggagttctcagaacacttccgctgcccacctggctcacccatgaacccgcctcacaagtgcgaagtctggtaaggacgaagcggagagagccaagacggaggaggggaaggggctgaggacgagacccccatccagcctccagggcattgctcagcccgcttggccacccggggccctgcttcctcacactggcgggttttcagccggaaccgagcccatggtgttggctctcaacgtgacccgcagtctgatcccctgtgaagagccggacatcccaggcacacgtgtgcgccaccttcagcaggcattcgggtgctgggctggtggctcatcaggcctgggccccacactgacaagcgccagatacgccacaaataccactgtgtcaaatgctttcaagatatatttttggggaaactattttttaaacactgtggaatacactggaaatcttcagggaaaaacacatttaaacacttttttttttaaggaaagaattggtatatttattatgttctgtttttctaaataacctgtggacaagggaagccccactgatttactccctctcttccccactccctgtgaggctgggctgaggcacggatccctgggccacagagcaagtctccaaatcagacagctgcctcagcccctgggatgtgtgatttcagctcctgtcacctcatgcaagggcgtggagaccagtagaggtgtggaggccaggcagagagaggagcctgctctgcggggggcccagctcatgggcactgccccttcagctagcctgcctccgtcccctgagtccaacagtgggagccctagctgggaagttctgatccccaaagccacagcaggggactgatggctatagcagaatgaggtcgggtcaggaccctcaaacaccatctgggaacaccaagcaccctgaatcgagactgcaggagccctgcggggtgagactgtgtcagagatacactgctggccacaagtgtcccctctcagtcccaccttttcgggctgtcccatgtctatctcaggggcccgttacctctctgcagcagtcccccatcccagccacaccagggtctgtccggccaaccctcttccccagggaaaggagaaaagagaaaacaggctgggcccggtggctcactcctgtaatcccagcactttgggaggttgaggtgggcggatcacctgaggtcaggagtttgagaccagcctggccaacgtggtgaaaccccatctctactaaaaaaaattacaaaaattagccgggagtggtggtgggcacctgtaatcccagttactcgggaggctgaggcaagagaatctcttgagctcaggaggcagaggttgcagtgagctgagattgcgccactgcactccagcctgggtgacagagggagactccgtcccaaaaaaaagaaaagagaaacagctgtcacctcccgcaggacccaaatcctctctctgagcaccgtcatccaccacatggctgggcctggctcccaggaccagtccagtcctctagtgccttatctgaggctgcagccgccagtctccaccccaaggagacagcccctgctcctagatgcccttggcctccgcagtgcagcccccaggtgtcctgactgaagcacaggccatagccccatttccccggtgcctgcagggctaacctccacgggagcccaggagctctggccggcaggtccatggcacagggcatcggaagactgcaaaactgctggacttaccctgggctgcagtccattgtcggcccctgggttgaatcaagatagtacttgcagctagatggat

SEQ ID NO: 665 - DNA, 2300 bp, Homo sapien
ccattccttcttatctggccagctcctacttattctgactgacccaggccagacatcacccgttccaggaagccctccctgattgaacccctgcccaccccagtctgtttctttatctgcctccctgctgggctgtgtatttccagcatggccctgagttggtgctcagctgttagcacatgacacggtgtcactgaacacgttaccccaccttcaggagacccttcctgtcttgtgggtgtgggttttgcaggaagcatctcttggaacagaggagaaccccaagctgccttgggtgtgagaggcctgggctgtcggcccccattgctgctggctggtgtgtccctcctcgggcagggagggccctgccacaccctgcacttcctctcattgtgcctcccttcctgtttagctagactgttaggctggagggatttttcctccctttcaggacctgaatggagctatttctccttgcatctctgccaacatctcccaggatccacctctgatccactggtgggctcgggcatcaacagctttgggttccaatcccagctgtccccattcagctgggtggtgagaagccagggtctcacctctctggacctcagtttcctcacttgtaaaaagaaaaataacaaggtggctcgcgtgtttttgcgtgggattatgagggtttaatgagctaaggatgtctgtgcttctgggaagtgtgagccatggctgtgtcacccttgtccctgaccccgctgatgtgggggctctgcagagagcccagctgggtactcactggatgcctgcaagtccaaacatcctgttcttttttgaactcctcactggagaaacagggaaaagctgtagttttttccttccactcatatcgagtgacacaaaaaaacaagcctgtcggggccgagctgcttgactctctgatgtttgggagcagatccgagcagctgagcagggtggctgttcctttcctggattagggctgaatctgtgggaaccagaccacccctgagacaggaggcagccctgatgcctctccagggcctgggcctgcagcggaaccccttcctccaagggaagcggggcccggggctcacgtcttccccgcccctcctgcctccttccctgcaggtgaacttccacagcccccggagtggccagaggtgctgggctgcacggacccaggtggagaagcggctggtggtgttggtggtacttctggcggcaggactggtggcctgcttggcagcactgggcatccagtaccagacaagtaggtgccttcgtgttgcatggtgggcttgactcactcctgcacccggctccgtcagctcgggcgaggggggcttccctgcttaagccggggcagggctctgaggctaaggagggagccaggcccaggggggtctgggtgctgagatagaccaagacccgggaagtgggcagcgtgggtgatataaaggtctcgcacttgagtccacatcctgtcccagcaacttactggctgtgtgacctcggacaagtcacttattccctcagcctgtgtcttctctaatttaaatgggaaaacagtacccaactgggggatgggtctgcggactagagataacatatgtcccatagctggtgcctcgtaggacttcttcaactttagctctgggtactgttgttgctagaatgtggggtaattacacacataggctgacattgtctgctatctctagttccaataaaataacaataatgccctctgtttactgaattatttcctcggaccaaatacccaaataccacacccctcgcttcagatgcaatctcatttcctcctggaggcagccctgtgaagtgtggttacttttggccccttttccatattaggaaactgaggcactgagatagagtgacttgctaatccaatgcggaagttggaattcacccacaggctactgggctcaagcccaggctccacctccctttgtaatccaagtacgctccagagcgcattacacccccaggagagctgcccttccagatccagctgcccatcgtgttccttgatcggtgcctttgtcccactttgaatggtgatacaattgggccactctgatcctgctgtaggggtctgagactggttctctgtttccaactaagtggatctagccagctgcctcacacagagttgatgctcagtaaacacttaagaagtgcgaaggggtggatccaagttagaaataagaatggggaattagccaaagccagggcctctcagtcccctgtgccccaacatc

SEQ ID NO: 666 - DNA, 2300 bp, Homo sapien
aggatgctgtaacagagaatttgggggactgcttagggttcctgggacatttgaggagctggtaggctgagatctgaagttggagctgaccatgggaagagtagagaggaggaaaaaatgttccagatagagacaacagcagctacaaaggtcttgggggaagaagaaacttgtagaaactgaggagttgtgtgaggaggttggtgggggagggggcgctggcagcacaagatgagggcccagagtgggcaggggccatggggcctggtgaagggtttggatttcattccaggacagtggagggtttttaagcaagggagtggtaatatcagaatttttttttattttatttatttactcagacaagatcttgttgtgtcgtccacgctggagtgcagtggtgcaatcacagctcactgtagccgccacctcctggcttcaagcgattctcccacctaagcctcccaagtagctgggactacaggcgcataccaccacgtcctgctaattaaaaatatataatatataaatatatatatatatattttctttttgtagagatggggtccgtgttgcccaggctggcctagaattagactcaagtgatctcctgcctcagcctcccaaagtgctgggattacaggtgtgaaccactgaacccagccagatttctgtggtttgtttgtttgagatggagtctcactctgtcacccaggctagagtacagtggcacaatctcagctcactgcaacctcgacctcctgggttcaagcgattcttctgcctcagcctcctgagtagctaggattacagatgcatgccaccaggcccagctgattttttgtatttttagtagagatggggtttcatcatgttggccaggctggtcttgaactcctgacctcaagtgatctacccaacttggcctcccaaagtgttgggattacaggcgcgagcgagccatggtgcctggcctcagccagatttcattttaaaggctcatcctggctgctgagggggctgtcagagggcaggagtggaagccaggagaccatctggagccattgccctcactgtccctgtgacgtcaggcccctcacccctctaaacctgtttattcacacatatgtgtgactgtgagaatcaaatttggaatgagcagaaatgcactttgcaaagctgaaaagtacgcataaatgcagggattcccgccttgctagaagcggagagtcctttggaaatctgctgggttagacctctctggggttcttggttgggacagtgctgggcctgagtccctaactgaacacctcatatccgagagagccccctttccctgcctagggttataggagagggctcaggggctggggaggggggcacctggctgaggctccgagtcttgagggggaagatgggaaagaagggtccccttcctggcttctgactccccctggagcaatggttctcttgtgttgcagggagggcgacacctttgagcacgggggtgaccaccggaccaccctgcagccatccaaatgcacacacacagctcctttcatcccgtgtcagggagttctctgaaattttctgaaactcattcacgaactctggcttaaaggcctctgagctagaaaggggaactgaaaggggacacctacctttttaccccaccttttttgtctggtctttctagcattaaccccctagacacacctaagggctgatgccggggggaacctgtcttgattgctctgggccacatcgagggcaccttcctgatacttttgttatctgccactggggacccggttgttgaagggggacttaagattttctcgaaggaggggtcactgtgagggcctttcctgcctgctaggggcttcagtttgggggcccccactcccgacctccggggaagggaggggtccccatctcccccgggcctctcgggtcttggggtctccccgggaggccggaggttgggaaccgggcgccggcgaaccgatcaggccccgcccgcgaaggtggtgcaacgcctggcccggcccatcccatcccggccacccgggcagcgggaccaggcgtctggggcacagcatgcggggcgtgtggccgcccccggtgtccgccctgctgtcggcgctgggggtgaggcgggcgcggcctggagggcgggggcgggaggcgggcgggacccctccccgcgcgggccgctccgtgggccggtctcggtctcgggtgtccaggccggggcggggcgcggcggcggcggcgccagggtcggggccgcttcccca

SEQ ID NO: 667 - DNA, 2300 bp, Homo sapien
tctctcggatatgaggtgttcagttagggactcaggcccagcactgtcccaaccaagaaccccagagaggtctaacccagcagatttccaaaggactctccgcttctagcaaggcgggaatccctgcatttatgcgtacttttcagctttgcaaagtgcatttctgctcattccaaatttgattctcacagtcacacatatgtgtgaataaacaggtttagaggggtgaggggcctgacgtcacagggacagtgagggcaatggctccagatggtctcctggcttccactcctgccctctgacagccccctcagcagccaggatgagcctttaaaatgaaatctggctgaggccaggcaccatggctcgctcgcgcctgtaatcccaacactttgggaggccaagttgggtagatcacttgaggtcaggagttcaagaccagcctggccaacatgatgaaaccccatctctactaaaaatacaaaaaatcagctgggcctggtggcatgcatctgtaatcctagctactcaggaggctgaggcagaagaatcgcttgaacccaggaggtcgaggttgcagtgagctgagattgtgccactgtactctagcctgggtgacagagtgagactccatctcaaacaaacaaaccacagaaatctggctgggttcagtggttcacacctgtaatcccagcactttgggaggctgaggcaggagatcacttgagtctaattctaggccagcctgggcaacacggaccccatctctacaaaaagaaaatatatatatatatatttatatattatatatttttaattagcaggacgtggtggtatgcgcctgtagtcccagctacttgggaggcttaggtgggagaatcgcttgaagccaggaggtggcggctacagtgagctgtgattgcaccactgcactccagcgtggacgacacaacaagatcttgtctgagtaaataaataaaataaaaaaaaattctgatattaccactcccttgcttaaaaaccctccactgtcctggaatgaaatccaaacccttcaccaggccccatggcccctgcccactctgggccctcatcttgtgctgccagcgccccctcccccaccaacctcctcacacaactcctcagtttctacaagtttcttcttcccccaagacctttgtagctgctgttgtctctatctggaacattttttcctcctctctactcttcccatggtcagctccaacttcagatctcagcctaccagctcctcaaatgtcccaggaaccctaagcagtcccccaaattctctgttacagcatcctgtttgttttcctttacagtacttgttgcagactgttttgtttccatgtctttatcatcactgtctctgtccctctccagaatccacagctttactggggctgggaccttgtctggcctgtccaacagagactctccatcacccggcacagagtaggtgctcaacaaacggttgttaaaatcaaaggggggacaagtagaggggaagtgccttcaagttctcaagaactctcctgcatctaacttcataatgcctacagaaacagggaacacatctaaaggtcacaggccctggggaggcagggtgcatgggaaagctctgaattctggagacttctgcctcactcccactgggtggaggagtttccattacccatcccagagagagaggggactctgaggctgcttcacttactgctgggttgcagctgggctttttctagaacaggacacttggttacactacgttaccaggtgtcgattgccagaggaaaagacttttgaaaaagaagttcagttcacagaacatctccccggggcatgtgggtggtgtaagggattcacccggctggtgtacgggatttgtcagttcttttataccatctcttttaagcttctcacccttccctcagaagcaggtatcactggttccttttacagagaatgaaactgaggcttggggaagttaactcgcccaggtgtggttaagcgatggctcctcctccttctgtctcatttcagagatttcccccttctggcaagctctcctgaccaccctccagggaccccagacagcatttggtccctggctctgtgtccccacacagccaccctaccccatgctgccttttactgaggcacacagcattttagacaggagaaccctgatggcagaggctgggtctcacgggaccctgtctccttaagggcttagtctggggctggagcctctacagatgtttgagcaaaggcgggag

SEQ ID NO: 668 - DNA, 2300 bp, Homo sapien
aaggagcaacatagagttatttccacagagcccctccccgccctccaggttcccaaacaaactgcccaggaacagatggtccgctttagaatgactctgtgtgcccagacgcatccagggccactctgggtcagcacctgggcaagggttgcagtcagttgctcctcctcttccttgctggcagtaggttctgtttccaaattcaccctggtcacccaccactacagcctcctcacccccgttggctgataggcaggattccccggatctttccctctggcctcacgagcattctgtctggcctaatgaactcttagacatccttcaaagcccaaatcccaatgccgccaggatgtctttctcctgaacatacactcattatgccccctacacagtagtttctctttctcagcccaacccaaatatagatgatcacaaaagtcacacaacagtcacacacaaagaccacagtgtcaccacacacacaatgtttttatctcgatgtctcttgcaaactgggttacacacaaagttgtaccaaatcacagccatgtccctcttttgtgtgggcacgtacaacacacgcaaactacaccacaaaaacccaggattttttcacaacttgtttacaacagggacaccacatttctttctaccacattaacatgcatgtacaacaggacccaaaagtggagatcacacatcacacacacacacaggcaggctgtcttctgttccttcctccttcccttgacctcacaaaacctacacgtggagacagtgtctctcctggacctgcaaattcacacgcctagagagccacggctccttctctctgctttgctaccattccctccctcacccctctatcacggggacacacacacacacagcaacaaaccccaaatacagcggacacacacacacagcaacgaaccccaaatatagcagacacacaaacacacagcaatgaaccctaaatatagcggagacacacacacagcaacaaacctcaaatatagcagacacacacacacagcaatgaaccccaaatatagtggacacacacagaacaaaccccaaatatagtagacactcacagcaacgaaccccaaatatagcgacacacagacacacggcaacaaacctcaaatatagcggacacaggttgtcctgaagtccctggacggcaacgaatcccaaataaatcagtcagggctttccttcacatataaacacacgggcacgcggaatccacccctcccccactttctgtctcctcatctctcttcctctcttacacacacacacacacacacacacacacacacacacacacggcaacaaaccccaaatataccggacacacacacacagcaacaaacctcaaatacagcggacacacacacagcaacgaaccccaaatatagcaaacacacacacgcacatatacacacagagcaacaaatcccaaatatagtcaggactttccttcacacataagcacacgggcacgcggaatccacccctcccaccgtttctgtctcctcttctcctccctcttacacacacgcgcgcgcgcgcgcgcgcgcgcacacacacacacacacacacacacacacacacacaagcagctgcagcgccccgggtcacactccagtgcaggagccaggcaggagacaaaggtcgccgaggctcccggcggccccaccggacacaatcgagcctcttcccggttctgctagctcccaacgccggtctcggcaaggtctggaccctgcgccccgaagcaacaactcccgcctgctcctgccctccaggttccccgcgcagcccgggcagccgactcccagcgcgccaagggttaagggcccgcgcgggcgcggggagtgcagcctcaggccgtgattggctgcgccacccaggcccccgcgccctgccattggccccgcggcggccccgcccctccggcactcggcgccgaagccgcgagctcgcccgctggagctgagcgcgccgcctgggccaggcagccgagccgtccgagcagctgggctgggagcagggaacccggagctgggaatcgggagccgggcgcggggagctgcgcgaagccggggcggagcacgcgagctatggtgagtgctgcgcgcggaggtctggtccggtccagcccagcctcgacggtcgcgggcagcggtgccgcgggtggcacccggggccgccctggctcgcggggggctgggcgccggctgcagcagcagcccccgcccggctctcggaaggcgtggagtcgggga

SEQ ID NO: 669 - DNA, 2300 bp, Homo sapien
ttctgggttccctttccctgagtgaccttagtgaccctgcttgccacatcatagccctggggaccaagctgcaacaccaaagaaaatcatctttttccttttcatggaaccacaggcaaaagtctctcaattttgtaagatgccgttcaagggattgcatgggataaccaaattaacattttccatccggccagagcaaaatacgtgtgacaaaacatagatattaaccactctgcttagcacccaatatcgaactggtaaggctcaaacttgcccctgtttgagccctgtcatctttattcaaagtggggtggaatgatctccgaccagcagtttcaacatttggtctctgggcaagatggtcgccctgagtaacagaaaagataggaaagggaaaggagagaacgagagagagaaaagcattgcctgcgatgaggtggggaaggcaaggagctcagggggtgggagaaagacccacccattgcagcgacactgactcaaaagttcaggcagctgcttgtcagtcacaaagggatcttttccagcagacccatcagctctcaagtttccctcttttgggggaggaaaaagctcccatgtcctatggtcctgtacttgtctaatcctgtcacccatagccatcagcaagcagtgcaaggcagattaattcaaagatgggttaacatcccataatgccaaatcctcttttttttttttttttttctttttgtggagaacagggtctcaatatattgtccaggcaggtcttgaactcctgggctcaagctatcttcctgcctctccctccctaagagctaggattacaggcgtgagccaccacgcccagcccaaacccattttttaaccaaaagggactttactgagggaaggtcctctaaccctctaaatattaggaaggactcttaccttcctaagttgggccttgaacccaagttcggtcaagcatccttgccttttattaagaggggcctttaaccttgtctgtctcaggagaaactaactctcctaagttgggcctctcactcaattccatcctttacctgggtaaaatgtaccccaccacttacccaaagtcggataatcggtgctgcagtctctttcctttgagttgggggtctcctcggtatagtccctttgtggtagccaagaagatgttaccggaagggtgtccggatctagaccccaaaggaggattcttggacctcgcccaagaaagaattcagggccaggcgcagtggctcacgcctgtaatcccagcactttgggaggctgaggcaggcagatcacttgaggtcaggagttcgagaccagcctggtcaacatatagtgagaccccgtctctactaaaaaatacaaaaattagctagacgtggtggcacgcacctgtagtcctagctacttgggaagctgaggcaggagaatcgcttgaacacgggaggcagaggttgcagtgagccaagatcgcaccactgtactccagcctcggcgacagagcaagactctgtctctcaaaaataaataaataatttgggacaagttcatagagtaaagagaaagcaagtttattaagaaagtaaaggaataaagaatggctactccatagatagcagcagcatgggctagtcaactgattatacttatagtaatttcttgataatatgctaaatgaagggtggatgattcatgagtttcccacgaaaaggttgggcagttccgggaactgagggtttctcccctttttagaccatagagagtaatttctagacgttgccatggcatttgtaaactgtcatgacgctggtgggagtgtcctttagcatgctaatgcattataattagcgtataacgaacagtgaggatgaccagaggtcactttctttttttttttttttttttttgtaagctttttcactttttttttttttctttaatttatttttttattgataattcttgggtgtttctcacagagggggatttggcagggtcatgggacaatagtggagggaaggtcagcagataaacaagtgaacaaaggtctccggttttcctaggcagaggaccctgcggccctccgaagtgtttgtgtccctgattacttgagattagggattggtgatgactcttaacgagcatgctgccttcaagcatctgtttaacaaagcacatcttgcaccgcccttaatccatttaaccctgagtggacacagcacatgtttcagagagcacagggttgggggtaaggtcacagatcaacaggatcccaaggcagaagaatt

SEQ ID NO: 670 - DNA, 2300 bp, Homo sapien
acacactcccggcctggcaggtccactttccgctgtcctcgtctctcacgcaaaccttcagtttttgcgataaatccaaggaggccaggagagcagctccaggcacaacacctgctctggaggctctgccctgaccatggcatccttcgagcacgctttcctctgacccactgggctgcacctgttgatttctcaagccccatccctgcccagccccactatgtccctgctgtgttttttttcaggacgcagctacctctgtggagcaggtttgggatgctcatcccttgacagtcttgggtggacctgtcgtctgtcctgttttatcccccacacaccccaagaggcctccccgtggccaccaccgccactaccacttctcaatgatgtggctcatgtagtcctcggtgggcacgcggcccggctcgtcggcgtcctcccgcggcagcgcctccttggcccggtgcagcagacgctcctcgcggctcctcaggcgctgctccctgcgctccagctgccgcttgtactggtagtgctgctggaagaggtccttggcgtagtcatacagctgcatgtccaggtcgttgagctcctcgatgcgccggatggtgtcctcatccacctccacgccgcccgcccgcgtgctgttgtactgcatgaagggccggatgaacttgaggttgaacgtccgctcgaacaggtactgcgtcttgcgctggaactcggtcaggccgaagaaggccatgccccgcaggttcttcttggcgctctcgagcagcagctgggcccgcttgccctcggggatgaaggacaggttgtagcagcccaccaggctcaggtcggccagcatgcgcacctggcggttgttggccaggttgtacgggcagtccatgaactcctgtagcgtgcagcccgaccagtccgtgccctcgtagcagggcggcagcccctcaggcgtgggcgtgcgcccatcacacatgtgcaacgacgtcttccacgtggcacccctctgcacatgccgccactcgctcaggtagcgggacacggggtctcgtagcagggtgatgtagtagaacttcctgggcgtgcgcagcgcggcggagtcgcggcggtccagcacgccgggcacgcagttggtgagctcggtccagtcggcgtgcagcccgcagctccagccggtggagaagcgggagaagagccaagtctcgcggcggttgggccggtagcaggtgcacttcttctggccgggccggcagtcgcacggcacctcgaggcgtacgttctgcacgaggtggcggccgaaggtggtgccgcccgtcttctggatgtgcaggaagacgatcacgtcgtcgcccttcatgtcgaagcgcagcgagcgctccagctcgcggaccgggaagtagtgcttcttctcgtagtgggggtcgggcgtggggaacaggtccaggtcgtcgggcggcgcgccgccgccgggcgcgcccaggctcagtcctgggcccgcgtactggtacaagatgagcatgaagcacaccgggcccgccaccaccagcacgaacttgctggcgcgctcaaccatggtcctgccgctggcgcgccgccgccgcatgtgtcaccatcgccggggcccgggcgcggggcgcggggcctgggagggcaggaggcgcgggcgcagctgcctccgccgccgcccgcgctccggcccggcccggctactcggcgcccaggccgcccgcagcggcgcgggccccgaccctccgcggtgccatggctgctccccgcccggccccggctccccgggcccgacgcccgactccgctcccgctcggccccgctcccggccccggccagcactgcgctctccgcgcccccagcaccagcccgctccgctccactccactccgcgccgagaacgccccccctggcttattctttacttttcctacttttccaggctcagcagggagctgctggatgagaaagagcctgaagtcttgcaggactcactggatagattttattcaactccctgtgggtacctggaactgcctgacttatgccagccctacagaagtgagttttactcattgcaggaacaacaccttggcttggctcttgacttggacagtgagtaccttactatgaaggtgataagactccacctggtcctccagatatgggtgatattcctgttccaagtggtccttattgacccgagagatgtcattgccgcaggcaggacccgtgggcgcatagaggttgtaatgaaattgtagtttcagttagaagcccagacatgaaat

SEQ ID NO: 671 - DNA, 2300 bp, Homo sapien
cttgaactcccgacctcaggtgatcctcccgcctgggccttctaaagtgctgggattacaggcgtgagccaccatgcctgggctatttatttttaagatggagtctcactctgtcccctaggctggattgcagtgacatgatctcagctcactgcaacctccgcctcctgggttcaagcaattctcctgcctcagcctcccgagtagctggaattacaggcgtgcaccaccatgtctggctaatttttgtatttttagtagagacgggggtttcaccatgttggccaggctggtctggaactcttgccttcaggtgatccacccgcttcggccacccaaagtgctgggattacaggttgagccactgtgcccagcccagttttgtgatctttagaaaatcacttctccatgcctcatttttctcatctgtaggataggggaagtaatgatacttaaaaatgtagctttcttttgaggatcaaataagctgttctatatatagcacttagaacagaacagattttggaacatgctaagtgctcactgaatgttagctctcattaatattgttattgccactatatgctggacctgttctaagcagtccatggatatttaatcctcacaccagtcctatggagtcgttcctgttattttcagcattttagaggtaggagaatgaaaacttaaatgacctgcacagtcacgtggctcgtcctgatctgtctttccctagggcctggggtgaggttcacagaagataatgtgccttgagcacttggtgaactataaaactctaaaccattgagggccctagttttatctgttctcctggcccagagcagattagaaatagcaaattagtgcgaaggcagagggtggcaaacacaggcccttcagaagggcagttggcagcactgggggaggtgcctgaaaagcacaaaagcaggcattgcagccccatggtgtcgcccaccttggtggagagataggattgaacttctgtgtgagctctttggaacgctcttcctgacccctaaccagtttggggcctgggacttggcacgtggctggcacgtgccaaatgggaagggaggctgggtgtggtggcacacgcctgtagtcctagctactcgggaggctggggcaggagaatcgcttgatcctgggaggcagaggttgcagtgagctgagattgtgccactgcactccagcaagggtgacagagcaagactcgaggtcaggagttctagaccagccttgccaacatggtgaaaccccgtctctactaaaaatacaacaattagccaggcaggatggtgggcacctgtaatcccagctatttgggaggctaaggcaggacaatagcttgaacttgggaggtggaggttgcaggaagccaagatcatgccattgcactccatcctgggcaacgagagcaagactctatctcaaaaaaaaaaataaaaataaaaaaagcgaaaacgtacataaaatatccctggaaggattcacaggaacagcatcccacagattgcctacagggtgagactgggagacaggaatggaaaagatgcctattttaactttacaattttctgtactatttgattttttttttttaatagatacggggctctttctttttcgtccaggctggtctcgaactccagggctcacgcctggccctatttgaatttcgaaccatgtaaatgtaccatcttttcagaaaaaaataaaatccgtgtgggcacgcggggacgctccgggcctccgagggggtgtgtcttctgcttctttaacctggcaggggcggttcaagtggccggggaaatcagcgatttggagggtcgagggctggtgctttgagagagacgcggagggcagagagggattccccgtcccagctgcactcggtgcatcacctaggttactccttttctcggcccgcagggcccctaacctgctcgaacctgttgtgcagtagaggccgccgagtccctttaaggccccgccgcgcctgcgccttgggttctcctgacgcggcccatccggaccctgaggagccagtgggctgcaggcgcaggcgcaggcgcaggcacaggcgaggggttgggtggcggttgagacagcggcggtactgggatgggtaggtgaggatcccgagactgagtgagcttctgcgcgcggtgcttttgggaacgcgggactggcaacctgcggcgccaggagctgggccgaggcgcggcggcgcggctgcgggccgccgtctggatgggaagttacggcgaagtccaccc

SEQ ID NO: 672 - DNA, 2300 bp, Homo sapien
tataaatcattttctggacatatgttttagtttctcttggataaatgcttaggaatgactgagtcatagaataggcagttgtttggttctgtaagaatatgccagatattttccccaaagtgtttatactattgtacattccatgcattaatgtacgaagatgagaaagcttttgccccttccaaagaggcctgtctatatacatgtaattttttctaactggagacaggctgatgacttcagggacatgaacatgggatacaggacacctgtcatcaccaccaccatgaagttgggattcaggaaggaggttaatcatataaggaatcctgtgaccagcatgagcttctgtcaggccacaaagggcactcaagtgaacagggcatagtgggtcctggggtcatggtgagaaagtgtctctttggtaaaaccttttcccttggggaggtaaataaattcttggttccttcttggtagcccttgtagataaggatggtcaaataaaataatattatatctgtaaaaactcagatcttggtaagatttactagttgggaatccagtgttaatgccatgaagcagccgccagttgggatcaaatgtgagcctatggatcaaggtgcatactcaaacacagagagcttttttgaaagatgccaccagtagtttttccagggcagagatgggtcgtttatttctctctctaatctagcccatatgctagctgagaaggtttcttcatatcactttaaatgatgatgtccttgtacaacaattttctaaacattctttagataagaatttaatgggcattctttattgcattaggcttaaatttcatgcatcttaaggttttattgcaaagtgttgccttgcttcctttttaagatgatacaatttataacacgcaagtttgctgtctgtcccctccctttatatacatataaaatgagcaaacatgtggccatgaaacagatggtcatagaattggttcagtggttgtgagttcagcaacccaagagtgtcttatctgaaataccacgaggaatgcctggacacagtagacaaaggttgttcaactggatgccttaggatacatgctaccaaaaacaaagtagctgaaaaggaaccagaataacagaatatcagagccagaggaacatttggaggtaattcagtacctcctccttttcaacctacaggggagatagtggaacagaagcagaaatgggcctgcctgctgtgcccaaaattcattggagattattgcggtgaagaatttcatttatgatgaaggagaattaaatccccgtcagtttaaattcaggcaggtttattgaaaaggtgaagaagcgtcttgcagaagcaaagcgtggctgaggcttgtgggctttgggaaaatgagcagctgacagtggctgatgctgcccctgactctgggaccatgtggtctcttgttccctgagagcatctcttctattctcttgcatcttccctcagcctggcagtctctgtataatcttcaacacataatcgagcaaggctgtgccagccccaatgccacctggcactttaggtcaaattaggaaggcatgaaataaactggccctttataatacagctgttggaaccacagttgaaagtacaatatcttgactcctgggttagtgctttatgctgagcttttttttctgaatatgagcacagactttggaatattagtgtcacctagcgttattagctagtattctccttttgtttccccatgacatcccctccttcttcccacagatccactgtccgctcatttccatcctgtctcatgccactcggggctcgtcccttctagaatgcattcctggctcccctgcatgcacacttccagttaggtttagcaatggagggcacctgatggagcctggaagtgagaggaaggtgaggtctgtatttcttccctctccctccctgctctggcactgagtatctggcaatagctgcatctgtctattacttcagtggccactcttccacagccccagttctcagtgggtcccatagcattatttacctttgttcctttagctcccatcaaggaagatccagagacattctccttaccaagacgttaagaaatgcacaggtgaggagaacagcggcatgcgtgtaaaggtcctgtggcacccatcctctgcaggctggaggtcatggcgggagatgctgcatggatttgccctccccgctgtcagtgagaacaacagggttctggaagagtagaggacaggccatgggacttggccatc

SEQ ID NO: 673 - DNA, 2300 bp, Homo sapien
gttggttatatcttctgtcatccctgtcctgcctggctcatcaggaatctgcaggagtctgaagaggaggaagccccccaggagtcctgggatgaaggtgattggactctctcaattcctcctgacatgtctgcctcataccagtctgacaggagcacctttcactcagtagaggaacagcaagtcggcttggctcttgacataggcagtgagtactccattttgaaggtgataaagctccagttcatgtcccaggtagaccccataatctttgggccttgtgaccctggttgggctgagagttgccatcactgtgggtggaacctatatatcaatgtagatttcaatcactctggaatcgagtctgaagcacaggcgtggggtgggtcagtgagctttgctctcttcctagtctcaggccatgcctgtgccaccctggactgactgtcaggacactgaacacaagacgggcgtggcaaactcacaccaagctgtgcagcatatgtccaggagttgtctgtcagatcagctcacctgagttaaacgtctcttgccagctacaaagttctttatgagttttgttcccaaagcatgtctgtgcagtgctttacctgcccaaggccagtgtcacccttgtctacctctccgtggaagatgtgacccaggtttcactgaatttttcccccttttctgtgtcttctaagttggcttgtcatagctcatctgtccatcatcttgctggtatgttttctagataaatggctgacttttcacccacaaaagccatgatagctgatgcttctgtgtagaaccaagtgtcactttgactcaagagctggtacattgcacccctccatcaaatctcagtgtccacaatctcataaactatcaaatctgggtatttgaagagagaagcctgaatattgcagtatctctcctatgaggcattagaatgatttgcctcaaatctattgggaaaaacattgctcatttgtgtacacaaacctaggacagagcacactgggaagatcacattccaaaacaggggcattttgcccaaggctcatgaaaggaaccaagtcagttctctcaagacttgccctcaggcctcctggtatatttctctcaaagtctcctattctcacactgagaagactgatgtccctgtgttaggattggacagaggaatgtttccgtgtgcaaggaagaactgcttcatgtaagaggccctgtctgaatttatttgcaggacattggtgtgatcaagtgaaaaaggaggaccaagaggccacaagtcccaggtgagtctgagaaattatggacagttaatttgatgttgacacctggagatgccaagtccggggaaagcagtacatgctgaaaatgatgatttcatcttgtcagacaagtctgaattatgtctactaacattgcttttggttctcattacagtaaatgtttaggtttccatttcttcctatccttctcatttactaacctagtgaaggttgaccatacttcaaaagctgtattctcatggtgactgcagggaagcttgagcacattttatgcaaaattgttgagcccactcttttcatgatcactgttcattgtgtgtcctgaaggcacaaatatagagtgttctttgactctctcatcagtgtgtcacctggccaattcactgagctcactatctctctctctctctctctctctctctctgtgtgtgtgtgtgtgtgtgtgtgtgtgtgtgtatgtgtatgtctttctctttcatccttttctacctggccctggtctgtcccaacatgaaggcaataatttgttacctcattaatagatctgtcctttttcttttcaaacagttccttatgttacccatgaaatctagctggggctgtgtggtttctgattccccctggcttattctttacttttcctacttttccaggctcagcagggagctgctggatgagaaagagcctgaagtcttgcaggactcactggatagattttattcaactccttttgagtacctggaactgcctgacttatgccagccctacagaagtgacttttactcattgcaggaacaacaccttggcttggctcttgacttggacagtgagtaccttactatgaaggtgataagactccacctggtcctccagatatgggtgatattcctgttccaagtggcccttattgacccgagagatgtcattgccacaggcaggacccgtgggcgcatagaggttgtaatgaaattgtagtttcagttggaagcccagacatgaaat

SEQ ID NO: 674 - DNA, 2300 bp, Homo sapien
ggatagggtcgggtgtggtggctcatgcctgtaatcccatcactttgggataaggaggcagggggatcacttgagcttaggagttcgagaccagcctgagcaacatagcaaaaccctgttctttacaaaaaaatacaaaaattagccgggcgtggtggtgcacacctgtagtcctggctgctggggaggctgaggtgggaagatcacttgagcccgggaggtcgaggctgcagtgagctgacatcatgctactgcattccagcctaggcaatagagtgggaccctgtctcaaaaaaaaaaaaaaaaaaaagtcaggggtgctggccccatgataggtgcaatgggtgcctccaattccctctggctctgcctcccagcctctgtccaagcaacaggcagattttccatgcctggggacttgcccctggctcactgatgatgataccatcttaagtctcctggaatccttaaacccttccttggcatttgtgagcaagtattgagcccctcccatgttttaggcccagtgctgggtgctttcacctgcaatttcttacagaggatggtatttcctaaactccattcatttgctacctccatgatttttgccatatcacccaacccatgaaatacataaataaatagtatttactcaatattttgactcacttttaaaaaacataaacttatctgaaaagggaacctatgtcacgcctctaaataaacagtatcaaccaaaaatacaaaagaaacaaaaataaatacaaagacattcttggtttctggcaccaggccccagttctggctccaaccttactgagaagtcacatgatctctctgggcctcagttttctcctctggaaaatggagcttttggaagttaatgcatgcacagtgcctggccctgagactggcatggagtgagtggaagagaggttgcctgacctggctaaaattggttctctgggcagacattttcccaagggccactgagaagaccctcctgttaggagtcagtgagctctgtcgctggaggcattcaaacagagcctgcggacttctcactgcgaagttgcccagagaattcagtgctcagaggaaagggagtggttattccatcagagctggttccccaggagcgggagcagggcctgtagcacccagcctctgtccctggctcccgtctatccgggattttagcgtttcctctgtagttttcaagcactgtctcatatgactctcgcaccagcgagaggccaggggagatggtgtctgcctgttaaagaggggcaggctggtccacataggtcaagtgacttggccaaggtcaccagagcagagttttgaacttgagctgtctgactcaactgcctgggaagtgcctgcccctcctctggcatccagggagcatgtcctggggctctggctgggacatagccggacacctgcgggccctttacgtctctaaagagagaaagagggaagggcccctgtctagggggtggtttccctccagatgccacccctccgaggtccccttctgcttcttcttgcggtagccagggaggcagcccacgggcagggaagcgggggtgggggtgcagagtcagaggtgcacgtggacagagacagagagacagggacacgtgggcagagacggataaagacagagacccagagaaagccagatatgttgacagacacagagacagacgccagagaggaaggcagacaaagagacgggtggagacaaagactcccaccaagagacgcagaaggaagatgccgacggtaaagacaaaacaggagacgcgcgcaaggagcaggtcagagcccaggctcgctgagagaggaagggctgggctggggcagcccggaggcagagagaccgagagtgcggggcgggcgagggacgccagggccgcgtcaccccagcccgttcctagctccgctcccggcagggggcgccctggcctcgtggcacgaccggcccgcggggcgcggggctcgggccgggggcggggccggggccgggctggggaggggttggggccgggggcgggggagggggcgggctgcccgggcctcactcgggccccgcggccgcctttataaggcggcgggggtggtggcccgggccgcgttgcgctcccgccactccgcgcccgctatcctggctccgtgctcccacgcgcttgtgcctggacggaccctcgccagtgctctgcgcaggtaaggattcgacgctgccccgcgccctggttccccagggccccagcggacgtggtccatccccttct

SEQ ID NO: 675 - DNA, 2300 bp, Homo sapien
agcttgagtgtcctcattacatggtggctggcttcccacagagatccaagagtatataaacagaagctacaacattttatgccccagccttcgaaatcacacaccatcatttcggtggcattctatggcatacaaaggctagtgtgggaggagaccacacaagcgcgtgaattccagggggcaggggttattgggcaccatcttggaggctggcttttgcctgcttccaaagcgctaacagcatgtggcaccaagtgaaccctgtgtgcatgggagctattgttcggctgtgtacccactcacagaggggcagggtgttctggaaggacaccagaattggaaggacaccagaatcagaagcaccagcatgggacacatggaactttgtgccatgggcaaggaatggatcattctccttatgtcacaagtgagaaaacggagcccagtgagcaggagggacaatgattccaaaccttctgctgtttcgctgcacaggccaccgtgcccttcaaatccaacatgtaaatgcacacacactctagcggccccatcgagtccaggctgtgaccctctgccttggggccacagtgctgtgtgctgagccctgcaggctggaggcagactgactgatggatttgaaccccagatctgccacttctcagctgacaatagcaagttatggaacacctctgggcctcagtgctcctcatctgtgaaacgggcatggtgatcccaccgcgccatagtggtgggaatgaaaatgaaaggaattggggctgggtgcggaggctcacgcctgtaatcccaacactttgggaggccgaggtgggcggatgacctgaggtcaggagttcgagaccagcctggctaacatggtgaaaccctgtctctacttaaaatacaacaaaaattagctgggtgtggtgatgcatgtctgtaatcccagctattcaggaggctaaggcaggagaatcacttgaacccgggaggcagaggttgcagggagccgagatcgcaccactgcactccagcctggacaacagagtgagactctgtctcaaaaaaaaaaaagaaaagaaaagaaaaagaaaaaagaaaaaaaaaggaattgggggcctaattctgggcccacaaaaatcacccagataaggatcctcccagccaccatactctaccccaagctggctgtggggagcctgcattccctgagacaccccagcttccttggagtcctcctagccgggtcacagcctctcagcatccacatcctcctggcgtcctcctcaggtctcttcgagccaggggacatgcagtacgagctgaacaggaacaacgtgacggacccgtcactctccgagatggtggtggtggccatccagatcctgcggaagaaccccaaaggcttcttcttgctggtggaaggtagggaccccgggtctgctgagagggggctgctggaaacacggccctggtgtcaggatggagaagtccagctcttaaagggaactgactggtttgggggtgaagggagaggtccctttaggagaataggttgtggaaggagacgggtggcactgtagacactcccagcccagcaagctgctctcctttgggcatggagatgcaagttaggttcagcaatccaggaaggcttcctgggagaggaggcagatttctcccctttggtagtctttcttggggacctggccctgaaggggcaagcagcccctcagcctcactgcccagaaaagcaaatccgcaggccccggctttcccacgctgtgtgctgatgttcccaggctctttcagcgccggccaggggccttgcagacagacctgaattcttggcctggcgctgccatctgctggcggtgtgacctctacctgtgcacttctgttatgtgaagccaaaaatagcatctgtctcctggagagtgattcgcctccattgtgttcagagacataaagtacttggaacggggcccagtaaagaataaaccgtgtttctattattagccttgttatggctacacaatagttaaggcgggaacaataggaagtgtgaggaagtgataaagattccagaaaccttccagtgctaacagcccttgcccaccgcagttcctcatgttgccctgctaacatcggtatgtatacacacacatgcacacacgtgaacatgtttgcacatatgctccccacgcatacacacatgctcagcgcctccgccttccagaggtgagcgtccgccagcccagcttggctgctttcttgccaaaccccggggttcccactcgagc

SEQ ID NO: 676 - DNA, 2300 bp, Homo sapien
tggcctcccgggtggcactgtggctctgggctgcagcggcagggtgtgtgtgggtgcgtgctaccgtcgggaccactttaccctgcccctgccccgtttggggggctctgaatgctccagggccactttgtggtggtgctttcatgtggggcaccccccatctggaccccatctctcagagccctcgcgtgtgtcagggcgtctgctgctccctctgaggctgtagctgtgggtgttgcttgttgctgtgtgtacactctgggtgacaggaccatgtgtcagtgtttatgtgactgattcccaatgcaacaaggtgtattagagtgttcctggctacgtttggtcaccctgagtggggtgtcttaatgggggacattaatgcacccatcatcagtgtgactctttggggtcatgcccagctgaggttgtgtggctgacctgggcacagaagccaaagttgctgtcatacagtgtgttgtgttgacaggcatgtttgtctgcctggacttcaggtgtgtgtctgtggtttctgcagtaactgcctgcggaattgtctctttcaaatgcagaggtgttgggtgtgaccataggtgaccatgggtcaaggtgtcctatggactcctgtggtgggttttacaaggtgggccttgcctctatgggcaggcctcacagtgtgcacatttatatgggcttgtgacccttcccagagctctgtgtgtgtgtgcgggtgagggctgtgtgaggtttagaccgtggccctcatccttggggattagctacccctgcagttgctggataccttttgagtctcatttactgttgttatgtgaccctgccggggcaggcagggcttgtagccatgagtggggctgcatctgggtctccctggacacacctgcccgcctctgtggctgcgtgttgtcatgcctcttgttctcacacgagagtggtttgtggtgttaccatagctttgtgtgcagttactggtgtgcagacctgcacaggtgtgggtttgcatttgtgtgtgtatctctcctggtacttggacctgcatgtgtttgagtgggtgtgctcctgtgtaactcagaacgccaatgtgtatatttgtgtgttagtatatagctctaagaatcactgtgcacagtccccatcatatgtgtttgtgtgtgttgttttcttggtacacgaaacatatacgtggtgcagtgggactttaaatattggtgtgcaggcttctgtgtgtgtgagcaggaggggagggagaaagatggagagagagagagagagagtgtgcgtgcttcctggtgtacaactccatagcacatgtgtcagcaggagccgcctgagctgagccttggaggggcagggggagggtcaccatcctggaggctctgggggcttcccaggcccagccccgagccgggccagccggcagggatgccgccttccaggaaggctcgcagggagttggcgctggagaggccggggctgccaagcgcagctggcagacaccggattaactctgcgtgtgccctggctcacccgggagagggtagctcgagtgtgcgagggttcaggtggctcatgcaaggtgctgggccgctgggcatcccagtgtcctcttccctgaagcacccccagctcactccccttggagaggggtgggctgtctgagcagtgggctgtggcctgagcctggttgactgagccttgcccccttccgggagaggtggggagaagcatagacccctcctggggatccaggatgggctcatctctgcagctgggacttggggacgatctgtccctccccaagggtagcagcccgtcagggagcaggactgagtgggtgggtggctctggccctgggccctaggctctgggttcacctcacttggcaatcggccagaccctgtggttctcccacacagaaccccctcccacgatgctcccgtcactcccgcttgctactcagacaggtgcctcggtcactgatcagagctggtgggacccggagggccggggcgggtggagactcctctggggcttggcgggatcagctgacctcgctctcccctgtctctgttgcagaacacagatctatttgagatgattgagaagatgcaggtgaggatggctctgtggcctgttctggggagccacagagctggctgggctggggctggggggcccttgctgcatctccagcccttcacctccctgaggacaggccacgccagtagaagatggtggctattggttgtccagggtcctctgtctggaggtcagggtagaggatg

SEQ ID NO: 677 - DNA, 2300 bp, Homo sapien
gaaaccaggggctagagagactgaatgattcatctggggtctccagcaagccagtgctgggctgagggaacacaggcctgtgacatattctccattcccctcccctggtgcccctagctctgtgcacatttataacatggatggcatccatctgaagggcaggtgaccttcctctgccagtgggcaaatccctgcccgtctctgggcctcaggttcctcatctgtaaaacagaggtgacagtttcttctctacctgccttgccagcttgcaattgggtgaaagtactttggaaagtagaaattaggaagctgagctcttatcagcgtcattacattcccagggctggacagggcacccagaagggacattctcctcccttcaggccccacatttgtacaggcatcgagctacccaggaccctccttccctcctccctacaggggtttctccactcggggattcagaaacctgcacacacgtacatacacagcctacccacacctacatatggggacagagtcacagacacaaaacacacagccacagccactggtctgtaaatatattcagagacttgcacatgcatgagatacacatgtacaaacacaaattcccataccaaggcattcccatacacacagaaagacagtatgcccacatacatacagccacatccggtcgtggagtctcacacacacgcacacatggctgcacgcatatgtgcacacaccttccatgccacctggcacacagccatctccagtgctgtgagcaggtctcgcctcccccgggggcagtgtgggaatggatgtttctctggctggatttcgatgggtgcccggaagcattcaggcctggaagtggctgcataaatcaatatttgctgttgttaattattaaaaccaaagctacaccgtgtctggaacacccatctccagagttcctgctggctctccaggcccaaacctgattcaaggccaggtctagggggaaagggagggcacagtgctttccttccaggagcccttagttctggggctggagggtggtgggcagccactggcagctctttcaggaagctgaacagaggtatggctctgagctggtgggcagccctgcccccgcaacatccaaagcagctgtgtctgcttggccacagttcaggaagcatttgctgtgttcccaacatctgtctggaggaagtggtagcaaggccctgtccctgtccctgctgtacagtggctataccaggccagggacacactgcagagccagctggaagggcctacagagtccttatattttaaagatggggaaactgaggtccagagaggaggcagggactcactcaaggccactcagcaagttgtagctagaatccacatgtcccaaaatctacttgggtcctttcctccataccacgggcctggcagcccctccctaggtgctgtggccatctcccccaggatctggggcagctagggcgggggaagggacggagcaggccagccactgtgaggcatgggaagcaggatggaggagaggaggaggaaaagggacagaccccaaagagtagcaccaggcctttctctggattccactttgacttcttcctgactgtgtggtctcgggcaagctatttcacctcttggaaccggcttctcatctgtataatggagatgacatttgtacctcctgggctgtgacgagattacgacacatgcgaagggcccagcattaagtaggtgctcaagaaaagccctctgtctgcaaggtaacccaaccctgtccttgatgccgaggcggggtacccagagcctgggaagatggagaaagtgaggtgggggcgcgctggggagaaccgagtggggggccccctcggggagcccgacgcacccaaagcttctagcgctcgggccggaacgcgcaggcgcggtgtcccggggccgcgggccgggccgcccggggggcgtggcttcagcgcccccgccccgccccgccccgcgccgtgccgcccgtacctggcgccccgccccctccgggccccgccgtggggcgagcccatcgcaggcagcgccgccgccgggagccgggagcgcggagctcagcgctgcggggcccggacccgggcgcgcgcgggccaggagccggctgggccagctgaagtgccgccccggcgggggccgggccgggccgcgctcaggatggcacagctgcggcccgcggtgccacccggccgtccgcggaggggctcgctgcccgcgggggccagctggcaggtgaggacccgggcggggcg

SEQ ID NO: 678 - DNA, 2300 bp, Homo sapien
tctgccaactgggcatgcagaaaccactcaggaatcattcccactgaaaagactggcgaggtataggtccatgtcgaaggggatgcagcagcccagatgtggctggagtccaggccccagcccaagcactgtgcacatcctcatagcccaggcctagctcttcagtcctctgccccaaccgcctcccacctctctgagaggccctgctgctgctgctgctactacttaggaaggagggagggaggaagggagggaggaaggttgttgctgctactacttaggaaggagggagggagggagggaggaaggaaggaaggaaggaaggaaggaaggaaggaaggaaggaaggaagttcctcccttctcaggcaaacttcagtgctctcaggacccacccctcaggagcctgccctggtgtgattcctccccccaggactctacagcactgcccagagcagaaggggcccagtccaggctccagagcaccttgcaaggggaagccacaccctcctctgaggactgaaaaccaagggacatagttctaggaatgaggaaataatgtttgccctgtccaggctctgaaccctgcaaggggctcttgagggctcctgcacccaccagaatgtgcagagaagaggtcccaggtgggagccgagagggggctgagggcagatccccaagagagaagtaattggtgtgagagaggatctcaatttcttcgtgtctaaaatggggaaactgcagcgccacttaccctgcctaggtgagacaaaccgtagaccctggtacccagactcgtcatttcccaggggatgctggagctcaccaagcccaggcccgggtcccaggtggaacagctccggaaaggcgtctgcagaatccctgctgccctgtccttgtgcccttggtcatccttcctccctcatccccggctgcatctgtgccctgcagtttgtttaaacagaaaatcccatagcaaaccttgagactgtgggggcctccttgggtgcagggcctgggggaaggatctctccctctatggggggaagactgggtgttgggctggagggcagtgtgctctggggtcagggctagtaacccggtgtctgctgacacagctccacttgggtgggggaaacagcttactctgaggaagagcgctggactgtgagctctgggcgagctgggtgcagaagagcgacttggagtgtttagtgagcgaatgagtacctgctgcagaactcagagcccagttccctctaaaggttgggacctggactgcatgacttttcaagaggggagtggaggggggcgtctccactcctcccctttgctcttcctcctcaccagggcaaaggggaaggggactcctgggagaaggggagacaggtgggcaaggaggggctattggaggctctgttcattcactcattcgttcgcgggaagggtagaacgctgtccccctgcggaactcttgtacccggcatttattaagcatctgctgtacgccagggcctgggccgagcgctttacgtgcgtgaactcatttcgtcatccccaggtcctaggaggccggcgggaggaatcccactttacagatgagaaagtcgagggacagggaggggcgggacatgcccgccgtgcagacccaggcttctgggagggagctcccagctcgtgatgatggggacggatccgccgaggagcgcggcggctcgagggggcgggaggagggcgtccctccaacagagggtctgcggcctggacggggggcggcggccgggaagggggtgggggaggggctgccccgggccccgggccccgcaatccccgcccggctgggcccggctcggaaagtcccgcgaagcccccgcccggccggcccagggcggcgcgaacaagcggccctttctgcgccggcggcccccggcagctggaccgcggcccgctggggcgcggacgtatccgagctggggcgggggcgggggcggggcggccgcgttgccaaggtgacccgggcgcgggaaggcggctccggctcgcgcgggccgggccgggcggcggcggcggcaccatgagcggccggaagcgcagcttcaccttcggggcctacggcgggtagggcgtggcgcggcgcggggcggggcgcgtgcgcgcgtgtgcgtgtgcacgcgtgggggggagcccgtgcggggtgtgctcgcgtttgggcgggtgggcctgggctatgactgctgtgggggctgagcgtttgacctcagtgcgcgcatggctgtcgtgctgtggcgcctgtgtgtgtgt

SEQ ID NO: 679 - DNA, 2300 bp, Homo sapien
cacccagtacatgctgcccttgaaggtctataggcattctgctggcatttcctaagtaggatgtatttgaccaagcatctcccaggaccagagccctgcaggacatacctgtctagggcagttgctatgccccacagtcccttcaccatcatccccagaagcgcctcggccagcctcattcaacttcttgcctttttattacagtgtttgagccaactatatagtcctggtgtattcctaggcaggagatcaaagggccccccgggttgggtggtccatgagtgagcatgtgataccgcaggagtcttcctcctgccctgacaacttgccttgtactaccagtgctgctcaggatgtctgcagccacgaagcttcattataaatgcaggagctcaggctccaggcccactgaatctgaatctgagtctacagaccgctcctgcactcttagaagtttgagaaacccccctgggctggggtctctttcccatatacagctagggaagcttgctggagggaggactgaaaagaacaagtgcctgatctaccttcccctctgccctttcacaggtgggtggatgcgtgggaagagggtggggcatttcctgctattcccccttattcaccttttctccacggggattagagtcttgaccggaaaacatggctctggtccccagcccctatgggactgaaaacccggaggcttgcatgtctcagatcctccagaggctgatgtaagagttgctgaagacctcggatctttccttttgtgaaatgcagcccatgtggccgggaaaatagtgggagctggaagtaacagttgtggttttaagcacacagtagatgctcaagaaatatattgagtacatgtcttggactttcccctccctaaatattatctgtcaagtgggcctattggacttgttgaccttggagggccctgtcggcttgacccaccaattcgaaatggttgagaaagaggtctgtctttgtaccttttgcagcctgttttcccagttcttagaacattggggtgagatccagagatttcagagatccccctggaacacgagtgttctgtgacgagttcatgaccttggagccaccaaccatacccctcacccgttgtccccagttctggccttgccgacccactgcgtgtttctttgcttcatgtgggctgttccccggggagggagctcagtggagaacagaaagaggtgtgggtgagggctcccccttggtggggagtggggcacaggagcctcaggctctgttgaccatcaaagaagggactcgagtgggcaggccgctcacttgctgtggaccttgggcaagtctctaactctccctgggccttggaagtcaggccgaggtgatctctgccgccccctccctgcctgggttttcactcttgttctgatcccactctcttccgggtgcctcccttccacttctccgtagcctgtggctcccctccccacacccgccctgggcccgggttaggctggggcgggggcgagctgcccagtccagagacaaagtccaagagccgcgaatgggctggcgagggtcaaccgcgtggcctctgccaggaagcgcgccgagcgcccgggtgaggagggcgtcagccagggcacagcagctttctcgcccagcgaagcctgtgcgccttcctcccgcgcctgcagacaagcggagcccatgggggccgtgggccccacctatcccgacgtctccacttgatccagaagttgtcccagtccccttggagcatgagctgttgcctggacagctgggctgtcgcccaggttctgccactgtctagctgtgtaaccttgagccagtccctgcccctctctggtcctcagtttccccacctgtaaaatgggggcaccgagaaccctcctccaggacctgcggcggggcggggcggcagggcgggggcctccccgccgctcccgcgcccgcggcttgggctccgcagtgagtggggagcggcgccggggaaggagcgctccgcggtcatgtgacgtccccctccccgaactgcggcggcggcgagcgccggccgcatctgagcagagctgcagcggcggccgcgggcaccagagtgccgagcccaggacgcccccggcccaggcccttgggtgagtgcgccccgccagggctgcggccctggaaaggggaaggggacagaggtgtccagactcccgtcggctcgcagcgaagaccccgcgcgggcgggcggggacggagggtgggggcgaacgcgtgggggacccgggtctccaggg

SEQ ID NO: 680 - DNA, 2300 bp, Homo sapien
atggcatgccacctccctgggttgacttcccaggggaattaacactgtacttctgacgggggtgtagggaggaggcaggtcatgtgctgtcagcaggagacagttgattgcttcattctctttcagattttagaaagagaaggggaagaaaatgaagccttacataagatgattgcaaacgagcaaaagacttctctcccaaatttgttccaggataaaaacagaccgtgtctcagtaactggccagaggtataatgattcccacaaaagaaagaatgcatcttttctttttaaagcccttgccaaattcccagtgagctatttcagaacaacccagaacttctcatattctcatttgtttagttatctaaccaggggatttactccagcctgctattttttggtagaggactgtgttttcattttatttataaaacttgaataaggacaaccaaagtatattataaggaatttgtgttaagcaggcggtgaattgacggatactgttttgtgatttttgtgttctaggatacggatgtcctctacatcgtgtctcagttctttgtagaagagtggcggaaatttgttaggtagaaacaaaatatgttttatttcctttattgttactgatttggttgactctggtattttttaagatatcgtggattctgtttgttgtacccttccttcatggttactttcaccagcatacactgaaagctttcttttctattaattaaatgaataagcctaagaaacacattgaattactaatattttcttaaatatatctctgattttgaaataattattttaaaatcttctctttcgtcatgcagtaattaggtatatttctcctccttgtctcatttgagtagaaagcctacaagatgcagccctgtgtcatcagttgggaacagtgctcttttgtgtccccacgggggcctcatgtttacatttgcttccatgaccaaagaagattctaaactgtgagttccttctcttcatgtgatttttttttcttcttttctctttttgatgattaataaaatatgtttaggaaatttctcatctgacatagtctgttttaagaatttagtcctttgctgaattgtggggtttttttttccccttttaaaagagaagaagactgcttctccaggaaagacaagaggctgcccgaggctatttgtctttttgctctttccttgtccctcttgaagacaacacagccaccctttctcttcccccgctgctggtgaccagtgctgagacctcttttccagaatcacagaatcaacatggtcttggttataggttttgttctgccatggccaggcttcagacaattaaaggaggaggctagcagggtggcagagcaaagccactgcactggtcatctggaattctagggtcttagaacccaaattttattccatgcttcaagtacttccagaggtgttcatctgtgaatttctcccgattttaccaaaaatcgtgatatacgagaaggtagaatgcttccaacattgtcagaaaatcaggaaaaggaaattggaacacataaataaaaatgcccttggggttaagctagagttttattattcatatttcagtactttaacatcatttaagggagttcaaagtttatatattctctacattttctccctcctctttctctccctccctctctgcatcccgccttccctgttgctctctcactctcgctgtgcatctctcttctctttcctccctccctttcttcctgtcgttgttattgcaaatgtcagacttccaggaaaatacaccagtaagcaaatgtgtgttaccattcagtttaaaagttaaatggttcaaatatgattaaaggccccacagtgcttatccttctgttgctacttctctttctcccacccttcctctcacactaaccactgtactgaatttagagtttatctgtctcagaaagtattctgtaaaaaaaaaaaatgcacgcacataatgtcttgcatatttaaaactttttatataaatggcaccatactgtatttatacttctgcaactaacttattttactcaattatgtttttgagatctaaccatgttgattcatgtaatttcagtccatttagtttcgctgctgtggtaacattcctttgtatgaaaaactattctttgttgatgatacgtatcttttctctctaattcctttggattaaatgttagtgttaatggttttggtttagcagactaatggattatgttaattctcttaatttccatgtgtcttaaggca

SEQ ID NO: 681 - DNA, 2300 bp, Homo sapien
caagctggtcttgaactcctgaccttgtgatccactcacctcagcctcctaaagtgctgggattacaggcgtgagccactgcccccggcctgttttctattaaataaataaataaattttaaaatatattatggggttcgaatgagctatagacctgggtttgtttgtttgtttgtttgtttgtttttgttttttgagacagagtcttgctcctcgcccaggctggagtggaatggcacaatcttggctcactgcaacctctgcctcttgcattcaaacgattcttctgcctcagcctcctgagtagctgagattacaggtgcctgccacacacctggctaatttttgtattttgagtagagacggggtttcgccatgttggccaggctggtttcaaactcctgacctcgtgatctgctcccctcagcctcccaaagtgctgggcttacaagtgtgaaccaccaagcccagcctcagacctagttttgttttgtttgttttgttttgtgttgttttgttttgtttttttgagatggcgtctctctctgttgcccaggccagagtgcaatggtggttatcttggctcactgccacctctgcctcctaggctcaaggagtcctcttgcctcagcctctggagtagctgggactacaggcaagcaccaccatacctggctgatgttggtatttttagtagacgcagggtttcatcatgttggccaggctggtctcaaactcctgacaagtgatccacctgcttcagcctccgaaagtgctggggattacaggagcaagcctctgtgcctggcctatagacctggtttcgtatcccagctttattactcactagctgtactctgcctggttatattcatctttctaaattcatttattatggaaagtgtagtatgtatttagaaagctcatggctttattactcttaataaatctgtaggtaccttgccaatgggtgcagaaacaaacatatgactttagaaatttaaagatagttttctgggtaatgaccgatatgggtagataagtgaagttcactaacttactgcttgggaacagctgaaacaacagtaagtataaccacaagtagagccagaggagaaaggtcctggcagggtggcggtgactagtattatttttttatatcttctgggatttttgaagattgaaggggatcttcaaaataaattgcaaatagcaaagaagttggtgcttgactggagatggttttcagattgagcagtagattgctttatcttctgtttgaattgataactttgaattgataacttaaggcagtggtcttgtgatggctggacacagcttacaaaatattattttaatgcagtgtgatttcaagattagtcaaatgggaggcaataaagtctgcaggaaatgataacctttgagtgtgggagtagatgtaattttgttaagcagcgcttgccatggcacagaggtcccaggactcctggaatcccatttttgactacttccttccttgcaaggagaaagaaaatgcacggttttagctttgtacgtttgtttttatctcatgatttttttttcaatcacagacctagattaaggacgtaaaattgaggttaatggctacctcctttagaattaaaatgaaatcggaaattcagaagtttttgaaaacaagaaaagagagctagaaataccaaactttagcaaagcaagaaaagcgtacctgtggatttttcttaagtttaagaaataggaaatagataatgactttttttcagctgttttttttttttccaaatatatttttttaaactcaggtgagttatgcatatctgaaaatgaaagaaggcttgtttctaaagaggcttggagcaaactgcagcagtactttccaaaggctcctgagtttccaagttacaaagagtgctgttcacagtgcaaggtactgaacgctactgacatctggggaaatggcatgccacctccctgggttgacttcccaggggaattaacactgtacttctgacgggggtgtagggaggaggcaggtcatgtgctgtcagcaggagacagttgattgcttcattctctttcagattttagaaagagaaggggaagaaaatgaagccttacataagatgattgcaaacgagcaaaagacttctctcccaaatttgttccaggataaaaacagaccgtgtctcagtaactggccagaggtataatgattcccacaaaagaaagaatgcatcttttctttttaaagcccttgccaaattcccagtgagctattt

SEQ ID NO: 682 - DNA, 2300 bp, Homo sapien
tcttccttcatggagcccacagcgcactaaagtgaaatctggagaacttgctgttagtagtaagcatggtattagattagaattataggcctgttctctgctttctgtcttcctcctcttactataaaaccgtacatagtttttctaatcattgtatcttacattaaatttatattgaacaattcaaaaaccaaaacaacaagctttccttggaagttttctgtgagattggaaaatgttgtcttgcctttgagccacattgttgctggacagtcagggccacagtcaccctaggctttgaattcctgcagacatcccctggcaaggagggctttgtgcattttgagctttcctagattcctttcattgtgagggccaggattcttagggtgttttctttcagttagcaataacagatactgctgtctgtccactcctccccagctgctggggaaactaggatgcctagtgacttattcttgaatgttgctctttatcacaatcctgttttttctcctttgatagccttcatattgcttaccattttaatctaattgactgtccttgggaaaagatgagagtatgctaagactttgatcttgctttcagaaagggatcatttatctttgcattccccagatacccagtgtactctatccctggcagattaagcttgataaatggcaaataaagtcgggaggcattttgaatgtaattagccataccatgatatactgtaaagtgctgcagctgtgttacatatactgcatcttaaagtctcctcttttttttttttgagatggaatttcactcttgttgcccaggctagagcgcactggtgcaatgtcagctcaccacaacctccgcgtcccgggttcaagtgattctcctgcctcagcctcccgaatagctggtattacagtcgtgtgccgccatgcccagctaattttttgtatttttagtacagacggggtttctccctgttggtcaggctggtctcaaactctggacctcaggtgatctgcccgcctcggcctcccaaagtgctaggattacaggcgtgagccaccatgcccagccaaggtctcctcttttatatattaagtttacgtaaatgtataattaacttttccatatctcttttcttccaaaaagctcaaaatgcttcacatagcttatcttttatactcaacaacattcccatgaggtaggtagaaggcaggtattattaccttcattttacaaataaaagactggaaacatagaaagtttaagtgacttgttcaggttcattttcttggtagcagaacttggattagaccgtgacctcgactcacagtcctgtgctcttcctctggagccacattcgacttgaccagttagaaggctcttagttgatgatgtacagtgccaaattttgttttcataaaaattgagatggtttactgtaaaattaaaatgggagttagttttctagacatgtaactctctggggagtataaaactggtcacaatgggctttgcgttgaagtatctgtccctcagatctcatcagaaggagtatataatacaaaaatataaattcaacctctgtatgttttcttctatgttttatgctgggactcactggagatctttgtaagtaatcaaagctggccctttatctttgattttggcttttagggaattctagggacttcctttccccaaattaaaactcattttgaggtgtttggttttgtcttttaatttttgcaacttcaaaattgatgactcagttctagtgtactttatcctcgaacttgtttaaaataggttactttcttgaaataaataataatataatgaagagatcatgacttggatttgggtgggggaattaaataccttttcaaaattgccatcagtatcatcttggatgaagaaagttcagtggttaaaagcgtcttctgaagtgtggtcatagtcggtgaggtttatttcagtttggcttctcattttaattttcagatgtatatcacatatatgtgaaaagtactgacaaaaataatttatgaaataaacacagtagggcatgaggttgtgttatttgtgaggcagcaatggagcatgacttgtagtcaacaaacatgggtgtcctgatcaaagctctgctgtgctattcggcaagactctatgtggatgcctcttgtagaatgtggttaataataccagccgatctcatagggcactgtgcagactcagcattatggtgcacagctccttgaactcataggagtggcacttaactggagctttgt

SEQ ID NO: 683 - DNA, 2300 bp, Homo sapien
tgctggcaagagaagtcttttgttatgcattttctaaatcttatttttgtgtgtgaacatatttaaaaaaacaaagatcacttaccctaaaatctaagcctcagtaggaacgtgcttttggccctttttatttccattgaaatatacttaaattatctctaggtaaagtgtttcagatgtttttgatgctgtgattgttctagactttataactttccaaagaaaatgtgtcatgttcaaaatccaggtttttttttttctttttaaagaactttgaaccaaaatgtatatttccctgtggtaaatattttaatattttgctttcctcatcaaatgctgaggtttcatatagtccggtatctccagcttgataataggagagttctccctcatttggagttgattatgtccatggcctttggaaagcaatgcttgtagtttactgaatcacaaatactagggaatatatttgaggggcctacttagagtctttttctagtgcagaaacatctgtagtgtaaaaactttgccacaaacagaatctgccttaactatgagacttgtgctccacttgtattctcaggcaagctcttggcagagtcagtgcaactctttatgatgatagagactgaaaatggaaagaaagacagacttctgtgaccatagtcactcttccttcatggagcccacagcgcactaaagtgaaatctggagaacttgctgttagtagtaagcatggtattagattagaattataggcctgttctctgctttctgtcttcctcctcttactataaaaccgtacatagtttttctaatcattgtatcttacattaaatttatattgaacaattcaaaaaccaaaacaacaagctttccttggaagttttctgtgagattggaaaatgttgtcttgcctttgagccacattgttgctggacagtcagggccacagtcaccctaggctttgaattcctgcagacatcccctggcaaggagggctttgtgcattttgagctttcctagattcctttcattgtgagggccaggattcttagggtgttttctttcagttagcaataacagatactgctgtctgtccactcctccccagctgctggggaaactaggatgcctagtgacttattcttgaatgttgctctttatcacaatcctgttttttctcctttgatagccttcatattgcttaccattttaatctaattgactgtccttgggaaaagatgagagtatgctaagactttgatcttgctttcagaaagggatcatttatctttgcattccccagatacccagtgtactctatccctggcagattaagcttgataaatggcaaataaagtcgggaggcattttgaatgtaattagccataccatgatatactgtaaagtgctgcagctgtgttacatatactgcatcttaaagtctcctcttttttttttttgagatggaatttcactcttgttgcccaggctagagcgcactggtgcaatgtcagctcaccacaacctccgcgtcccgggttcaagtgattctcctgcctcagcctcccgaatagctggtattacagtcgtgtgccgccatgcccagctaattttttgtatttttagtacagacggggtttctccctgttggtcaggctggtctcaaactctggacctcaggtgatctgcccgcctcggcctcccaaagtgctaggattacaggcgtgagccaccatgcccagccaaggtctcctcttttatatattaagtttacgtaaatgtataattaacttttccatatctcttttcttccaaaaagctcaaaatgcttcacatagcttatcttttatactcaacaacattcccatgaggtaggtagaaggcaggtattattaccttcattttacaaataaaagactggaaacatagaaagtttaagtgacttgttcaggttcattttcttggtagcagaacttggattagaccgtgacctcgactcacagtcctgtgctcttcctctggagccacattcgacttgaccagttagaaggctcttagttgatgatgtacagtgccaaattttgttttcataaaaattgagatggtttactgtaaaattaaaatgggagttagttttctagacatgtaactctctggggagtataaaactggtcacaatgggctttgcgttgaagtatctgtccctcagatctcatcagaaggagtatataatacaaaaatataaattcaacctctgtatgttttcttctatgttttatgctgggactcactgg

SEQ ID NO: 684 - DNA, 2300 bp, Homo sapien
tttctggttgttagcatttcattccttttgttttttctttttggagactgagtctcactgtcacccaggctgcagtacagtggcgtgatcttggctcactgcaacctctgcctcctgggttcaactgattctgctgcatcagcctcctgagtagctgggattacagacccctggctaatttttatagttttagtagatacgggcttttactgtgttggccaggctggcctcgaactcctgacctcaggtgatctacctgcctcggcctcccaaagtgctgggattacaggcatgagccaccgcacctggcccatttcatttcatttttaaaaattatgctattttaggctgggtggggtggctcactcctgtaatcccagcactttgggaggccgaggagggaggatcacctgaggtcaggagtttgagaccagcctggccaacgtggtaaatcctcatctccactaaaaatgcaaaaattaccctggcgtggtgacacacgcctgtaatcctagctaatggggaggctaaggcaggagaatcacttgaacctgggaggcagagattgcagtacactgagatcgtgccattccactccagcctgggagacgagcgaaattctgtctcaaaaaaagaaaagaaaatatgctattttatttatttgggcaattaagtctagatttatttgtattattttgactaaattgaagaaaatctgtttactaaaatgattactgagctaatttttatttttcaaactgtacatatacattttatatatacttttattaaaaaacaacattaaaacaaatacttgtgtaccaagcaatcattgagaataaaaatatttcagccaggtgcagtggctcacgcctgtaatcccaacactttgggaggctgaggcgggcagattgtgaggtcagtagatcgagaccatcctggccaacatggtgaaatcttctctctactaaaaatacaaaaattagctgggtgtggtgacacgtgcctgtaatcccagctacttgagaggctgaggcatgagaatcgcttgaacccaggaggtagaggttgcagtgagccaagatcgcgccactgcactctagcctgccgacagagcaagactgtctcaaaaaaaaaaaaaagaataaaaatatttccagtagagttgaagtcccatattccctttagtgattgcatcagtcttgatttttatttatttatttttttgaggcagagtttcactctgtcccccagacaggagtgcagtgacacactgcaacctctgcctcctgggttcaagcgattctcctgcctcaggctcccgaatagctgggattacaggcatgtgccaacatgcccgactaatttttgtgtttttagacagatgggttttcaccatgttggccaggtgtgagccaccgcacctggcctgtttttattttttaatttaatttaatttaactttttctttttcatgagacagagtcttgctctgtcacccaggctggagtgtgatctcggctcactgcaacctctgcctcctgggttcaatcgattcacttgtgtcagcctcccaagtaggtggactgcaggtgcgcaccaccacacctgcttaatttttgtattattagtagagacagggcttctccatgttttggccaggctggtcttgaacttctggcttcaagtgatctgcccatcttggcctcctagagtgctatgattacaagcatgagccactgtgcccggcttcagttaatttttgtaatttaagactaacataaaaatcagcttatggcaatagtgatttttttgttgttgttctaggtttgttccccagaaaaatgtattttctttttacctttaaaaaatagaatgtggcaggcaatagtggtagtaaacttttttaaatattaaagctaaagagcctgccaaatttctatggcctttgaatgttttagattggtgttaatgtgtcttgggtgtatattttggaaattgttttctatagccccgctaaagaataaacaaactctaggcacttaagttaaggtaccttttgatttctctatctcagcagaaccttctaagtctcagacacgtaaacccaagtgtggcaaaggaactcattgctctcgaaatgcatatatgttggtttatagactgcaaactcaagaaaagcccaacactactgttcaagttccaggtaaagcagttttccaggattatagcaggcaaatgttttagaatgccatactcaaagattaatgataagtaatggattgcttttagttactatg

SEQ ID NO: 685 - DNA, 2300 bp, Homo sapien
caagagcaaaactccgtctcaggaaaaaaaaaagtcttctctgcctcactatacaaaatgcaaatctccattatagcactcaacagctgtatatcttcagtgggtactttgaataaaggtcttcctttttttgtttttttttttgttgttattgttgttttattgttgttgttattgttgttttgttttgtttttgttttttttttggagacagagtctcgctcagtcgcccaggccggagggcagtggcgcgatctccgctcactgtaagctccgcctcctgggttcccgcccttctcctgcctcagcctccagagtagctgggactacaggcgcccgccactacgcccggctattttttttgtatttttagtagagagggggtttcaccgtgttagccaggatggtctcgatctcctgatctcgtgatccgcccgccttggcctcccaaagtgctgggattacaggcgtgagccaccgcgcccggcggcaaggtcttcctttcaagccataactctcacctgtccctgtctcagaaattgtggccctctcacgccaagcttttctcttctgtgcctttgctccttgtggtttctttttttctggaatggtgtctttcttctatcctggataagtccaactcacccgttaaaagcgggcttcggaattacttctgggaagccttttctcaagtaccccgaagcctcccaagactgggatggggatctttgtatttctaccgctcactccctaacccacttccaagggcagggaccacatcttactttcttctgccttcagcgaatttttttgttttttttgagacggagttttactcttgttgcccaggctggagtgcaatggcgttatctcggctaaccacaacctccgcctcccgggttcaagcgattctcctgcctctgcctcccgactagctgggattacaggcatgcgcgaccgcgccttgctaattttgtatttttagtagagacggggtttctccattttggtcaggctggcctcgaactcctgacctcaggtgatccgcccacctcggcctcccaaagtgctgggattggatccttgagccacggtgctcggcccagtgaatgtttatctaaagaattcagcctaaggttttccagcaggcaagcagctgagtcagaagttagcgcttagattctggcagagctctaattcaaattcaaaattcttaaatatcctcactttagtagagttctttacagtttgcaaaacaattctcataaagctactctttatgtcctggggcaggagtcgcagaaaggaaatgttttaaaccaggagctagagaggaactagaaaatcctggcatagaggtaacagtcttgagaagggagccaacagcaaacatgaccttgcgcaccagagaaactccaccctggcacctcggacccccgcccgcacagtctgcggcgcactgagcactcccacctcgaagactacaaatcccagcatgcctcacagtcagtggcaggacgcagggcatgccgggacacgtagtcccaccctagcacgggaaaaggccggaaggtcccatgacgtcaggagggctcgggaaaggggttcggaaccggtctaggctcaagttaaatctccctctaaagagccaacactggtttctttggcgactcggtttctactctaaacaggtcccgctccacagtctgggcgggcctgtgtgtgcgttgagtagcctctagcgtgaaaacttcatggttaaaagggaagtaccggaggcaagaaatagctttcgaggcactggtttgttagagtagtggtacgtagtgcgccgccctgaacgggggctgagacgctgcttttccagaagtgccagtgaggacgtggcaagaccgcctcggacgtacgcttcctctacctcagcccgtcgggttaggggcgcgggaggcgcagaggctgctgggaacgcgcatgcgctcagcgcggcggggagtccacctttaacgtccgcgggcgcggggtgtgtcgggtgtcgacggcggcgctttgcggccggtcgtgcgggtcgggcgcgggcgggcgcggcggcagtggcgcgcacaggtgattgactggccagctgcctgaaggagcgccaggtcctccttgctggcaggtggcgaagcccattggggcggcggtgcagaccgcggcggcggctgcggcggtctggctcgggaggcgttcctggggccaaggccatggccccgcggctgcagctggagaaggcggcctggcgctgggcggagacggtgcggccc

SEQ ID NO: 686 - DNA, 2300 bp, Homo sapien
atacaggtcataaagacattgctgagaaaacagaatgcagtaaagaagctggttaaaacccaccaaaaccaagatggccatgagactgacctctggtcgtcctcactgcttattatatgctaattattatacgctaattattatacattagcatgctaaaagacatgcccaccagtgcatgacaggttacaaatgccatggcaaagtcaggaagttaccctatatggtctaaaaaggggaggaggccaggcgcggtagctcacacctgtaatcccagcactttgagaggccgaggtgggcggatcacctgaagtccggagttcgagaccagcctgaccaacatagtgaaaccccgtctctactaaaaaatacaaaaaaattaggcgggcgtggtggcaaaagcctgtaatcctagctacttgggaggttgaggcaggagaatcgcttgaacccaggaggcggaggttgcagtgagcccagaccacaccattgcactccagcctgggcaacaagagcaaaactccgtctcaggaaaaaaaaaagtcttctctgcctcactatacaaaatgcaaatctccattatagcactcaacagctgtatatcttcagtgggtactttgaataaaggtcttcctttttttgtttttttttttgttgttattgttgttttattgttgttgttattgttgttttgttttgtttttgttttttttttggagacagagtctcgctcagtcgcccaggccggagggcagtggcgcgatctccgctcactgtaagctccgcctcctgggttcccgcccttctcctgcctcagcctccagagtagctgggactacaggcgcccgccactacgcccggctattttttttgtatttttagtagagagggggtttcaccgtgttagccaggatggtctcgatctcctgatctcgtgatccgcccgccttggcctcccaaagtgctgggattacaggcgtgagccaccgcgcccggcggcaaggtcttcctttcaagccataactctcacctgtccctgtctcagaaattgtggccctctcacgccaagcttttctcttctgtgcctttgctccttgtggtttctttttttctggaatggtgtctttcttctatcctggataagtccaactcacccgttaaaagcgggcttcggaattacttctgggaagccttttctcaagtaccccgaagcctcccaagactgggatggggatctttgtatttctaccgctcactccctaacccacttccaagggcagggaccacatcttactttcttctgccttcagcgaatttttttgttttttttgagacggagttttactcttgttgcccaggctggagtgcaatggcgttatctcggctaaccacaacctccgcctcccgggttcaagcgattctcctgcctctgcctcccgactagctgggattacaggcatgcgcgaccgcgccttgctaattttgtatttttagtagagacggggtttctccattttggtcaggctggcctcgaactcctgacctcaggtgatccgcccacctcggcctcccaaagtgctgggattggatccttgagccacggtgctcggcccagtgaatgtttatctaaagaattcagcctaaggttttccagcaggcaagcagctgagtcagaagttagcgcttagattctggcagagctctaattcaaattcaaaattcttaaatatcctcactttagtagagttctttacagtttgcaaaacaattctcataaagctactctttatgtcctggggcaggagtcgcagaaaggaaatgttttaaaccaggagctagagaggaactagaaaatcctggcatagaggtaacagtcttgagaagggagccaacagcaaacatgaccttgcgcaccagagaaactccaccctggcacctcggacccccgcccgcacagtctgcggcgcactgagcactcccacctcgaagactacaaatcccagcatgcctcacagtcagtggcaggacgcagggcatgccgggacacgtagtcccaccctagcacgggaaaaggccggaaggtcccatgacgtcaggagggctcgggaaaggggttcggaaccggtctaggctcaagttaaatctccctctaaagagccaacactggtttctttggcgactcggtttctactctaaacaggtcccgctccacagtctgggcgggcctgtgtgtgcgttgagtagcctctagcgtgaaaacttcatggttaaaagggaagtaccggaggcaagaaatagct

SEQ ID NO: 687 - DNA, 2300 bp, Homo sapien
tgatggcgggtgcctgtaatcccagctacttgggaggctgaggcaggagaatggcgtgaacccgggaggcggagcttgcaacaaaccaagattgcgccactgcactgcagcctgggcgacagagcaagactcagtctcaaaacaaaaacaaaaacaaaaacaaaacaaaacaaaaaccatataatcccatgcaggtgatgagttctgaagtttaagcttcagtgggcttcatgataaattcattcttgctgagggaagatttgagtctttttggagttccccaaggtacagatttggacatcatacactgtaggaaatcaaggttgcatcaaatgaccgctccaggagggagagctgttagggaataataggtccagaggtgtttgttttgggtttttttttttttttattttatcgcccaggttggagtgcagtggtgcaatctcggctcactgcaatctccgcctcccgggttcaagcgattattgtgcctcagcctctgtgccacaacgcccggctaatatttgtatttatagtagagatggggtttcaccatgctggccaggctgctctcgaattcccaacctcaggtgatcgcctgccttggcctcccaacgtgatgggattacaggtgtgagccactgtgcccggccaggtccagaggtcttaaccttctcatggattcctgggattttgaggtggtgtctcaggcactgccaatttgggctgcttagctcctcccctcccccacacttgaaacatctgcttaaataataacgatgacattaatgatcatcattcaagctgaaatacattggttactttactacatgatagacactattccaagtaccccacttgtattaagttacttaattctttttttttttttttttttgagatgaagtctcactctgttgctcaagctggagtgcagtggcacaatctcagctcactgcaacctccacctcccggattcaagcgattctcctgcctcagcctcctgagtagctgggactacaggaatgcaccaccatgcccggctaattttttttgtatttttagtagagatggggtttcactatgttggccaggctggccttgaactcctgaccttgtgatccacccacctctgcctcccaaagtgctgggattacaggcatgagccaccaagccaggccaagttacttaattcttacaatgcaactatgtggttggaattaatcattatcccattttccagagaaggatgccagggcttgaaaagcttcagttttatagataaaggttccttgtaacataccttttgaaaaaaaattgttctactaataacacgttttgaaaaagtctgaattagtccagggtatttattttacacatgggaaagtaaaatccagaaaaaggggtcatttgttcaatgccacacacttattctttcattatttcctgggcgcctgccttgtgccagtgactgtgctatgacataagggttcagaggtaaacaagatactcatggaatataattttagtggaggccagtggacaatatatacaagaagaaatgaataggcaaaataattccagacagtgctgggatgatacatttgagatgtgattgagtgacaaagagagagagtgttaatttagttggagaggtggtcaggagagtgtggtctgtggaggtaacatgtgagccacaacctgatgacctgaagaagtcagccgtgcactgctatggggggacaacactccagacagagggatctatgagtgcaaaggccctgaggcaggaatggcttgttagtaatacagcagactcctggtccagtgctccttctctgcctgctgctctctaggccctcagagaggctcctttggtgtcctggacctccctcaagctcagtccctaaggggccagctgatctaggaaggtagcagatctggcttcctgtgggtcctcctcccagaagccctatggctgaaccggatctgagtttcctggttcctgtctggcagaaggggagcagatctcctccctgcctcctctccccaggctctagcccttgctccaaatctccatggcaacccctggacacagttctgaaccaaatgaagaggatctggaaggcaaagcactaagatcatagtgaagacttgcctcccccttctccttgtgtcccaccagcctccctgctggcctgaccaggccccatactccagtctccccagagaccccaagctgaagattctgtgggtctgccccattgctgggcacagcagagcctggatggaggcttgtt

SEQ ID NO: 688 - DNA, 2300 bp, Homo sapien
tattattatattctaatatgtatattagatatgcttcctgtacagcctgcagaactgagacaattaaacctcttttctttataaattacctttataaatttataaatttataaattacctttctttataaatttataagaaaattataaattttctttataagcatatacatatgtatattagaatagtcaaaatcacagagacaggaagtagagccatggtcactaggggctgggggggtggggacaaggaggatatggagttaatggaattgacggagttgatggagtttccgtttgggcagatacaaagttctggagatggatggcggtgatggctgcacaatgtgagtgcgtattagtccattctcgcattgctataaaaaaacacctgagactgggtactttataaagaaaagaggtttaattatctcacagttctgcaggctatacaggaagcatgatgctggcatctgctcagcttcaggggatgcctcaagaaacttacaatcttggcagaaggcgaggggagcaggcacagccagagtaggagcaagagagagtgagtggggaggcactgcacacttttaaacaaccagatcttgagagaactcactatcttgagaacagcaccaaacggatggtgctaaactattcatgagaaatccacccccatgatctaatcacttcctaccaggccccacctccaacactgggaattacaatttgacctgagatttgggtgggaacacagatccaaactctatcagaatatatttaatgccactgaactgtacccctaaccatggttaaatggtaaacgttatgtgctttgccacagtaagaaaagcggcagcccgctgggcgcggtggctcacgcctgtaatcccagcactttgggaggcagaggcgggaggatcacgaggtcaggagatcgagaccacagtgaaaccccgtctctactaaaaatacaaaaaattagctgggcgcagtggcgggcacctgtagtcccggctactcgggaggctgaggcaggagaatggcgtgaacccggaaggcggagcttgcagtgagccgagatcctgccactgcactccagcctgggcgacagagcgagactccgtctcaaaaaaaaaaaaaaaaaaagaaaagaaaagaaaagcggcagccctgcccccaccaacatgcgtaatttttctcactagcatctatctcctttagacataaattctattcatgtgttttgtttctccccacactaaactcccagtgccatgaagacatatttgtcatgtgctcatggttgtatcccccagttgctagagccatgcctgggggcataggagatgctcaagaaatactagtcaaatgaatggaagaaggaacctctatgcctcagtttccttatctgtgaaatggggataaacctcacccttcagagttgttgtaaactgtgagtggcatacataggtaacgggcccagcacagagtgtggtgcttgatgcacagaaaatgctcatggccgggcatggtggctcacgcctggaatcccagcattttgggaggctgaggcaggtggattgcttgagctcaggagtcgagaccagcttgggcaacatagtgagatcccgtctctacaaaaaatagaaaaattagccaggcatggtggcacgtgctggtagtcccagctactcgggaggctgaggtaggaggatcacttgagcctgggaggcagaagttgcagtgagtggtgattgcgccactggactccagcctgggcgacagagtgagaccctgcctcaatgctcagtacatgtacaccctcttccttgggaagtagctccactcatagaccttaggccctggagccagaccatgtgagttcaagtcctcctatcacttccagctaattgaactcggcaagtgacaacctctctgtaaaatggaaacacagagtgacaaactcagggaagtcttgtgaggattgaatgaaacacacaagtgtcccagaaagggcagttctcagtgtgctagttctgttctttcccatgcaggtccctctccggtgcccagccagacaggaagtacagatgcccatacctccagatccctgactccctccccagctctcgggtctgcaggatccctctggattgcagctgagaggagttccccagcaggcagggaccccacgagacaagacgcagctttggaaggttacaccttgctcctactcttcccaccaaaatcatacctgtccctctctaggtgatggggacggggcagaggacccaggccgag

SEQ ID NO: 689 - DNA, 2300 bp, Homo sapien
tttctttctaggggcgctcagtaaggcccttgcgtttggggcaccagccctgagatagtgagaaggccctggctgtgtgaggagtgccagagggagggacaggttccgagagtggacaggctcaagagcttgggtggtttctagggtgggggaggacagggagcctgtggctggaagggggccccttacacagtggtgcccacccagggatgctgctgtacaatgggcagaagcgagtcccagggagccccaccaacctggccaaccggcagcccgacttcatctccttcggcctcgtggggggaaggcccgagttccggtgagacccccagcctccccacctacagggggactggacacagggctttggtctggcaagtgctaccctgggctccattatacaaaggagatctggaggaaggagaaaatgtggccgttacccttggtgaccacccaatctgctagagtaggaatagtatgccagtcaggtggaggagggtgcaacctcagacttgggactgctgcaggccaggattcattcattcattcattcattcatgcatgcatgcatcagttatttgctgaccaccccatgtgtgccaggcactgatacaggtaaaacaaaacagaccaaattctggctcttgtgggaagaggtgtattctcactggggaagaataaacaagccataaacagagaaacaaggtgatcacagggagagaggagtcctcagaggaacaaggaggccaggtgctaggctgcagggcgctgagcctggggtccctgtgggctgctctgggaaagctcccagcaaaaggatgtggggagagaagatccaggggatgggtcacggggagggacgacaagacagggacaggaacgggaacagccccagggctgggactgcaggaagtggtgacatccctcctctgggacccctctacccaactgggcccctagcccttcttacaaaccccctatccactctctcctgccccggcctgccccacggagcaggttcgatgcaggctcaggcatggccaccatccgccatcccacaccactggccctgggccatttccacaccgtgaccctgctgcgcagcctcacccagggctccctgattgtgggtgacctggccccggtcaatgggacctcccaggtgagacccaaccccatactgctacttccagccctcatcccgcccttgcccagcctctgttgccattcctgacttccccacctccccagggcaagttccagggcctggatctgaacgaggaactctacctgggtggctatcctgactatggtgccatccccaaggcggggctgagcagcggcttcataggtgagccccctccccacctccagctgaggctgggccttacctggctggctggaagagccctggagagcctgggagggcacctcagggtatgggctgggacaccctgccctgtgctcatcctgcccactcacctcccaggctgtgtccgggagctgcgcatccagggcgaggagatcgtcttccatgacctcaacctcacggcgcacggcatctcccactgccccacctgtcgggaccggccctgccaggtgaccccacaccccacacaccacctggctgccgtggcctccacccctagccatggctggcccctgtggggattatggggggtactgaatgttctcggccttacttctgggggctgctttgcagaatggcggtcagtgccatgactctgagagcagcagctacgtgtgcgtctgcccagctggcttcaccgggagccgctgtgagcactcgcaggccctgcactgccatccaggtacgcaccccgaccgccagtcgctgtcgccccagggcctgcctcttccctttgctgcctccccatatccaccaccatctcaaccactggggcacttccacaccccccactctcacctgagcactctccactcctcccatgtacccatcccccatctctgctacccgaaggccctcaccccatcactgctgcttcccctcctccagccctgctgaccaaattcttaccactaccccgccacccaggcactcccccacccccagcccatcttttttttttttttttttttttgagacgaagtttcgctcttgttgcccaggctggagtgcagtggcacgatctcagctcactgcaacttccacctcccgggttcaagcgattctcctgcctcagcctcctgagtagctgggaatacaagtgtctgccaccacccctggctaaattttttgcatttttagtagaggcggg

SEQ ID NO: 690 - DNA, 2300 bp, Homo sapien
gacagccgcctggagaacaacatgctgatgctgccctcagtccgaccccaggacgcaggtacctacgtctgcaccgccactaaccgccagggcaaggtcaaagcctttgcccacctgcaggtgccaggtaagacaccacccctaagaattggcagtgccctgcccactccctgactggcagggtcttcagctgtgctctctgctggcagagcgggtggtgccctacttcacgcagaccccctactccttcctaccgctgcccaccatcaaggatgcctacaggaagttcgagatcaagatcaccttccggcccgactcagccgatggtgagcaggagggttaatttgcggggtgggctggcctgggttgagggacctcgtggagtaactgccatcatggcaggagccctggctgcccctcagtcctgccccaatccctcagccctccctctccagaagcccccagacctctgggcctccaccctggtgtgccttctcttgtgcctcccggcttctccatccctgcctctgtgatatctccagcctcctcgtggctcctctgccaccggggcatcacccccagtcctcctgtcccagcttcctttccccatctctgctccttcctccctcctctgcctccatctcaccctttcctcctctctttctctcgtctcttacgggtctctgactttcactgtccaggcctccttctctactcgggtgagtctctgcctccctctcccccttgagggagactccagtgtgtgtgaagcaaattcagtttctttctaggggcgctcagtaaggcccttgcgtttggggcaccagccctgagatagtgagaaggccctggctgtgtgaggagtgccagagggagggacaggttccgagagtggacaggctcaagagcttgggtggtttctagggtgggggaggacagggagcctgtggctggaagggggccccttacacagtggtgcccacccagggatgctgctgtacaatgggcagaagcgagtcccagggagccccaccaacctggccaaccggcagcccgacttcatctccttcggcctcgtggggggaaggcccgagttccggtgagacccccagcctccccacctacagggggactggacacagggctttggtctggcaagtgctaccctgggctccattatacaaaggagatctggaggaaggagaaaatgtggccgttacccttggtgaccacccaatctgctagagtaggaatagtatgccagtcaggtggaggagggtgcaacctcagacttgggactgctgcaggccaggattcattcattcattcattcattcatgcatgcatgcatcagttatttgctgaccaccccatgtgtgccaggcactgatacaggtaaaacaaaacagaccaaattctggctcttgtgggaagaggtgtattctcactggggaagaataaacaagccataaacagagaaacaaggtgatcacagggagagaggagtcctcagaggaacaaggaggccaggtgctaggctgcagggcgctgagcctggggtccctgtgggctgctctgggaaagctcccagcaaaaggatgtggggagagaagatccaggggatgggtcacggggagggacgacaagacagggacaggaacgggaacagccccagggctgggactgcaggaagtggtgacatccctcctctgggacccctctacccaactgggcccctagcccttcttacaaaccccctatccactctctcctgccccggcctgccccacggagcaggttcgatgcaggctcaggcatggccaccatccgccatcccacaccactggccctgggccatttccacaccgtgaccctgctgcgcagcctcacccagggctccctgattgtgggtgacctggccccggtcaatgggacctcccaggtgagacccaaccccatactgctacttccagccctcatcccgcccttgcccagcctctgttgccattcctgacttccccacctccccagggcaagttccagggcctggatctgaacgaggaactctacctgggtggctatcctgactatggtgccatccccaaggcggggctgagcagcggcttcataggtgagccccctccccacctccagctgaggctgggccttacctggctggctggaagagccctggagagcctgggagggcacctcagggtatgggctgggacaccctgccctgtgctcatcctgcccactcacctcccaggctgtgtccgggagctgcgcatccagggcga

SEQ ID NO: 691 - DNA, 2300 bp, Homo sapien
caggattctctatcagactgagaacaatacccggacagggactattcttccccacacctctatcagattaagagtttactgagggccaagattgggcgtccctcctctgtccacccctatctccctgtgcggatcagagatagaccttattcagtgctgtgcctggagcctgggttggggccaggcagttggcctgactaccgtggatgcaatttctgttctttacaactctgagctggtcccacagaaatatgccccacagggcatattttggagatatcttttggagataggggatctatctgggatgggggtcaggatgccagtgttttttcaatcccccagatgcctggatgagaggccccaatgtgcttgggagcctgcggacccctatcacagggaacatagcttccggagccaggcctggtgccgcccagtgagctgggcatttccttctgtccacagctcacctcactcctggctgcaaacccagccatgagtttctggaacctagcaactctcacaggaaacaatggaaacttcagttttattctcctcctctatcattactcaaaaggttttcctcaaagctacacacacatagttttcctctccacccatcagcctcgggctgccctggaaatttcaggcagaagaggggagctgaagagtaggcagtgaataggtctgggggcttggtgctgtttgctgcctgcggttgggtcagagacagatcatggggctgtgattttaccacccacccgagcatctgtgatggggctttggcagggtctgtctgtctgggcctgagtgtgtgagttggtgtggttctggctctggggctgtgatttatgtgactcaaagttggtgtgtgagtgatttacatggaaaatggtgcaggtggggtgggcagctcagttcagtacccagtgcccactatgaggcactgtgattagtgggtgagaacaggtaaaagatacaggctgaggctgggtgcggtggctcaatgcctgtaatcccatcactttgggagggcaaggcgggcagatcacaaggtcaggagttcgagaccagcctggccaacatggtaaaaaccccatctctattaaaaatacaaaaattagccaggcgtggtggcacgcctgtaatcccagctattcaggaggctgaggccggagaattgcttgaacccggaggcggaggttgcagtgagccaagatcccaccaccgcactccagcctggggacagagcgagactccttctcaaaaaaaaaaaaaaaaaaaaaaacaagctggtaagcatgtaggcaatgatgtgggcctgtgtgtgaaatgtgcgtgcctgcgaggaatctatgtgaaaaggcgtcctcccgctccgtgacttgttgggatgtatgcgtgagtgaggggctgagtgtggtgtgagggctgtctcctgtgtccctggtggaggtgagagtttggaagcgagttaagtgtgcatgtgagccggtgaggattgttggtacttcagagttgggtccagagtgtgaaagtgttcccgggtagcgcacaagtgtgttcgtgcagtaaagttatggtgtgaaggtgttcttgggtgtggaagttggcgtgcacgtgtggcgcggagcggcagctgcgtgcgtgtgagcgtgggaaggagatcccgggatcttcaaaagctgcgcgagtggagtcggccgtgcggggcgtgcaggggcgtggaagtcggcggcgcgcgcggggaagcgggggagccggggatcggggaggcgagagcgcctggcccggcggccccatcccatgcccgggcccgggcccccggtcccccgccccgtcccatcccatactccaggccgggtttggcggggagccgggccgggccgcggcccgcgcggagggggctgggggcccagacaaaggcctagtaggctgcgcggccggctggggcgagcagagcccgcggcccgggggcggtccgtgggcggggcctggcgctccggggaggggcggttcgggggcggggccggcgctgcgggggcggggcgggcggggaggaaagggggcggtggggagagggccgcgctgtcccgagctggccggcgagcgggcggctgcgggcggcgcggagcgggcggcgcggagcgagcgagcgagagagcggcgcgggccgggccatggggtggcgggcggcgggcgcgctgctgctggcgctgctgctgcacgggcggctgctggcggtgagtgtgcggggcagaggggcggggggcgggggcggaggggctaggggcgccccg

SEQ ID NO: 692 - DNA, 2300 bp, Homo sapien
tgggcccctccctccttcttccctggcgtaaggtctggggaatggctcagagctttcaagctgagcaaacaaacatgtccgggcacatagggaacagagggcaggggagggcatggctatttttatcacagtataaaggattttcacagctgcttccattgtgtccacacacgttccatgaacccaggctatcagagtggctaggctgtgattggagggggttcactcctaaaacaaaacctgcccagcaagatgcctgactttcccccaggagggatctatttaaattgccccgtctggccgggtgcagtggctcatgcctgtaatcccagtactttgggaggtcgaggtgggtggatcaccagaggtcaggagttggaaactagcctggccaacatggtgaaaccccatctctactaaaaatacaaaaattagccaggcgtggtggtgcgcgcctgtaatcccagctactcgggaggctgaggcaggagaatcgcttgaacccgtgaggtggaggttgcagtgagccaagatcgcaccactataaaaaaaaaaaatctattgtgtgaatatgctacacatattgacctatgaaccttgatggacgtgggagttgtttctaggtctttgctgttgaggtttgagaacaggggctgcggcaaacaatctcatccacacctcctggagcacatgcctaaggttttctcacggtgtagacctaggagggaaaccgctggatcacctgtgaattccactttcggggttgcctgctctttgacctcatctcccacccctctctactttgactaccaagctcctgtcacactggcctccctttccttgaacaagccaagcccattgcagcctccagaacttcgcacctgctgtcgcctcccttcagaacgcgtttctttcagggattcccgttgctggcttttacttatcctcaggactccatcagatatgacctcctcagcccaaatgtcactttctctgtccccctcatctaaatgacttactccattcctaccccaatcacccattttcattttctttttttttttttgacacggagtctcgctgtcgcccaggctggagtgcaggggcgccatcttggctcactgcaggctctgccccctggggttcacgccattctcttgcctcactctcctgagtagctggggctacaggcgcccgccacctcgcccggctaacattttgtatttttagtggagacggggtttcaccgtgttagccaggatggtgtcgatctcctgacctcgtgatccacccacctcagcctcccaaagtgctgggattacaggcgtgagccaccgtgcccgccccattttcttttctgttttgtttgtttgtttgtttgtttttgagacagtcttgctctgtggcccaggcaggagtgcagtggcatgatctcggctcactgcaacctctgcctccctgcctcctgggttcaaatgattctcctccctcaggctcacagtagctaggattaccggtgctgggattataggtgcccaccaccacgcctgctaatttttgtagttttagtagagataaggtttcaccatgtttcaaacttctgacctcaattgatcctcccaccttggcctcccaaagcgctgggatcacaggtgtgagccaccgctcctggcctagactcaaactctagaagggctgagaccatgtatttttcacagctgtatcccctagaacagtgcctgatacatagagaaaaagtgctcaacaaaaaattttttgtggaggtgggtactaatataaatctcatgttagagagcagaaaactgagactcagagaggttaagccatgcgcccaaagtcgcagagcttggaggtggcagaaccaggattgaaccgtggtctgcccggttccagtgcccctgttctttccgaaagaggaggtcttgtcctgacatgagcttttcttcctgaactcttgttatcagttggccactccacaccacctgtgcggccacctgttggagggaacgctaggtccttcctttggctgtcactcctccatctgcagtgagtgagaactgtggccttggaccatgggagacctgcatttccaccacctgttctgggagtggggcccagtcagccccctttgcttaccttctgccctatattagagccccaggttctgtgcccttttcctatcatcgcaaaactcatgatgctccggctgctcagttccctcctccttgtggccgttggtaagaccccaacctgtgtgtgtgctccctgggctgccctag

SEQ ID NO: 693 - DNA, 2300 bp, Homo sapien
acctcaggtggtccaccctcctcggcctcccaaagtgttgggattacaggcgtgagccactgtgcctggcccatcattttcccttctgtcaaataaaagtggttggattagatcgcgttttaggccctgtgggtttcagacactctacagtggaatctgggcttatcggacctaaccctatctctccccagccacctcctgggcccctccctccttcttccctggcgtagggtctggggaatggctcagagctttcaagctgagcaaacatgtccgggcacatagggaacagagggtaggggagggcatggctatttttatcacagtataaaggattttcacagctgcttcccttgtgtccacacacgttccacgaacccaggctatcagagtggctaggctgtgattggagggggttcactcctaaaacaaaacctgctcagcaagatgcctgactttcccccaggagggatctatttaaattgccccgtctggccggatgcagtggctcatgcctgtaatcccagtactttgggaggtcgaggtgggtggatcaccagaggtcaggagttggagaccagcctggccaacatggtgaaaccccgtctctactaaaaatacaaaaattagccgggcgtggtggtgcgcgcctgtaatcccagctactcaggaggctgaggcaggagaatcgcttgaacccgtgaggtggaggttgcagtgagccaagatcgcaccactataaaaaaaaaaatctattgtgtgaatatgctacacatattgacctatgaaccttgatggacgtgggagttgtttctaggtctttgctgttgagttttgagaacaggggctgcggcaaacaatctcatccacacctcctggagcacatgcctaaggttttctcacggtatagacctaggagggaaacggctggatcacctgtgaattccactttcggggtcgcctgctctttgacctcatctcccacccctctctactttgactaccaagctcctgtcacactggcctccccttccttgaacaagtcaagcccattgcagcctccagaacttcgcacctgctgtcgcctcccttcagagcgcgtttctttcagggattcccgtggctggcttttacttatcctcaggactccatcagatatgacctcctcagcccaaatgtcactttctctgtcccccccatctaaatgacttactcccattcctaccccaatcacctatgtttcattttcttttcttctctgtttttttttttggttttgtttttgttttttgagacagtgttgctctgtggcccaggctggagtgcagtggcatgatctcggctctctgtagcctctgcctctccgctcccaggttcaagtgattctcctccctcagcctcccagtagctaggattacaggtgctgggattacaggtgctcaccaccacacctggctaatttttgtagttttagtagagatagggtttcatcatgtctcgaacttctgacctcaagtgatcctcccaccttggcctcccaaagcgctgggatcacaggtgtgagccaccgctcctggcctagactcaaactctagaagggctgagaccatgcatttttcacagctgtatcccctagaacagtgcctgatacatagagaaaaagtgctcaacaagaatttttttgtggaggtgggtactaatataaatctcatgttagagagcagaaaactgagactcagagaggttaagccatgcgcccaaagtcgcagagcttgaaggtggcagaaccaggattgaaccgtggtctgcccggttccagtgcccctgttctttccgaaagaggaggtcttgtcctgacatgagcttttcttcctgaactcttgttatcagttggccactccacaccacctgtccagccacctgttggagggaacgctaggtcctccctttggctgtcacttgtccatctgcagcaggcgaggactgtggccttggaccatgggagacctggagttccaccacctgttctgggagtggggcccaatcagcccccctgcttaccttctgccctatattagagccccaggctctgtgcccttttcctatcatcacaaaactcatgatgctccggctgctcagttccctcctccttgtggccgttggtaagaccccaacctgtctgtgtgctccctgggctgccctggactaggaatccttgaaatctaccactcgctctgagtcccatgacatgctatgcctggttccacaggagggggtctcagcttgtacccgggggcatg

SEQ ID NO: 694 - DNA, 2300 bp, Homo sapien
ttataaaggaattggaagggtgcccggggtcgggggatagaggaggtgggcagaaaaggagacgctacagttgaactggaacctgggtgaacagatctcaggaaagagcactgcaagcagagatcagcaaaagaagtgaagatgaggccgggtgcgatggctcacgcctgtaatcccagcactttgggaagccgaggtgggtggatcgcttgaggtcaggagttcgagaccagcctggggaacatggcaaaaccctgtctctactaaaaatacaaaaattagctggacagggtggtgcaagtctgtaatctgaactacttgggaggctaaggcaagagaatcacttcaacccaggaggtggaagttgcagtgagctgagatcatgccactgcattccagcctgggtgacagaatgagactctgcctcaaaaaaaggctgggcgtggtggctcacacctgtaatcccagcactttgggaggctgaggtgggcggatcacctgaggtcaggagttcgagaccagcctggccaatatggcgaaaccccgtctctactaaaagtacaaaaaattagccgggtgtggtggctcgtgcctgtaatcccagttactcgggaggctgaggcaggagaatcgcttgaatccgggaggcagaggttgcagtgagtcgagatcacaccattgcactccagcttagacaacaagagcgaaactccgtctcaaaaaaaaaaaaaaaaaaaaaaaagaagtgaagatgagcttgtcagattgtcagatttgcaaaatagccagaaggtcagtgttcttggagcaaactgagtgagcaggagggtggggaaagatgaagcacaaaggctgaattttacctgggatgataaaataatcttacacaagccgaaacgtatatactttcacataaatttatgtgcctatgaaattggagttgctctgggactcaagcggcatccttgccccaacccctgctgttttctgaagcattcctaaggaaccttagagtgtgggagagagaaatagcaggaagtccttaacctagtccaacccttttattttacagttagggaaacctaagctgagagaggagatggaaacctggttgtaggagtgagtggggaagggttcacggtcattctggtaggtaggggtagggccagagcaaggagtcctggtttgtgaaccaccagctggccgtctaggagtttacagaccagcagtggcaatgttgacaaagggcatatcttcctttccccaagaacattggctctggagcaataacccagcaatgggggctttggggtgtccctcttaatccggtagctcagcccattcggatatgccagctggaaagagagagggagaagtcaactgagtacctctctctaacagctcaatccctccccttcagggttaagatcggggctgcagtggttagcatctctgcttcctctagccggctgtgtcattgaacctgtgtgatcagacgcaaaccagatcagtatgacttcaaagcttcatctttgagatggagtcttgctccctcgtccgggctggagtgcaatggcgcaatctcggctcactgcaacctccgcctcccgggttcaagcaattctcctgtctcagtctcccgagcagctgggactataggcgcctgccagcacgcccggctaatttttgtatttttagtaaagactgagtttcaccttgttggtcaagctggtctcgaactcgtgacctcaggtgatccacacgcctctgcctcctaaagtgctgggattacaggcgtgagccaccgcgcacggctaaagcttcagttcttaaccatcaggcgacagtgcgtagtctggtagcaactggaaaagtcctgctgagatttagcctcccatacacacagagtcccaccccggacaggctgtatcaaccccccacggccatatgcccactgctgtttgcgtacaatgaggcgggacctatagactgtatccactgactcatctggagtgattccgcggggcgccaatacaaggaccactgtctccaaacagcagccagccacccctctctcttggtttccttcctttgagtggtgcaaaggcttaagggtgtaacctcagaatggggccctgaatcagctgtgggcgagctcctagagtatcttaattcctgcttcatctctttccattttgcagttgggcaaactgcggctcagaaagataaagaacttctccggagcgaaaaagctgctaagaatgtatccaaaactccgcacggtaaggactgaggacggt

SEQ ID NO: 695 - DNA, 2300 bp, Homo sapien
cttcaacccaggaggtggaagttgcagtgagctgagatcatgccactgcattccagcctgggtgacagaatgagactctgcctcaaaaaaaggctgggcgtggtggctcacacctgtaatcccagcactttgggaggctgaggtgggcggatcacctgaggtcaggagttcgagaccagcctggccaatatggcgaaaccccgtctctactaaaagtacaaaaaattagccgggtgtggtggctcgtgcctgtaatcccagttactcgggaggctgaggcaggagaatcgcttgaatccgggaggcagaggttgcagtgagtcgagatcacaccattgcactccagcttagacaacaagagcgaaactccgtctcaaaaaaaaaaaaaaaaaaaaaaaagaagtgaagatgagcttgtcagattgtcagatttgcaaaatagccagaaggtcagtgttcttggagcaaactgagtgagcaggagggtggggaaagatgaagcacaaaggctgaattttacctgggatgataaaataatcttacacaagccgaaacgtatatactttcacataaatttatgtgcctatgaaattggagttgctctgggactcaagcggcatccttgccccaacccctgctgttttctgaagcattcctaaggaaccttagagtgtgggagagagaaatagcaggaagtccttaacctagtccaacccttttattttacagttagggaaacctaagctgagagaggagatggaaacctggttgtaggagtgagtggggaagggttcacggtcattctggtaggtaggggtagggccagagcaaggagtcctggtttgtgaaccaccagctggccgtctaggagtttacagaccagcagtggcaatgttgacaaagggcatatcttcctttccccaagaacattggctctggagcaataacccagcaatgggggctttggggtgtccctcttaatccggtagctcagcccattcggatatgccagctggaaagagagagggagaagtcaactgagtacctctctctaacagctcaatccctccccttcagggttaagatcggggctgcagtggttagcatctctgcttcctctagccggctgtgtcattgaacctgtgtgatcagacgcaaaccagatcagtatgacttcaaagcttcatctttgagatggagtcttgctccctcgtccgggctggagtgcaatggcgcaatctcggctcactgcaacctccgcctcccgggttcaagcaattctcctgtctcagtctcccgagcagctgggactataggcgcctgccagcacgcccggctaatttttgtatttttagtaaagactgagtttcaccttgttggtcaagctggtctcgaactcgtgacctcaggtgatccacacgcctctgcctcctaaagtgctgggattacaggcgtgagccaccgcgcacggctaaagcttcagttcttaaccatcaggcgacagtgcgtagtctggtagcaactggaaaagtcctgctgagatttagcctcccatacacacagagtcccaccccggacaggctgtatcaaccccccacggccatatgcccactgctgtttgcgtacaatgaggcgggacctatagactgtatccactgactcatctggagtgattccgcggggcgccaatacaaggaccactgtctccaaacagcagccagccacccctctctcttggtttccttcctttgagtggtgcaaaggcttaagggtgtaacctcagaatggggccctgaatcagctgtgggcgagctcctagagtatcttaattcctgcttcatctctttccattttgcagttgggcaaactgcggctcagaaagataaagaacttctccggagcgaaaaagctgctaagaatgtatccaaaactccgcacggtaaggactgaggacggtcaaaagaccaccaagagttaaaaccatgaagctgcgtagtaccgcggaggctagagagacccggcccaccccttccaacctatgcccctcctcttaacttccgggcggggcatgacttccggttcccgcgcggcgctccaaagctcggggagtggtggtctccctttcctggagtcatttgtgggagttagggtcttatcctgatctttcctcgtcccccgctcccccgtcctccgaggtggcagctgcgtaggtgaacgttccccctgtccccttccttctccttcctaacccgagtacgcttgctcgcggccacagtggctgcctgccccaggagcgggga

SEQ ID NO: 696 - DNA, 2300 bp, Homo sapien
aggtttcaccatgttagccaggatggtctcgatctcctgacctcatgatccaccgcccttgcctcggcctcccaaagtgctgggattacaggtgtgagccaccgtgcccggcccattgttttctttaatactctcttccctcaaagaactaatcccttccagacatataatacatagcaggagagctgacatttaaaatccttcccacctcagagaatctctcaaatctgtttcctgagcaacaattgacagaagccaacaatcactaacgctgactagctgccgtgcacccagcacctagtcatcccttctctaaaggttccctgacccatttcttaggagactttaattgattctagacccagcaccttggatattcttgggagtacaccaattcttctcacattatcttggtttttgctcagttaataaggtgtgctcatcccccaaagtaagctgttactaacctagggtggtgaatagggaaaagcagaatcacttagggtgagttggactaaaatatttcgtccaagaaaggttgggtgaaacactgtgggaaagcaaaatcttgggaacaacctaagtgaccatcaacagggaaatgactgaagtaccgtcaaccactcagtggtgccgccacgtaaaaaatgaagcaggcttatgagtactggtaagaaagctgtccatatcacaacatgactaaggtcccgatcgatgtgtagtatgacccccgatctgaggaaattaaaaatacataaatacagatacaaataaataaaacctgatatatccaaataatagatagaaagttatcaaagaaattaattgtatttacttctgaagggcagaaacagtagaagggggaaacacttttcattttacatctttctgcattgttttctaactacacacatgtattacttttataacaactcaagaggaagaaaacttctcaggctttcccctcctgcccaaaaacctttctgagtgaaaacccctaacccacttaggaaaacacccttttattacttcttctagctcccagcacccaacgtctttacaacccaggtttctaggaacagactgtcagtgggcctttttctttccttttttttttttttgagacaagtctcactctgtcgctcaggctggagtgcagtagtgtgatctcggttcactgcaacctttcctccttctgggttcaagcaattctctgcctcagcctcccgagtaactgggattacaggtgcccaccaccatacctggctaatttttatgtttttagtagagatggggtttcaccatgttgaccaggctggtctcgaactcctgacttcgggtgatccacccgcttcggcctcccaaagtgctgggattacagatgtgagccaccacgcccagcagtcagtgggccaattcttaaggctggctctcaaagatgaaccagcaccacaatttacccggcttataaatcctgtcagcttcagaagacgacttaccaaacacaaatttatcctcaccagttaataactccttttctttgctcaaaaacccagtgagaaaaaataactccaggccaggcacagtggctcatgcctatacttctagcactttggaaggccgaggcgggtggatcacctgagatcaggagttcaagaccaggctggccaacatggtgaaaccgtctctattaaaaatgcaaaacattagccaggcgtggtgatgtgcgactgtaatcccagttactcgagtggctgaggcaggagaatcgcttgaacccatgtggcagagaaggttgcagtgaggcgacaacgcggcactgcaactccggcctgggcgacagagcgagactccgtctcaaaaaaaaaaaaaagaaaaaataactccagtgcactgcgcccttacttcctatctaacattgtgccgaacgttatacacagatcctcctccgtatgatccttagttcaggatcataaactcttgataaattactgccccaggaacctccagtgacatcaaccgctgctaccatttgtggaattctgccggccagacaccccacactgcattccctcacaactgatcctcccgatagcccatggggtaggcactgttatttccattcacagataagcaaagtgaggctcggagggcggggacttgcccaaagccacaaggatgaaaggtagtgcgatgactcaaccgataaaaataatcccggttgtggtgggggggagctgagcccgactcctcccactatgctgccgcggctccgaaggcctagcccgagtgcggaaatg

SEQ ID NO: 697 - DNA, 2300 bp, Homo sapien
tattagccatacctgcagtaaacactaaaaaatgtagttcttatttttgggtaattaaaaaatccaaaagagggctgggtgcggtggcttacacctgtaatcgcagccctttgggaggccaaggcaggtggatcacaaagtcatgagttcaagaccagcttggccaatatggtgaaaccccgtctctactaaaaatacaaaaattagctgggcatggtggtgggcacctgtagtctcagccacttgggaggctgaggcaggagaattgcttgaacccgggaggcggagattgcagtgagccgagatcgaaccactgcattccagcctgggtgacagagcgagactccgtctcaaaaaaaaaaaaaaaatccaaaagaaaatatgactataagtcaatatactggaattaagtgtctttgttggccaaatagctgtggcagtagacaataaatgagctgttattaagataagcaatttttttttattttttttgagacagagtctcgctctgttgcccaggctggagtgcagtggcgcgatcttggctcactgcaagctccgcctcccgggttcacgccattctcctgcctcagcctctcgagtagctatgactacaggagctcgccaccacgcccggctaatttttttgtatttttagtagaggcggggtttcaccgtgttagccaggatggtctcgatctcctgacctcgtgatccgcccgccttggcctcccaaagtgctgcgattacaggcatgagccaccgtgcccggcctaggataagcaatttaagcgatttttctctaacatggggaaacatctaagaataagagagggaagttctctattttcctgaagctttcatactagcagagaagacaaataatagatactgcgaagataggatgattgaagaatgcagtgatataaatttgggggaagaggagggaggcagagcaaagaaattcaaggccttggccagacgtaatgtctcacaccttgtaatcccagcagtttgggaggctgaggcaggctgatagcttgtgtccaggagttcgagaccagcctgggcaatccagcaaaaccctgtgtctacaaaaaaatacaaaaattagccaggcatggtggcatgcgcctgtggtcccagctacttgggaggctgaggtgggagaatcgccgggacgtcgagattgcagtgagctgagatcgtgccactgcactcctgcctgggtgacagagcaagaacgtctcaaagaaaaaacaacaacaacaacaacaacaacaacaacaaaaacacaaggcctgtggttgggggaaggttgtaactctaaaaaagacccatgtggctacagcgagggacactgggtgtaggtagagataagaagagtgatactcagttctcacatcacggcggactgaatacaggcccggggagtgagagaccatccacccctgtgatctggggcaagtcaccagccctttcagagaagcttccgtcttctctgcaaaatgggacaataccttgcttcacaagcttgcaaggatcaaaagaactggtagtgggccgggcgcggtggttcacgcccgtaatcccagcactttgggaggtcgaggcaggtggatcacttacttgaggtcacgggttcgagaccagcctgggcaaaatggtgaaaccccgtgtctgctaaaaatacaaacattagcctggcgtggtggcaggtgccagtgatcccagctactcgggaggcagaggcaggaggatcgcttgaacccaaggggtggaggttgcagtgagctgagatcgcgcgctgcactccagtctgggcaacagatcaagactgtctcagaaaaaacaaacaaaaaagaactggtagaggaagcgctttgcatactatcgttcacagtattattacaaatacaaccattaggaaaacatgcagagcatagccccgaactcacgagctgcgccggcccgcgcgtgcgcgacaggcgggcggagccagggcagtccaggcaccgccttgacccgccccagcctcttccccttccctgttcctcccacttccgcgggcacccaactgtgcgtctcctgcgcgctgacgtcaggtgcgtgcccctgtccggcagccgaggagaccccgcgcagtgctgccaacgccccggtggagaagctgaggtgagtgcggggcccgaggttccccgcgggagctgccaccctaccttcccatccccgccgtctccgtcctctcccagtcctcggggacaccccgtctgcgggatcgtggggggcccgggagcacg

SEQ ID NO: 698 - DNA, 2300 bp, Homo sapien
tttagtagaggcggggtttcaccgtgttagccaggatggtctcgatctcctgacctcgtgatccgcccgccttggcctcccaaagtgctgcgattacaggcatgagccaccgtgcccggcctaggataagcaatttaagcgatttttctctaacatggggaaacatctaagaataagagagggaagttctctattttcctgaagctttcatactagcagagaagacaaataatagatactgcgaagataggatgattgaagaatgcagtgatataaatttgggggaagaggagggaggcagagcaaagaaattcaaggccttggccagacgtaatgtctcacaccttgtaatcccagcagtttgggaggctgaggcaggctgatagcttgtgtccaggagttcgagaccagcctgggcaatccagcaaaaccctgtgtctacaaaaaaatacaaaaattagccaggcatggtggcatgcgcctgtggtcccagctacttgggaggctgaggtgggagaatcgccgggacgtcgagattgcagtgagctgagatcgtgccactgcactcctgcctgggtgacagagcaagaacgtctcaaagaaaaaacaacaacaacaacaacaacaacaacaacaaaaacacaaggcctgtggttgggggaaggttgtaactctaaaaaagacccatgtggctacagcgagggacactgggtgtaggtagagataagaagagtgatactcagttctcacatcacggcggactgaatacaggcccggggagtgagagaccatccacccctgtgatctggggcaagtcaccagccctttcagagaagcttccgtcttctctgcaaaatgggacaataccttgcttcacaagcttgcaaggatcaaaagaactggtagtgggccgggcgcggtggttcacgcccgtaatcccagcactttgggaggtcgaggcaggtggatcacttacttgaggtcacgggttcgagaccagcctgggcaaaatggtgaaaccccgtgtctgctaaaaatacaaacattagcctggcgtggtggcaggtgccagtgatcccagctactcgggaggcagaggcaggaggatcgcttgaacccaaggggtggaggttgcagtgagctgagatcgcgcgctgcactccagtctgggcaacagatcaagactgtctcagaaaaaacaaacaaaaaagaactggtagaggaagcgctttgcatactatcgttcacagtattattacaaatacaaccattaggaaaacatgcagagcatagccccgaactcacgagctgcgccggcccgcgcgtgcgcgacaggcgggcggagccagggcagtccaggcaccgccttgacccgccccagcctcttccccttccctgttcctcccacttccgcgggcacccaactgtgcgtctcctgcgcgctgacgtcaggtgcgtgcccctgtccggcagccgaggagaccccgcgcagtgctgccaacgccccggtggagaagctgaggtgagtgcggggcccgaggttccccgcgggagctgccaccctaccttcccatccccgccgtctccgtcctctcccagtcctcggggacaccccgtctgcgggatcgtggggggcccgggagcacgggttgtgggggagtgcccggctcgcgctgcgtcctccgggcgggcgcgggtccgcgttctgtgggggagccggggcgggggtcgcggccggggaggcagggggcgcccgtctgaggaggggcgcgcggccggggctcggggcgcgagcgggaccgggctgtcaccggcagcggcggaaggaagggggtcacacccatcctgggcgcccgggctcccctccccccagcccggcccggcgggctcctaagggcggccgggggcctcagagcgactcgcgggcgcttgggccgggccgggcgccggtcttccgtgctggcaggctgcgttccgtgccctgcgctccggcctggacttcctgcttcgccgggcgccgccgcggacattttgcggcgggggtgggggggcgggggaggggagtggcgttgcggccgcggcggggcggtggcaggagggcagctcgctggctgctcgcggcggtgcctgtccgagctcccctccgcgccggccgcgtcctctgggcggggtggccccgagccacggcctccaggctgctcttcctttcggaggtcgagttcctagcatttccatccgctcctccagcccgctccctgccggtttagctgaagcttccctttcggggagttacctaacta

SEQ ID NO: 699 - DNA, 2300 bp, Homo sapien
taggtatgtgcagtctaagtaacgtctttgtgactcaggtttacttcctctaaaataggggtagcagtagtgcttacctaacagggctgcagtgttaggaagattgaattaatatatatgaagtgtttaggactgttcactggcacatagtgagtgctgtatagatttttgctcttggcacaactgtgaggacccttccccgccatctttgagaagctgtgtttctctcaaacataaacattttaataaccatccttctcccggactaatctgatgaatccaaaaacatttcttttttcttttttgagatggagttttgctcttgttgcccaggctggagtgcaatggcgcgatctcggctcaccgcaacctccgcctcctggattcaagtaattttcctgcctcggcctcttgagtagctgggattgcaggcatgcgtcagcgcccctggctaattttgtatttttcgtagagatggggtttctctatgttggtcaggctggtctccaactcctgacctcaggtgatccgcccgtctcggcctctcaaagtactgggattacaggcataagccactatgtctagcccaaaaacatttctaaatgaagtggagattgctttaccttttttttttcttttttttttgagacagagtctcgctctgtcacccaggctggagtgcagtggcatgatcttggctcactgcaacctctgcctcccgggttcaagtgattctcctgcttcggcctcctgagtagctgggattacaggtgtccgccaccacacccgggtaattttcgtatttttagtagaggtgggggggtttcaccatgttggtcaggctggtctgtaactcctgacctcacgtgatctgcctgcctcggcctcccaaagtgctggaattaacaggcgtgagccgctgcattccggcctcctttacatttttatccgttacctttaccgttgtcatagaagcaagggtgtcaggcctcaggtatgcagtatagtctgtggacccatcagcataagtgtcacctgggagctcattagaactatcaggattcatcccagtcttactgacccagaatcttattttaataagatccccacatgatttttatgtgtattaaggcttgaagcaccctcttcaggactgctagagtgatgtctcaaatttcggaaacaatgtgaatgctttatttcattttattttcctatggaagcataacctggtttattttaggcagtgtaccacaatttattgcaaggatcataatctgaaaatgaatctgaagcatatttagtttttaaaggaattgttgcttcctgcctattacgtagaattgcctcatgtctgcccattatcaggaactaatgtgttatttaaagttttttttttttttgagatggagttttgcccttgttgcccaggctggagtgcaatggcatgatctccactcactgcaacctccacctcccgggttcaagtgattctcctgcctcaacctcccgagtagctgggattacaggcatgtgccagcatgcctggctgatcttgtatttttagtagagatggggtttctccatgttgggagtttctccatgctggtcaggctggtctcaaactcccgacctcaggtgatccacccaccttggcctcccatagtgctgggattacaggcgtgaaccaccgcacccagccgaattacgtattttttaattttatttttattttttagagatagagtcttgctatgtcaccaggctgcagtgcgtggtgtgattatagctcactgtaaccttgaactcctgggcttaaaggatcctccaacctcagcctcccaagtagctgggattgcaggcacgcaccaccacacttggctaattgtaaatatatatatatatttttgtagagaatggggcctttttatgttgcccaggttgttcttgaactcctggcctcaagtgacctcccaccttggcctcccagagctgtgggattacagttgtgagcctctgcaccgggccttaattttttttttttttgagacggagttttgctcttgttgcccaggctggagtgcaatggcgcaatctcggctcaccgcaacctccgcctcccaggttcaagtgattctcctgcctccacctccctagtagctgggattacaggcatgtgccaccacagcacggggccttaattatacatttgaacttaagtgacattttattgaaaactaattgtggtgacgaggaatggtctaagcatatgattaggataattcatattcattatgaaa

SEQ ID NO: 700 - DNA, 2300 bp, Homo sapien
atgcacctgtaatcccagttgctctggaggctgaggcaggataatcgcttgaacccgggaggcagaggttgcagtgagcagagatcacgccactgcactgacacatacacacacacacacacacaacaagcagggacttgagagtcagactgcttgggtttaaattacagttctcccagttactggctgaatagccttggcttagttacttgctgagcctcactcttcttatctgtaaaatagggataatacagcacatacttcataggctttttgggaggatgaaatgtgtgaatatgtgtaatatgttttgaacagtacatagcacttagtaaatgctgtatgagtgtttgctgcttactattattatttgagtgcttttagatttaaccagtaattgattgatcttagggatcagggttgttaatctttaatgctgtattagttagtatgggtgcttcttagtgcataaaagggaaaggagaaggaaaaaggagatataaaaggaagttgaataaagaaggataaatatggctggctgcggtggctcatgcatgtaatcccagcactctgggactttgggaggccgaggtgagtggattgcttgagtccaggaattcaagaccagcctgggtaacagtgagacccgtctcttaaaaaaacaaaaaccaaacaaaaacccagccgggcatggtggcatgcgtctgtggttccagctacttgggaggccaaggtgggaggattgcttgagtctgggaggtggaggttgcagtgagctgaggttgtgccactgcactccagcctgggtgacgggagtaaaaccctgtctaaaaaaaagaaaaatatactgcagataattttgatgaggagcgggagagtgtatatttcatgtgagttactcacactaatgtagtttcatgttcttttgtttcgtgatttttgcatccaatcaacaactcacagtgtgtcagtctagaagtgctcagtgctagaagtatagtggtgcatgaggtagtataggttcatttacagggatgttaataggcatttataaattgttatgattaattgttgtgaatggtgctataggagcatggtggcatctgaccaagagttaggtggttctgtatttttatgtttaattataacccctttaggattataatttaaattaatttaaatataaatcttaaaatttaggtacatattgggtggtgtttctttttattctttcagaaaactgttaaagtatttcattgaatctaagattccaatttcatagaagtcaaaatgtgggggaaaaatggctgataatgattctaagagactcaaagatacattctgactttagagatgttaacatgaaaaaaagcatctcaaattaatgactctttggtacttgtaattgatagcttcttaaaatggaggaggactctagtaagagaagctatagtatctgtttataagtcagtatgctttagagcaatctgactttttcattataaaaatgtaggttttggactaggcattctggtgctaaaacagctgctgaggccagcgatcaccctgttctttgttcagttcctcacgttactcatataattaccgtgtgatcgtgtggtgctctgctgcttgttggtcagagcctgagtaaggctgaataaggctggatcatgaaccattctttaaagcagtggcctttgtattgcagtctagttgacatacatgcatacatacaggtgtgtgtgcacgtgtaactgaagaacagctttcacaaaataatatttagcacactgtggaattttctctgatacagcctcttctctttcatgataaaaataaattcgctgattatcacaccactttggaccttttaaaaataacacttaagaagttggaatagccagggatcagaaacttagaaatggaccttatttgttattgtaacttatagcaagtcattgtgtctcttattgggttcttttagccataataattgtgctagttcttttcttgctctgagtgcctgaacctgttgctaagtgaggaagaaaaatccatatgtaagtataaataaacaaatgtctttaatctttttgcaggtcatcatcagatttgaaatatttaaagtggatacaaaactatttcagcaatgcagacaattaagtgtgttgttgtgggcgatggtgctgttggtaaaacatgtctcctgatatcctacacaacaaacaaatttccatcggaatatgtaccgactgtaagtataaaggcttccttctgttagtaaaatgttgtaaaat

SEQ ID NO: 701 - DNA, 2300 bp, Homo sapien
ccgggccatgctggctccactttgggacagcttcagggaagggggtatagggtcactgcctgggagtcagaacacctgggttcagttctcagctctgagtttgggcaagtagcttccactccctaggcctcagtttcctcatctgagtcaaagatgagatgttcctgaaggactttccactgcagatgtcgctgtcttccatgtaggcctgggccagacgcttggactgccacttttttttctttgttttttgtttgtttgtttgttttttgtggctttggcggtgctgggcaggtgagacacagttcttgctccttctgatgctcagatctgttttggaggcccccgctctgaacccatgcattcaagaaccagctccagggacacccagggtcctccaagtccaaatcagctccctccccagctctgtgacccaggctccattcagggggtggcctgcaggggggcagtgggagaaggtggtggtgccttgctttctgtacactctgccactgctcctgaagtgttaatcaaattaaggctccaagaaaaacaaaagctccgcagccacttcgggctgccttggagtcgtttgctctcggaacagctgggagaattccacatcacctccgtcccccaagccctgggtggctctgaccccaacgaacacactccttccagcctggagggctctggctggccacaatgacctcatagcaacagccattggacactcggggcaatttcatgggagatatttgttctttggtcttgatgcagagagaattttttcctctctccctgtctccatggaaaccccagctacactgttggcgatcccccttcccaccccatgcttttcagatcaatattggagcttggctccccactggctgcccacagcggatggtggcagagctctgggcaggaggaactggggccagggttaagcgcggggcatggggaactgtccctgagcggggatgaaaggagcgcgggtccgcttgctccctgtccacccactcactggagctcatccctttagtctccctccctgcagcaaaccttccgcccctacccagggagcgccctgagcgcagatccagtcaaggagaaacagacaggtcaccagcggttaccaccccttcctccttaggctagacacggggagctggggggccgttgtcttctttaaggtctggacggagtttcttcctgccccggggaaaaaccaaggcccggccagcgccagcgccagccccgggccctgggagaccaggcgtcctggtcccttccttctgtctccggctcccgccccccaagcagaaacaggtccctgcacgcctccagcccagcccgcagcgcggcgcagctcggcgcagctcggcgctgggagctcgctccggacttctcgggattaacctgctattatgtcccggagcccttccctgcaatgggcttcctcagcgacctgtcagcccggctggactgcaacccgcgtccggcgcccctcccgggccaccgccccgcgctcgcacccctggcgccctcgagagccccgagccgcctaccggtgcggacgccgccacagccacccctgacgcctctgggcagggagccggacccgggcaggaggggaccccgggtgtgcagagggacgttcgggccgtggcggcggcagcggagcgagcgagcctccggtcccgcggccgagacacctgccgggctgccccgcgcccgctgccccgcgccgcctggcaccggccgctgcccccggggcctgccccgccccgccccgccccgctcggccccggccagacttacagccagttgctcgcggcggctgagaagacggcgaagacgaggaggcgcagcgaacgcaggcacgagcggggactcatggtgccgccgcgggcgcccggcccggggcagcggctgcggccgcggggggcctcccgtcggggctgcaggtgggcgcccgcgggcgggccggggcgcgcgcggcggggctctgcctccgtgtgcctgccggcagcctgcccgctgctgcgcccgctgcccggcgcggaccagactgtcagcgccgccccagagccgggatgcggcggcggcggcggcggcggcggcggcggaggcgggcgggcgggcgggcggccgggggggcgggccgggggcgggccgaggatggggttacctgggcgggcccagcggcccgggacacccccccgggggcgggccggagcggcggcggctgccgccttagcccgcgggactgggctgctcccggggcctccccggct

SEQ ID NO: 702 - DNA, 2300 bp, Homo sapien
ccaggaagtgaatatgctggttcaaaataggtcagcacttcagtaccacccttaaacacaggtgagagtggcccctgccctggggacccccccagtctggccctcctccagctaacctctcatcacaaggagggaagaccatgggacaaggggacatgcccacctggaacttgtggcacctccactagagcatactctgggtgcccaggcccctggggttccctgcagagatggcccttagcccactgccaggacctgcgtgggtctcttccgcagatccagcccgaggacagagtacaccactggcgtgcccagccctaagcctgaggggctaccaaggggctgagcttgcatgtgcaggctgagatgttcatgaatgtgcacaagactctcgaaggacaggacagaggcagaggtaggaaaaggtagggggcaggggcccaggccaggcactaggggccccctctccctgtgccaccagctccagggcaaggtctgaggagtatgagaatgccacactcaaagccagctttctgccttgttaggaaagtgtatttgtcaagatagaagaatagaacataatttattttgcattttgttagcttgatttatagcctgcaaatatttggacatatggtatgtgaacctccatctatactcttgcccagccccacaaatccctgccacgttccacccagtcccaataccaaatgtttactgagcccttcctctgttctgagcccaggggaccccagggcaccatcccagcacccaaacatgatggcctctgtgggagcaaacttcatactccaaaatcagtgaagaactaagatcagggggtgagggcatagacctggtccttgcctctgttcccaacccctagggaggtgggacaggtgcctccctttccgggccttagttttactgtttagataagaggtccctctacctgtgagcagctgggggatgcagcctggaggatgagtagcacacagaatcagatcagtgacctgagagggtgtggcgtggacttgggcagacaattcttaggggttacagtgatgtggaattgagctctctggactagccaagcacaggctgttgcagcccattccattccattcatttattccttccacaaacatggcaggcaccgccctgtgcccaaaacaaacaagaggctgaatctgcctagtatgggaggataaatcgaacaagcacatagaaaaccaaatgcaaagtaagacttggtgagtgagccaagagagcttccctaaactcctcctgtcctcccaatcacagcgtcttaagcccacttcccggatgagaaaacggaggctcagagtcaagaccctgctgcctggggcgcgcccagaccttgtggctagccagaagcgaggtttcggattcccacagtctcgggccactgtcccaagctgcccaaagctggggaggccccgtccagctcccggaaggctgtagggaggtgagcgccagggaggggctgggccgcaggacgcgggggccaggaggcagggaggggccgggcggggggcggtcgggagacatccagcgccccgatgtgcagccccaggcacccggagcgccagcgcctgggtgcgcgcgagtggtagccgcgctccggtgggtccgccgcggtcggaccggggtctgggctccaggcgccggcggggggcggtggggggggtagggggacagcgagggccgcgctgcagtgcccgcagcggcgggttgggggagctgtgcccgcctgtcccctaggcccgggcggcggccgggcagctgggtcgccgcgcctctagccgggccgggctcggcggcgcgcagccaggcgtgcctggagcgggctcgggccccaagtcctccggagcgcccagccggggaggccccgggagcagcccagtcccgcgggctaaggcggcagccgccgccgctccggcccgcccccgggggggtgtcccgggccgctgggcccgcccaggtaaccccatcctcggcccgcccccggcccgcccccccggccgcccgcccgcccgcccgcctccgccgccgccgccgccgccgccgccgccgcatcccggctctggggcggcgctgacagtctggtccgcgccgggcagcgggcgcagcagcgggcaggctgccggcaggcacacggaggcagagccccgccgcgcgcgccccggcccgcccgcgggcgcccacctgcagccccgacgggaggccccccgcggccgcagccgctgccccgggccgggcgcccgcggcggcaccatgag

SEQ ID NO: 703 - DNA, 2300 bp, Homo sapien
gtggccacttttcttttgctctcttcgtttagtccctataggatttgaagtcttgttaagtggaacaggagggacagatggtgcctgaaaacttattcctattgagactcctgagcttcaagccatctgcattcacatacagcacattggcaatgatactgttttttaaaatccattaattcgataaatatttctcttttttttttttttgagacggagtctcgctctcgttgcccaggctggagtgcagtggcgtgatctcagctcactccaacctccgcctcccaggttcaagcgattctcctgcctcagcatcctgagtaactgggattacaggcacctgccaccatgcccaggtaatttttctatttttagtagagacgggggtttcaccatgttggccaggctggtctcgaactcctgacctcaggtgatccgcctgcctcggcctcccaaaatgctcccaaaatgcccagtggctcacacctgtaatcccattaactcgataaatatttctagagcacctactatgtgccaagcacccttctaggtgtttgtttgctaaatctagcaaccctatgttcccactaaaagagaatgtgaggctggtggaaatgagggcttaggagacacaacagctgtaggcgtggttccagttactacaaaagtgactaaataacagctacagtaaatccgaccctgaatgtaacggtgacatgagtataatagtgaaagtgactaactgggcacaagggtatgaggacaacagtgtaccctgaaggggcctgttaaatactggcttgactgtgtggcagcaaaagtggctgcatgacaatgacagtgaaaacaacagaaagggcaacagctgggcaaacaaagtgctattttgaacagaaccgtttgaagtttatggtcaatgacggtagctgcatgtcagacagtgacagtaaatatgatcgaccgggagacagcaacaatgcaagtgacagttctgcccagtagattgaatttgtgatgtaaaacggtgatggggtgagtcagtcagccagagacagctctcagaacgactgaatattgacattgcagatggaaaaggtataaccacagaggaagctggacattgcactaagatggctggatttgggcacgtaactgtcagggacagaaaaagtggctgcatgtcagtgacagggtgactgtgttcagtgggccagcgcggaggtgactcagtttgttactgctggatctgatttaaatgtttgtgtaaggaagggtggcaaggggacgcttcaacagggaacgcatagtgtgtgagaaggaaaatgagcaaaagaaaagctaggactaaatcccaaagcccctaaatcccaaaattgggaggtgcgagaggcaggatcaggatgcctccaggatgccttcagcccactgcgccccaccagcgccaagcctgtcccacaaagagtgcgggctggggacgcggctcaggtcgcctctccgcctcgcacgtgaatgtgttgttttggaaaaacgaagccttttgtgttcacttccttgccctcctttgaaacaaaatcctaatcctagagctgccggagcgagactgcggagctccattagaactttccttagggccgggcatggtgggaggccgaggcaggtggatcatctgggctcaggagttcgggaccagcctggccaacatggtgacatcctgtctctactaaaaatagaagagaaaaaaaaaattagcagggcgtggtggcgcgcgcctgtaatcccagctactcgggaggctgaggcaggagaatcgcttgaacctggaaggcggaggctgcagtggggcgagatcgcgccgctacactccagcctgggaaacaagagcgaatctcccatctcaaaaaaaaaaaaaagaaaaaaactttacttaggaagtgtggggagggaaggagggagtggccaaggtcagaggtcagagaagagcctagcaaccagccggcccccgccgtcctagcataggtggagagcgagcgcgtgacgcaggccccgcccccagcacgtgaccgcggcgcgtggggcaggtcgggccgccccctcccctctgatacccattgcgcgccggcctcaagatggccgccttctggcgtctccggcgctgttgaatggcgaaagctttattgttcccttcgggcaggagtgttcgtgtcctctatggcgctgtcaataaagaacggcagtttgaatcggtgctgaacaggtaaccatagaaacggggctgggactccgcgtggagacccttcctg

SEQ ID NO: 704 - DNA, 2300 bp, Homo sapien
gtgcaccaccacgcccagctaatttttaaacaactttttgttgagatgaggtcttgccatgttgctcagattggtctcaaattcctaggctcaagcgatcctcctgcctctgcctcccaaagtgctgggattacaggcatgagccaccgtgcctcgccttgtctgcgtttttccgcctctcatctgcccacttctctgacaccccaggagtgagttcccagccatggattcttccatctgatgagccttgaagcacagcccggaggcctgtgggctacggccaccctactcacaggtctgcctacactatggtgttattaaaatgtttacattagctgccaaccttaaaaatcaagacgtaacacaaataagttccagatagacaactttttcttgaaaatgcagaaaactggacacacatctccaccagcaatgttggctggatctgggtacactctcctagcaggctctgtaagggtgcctgcctatctcatgtaggcatttgagtttgccactctgggtctagtccaatctgctttgtactcacctgccctcttacagcatctctgaacaatttctagctagtatctgcttaaatgcctctggtcacaggagtctcactacatcagtgaggcagtccacctgagctgcgaggaaggggctcctatggaactgtcttccccctttctgtagcaaaaaaaaagacacagaggaaagaaacgggcgttggagccaagcagctgtggatctgagtacctctctagcattcaaccagctgtgtgatctaaggcaaatgatggcctttctgagcttctgtttccttaggtgtgccagccctgcaaggctgtgtgaggcttaaactggagcgagtttataaagcccctagagcagggtctgactcagggcacatgttccccaaatggcctttctcatcctatgtaacttccagccatggctccaattctcctcaccccccagtgaccatgagagctgggaacgaaggaagaggggactggacgatggtctgtgccaggcggcagtgggaagcaatcaggcacttgctcccgtgggcatccaccctctcaggaggctgcaggtctcttgcctgcttctcggactgcttggcccaccaggtgtgtgagggacttgagggtggcagagcaggccccaggatgcagccctatatccctgtcctcccctcacagcccaaagccatccctggatgagacccctagtcctgggggatggaactggagacagggaaggtcaggggagggaaaagcagggaatgatagtccccctcactggataacagctcccatgaccggccacctggctgtgtgcccggccgtctgccaggagttccacctgggccctttcacgccaccctaggatatcgatactggtattcttgttttacagacatgaagttttagactcagagagcttaagaaacttgcctaaggccacacagcaggacacttgtcttcctggtccctgagcctgccctcctgaccactgcaatctaaggcctccttaaaatcccgtggtccctaaatgccaagttgttggggtggggaaagggagagagttttggttttggtgtttttttggtttttcacctaaaagtgcctctgagtttgccgctgagcccatctctgagcctctgcccatgaactagtgtgtatccatcggagtgtgtcaccacgcgaagcactcggtgttggggtcatgcgggcaggagcgagcatgcggtggatgtgcggcccgcgcgtgtgtccacagagggaatccctgggtgggtctggtcctggtgtcgccgggacgtcccgatggtggcttcgcgcactggggccctgagccctgagtccaagtgcgcagcgcggggcgcgcccccgaaggtgcccgccgggggagtgtgggcgtgcgcacgtgcggcggcggtggccgcgggccgggtggccgcggtgcgggctccgtgtcccccacccccccgcctcggtgctgattggctcggcgccgtgacgggccggcccccgcccggggcggcggcggcggcggcgggcgcgggtgcccgcgtgtgcgctgggagccgcgtgtgcgccggggtgtgcgcccggccgggtgtgcggagagcgagggagcgcgctccctcccgacgcgcgggccgcagcggccaagcccgagggtgcgtggcgcccccgcccgcccggcccggcccggccatggcccccgcccggggccgcctgccccctgcgctctgggtcgtcacggccgcggcggcggcggccacctgcgtg

SEQ ID NO: 705 - DNA, 2300 bp, Homo sapien
gatgggtcccaagttcttatcctgcaaccaggaagaatgaggtatgcagacaagtggggagtgagcaagacgaagaggagctttactgagcgatagaacagctcagcctcctgcagagcctccctcagggggcagctcctttccacagccagggtgtcctgatgagtgttcagctgctagcagagaggagaccctggaatgggaagctcctctctgcaggcaggtcatcctgtcgactttccagctctcagaagagggaagaccctggaatgggaagctcctttctgcaggcaagttgttctgccatctctgcagctctcagcagagaggaggccctggagcgggtagctcctctcggcagctggtcatccaatgtctgcccagctctggctgagcctgaagctttcatgagcctcagagaggaggaagtgcatactgattggtccatgggtggctataggcaagcccagaaaatacaccataagttcccactctggtgtgtgggactggcagcctggcccccagccttgaggccctccctggcttgaaggtagggcctcaccagggacccatccccttccacccaggagcctgtctgtctcctgctgctgttcatggtgcccaggctgttcatgccaaggagcgtctgcaggccagtgccgagctgccctcagtttccccttggctttccttccatgctagtcagtgcccaaagtccagagggggccaaggcagcaggggtctagtgtgtcagcactgccccaagcatgcccacacccagccaggctgcgacagcacccaggctcagcaccaactttgctctaagatcagagtgggcgccaagaggagggagaagccaggcagtgggagcagacacttctgagcctgaagggtggggcggggggccttcccgggcccccaagattgcagggatgcctgggtccacagctgcagtttaggcagctgcagctgcatgggggatggcgggggcccccacctgctccatgaagcaggatcagctgtggtttggcagctgcagtggttcccaggagggcggggttcccactgtccccagctcccactggctacatggagcatgcagccctggccgtgcctccctgctgcagccagtgtgatgacagcagccattccagacggcccgccattgccatctcttttttttttttttttttttgagatggggtcttgttctgtctcccaggcaggagtgcagtggtaagatcaaagctcactgcagcctcaacctcctgggctctagcaatcctcccagctcagcctcccaaatagctgggactacacaggtgcatgctaccacacctggctattttttaaatttttagtagagatggagtttcaccatgttggccaggctggtctcgaactcctgacctcaagtgatccgcctgccttgacctcccaaaatgctgggattacaggcgtgagccaaagcacctagacttgctgtttttttaaatgttggcaaaagctagtgactaagtgttcaccatgtgccaagtgttttgtatgtgcaagtcattaaaatgttataataatcagatgatataggaccccgttcccagtgtacagataaaactgagggctcaggaggtcaagtaatttcccaaagacatgcaactaggaagcagcaagtctagaaacagattgctgtgcttccttctcaccaatgcactgttctttcttctttgtattttccaagcttttggcaatgaattgcatgtcactttcataatcatgaaaagtcctacaagggacagatttttttaaagattccttccgctctggtgttctgtgcttcgctggttctcagaacctcaccctgcacggcctccaccccacatcctcacaggcactggcctcactgcccccactcccacaccagctgttgctggggcaggacgcccaatgtcccagtcttgctgaagtctgcttgaaatgtccctggtgagcttctggccactggggaagttcagggggcaggtctgaagaaggggaagtaggaagggatgtgaaacttggccacagcctggagccactcctgctgggcagcccacagggtccctgggcggagggcaggagcatccagttggagttgacaacaggaggcaggtgaggccagagtcccagagggagggggctgcagagttctgggacccaggggagctggcccaggaggctgggcagctgaggcagggagggagggaaataactgtgcctgattctaggacagggatgggggtgcagcactgatccaggaccca

SEQ ID NO: 706 - DNA, 2300 bp, Homo sapien
agtttaggcagctgcagctgcatgggggatggcgggggcccccacctgctccatgaagcaggatcagctgtggtttggcagctgcagtggttcccaggagggcggggttcccactgtccccagctcccactggctacatggagcatgcagccctggccgtgcctccctgctgcagccagtgtgatgacagcagccattccagacggcccgccattgccatctcttttttttttttttttttttgagatggggtcttgttctgtctcccaggcaggagtgcagtggtaagatcaaagctcactgcagcctcaacctcctgggctctagcaatcctcccagctcagcctcccaaatagctgggactacacaggtgcatgctaccacacctggctattttttaaatttttagtagagatggagtttcaccatgttggccaggctggtctcgaactcctgacctcaagtgatccgcctgccttgacctcccaaaatgctgggattacaggcgtgagccaaagcacctagacttgctgtttttttaaatgttggcaaaagctagtgactaagtgttcaccatgtgccaagtgttttgtatgtgcaagtcattaaaatgttataataatcagatgatataggaccccgttcccagtgtacagataaaactgagggctcaggaggtcaagtaatttcccaaagacatgcaactaggaagcagcaagtctagaaacagattgctgtgcttccttctcaccaatgcactgttctttcttctttgtattttccaagcttttggcaatgaattgcatgtcactttcataatcatgaaaagtcctacaagggacagatttttttaaagattccttccgctctggtgttctgtgcttcgctggttctcagaacctcaccctgcacggcctccaccccacatcctcacaggcactggcctcactgcccccactcccacaccagctgttgctggggcaggacgcccaatgtcccagtcttgctgaagtctgcttgaaatgtccctggtgagcttctggccactggggaagttcagggggcaggtctgaagaaggggaagtaggaagggatgtgaaacttggccacagcctggagccactcctgctgggcagcccacagggtccctgggcggagggcaggagcatccagttggagttgacaacaggaggcaggtgaggccagagtcccagagggagggggctgcagagttctgggacccaggggagctggcccaggaggctgggcagctgaggcagggagggagggaaataactgtgcctgattctaggacagggatgggggtgcagcactgatccaggacccagaatgggtgagtggagggaccttaactccttgagccagggcttgggggagggtgagaggcgatgagttagacctaacaactgaagggtaagaccagggttcctgggtcctggccccataacacataagaaaccaggaaaagcctggggtgctagagctggcagtgggacccagcagaggggactgtaggggcagccagtcacccatgctcaggtggatgctgaaaggcgctgagcatgcagaagagtgagcaggtgtcgctttgggcgtttgtgaattcctgtgtgtatgcagagctccaccatctgggtgagccagtgttaattaaataaggagcaggcgctcaatacatatttgttcaatgaaatcgattacctgtgggagtgtatgaatgtgtgtgtccgtgcaagtgagggacagggtctatttgggtatcagttgtgtgtctaggggggtatagtggatttctgagtttgcctactgtgttttgtaggtgcgtggatgagagctgtgtttgtgtgagtgtgtgaagatgtgggtgtgctctgttgcatgtgtggatgtgtgtgagtttgtggttctgtgtatatgcgtggggtcctggggctggattgagagtggacattgagagccccagagggtgcatgtgcacttggggaggactgtgcatatatcattgtgtgcatgggactcaagggtgggagctgggtgtgagtgtgatgtccaacctgcccaggccctcccgtgtctccacagaggcatcatggagggtccccggggatggctggtgctctgtgtgctggccatatcgctggcctctatggtgaccgaggacttgtgccgagcaccagacgggaagaaaggggaggcaggaagacctggcagacgggggcggccaggcctcaagggggagcaaggggagccgggtaagcacccttcctcgggacccagcc

SEQ ID NO: 707 - DNA, 2300 bp, Homo sapien
gatgcacaaatggcctcatggtcctcgagtgcacaacctgaatacccacctctaaagtacaagaccccctcctgggactgcccctgccctgccaacaggctttgggggtcgggaagaagtgaggggggcccagggagaggatgaaccctccacagcctcagggtagccctcagctcccttccagagtcagctcagccctgttctccccccgcctcgctcacccagaacacacactgtttcacaggcaccgggaaaagagacaggtcttcgggaacctaacgtgctgggcattccacggccattgatgtatttaatcccagcaaaatcgatgtggacactgaggctcagagaaagcagacatccacccaaggacacacagccagaaaggggaagggccctggggctgagccaggggtgcctgaccccacagggttagggcacgcaaagaaaatgccaggggtggaggctccatcagcggcagtagaggccaagctagagaaatggggtgtgcagtgagtgcccggccacccccttaccctaaatcctacccataccccaccatccacccactaccccgatgcaaaatctctggcccctctgggaggggaatgaactggagctgcccggagcggggccaagtgggcggggcacgggagggttgagcgtgggccgaggctgccacctgctggacaagccgaacccaggcgcagaggaggtgaagagggaggagaggagcccagagccgttaggctgggtggcccccagccccataatgcagtatccatcatttcttctcggcccaggcttccacccaccagggactcctagggccaagtgggttcatgccccttaactcaccccacactctctgcagtcccatggcacgtggtggagacacagaaggggagactgagaccctgagggttcctcagtgaggcaggggaagagctctgaacacctgcccatacctggcacgggacaaggcatcacacgtgtgttgtgcactgaatcccagccactggcctggagctgtaagaagcctccatgttacagagggggaaccaatggacacaggtggcaggtgtggggtcgaggctggagccctgctactgcctgacagccccttcatccctagaatctcatgtgaggagaagagggagaggggagaaggcctctcagctctgccagcctggtcctgatggggagcccctcaccagccatggtgggctccaagcccagaggcagggcacccccaggatgcaggcaaggagggtggtgttggcagggaagatggaaccgtcagggaagaccaggtgccccaacgaaggaagaggcaccaatactgaaagccaaggccaccccagtagacagaagggaggccagagggaccagtgatttgctgaaggcatctggtccatgcagtgacagggctggaaggagaagccagggccctggctctgtagccagggcagcccgtgcaccacaacagctgcctgccgccaaagcgggtccatcctgggggtccacctccaagtgtggccactgggatggggcacatggaagtttctagaacaaggcttgcaacttgacaagtgcatgtgaggcttgtttctgggggcagctgagcagaggggtcagagcaaggctttgggccccaagagaccactcagtgtgtgactttgggcaacggtgtacatcctcctgagcctgtttccttatctgtaaagggggataataacttcctcctagggattctgggaaaactgagtctcaggcaaagcaaatgctaacattggtcattagatgggatgaacctgactctgggggacgtctgtgccctgggggcttgtgtttatacacacacacacacacacacacacacacacaccctcagccagatgctggggcaggggacagttcctcatttcggacactgactgccggtggggggatgtggatggggtattgctgtggtcagtctggctcagcacccaaaagaaagtgtcaagtcagggaaaattctgggaaaggggatgtgggattgggggagggcacgagaaggggagggggcccagccctgctttgggcaatccttgctctgaccactcagacaccgtgtcctcttgcctgggagaggggaagcagatctgaggacatctctgtgccaggccagaaaccgcccacctgcaggtgaggcccggacccctgcccaggtatgggcagatggccgtttcctccaccttccgccaccttcctgaaatgtggtgccaggggcagcttggtgtgtgaggggaaggagg

SEQ ID NO: 708 - DNA, 2300 bp, Homo sapien
atgtttgcagtgggtgcccaccaagggctgggcactcacctggccctggacatggcagggggacctcgctggcccccaaaacagccccaggagataggcgttcatgcttcccatttctacacgaggaaactgaggccagtaaacattcccgtggccacatagttagcaagacgaagagctgggattcaaactgccaaagtccgtgctcctaacccacctctgctgcttcctgttcttagcctcactgcttctaccccaaattgacatccatcttttcccattgcccttagccacctaagaattagaggcccagaggctgggcatggtggctcacgcctgtaatcccagcactttgggaggccgaggcaggcagatcaacttgaggtcaggagtttgagaccggcctggccaacatggtgaaaccctgtatctactaaaaaaaaatacaaaaattagctgggcttggtggcatgcacctgtagtcccagctacctgggaggctgaggcaggagaatcgcttgaacttgggaggaagaggttctagtgagctgaggtcgcaccactgcactccagcctgagcaacagactgagactccatctcaagaaaaaaaaaaaaaaaaagaactagaggcccagagccactcggctttgggaatgctcagaagccctcaacttgcaacctactaactcgtttctccctttgtggaatccagtgtttcttctcttcaccctagcctgggtcccttcgggactatagttgactgagctcagagaccttttggttttatcaaacttatctttccctcctgttcacccattgcagttaacacttaatttccaccaagctgcatccacaagcccagtgaatttccatctccaagcacagatgtcaagagggcctccagctcctggtgcttgctagtcatcatgtcgtctgagacgcagccacagggagagactgatatcctagtgccagggatgccggcttccaggtctgcatctgccacctccatgaggcatcggccccagcagtcacgtctttctgtgacatttatcacagaagcaatgaagcctcatgtcattccgtgtttaacaccagtctccccccgtagaagggaggccccatgggggcagggaccatggctgatttgctaagagctctctcttcagtgcacatggaagcaaacactaaatatttgttaaatggtgggtctcccctctgggcctcagtttcctcgtatataaaatgaggaggatgggccgagtaacctcagcccctctccggccctaacttggcgtgattccaggatcgagaagaagcaacaggcccctgcctgggcctattattgtcatcagcgtccagccctgctggaagcagagggaggggtatcaataaataatgaacacatttaaaattcattatgagattattttctgagaacagggaaagagcaggggcacagaatgggaaggaagcagaagagatgagcccagaaaggggaagcctgggacatgaagtgatattaacaatgaacacgtgcacagccctttacagtttacccccagacacttcctcccccatcatttcctccattatcctcccagtggcctgtgagatctgtatctgtagagcaggtacaattatggtcccatcctatagcagagaaaattggggctcccttgactgacaacacatcaactggcaagtggcagaggcgggattggaatcaaaggctctgactgtaagccagcactcaggcagcgggcccgccacatgatgctcactgaggaacacccctgcccagtgtagaagaagatcacgaggtcagagagcctgggagggtgagctgtggatgttcccccaggacagcgtgttctccccacagctgctgagttggcagaaccaaacttgccacccacccgtctcatttacagtaaatccagtgggttgcagaaataggacctgaaactgcctgagggcagcagggtggggggacagtgaggggacgggaaaggggccagcctgctggtccatgggaggggaccgtcaggggaaagcccttcccgcctctggggaagggaacttccgcttcggaccgagggcagtaggctctcggctcctggtcccactgctgctcagcccagtggcctcacaggacaccagcttcccaggtgaggacggggcttggcgcctgggggaggctggcagggccaatatggcagaaagtggtgattccgtaagtgtgagctttgcgtcacctgcctcggagccagttaggctgtttaacagtgcaggtagc

SEQ ID NO: 709 - DNA, 2300 bp, Homo sapien
gaaattctaaggattttaggagttgtctgccaggaaagaggtagaagaccaaatatatactttgcaatatcacatgtacccatacaatggagtattattcagttataaaaaggaatgaagtactgatacatgctacaacatagaaacatggatgaaccttgaaaacattaccctaaatgaaatgagtcagacacaaaaggtcacacgttgtataattccatttatatgaaataataggaataggtaaatccatagggacagaaagcagattcatggttgtcaggggctgggggaaggaggattgagaagaaactgcttaacgggcatagagttttattttggggtgatgaaaagtcttggaactagatggaagtgagggttgcacaagactgtgaatgtattcaataccactaaaatgcttgctttaaattggttaattttatgttgtaggaatgttgcctcagttaaaaatatataggctgagggttaaactagatgaacttaaaggccactttgtcctgagagctaatggcatggaacactggccatgctgaccagtttgagacagcccaccggcttcttcctagttctttgggattaaaaaggggccatcactgccctcttgccagagtcacagctctgagaatattctaccagcagaaacagcctggtatgctggcagggacatcggcttcattccttcctgtatgactctgagcaagtgacttggcctccctgagcctcagtgtcccctttggtgtaggaatcacagtagatgcagggatgctctaagcatgcaaggtggcccgttcataagcagcatcataccctgaattcagaagctctactgaataagagctttcggggaataaaaccccaaactcatagtagcttagttgcctctccactcttgcttcctgtcacttgaactcttgctcccctctgtcatactggcctcctgctgatcctcaacatcctaacctctgtcctgcctctgggccttctccatattctctgtcctcctggaacattcttgcccccaccttttctggaccttcaggtctcagcctaatcatcacttccaagagtggcttccccttggagaagactttcctggtgggaggacttccctcacaaaacccaccacctcccacctccagcccagttactctgcctcccagcatccttctctttctttcagagcaccaatcacggtctatcactatttctatttactttatgctgacccatttatatctacctgtttatatctgtccccactaggggcacaagtccaggagggcagggactgtatccgtcttgttcttcactgaatccccagcaccttgcacagagtctggtagataggggacaatcagtgaacatatggatggaggaatggatggatggagggacagatggaggaatagagggatggatggatgaacggatggatggatagatggacagagggatggagggatgcaggggcagaaggatggatggatggatggatggagggtggatggatggacagatggacagagggatgcagggatggaaggatggagggatggatggatggacagcaggatggagggatggatggatggatggatgcagggatggaggggtagagagatggatggatggatggagaggaggatggatggatggatgcagggatggacagagggatgcatgggtggatgaatggatgcagggatggagggatagagagacagatggatggatggatggatggatggatggatggatggatggacagggggatggagggatggatgcagggatggaggatagagagatagatggatggatggatgaatggatggatgcagatagagggatagagagatggatggatggatggttggatgcaggaatggagggatagagagatggatggatggatgcagggatggagggatagagagatggatggatggatggacggatgcagatggagggatagagagatggatggatggatggatggatggatggatggatgcagatggaggaatagagagatggatggatggatggatggatggatggatggatggatggatggatgataggatcaccacggtggtaacctctcacattgtcttctccacaggaggcgtctgacacagtatgatgatgaagatcccatggggcagcatcccagtactgatgttgctcctgctcctgggcctaatcgatatctcccaggcccagctcagctgcaccgggcccccagccatccctggcatcccgggtatccctgggac

SEQ ID NO: 710 - DNA, 2300 bp, Homo sapien
tagcccaatttgccatgtgactttggacaaattacttatctggtcctcagtttcatcatgtgaaaagatcagcacctggtgcacagagtaggaaagattaagggggacaagaaataaacaaagcccagcctagtgcctggtaccatgtcctcaataaagcagagtcactggtcttcctattttgagacaaaaaggaagtaaccactggccctgggtaggtggagtcaagggtcccaggaaatagaaacaaagcaaaaaagctgaatctgcacagtacataataggtgctcaataatgacttcttgaatttggaagtgtctagcacctggatgcactggagggggccagagcttagagctgctctgtccaggagagggaggattgcctcaagatgggccaagcttggggtccctcaaaccctgggtctcctggaaggtctgacaggcaagaactgaaaataaaggctagccccaccccagtggatcttgaccctggtgaggggtctgtagacttaaaagggggaatcttcgtttctcctctctccctgctcactcaaataggaacggtagtggctctgccagccccaccccactggctcttgaccctggtgaggggtctgtaggcttaatagggggaaatctcctgtttctcttctctccctgctcactcctgttctgtctccctcccaggctgcctcctcctggtggccttccaggatgacacccatttcaactggactcttggagcttcaagagacgacccaactttccaaaccttagatggattcccaaagcctgtggtaccccattttcttggtatggactgaaggggagggattgctgggacattttgatagtatgtgggacaaagggacacaggagatgtgggtagcatagacttaaactgccttcgacttaaaccacctgctcctgcactgggctcctccactcactccacagagttccgagctcctgatgaagtctcctcagtcaggagtgggctcccaactgccaggggttcagcctgggtgattgccgcaggccccctgcagccgcccaccatccagacttcagtaaagtctgttaatgatgatggtgatgaaggctgtcagagcagggcagggcccacagggttggggctagggttgtgttctccctgaagggacggccatgcacaaaaccacggctgcacagacaggtccattccacagcgtgggggtggctggggctttccccagattcacccatggacttccttcaccccatccccaaactgcactgggagcaagatcaacagagaaggagaaatctaatacagacatagacgagtctgcagtgaggggctcgcgggccagctcagaacaacggggcagggaggggaggcctggggtctgcctgcaagggcccagcccaccagtgccgagtgaccaccctccccccagccccaccccaggccctcgggtagcgccaaggcccagtctcccactcggaggccccggcccagccccggtgcctgggaaagccgcctgttttgttcccagatgccacccccccacacacacccttttttttttttttccattcattgcagttcggtccctttcgaagccgcagggacccgggtggcagggctgaggcgagggggtgggactccctgccctgacaggtagtgccggcccccgctttgggaagccccttcccccgccctcccctccgtccgctctccctgcccctgtcagccgcgccagacgctctccggctttgcagcattcaataaaaattgagaaacatttgggctgaaatcgctgctttatctggaggagccacagcgccgggagagaccactgctgcgcggggggagcccggggtctcagtggcccgggcacgcggggtcgccgcgctccagcgcccgcgctgcccccgggtgaccctacgggcgcggtgtggggacccgggctcgcggcggcgcgcggccgccgggggccgggacgcgcgcggggggcggtggcctggcgaggctccccccgcgcccgcggctcaggtgggccgtgcccagcgctggcggagcccgggtccccgttctgcccgggctggatggctcattctgctggctgcgcggtggcggcggctgtgtgtgcgccgcgccttgccgccccccctggccccccgagcccggggcgcgcgctcccgcccgggccgtccgggccccgcggcgccgcggcccgaggccccgggaagcgcagccatggctctgcggaggctgggggccgcgctgctgctgctgccgctgctcgccgccgt

SEQ ID NO: 711 - DNA, 2300 bp, Homo sapien
ggttctgtatggtccagcctttgcatactgtaaaaacctttggctcccaatgcctcctttgatcctcaaaacaacgcagtgaagtatacagagcaaggattttgtcatctccattttacagatgaggaaacagaggctcagagaggagaagtgactcttccaagcttgtcagtgtccttgtcttctcctggaatttctaacttggaccatgaaaagagtgctgtgaccatggacagtccgggtcaggcctccaggctgtgaatggcatcttaccaggccacgagatcccagccaggcctagcttcaggccacctcagccccaccagccccagacagggtgcaacaggaaccgctgggaagagcctgggctggcatctgctgcatgggtctcacaccaggctgatttgctgcctaggctacaggccactggtcagtctgtaggcgaagacccgtgggtgtagctatgaggtgtctgttcatcttcagcttcaacccttcccccagctggcccccaattctagcctaatttcctctgccaagaccactctgtgacccagcggttctcagagcagaccacatcactaccctcttcaagaatcttccatagctccctgctgcttatgggagaagacccaacctccttagccccacatttgagaggccctccacattctggcgccctgtcctgtgctaccatctccttctgtgaagcattttgctcccactacatgggacggacactccagcatggcgcagtggctaaggacatgggctttggtgcgaggcagacccggctccatcgcttcctggccatggaaaccttgaacaacctctccaaactttgatttctccatctgtaaagggagatcctaaagtacttacttcacaaatagttaacgatgaaatgggataatgagtgctaagcgcttggcctagagcccaccactgagagccagtcatcagttttacgattgcccagccttccccgatgtcttacacttctgtgcctttgattctgctgggccctgtatgtggcgtgcccttccctctcctcccagctcacatgccacctcctctgagatgcctttccaaatttcctgctcaaagctactcccttcttcctctgggtttcctggctcctggccgggaccagccgtctcactccgcctctccctgcagtaagttcacacgtcgggcactagtctgggagctttttgagggaagggcctgctgatctgcctctgtgtctccagtgcctggctcagggcctggcacacatcgggtggaggagatgttcattgaatgaccatgactttgttacttaacccagccagagcaggaggagtcaggacagctgccaggaagaaggaagaaggaggctttgagctcagttttggaagagaagttagccaggctaacaaagcaagaagggccaggcgttccaggcagaaaaatctagaaaggtcaagtcaccagtgttcagggaggtaaagtgacttctgcaagcaggaggaaattttggatggctggatacgagagacacggaagacggtggctggaaggtaattagctggcctgcttggcaggggcctcgagtaccttgttaagagctaggacttgatccttcaggcagcaggagctctgaagggcgatcacacatggactttaggaacatcacccagctgctgtgtggaggttggatgcatgtgctagtgccaggcctagttctcagtgttgagggtacagcggtgaacaaggtggatgcagacctcccctacatgtgggccctgggagacatcagaagaacaggattcacctacatggtgtcatttaattctcacaatgacccattttacagatgtggaaactgaggcccagagagcagaactggcattcctgcaattgtacactagagtgccagagccaagattctggcctgggcagtctatgtcccactcccctgctgccctcctcctgccccttgctattctcacacaggcccatgcagagagagaagataaatgcacacacacaagccctgatgactttgttgttttgtgttgtctgttttttaaggctatggccatggcatcttaaaaataacacagttgtgaaaatagatggatgtgggttccagtcctagccctgcctgtgtgcacttatgcaggttggttctcctgtctggcctcagtttcctcgtctgtgaaatggggttaataatagtatatacttctggaggttgcgcctgaaatggcatttagagggccctggccagcgcttggcatgtataggtgcttaat

SEQ ID NO: 712 - DNA, 2300 bp, Homo sapien
gcaaagggacacagtgaccacaggcagtcatggggatgccagtgcacagggacacaagccacaggcagttgtggggacacttctgcatcctctcttgtcagctcatgggtctgactggggtcacctctgaccaaatgcttcctcctgtccccaccctttatcccctccacccctgccatagttcaaaccctaattatctgccatttggaccttctcagctgcctagacactgggcacacagccccagtctcctggtccttgtcatttagcccagaccatcaaactaattgtttcaagtgactgaaagtttataggctaggaggcaagacacctgcacttcccactgtgtcaccaactcctatgcaatctttggaagccccttcccatccctgtgcttcagttgccctgtctccaaaaggaggcggttgggctggaccagggatagcatctcaaatggttcgtatttgtttcctggaacactgtggcaagaagcatcatgtggccacagtatggggactgatgagtgatgcctgccctgggcacagaattggagcatggcaacaagcatacctctcacccactctcactgagcaaggtggtgtcactgtgaccttctaggtctctccccctactctctcatagctatttatattcacacctcatctccactaccagaccaggaactgctccatggtagggtcttgctagccacggttttctctctcagggcacccagtgcagcgcctggtacataatgggcatcaggatattttgttgaatgaacgcttgaaaggggtccatttaaattcattcggtgtattgcaattccattcagaaagtgtttggaagccagagaggcaaggaaagggtagaggacaggggtcctgaacctgacctggggagaatgggggtctctagggccatgtggctcttcttccccctaggccacatggctccctgcagctgctggaatcgggggaggcaagtggggcccaggatggtccaggtgctgacatgtctcctgaacccccacaggccatgtgacagttggcccctactgggtgcagtgcttgctctcaacacttctccactcctgggaccctgtcctgggggcagagttgcctgagccctgggggaggggccccagtgataggaacatgatggaaggctccaggtttctagagaaagggagagtgtcctgacaagatgtgtgcgccagaggagcaacgaggggaaactgaggggtctcagctgggacacaagcacagcccctctaaggcccaagttcgtttttgagagtttgatgcaagctgaaaagcaaacagatcccagagtttgatgtaaaatatcaagggtttagtggcagagcctcggaaacccatccagtagactccaggtttagtggatgtaagaccctcctcgtccagaaaaggaagggaaggacagtacctaggttagtgagactagactggcctagaggtagagcctgaccatgatgtaagggtggacttggcctggaggggcggggcctagaggagtggcatcagatgattggctaggctgtgggggtaggcgggataatggagtagagaggcggagtctaaaccgagggcagtctggagagttagagtcagatgactggggcaatggaagtaggcggggctctcagtaaagaaggatgagggcccggccgtgagggtctggccgggcacggtggctcacgcctgtactcccagcactttgggagggcgaggcgggcggatcacgaggtcaggagatcgagaccgtcctggctaacacggtgaaaccctgtctctactaaaaatacaaaaaattagccgggcgtggttggaggcgcctgtagtcccagctactcgggaggctgaggcaggagaatggcctgaacgtgggaggcggagcttgcagtgagccgagatcacaccactgcactccagcctgggcgacagagccagactccgtctaaaaaaaaaaaaaaaaaagaagaagaaggatgagggcccaacagaaagattgacagcgcctggtaggtggggcggggtggtgactctttgctctccccacagaaacgctaatggactccactacagcgactgctgagctgggctggatggtgcatcctccatcaggggtgagtcagtggtccccaaaccttgcattggtccccaggatccctcaagccctgctgcagggcccgaatgccccctcatattctaacccctttccccctcttcaggacccagagccaggcctctctcagccccaccctcccaatcccctac

SEQ ID NO: 713 - DNA, 2300 bp, Homo sapien
tgtactcacccttcatcgcacctgaccctccccaggctgccagcccctgctccacacgcacagacttggcccagggaatctgagtggcacaggataaaggacacccacttgagggtgacacctcttccatcagctgccacccccacagtcacatttggcaactggaggcccaggagggagaaatgacttgcccaaggccactcatcaagttagtagagctgggactagaacccaggactcctagggcacacttggtgtccttgtgtttccaggcagcacaggcaaccacacgaacagctctgggtctgtgtgacctgggtcaaatgacctcacttctagtctctactccctcatcctctgtaaaaggggtctaaccatacagaccatgtgcgataatcacaccaaagaaatgagatcctgttagggtgcccatccccagacatggataggagaggggactctgctgttggggctcctttgggtctaccccaggtgaagccagccaacaccaaagggggcacgggagaaggacaggaggggtggtttccctcagcaagctctcagtcccactgacactggcccaagagggctgagtgtactgggcactcacgcagggagattgttcccgaaggccctcgggaaagttggtgaatgcaaacagcaggcagccagagagcctgctgcagaggagaccagagacgatgccccaggagggcacagaagtgtgcaaaagactcagcagtgggaaggagcctggtccgtgagtgtgaggagataacccgggccctaggcccttcctgccccaactttccaccacctggcccagccccttgcagcggtgaggcttagcatctctctgctgggtttgtgagagcccagactgccccagtgagggtacaggagtactctccccaggcaggaagggtgggcggcctccctccaggtacccaagaggaaatgttagcagctgaaagccccagagcagagctgttctcatggggaaggaccctgtcttccccatcatcctaggcgttcattgaggatgaggactgtcttcctccatcagaccgagagttcccaagggcaagggctgtctctccctggtcagacagggagctccccgagggcagaggtcctgtctcctccatcagactggtagcccccacaaccacaaagctatgtctactttcatcagaaggagctccctaagtggggaagggttctccctattttccccttccaggtgggaacttcctggccagggtccctgtctcctttatcagattagtgtacccctgacagtaagggcaatgtctcccctgtcagctagcagaataccaagagcaggatgtgtgcctttcccacctgattggcatgtctcccccatcagattgggaattctctgatgtcttcaccattagactggagggttccctaaggcagagtctgtgtcttccaccttagactgagtgtgtgctggggctgagcccttacctccccacctgacgagcattttacccacagtgggaagaggtgagtggctacgatgagaacatgaacacgatccgcacgtaccaggtgtgcaacgtgtttgagtcaagccagaacaactggctacggaccaagtttatccggcgccgtggcgcccaccgcatccacgtggagatgaagttttcggtgcgtgactgcagcagcatccccagcgtgcctggctcctgcaaggagaccttcaacctctattactatgaggctgactttgactcggccaccaagaccttccccaactggatggagaatccatgggtgaaggtggataccattgcagccgacgagagcttctcccaggtggacctgggtggccgcgtcatgaaaatcaacaccgaggtgcggagcttcggacctgtgtcccgcagcggcttctacctggccttccaggactatggcggctgcatgtccctcatcgccgtgcgtgtcttctaccgcaagtgcccccgcatcatccagaatggcgccatcttccaggaaaccctgtcgggggctgagagcacatcgctggtggctgcccggggcagctgcatcgccaatgcggaagaggtggatgtacccatcaagctctactgtaacggggacggcgagtggctggtgcccatcgggcgctgcatgtgcaaagcaggcttcgaggccgttgagaatggcaccgtctgccgaggtaagggccagggtggggcacgtgcccctgcaaatgcatagaactggtcttggctgcagactcgggctgcagacttgggcctggcctctga

SEQ ID NO: 714 - DNA, 2300 bp, Homo sapien
attactttatgtggtagatgctcttaccaatgagaacaatgtagctcagagaggtcaaataacttgtctaaggtctctcagcaaattgcttttgaaccagatggcttagtactgccaggaactgttacaagtgtttttacataagttaagcaatataaactgacaacaactctaggaggtagatactgttgtcccattttacagataaggaaacagtttaagtgacttccccgaggccacactgctcacacaggtgggtctgggtttgccagcagcctgcacactaaccactatgttcactgccctcctgcttgcatggcctccaaagcccatgctcattccacttaaggaggcagctccaagatgtatttatgggccaggtgtggtggcttttgcttgtaatcccagcactctgggaggctgaggcaggaggactgcttgagcccaggagttcaagaccagcctgagcaacatagtgagaccccccatctctacaaaaataaaaataaaattaataacaacaacaaaagaagtatttacagagcacttgctgggtgcagattctaagctaggcacaggacaagcagctgtgagtcagacatggctctgatcctgggggagttgagagcatggccaggagacccccagaaaaataattttggtgggtaagtaaagcactctgaacccaagcaatgttctgggccccaagaaaggcagggtctctgaggccagagctggttgagggttgagggagggtggtttgctaagacttggactgggaagataagccttgaagactagagctggaaaaaatgaactagggaaatttatgttaattgtttacatacacagaaactaatgtccagagaagctgagtcacttgctgaagaacccacagcacccaggcataaaatgtactcccggtgagggcctgggggcctgtggatggtttagctgcatttcatcccaaggagatgaaatgtttgttgcaaagctgtttcctgtccacccacttacccattgcacaatctcttccaggtatcatagcagagctgggttcatgaacccagcaggctgaagctgggagaggggcagggcctagaccctcagcctcctgattctcagcccagggccagcaagaagaggaaggtggatttgaatatgtgtgcacacaaggcagttgcctcttataggccctaacctcatactcagagctacagtgggggtggactccatatcagggatgatggccacagcccatgggagaagccaaatgagggccgagtgcaagcagtgccctccttaggctggccctggtactgcaggcccgccttttattaatattttaataaattgatcacatattcattgggcacctatactgtgcaaggccttgtgccatgggccttacgcttaagcagaatactcacaatgaccctgcagagatgggccttagaatcctaattttacaaataagaaaactgagtctgagtagttaagcagcttgtctggggctgcacagctagtaaaaggcctagccagtactcaaagccaggtcggtcttattccaaaagtagtgtcctcctctattctaccacatcacctctctacactgccctaggacttttcttctgccgtataatcatcttaattgtctgtaacccaaggatctagttctaagaatcagggcccagccagacattattaagcaagaccaggacccatgcacactgccccagacatcttcagatgtgcctcctaactaggtcaggattgattctagagaccatgacacagccaagctgggataggtgagggaagattgctgggagccctagacagctcacggacaagaaactagggagccctgacagaattagaactcccacgttggggcctggagacttcaaacccttcaagagatgagattttccagcagtggtgctgcatggcccctccgcgaggctgtgtggcccctccgtgaggctgcgtggctcgtgacctctctgagtcttcatccagtttcctggtgactctccttgtcttctctctcaggttgtccatctgggactttcaaggccaaccaaggggatgaggcctgtacccactgtcccatcaacagccggaccacttctgaaggggccaccaactgtgtctgccgcaatggctactacagagcagacctggaccccctggacatgccctgcacaagtaagtcctagggcccctcaagggcgatggctggccgagtcccaggtctacctgcagaaaagctcagagtgaggattgggtgccgtccg

SEQ ID NO: 715 - DNA, 2300 bp, Homo sapien
acgggacagatggacagacagccaccctgagaacccctctgggaaaatctattcctgccaccactgggcaaacagaagaatttttctgtctttggagagtattttagaaactccaatgaaagacactgtttctcctgttggctcacagggctgaaaggggcttttgtcctcctgggtcagggagaacgcggggaccccagaaaggtcagccttcctgaggatgggcaacccccaggtctgcagctccaggtacatatcacgcgcacagcctggcagcctggccctcctggtgcccactcccgccagcccctgcctcgaggactgatactgcagtgactgccgtcagctccgactgccgctgagaagggttgatcctgcatctgggtttgtttacagcaattcctggactcgggggtattttggtcacagggtggttttggtttagggggtttgtttgttgggttgttttttgttttttggttttttttaatgacaatgaagtgacactttgacatttcctaccttttgaggacttgatccttctccaggaagaaggtgctttctgcttactgacttaggcaatacaccaagggcgagattttatatgcacatttctggatttttttatacggttttcattgacactcttccctcctcccacctgccaccaggcctcaccaaagcccactgccatggggccatctgggccattcagagactggagtgagatttgggtgtggagggggaggcgccaaggtggaggagcttcccactccaggactgttgatgaaagggacagattgaggaggaagtgggctctgaggctgcagggctggaagtccttgcccacttcccactctcctgccccaatctatctagtacttcccaggcaaataggcccctttgaggctcctgagtgccctcagatggtcaaaacccagttttccctctgggagcctaaaccaggctgcatcggaggccaggacccggatcattcactgtgataccctgccctccagagggtgcgctcagagacacgggcaagcatgcctcttcccttccctggagagaaagtgtgtgatttctctcccacctccttccccccaccagacctttgctgggcctaaaggtcttggccatggggacgccctcagtctagggatctggccacagactccctcctgtgaaccaacacagacacccaagcagagcaatcagttagtgaattgaatggaaataaacgctttagttataatatgacccctgttctctgtaagttccaagggagaccttggtacccttgggatgcacgtgacccaggtgctaagggttgctcttctaagcagcccttcctccctcaggcttccagaaagcccagggcagagaaaacacatggagaacgacagctccacgtggcctttctggccctggcttgtcaaaagcacaggcaacaaaggaagtgagttggaagtggctcagaactcagccttcgatgccctgggaatcagggtgagcccctgcaggtacataagtagcagagaattgacgagagtgcactcggaagagggtctgagtgtcaggtgagctgtcatagtgggaacgtgagggtcttagagtgctcatgtacccccaggcacagccaactctggttttctctgtgcaaatgagctcttgctcacattaaaatcagaattgtccacgtggcaggaggaggcagggagatggatgtgccatggatatcgggtctggctgaggaaggggagccaaggagactacctctcgggacctttcccagatccgaggagatggccagtgagaaagattcgggccacaggcagccagctagaagcgccacggtcagagtgaacatccagcacagcacagcccatcgtctgtcactcacctgttccgggagcctgagctgcaaagggaaggaagggattagagagaagtgtgggccccccatggggacagcagggcaagccacagggaaagcattggcaggtttcccacaaactggccggcagtggcccactggccttcactttgtgccccaaaggtgccctgcgcgggtggcagctgtctcggcacacaaggtcaccttctggtgggagctgccctgatgctctttagattagttctgtctccccagcccaccccccaactgttctggggccccacatggggctggcagtcggtgcttcccgtcagatggcttcctgtcctaagccgctgagctggtgaccactagccagcatgtctgcccctccaccctccagggccgaggtcctcagtggcca

SEQ ID NO: 716 - DNA, 2300 bp, Homo sapien
tgcaatcttgactcaatgcaacctctgcctcccaagttcaagcgattctcctgcctcagcctccccagtagctgggattacaggcgtgtgccaccatgcctggctaatttttgtatttttagtagaaacagggtttcgccatgttggctaggcttgtctccaactcctgacctcaagtgatcctcccacctcggcctcccaaagtgcagggattacaggtgtgagccaccgcgccccgccgagcagtgaatattgttttaaccaaagtgatagaattacattaagagaatggagaaaaaagaaagtttgtggggagaaagatgagaaggttttaaggatttagggaagtagggaggttgttgggggaggtgctgcttgggagctaaattatttttcaccataaaaatataatacataatgttggccaggcgcggtggctcatgcctgtaatcccagcactttgggaggccgaggcgggcagatcacgaggtcaggagatcaagaccgtcgtggctaacacggtgaaaccccgtctctactaaaaatacaaaaaaactggccgggcatggtggcgggcgcctgtagtcccagctactcggaggccgaggcaggagaatggcgtgaacccaggaggcggaggtagcagtgagccgagatcgcgccgctgcactccagcctgggcgacagagcgagactccgtctcaaaaaaagtatatatatatatatatatatatatatatatatatatatatatatatatatatatatatataaaatacataatgtcaaaattgagaaatcaaaaaataatataagcatactatttagaaatatcaaggtaaatacagaagaaacagctaaaaaagttggaattggttgtctctaaggcttggaacttgacggtggaaagaggtgaggcagtggattggagcttgttttaaatcctgtagttctatctgacttgtttgcacatttaatagtttgataaaacttgaaattagatgttaaaaacatacataccctttgaccaagtaattctactttcaggaaagcattctagggaaagattcagtatgtgtacagatttaacttcaacactgtgtatctcaggttatacgtaatgacgataaaggagaactaacctaaaaacccaacaaaggccaggcacagtgacttgcatctgtaatgccagcattttgggaagccgaggtggaaggattgcttgagcccaggagtttaaggctacagtgagctatggtcacgccactgcactccagcctgggcaacagagcaagaccctgtctctaaaacaataaaaattttaaaaagccccaacaagtggtaaccaatttgatacaatcatacaccgcataacaatgtttccatcaacaacagactgcatatgagatagtgttcccataaaattatataacacatttttaccataccttttctaccttttctatgtttagacagaattgctacagtattcagtacagtaacatgccatacaggtttgtagcctattaacaatacactataccatatagcctaggtgtgtagtaggctataccatttaggtttgtgttaagtatgctctatgatgttcacacaacaatgaaattgcctaatggcgcttttctcagaatgtatcccatcgttcagtgaggcatggtcctagcaaggcatgattctatattggaatatcacagccactaaaactgatatttttacataaagaattcctggccgggtgtggtggctcatgcctgtaatcccagcactttgggtggccgaggcgggtggatcacctgagttcaggaataggagaccagcctggccaacaatggtgaaaccccgtctctactaaaaatacaaaaattagccagatgtggtggcacttacccgttttttccccagaaataactaattcatatcagatgtttttattgtgataaaatacacataacataaaatttatgatcctaaccattttgagtatactgtttagtagtgttagatgcattcacattgttgcataaacaatctccagaattattttcatcttgcaaaattctgtatacattaaacaatgactacatttgcccctccttccagaccctggcagccaccattctactctttgcctctatgaatttgactattgtagatagctcatgtaagtggaatcatacggtatttgttttttttttgtgactgacttatttcacttagcttaatgtcctcaaggttcatctatgttgtaacatgttagaatttccttcctttttaaggctggt

SEQ ID NO: 717 - DNA, 2300 bp, Homo sapien
cgagtagctgggactacaggcgcccgccaccatgcccggccagtttttttgtatttttagtagagacggggtttcaccgtgttagccacgacggtcttgatctcctgacctcgtgatctgcccgcctcggcctcccaaagtgctgggattacaggcatgagccaccgcgcctggccaacattatgtattatatttttatggtgaaaaataatttagctcccaagcagcacctcccccaacaacctccctacttccctaaatccttaaaaccttctcatctttctccccacaaactttcttttttctccattctcttaatgtaattctatcactttggttaaaacaatattcactgctcggcggggcgcggtggctcacacctgtaatccctgcactttgggaggccgaggtgggaggatcacttgaggtcaggagttggagacaagcctagccaacatggcgaaaccctgtttctactaaaaatacaaaaattagccaggcatggtggcacacgcctgtaatcccagctactggggaggctgaggcaggagaatcgcttgaacttgggaggcagaggttgcattgagtcaagattgcacccctgcactccagcctgggcaacagagcaagactctgtctcaaaaaaaaaaagaagaaacaaacaaacaaaagaacagaaaaaataaataaaacaatattcactgcttacgtttttatggtcatgttaatacagttcacagctgagccatatgttgtactatgattatattttctttctttttcttttctctttttttttagaaacgcagtttcactatgttgctcaggctggacttgaatgaactcctaggctcaagtgattctcccacctcagtctctcgagcagctggtactacaagtgcgtgccacgccactcggatacattttctttcttgcatagcttttactttttttcctttctacatttgattgcctttttgtctgtttgcttagttttttacaaaaaacaactttactgaagtactacagttacataaaacatacctgttttacatggatagttcatagagttttgacaaatatatacacctatgtaaccatcaccctaatcaagatataaaacatttccatcacccccagcaagttctttcttgttcttttgcagtcaacccccgacccccatctcaggcaagggctgattggagcctattactggagattagttttaccagttcttgaacttcatgtaaatggaataattttttgacaatttcacttcgaagagacagactattaaaaagacaattgtttgtgtaataagtacacgcatgctaaaagtacacgacctgttccagttttgggttagcaagggattcctcgaaaaattaaaagaataaaccgctactatcattattagaaagaattaacctggagtagaaagaggtgttatgtggatggggatgggggacatgaaggatgggggacatgggggatgggggacatgggggatgggagaagcgcaagacatggagtgcgaatgaggttggggtccagccagaaggaaaagcatgaacaaaggcttggagacaagagcaattccgtctggactcaaacctggatttcgtaacttgtctccattttactaccatcgaaactgctgtgctctccaagttttttgcccagtccaagcagggcaattatgaataagtaagacgctctaccaacatatttcagtgttttcccccattagactgtaagttctttgaaagctagaacttcataatgtaacccttgttacgtagtaggcaagcattaataaatactggttgaattaacgaataattgggtgagtgaatgaacgaacgcacgcatgcaaacccgaaagtccctggaggaaatggtcaccttcggaggtttagtctggcccagaagccctaagaccacggactgtgccaggtcccactccaaacgccggggagacgctctaggcaagctacacgttctttgctgcggtgccactctagccgcgagaacgccgctctatggctgcgggggaggggcggggctcgtgggtgtctccgaccctttttgtcccggcgcggcgggagcgcgcttggcgcgtgcgtacgcgacggcggttggcggcgcgcgggcagcgtgaagcgaggcgaggcaaggcttttcggacccacggagcgacagagcgagcggcccctacggccgtcggcggcccggcggcccgagatgttatctgggaagaaggcggcagccgcggcggcggcggctgcagcggcagcaac

SEQ ID NO: 718 - DNA, 2300 bp, Homo sapien
gtaatttcatgctccacctacaatatggcttttactatttttttattttttattttttttacccaaggaataaattatcctgacagtctttaattttgggtatggattagttaaatgtaaggattgttgatttgatttagtaatgtgagacacaatgtttatgtcctcattatctacagtagatggatagttttttctcctggtctctaagaatagtatttcttaatgtgtggcccatgattggcattaggcgtttttgcttgaccacttgttaaacatgatttttttctaggtagtgtttgccatttgaatgtctttgtggaaacagactccttaatagcttagctataattttctaagttaacatctttacctgccttgtttttttaattctcctaatcttactaataccttagcattagttttgcttccattatcagtgcttccaacttcttgttttatgtgctttaaaatgattatatatgggctgagcatggtggctcactcctgtaatcccagcactttgggaggctgaggtgggtggatcacttgaggccaggagttccagactagtctagccaacatggggaaaccctgtctctacaaagaatacaaaaaacattagccaggcatggtggtgcatgcctgtagtcccagctacttgggaggctgaggcaggagaatcgcctgaacccagaaggcagaggttgcagtgagccgagatcgcgctactgcacttccagcctgggcgacagagtgagactccctctcaaaaaaaaaaaaaaaaaaaaaaaattatatatggatatctggcgcctattttgttacttatatgtaattacttaaatggtatggaattttgaaactctttaaattgaatcttgatagtttttataagctggtggataagtacatctataaggtgattttagaaatacatttgcatttattgtgcttgtgtttttaagatcacctaataaaggtgtacttatccaccaatttataaaactatcaagacaatacccaattaattgaagagtttgaaaataacatgttttttgggaggttgaggcaggtggatcacctgaggtcaggagttcgagacaagcctggccaacatggtgaagccccgtctctactaaaaatacaaaaaattagccaggcatgggagcgggtgcctgtaatcccagctactcgagaggctgaggcaggagaatcgcttgaacccaggaggcagaggttgtagtgagccaagatcgcaccactacactccagcctgggcaataagagtgaaacttcgtctcaaaaaaaaaaaaaagagaagaacgtattttacttgcagtgtatagtgtatgtatacactatatgtatatgtgttatagattatacatagtaatattagtagtatatagtaaagcatttctaatgtttctgccagcaaatgtaaattccttgcattcttctgtcttattgttgtctgcttaatttctctcactgcttgccagcgttgaattatgattactaatggatgatactgttgatgggattgtgattttctgctgttgattattaaagtcatctttctgtttcatgctgtaatcctaaaagaaggcatgtgattgtgtttttcgctccacagcttcttttgctttcctgttagtgcattttcctttattctggttctttagttttaaattttattgtacacctgtcagtagtgctaattttaattagatcatctaatatgataaagttattttatggacaaagaaactattttaaatgctttgtcttataaggtagttgtttcactcagtaaagtataaactttggaatgttaagctcaaataagtggctaatatctaaggaagtttcagcttttgagacaattgaaaattttttaaaaaggtcagtctgtgagtgaggcaaaggaatttaagcgtcatcactacccgttttgtattcacttgcacttttcctagatgtcctttgctttcttcgttaggtgtggagggcgcagctttccagagccgacttcctcatgaccggatgacttctcaagaagcagcctgttttccagatattatcagtggaccacaacagacccagaaggtttttcttttcattagaaaccgcacagtaagtttccatttcagctttttcacctggattataaaaagtatatatggctttgatagagaatatgggaaaaataaaaagagaagaaagaattctaaaattatctataatactattattacccagagataacctttgttaatagttatttttcatttggg

SEQ ID NO: 719 - DNA, 2300 bp, Homo sapien
catccagttgacactggaagagctttaatctgtaccatttgcacacttgtgtttgacacattctgccctattgtagaggcatatgtgatctagtagtccctcttggctgctatagcatcctcttgctaggcattttagaagcaacacatagaaatatcacttttatactccaggaaaagcagtcaggcgcattgcatctgtgatcagttaaggtctcataactacctagatttcacattgaaatgtaattgtttctcctttttgaaagaaaaaccaaatttagatttccagaaccatcttttgtagcatcattgcaggatttgcactagaagtagcatgtttctgagcaaaatttcagcattgtttgagttgctctgcatatgaccatcacatatcacatcagtgaggaaaagtagctgagaaagtaaatgaaattcctgaccaaagggtctcttccatcagctctcatagctgtgtaataagaacaagctctttttttggccattgagttgaatgagtagtagatcacaggtttttgatctaccagtcttaggtaccttcctgatataaatggcaccaagtatctgaagcctgattctctgcctcatttaacacaaaccagaatatttttagagatttagattttctttaggctaagggtaattctttaattataaagataccctgatccctcccatgtatagtctttgggaacttactgtttgaatatgatttttaaatcagttatggtatctgtcatatttacagttcaaaggagagttgcagtcctctttctttttgggggcagattgcccttcttgccagattctttctgccacacactggctcatctcgtagtgttacttgtgttatcagtgaaggagcagaggccagggttcaaaatcgtctgttgggttgggaagtggaaaaactgtggagtttcaaatgagaggtagaatcttactgggatggtcttgtcaacagtcagttacctctgattgtaaaaggtcgctcctcctgagtcttagtgtttactagaatttgcttcaatgttttatttttgtgttaccagttttaggttgactgtataatgaaattctgtattttgaatcacatttccctgctgatatcagcccagcttataacaagtaatgcttgccttaaacatattttttctttctctcacttctgccatcaattcaacaataggattgcagatacagtttactttggggctgaattaagcagtagcagaggggtgtttgtaaactaactgatgttatcaataggcagggacacagcatggcttaggatcatggtcttccagcttgatgacctgctttgcaatctgtttgcttcatccacatcaatgaggagccagaccttctggtccttcatttactcatagactctcttaagagctttgtacattcaattctgaacttattggtgccataaaatattattactgtgcaaaagaataaaagtgctagtgtgttcttattagtagccatgaatttcatttctcttttccctcttcccacctgagattcatctttgaggggaagccagataccttgggcttcttattttcccatcctgcccttattcttggaaggtcctcaggtttgttgacatggtttttgttctctgggacttttctagtgtgttgtttgcatgtcagccagctcaacttaatgcatgtcagctcagtgccacttgtgctccatgtgacttcagttagcaccagtgtaaatcttgtggctgttaatagaggtggagtcccagctctgacggcagtagtgggagaagaagaggaaattgtcagggcccaaacatttcatatctcatttaaatggatctgaccacttcatagaaaagaaaatttgaatcattgtgctcaaaggtttcccctttgagatacatattttgacctttataaactatagagcatttgtgttttcatggatggttatgtttagttttataaggaccaactctgctatacttcggattttcaggttcctaaagagaaagatgaaatggtagagcaagagtttaaccggttgctagaagctacatcttaccttagtcatcaactagacttcaatgtcctcaataataagcctgtgtcccttggccaggcattggaagttgtcattcagtaagtactttgatactgcttattgtatagtgagttccatgtgtaaagatttgctatttatgttttaagtttttctgcaagtcttgtttgaggtagtttttacttaattttgtatgaaaccattgaatccaaagtt

SEQ ID NO: 720 - DNA, 2300 bp, Homo sapien
gaaatgctcagagtcaaagtgaaagaactagaatcttctgaggaccgcctggataaaactgagcagagtttagcgtcagagttagaaaagctgaaatcattaactctgagctttgtaagtgagagaaaatacttgaatgaaaaggagaaagaaaatgagaaattgataaaagaactcactcaaaaactagagcagaacaaaaaaatgaaccgagattatacaaggaatgcttctaatctggaaagaaatgacctacggattgaggatggcatctcttccacactgccgtccaaagaatcaagaaggaagggtggtctggactacctaaagcaggtagagaatgaaacaagaaacaaatcagaaaatgaaaagaaccgcaatcaggaagacaacaaagtcaaagaccttaaccaagagattgagaaacttaagacacaaatcaaacactttgaatcgttggaagaagagcttaagaaaatgaagtccaaaaataacgaccttcaggataattacctaagtgaacaaaataaaaacaaattattagccagccaactggaggagataaagctacaaatcaagaaacagaaagagttagaaaatggagaggtagaaggggaagatgctttcctgtccagcaaaggcagacatgagaggactaagtttagaggccacggaagtgaagcttctgtgtccaagcacacagcgcgggaactgtctcctcagcataagcgggaacgactccggaacagggagtttgctctcaacaatgaaaactattctctgagcaacaggcaggtttcttctcccagtttcaccaacaggagggcagcaaaagcttctcacatgggggtgagtacagacagtgggactcaggagacaaagaaaactgaagaccggtttgtacccggctcctcccagagcgaagggaagaagtctagggagcagccctcagtgctgagtcgctaccccccggctgctcaggagcacagtaaagcgtggaaggggacttccaagccaggcaccgagagcggactgaagggaaaagtggagaagacaacacgaacgtttagtgacaccacccatggatctgttcccagtgacccattgggtagagctgacaaggcttctgacacctcctctgagactgtctttggcaagaggggacacgtgcttggcaacggaagtcaagtaactcaggctgcaaactctggctgttctaaggccattggagccctggcctcatctcgaagatcctcctcagaagggctctctaaaggcaaaaaggctgccaatggccttgaggctgataacagttgcccgaattccaaggctcctgttctatcgaagtatccttatagctgtagaagccaagagaacatccttcagggattttcaacctcacataaagaaggggttaatcaacctgcagcagttgtgatggaagacagcagtccgcatgaagccttgaggtgtcgagtcatcaaatccagtggcagagagaagccagactcagatgatgacttggacatagcatctcttgttactgccaagttggtaaatacaaccatcactccagagccagagcccaaaccacagcctaactctagagaaaaggctaaaacccgaggggcacctagaacctccctatttgagaatgataaagatgctggaatggagaatgaatctgtgaaatctgtcagagcctccaccaataccatggagctcccagataccaatggtgctggggtaaaaagccaaaggccctttagccccagagaggcgttgcggtctagagccatcatcaaacctgttattgttgataaggatgtgaaaaaaatcatgggaggatctggaacagagactacgttggagaaacagaaacccgtctccaaaccagggccaaacaaagtgacaagtagcattactatatatccatctgacagcagcagccccagagctgctccgggtgaggccctgagggagaggcacacatccactagcaatatccaggtggggctggcagagctcacatcagttagcaaccatgtcagctccccttttgagctctccattcacaaacatgacatcaccctgcagcttgcagaagcggagagaatggcagatgggcccctgaaggacaggccagaaacagtggtctctcggagcagcattataatcaagccatcggatcctgtggagaggaatagccatgcacctccagcggagacaatcaggtggaaaagccatagtgccccttcagaagtgggcttctcagatgccagacatgttactgtgcggaa

SEQ ID NO: 721 - DNA, 2300 bp, Homo sapien
taatttttagtattttttgtaaagacggggttttgccatgttgcccaggctggtctcaaactcctggactcaagtgatccatccccctggactcaagtgatcctcccaaagtggtgggattgcaggcatgagcaaccgcgcctggtcaatataatactactgaaaataagaatgacaggggcctgatgtggtggctcacgtctgtaatcctagcacttacggaggccaaggtgagtggatcacctgaggtcaggagttcgagaccagcgtggccaacatggtgaaacaccgtctctactaaaaatacaaaaattagccaggtgtggtggcaagtgccggtaatcccagctacttgggaggctgaggcaggagaatctcttgaacctggaaggcagaggttgcagtgaactgagatcgtgccactgcactccagcctgggcgacaagagagaaaattcgtctcaaaaaaaaaaaaaaaaaaaaagaaagaaaaagaaaataagaatgacaatcatattgttcatattgtttgtggaacactgtgcctgatgttttccatacagtatcttaggtaattttaaaacaaacaccacaagactatattattatccccattttatagatgagaagacaggctcagagatggctattatgaccccagaacatatgatcccagggttttctggcatcagagcttgagctccacaaacatgtgtgggttctgacctccaggaagtgctaagaaacaaatgggaggtcagttctttataagttgtagtgttcatgcccacgtgagggttaaacacaatgttattggttattcagaacagggaggattgctttctggctgggagaagctgggaggtgagacagcaggggaagagcttcagcaaagggtcaaatgtgggaaagcagtgggtgtgctaagagaagtttggataaactttgtgtgtgtgtgtgtgtgtgtgtgtgtgtaaaggtaggaagtgatcataccaggccagggctttggcctttattccataggcaataaagagcttacacaagagatgtctcaagagaccaaccatgctgctgtagtcagagaggaagcagccctcagcccatctgtgtcctggcttgtgaatgctgctgcgtgccagcgtgtgggagggcatccgcagcgagagcagtctctggctgtgtcctgtactatgctgggtgtgggtcttgggctgtctttgaagccttcctcctggcttctcagggcactaggtgccttttagatagtagacttaaaggaagtatgtcatagaagtatgggaggggattttgagatcatctggttattcccccttcccattttaaagaagatgaaaatcgggaacatagatgggaaagtacttgtctagcatcacacaaagaattaatagcacagtgggggacgggaacccatgcctcccgagtctgagctgagttccttctctgcatttgcagagtaatagaaataggatttgttgagtgattattccatatcaggttctaggctaagcacctttccattgattatctcatttaatcctcacaaccctactgagagtgtcccgcttttttctttttcttttgagacagggtctcactctgtcacccacgccggagtgcagtggcacgatcacggctcactgcagcctcgacctccctcggctcaagcgatcctcctactttagcttaccggcgggcgccaccactcccggctaatttttgtattttttatagagatggggtttcgccatgttgcccaggctggtctcgaacttctgagtttaagcgatccgtccgcctcagcctcccaaagttctgggattacagacttgagccaccacgcgggccgaaagtgtccctcctgaaatcgagaagtcttgtcttccatttcgatttcccagggcgcctagcacaggacccagctacggaggcaataaaaacttggtggagtctaagtcctgggaagggaaaaaaaggacggagggggcggggcctacagacaaccccgcccatcacaaagaccccgccttccagaacgctgacgtcacaatttggccccgcccctcattgtcagtcccgcggagccagaggaggcgccggtcgctggcagctgagcggcggaacccttcgctggcgggagcgcggttcggggccgcagaggtgagggtccgtgaggcggcggcggcgggagcgcggcgcggggaggggagggcggcggggttgggaggccggtcccgggtgaggtcggggcacccgcggccacggggcagaagaaaccgc

SEQ ID NO: 722 - DNA, 2300 bp, Homo sapien
agtccgtatttcatctttctttcctttttccccactggcctttgagccaggcttttatcgctcccgaattcttgttctttaattatcagtcaaatggtctcgaggctgcaatgaaactaccttgaaaccctttttggaaaacacattacataagacatcagatgaacagagatggcttctgaccagctgaggcagttggacacagttgaagatgtcttttgagcatctttcgtgtaaccagcactgtgctctgtcatgtggaggatacaacagtgagcccaaggtagtcccatactagttatgccaactgctatgatagataaatcctgaaatcgcaacgcctaaatacaatagaaattagttcaatgtgtgcccccctcagtcaagtgatgagtgagacccaggttgactaaggctctgccccgttcaacttgtagcttccaagggccccctggtgttgacatctgattggcagatgagagaaaagagctttgagcaagcatacatccttcttcaccactttggccaggacatggcattcatgttctctgcccatatcccactggtgaacacgagttatgtacctaattagcaaggagtgctggaaaatgtagtctggctgcttttctcagaaacaactctacacgtggaaggggaacagctttgatgaacagctgaccttgtcccagtttacgaggaacttaaaattattgaaccgtctacccttatagaatggctaagaataccatgcaatatgtaatgtggccacagggaggaaaatggcctggccttgtttacaagaaaccacggacaaaaaaaggagcatttaaggctgggcacagtagctcgtgcctgtaatcccagcacttttggaggccaaggtgggtggatcacctgaggtcaggagtttgagaccagcctgatcaaccaatgaaaccctgtctctactaaaaatacaaaattagtcgggtgtagtggcacacgcctgtaatcccagttacttgggaggctgaggcaggagaatcacttgaacccgggaggcggagtttgcaatgagccaagatcatgccattgcactccagccagggctataaggcgaaactccgtctcaaaaaaaaaaaggagcatttacgtttaaaccaaatctatttgtccaacaagggaatgggatgggggtgtggagagggggagagtttatcatgatagtgagtattcaggcagaggctaagttttcacttggctgaaggctctagaaagggtgacgtgacagatgcctcctatcagtccttctaagtgtgaacttccatgtaaggttcccttagtcacctctgagcacttactttgtgtcaagttctcggtaaggctctgaggacccagaaacaaatgagacaaggtcatggttactcaactgaagtgctgaagcaggatagagaaaggctgagctctggaaacaggaggctggagtttaattcctagctctgttatttcgtagctgtgcatcactggagatgccacttggcctctggttctgtttcctcatttatgaactaggaacaacagttatcttcatagattacaggaacccaatgacaaaaaacacctggagtatttgtagcacagtgcctggtatgtagtaagcatgttattttattagtagtaatatttttatgatgaccttggataagtcacttcatttttcaaagcctcagctttctcatccataggatggagttaacactgacatcatggggttggaatcttgctgtgtcgtggggtcgggagctgccatttcgtctctccgcttcctcctgggataagtgggtcgcatcatgcccacttgatcgcggacggaaagcagccccgttcagcgcaaaggaggaacctgaattaacaaggacgcgatttcctggctgcgctcccggggtaggaggtttgcgctgggtcccatcccccggccggtcctgctcaggaaacgcggagagaaagccaggaaccaggcctgccaggccctgcggcccctcagcgccgtccctcctccccggccctcggctgcaggaagccggctggcgggaacgccctgcctggtgggtgggaaaggccgagagcgcgcccggcaccggcggcttcccaggcccgcggccggctggcggcgcggagctgtcactgcggcaaacggcgaacgcgccggccccctcccccgccgcccgcaagcctggtgcagtcggcccatgagtatttcatgaagtgccgcagccggattcatggctcactggcgcaggaggggagagaggctgagtcct

SEQ ID NO: 723 - DNA, 2300 bp, Homo sapien
tagaaatttcttgagagctctggacctggtttttccacttccagccaggtggccttgggcaggtgacatcacctctctgagcattggtcgggtcattataagttgggagccacgttgcccactttacaggttggatgactcttagccccaaagctagctcagtgcctgaaatatagcaagagctcttcaaaagatattgttataatatcctttaaactgtaatatatgttttggagttggtggcttaggattggttttcttaaactgaggctttcccctctcctccaggcagatttttttttaatgaagcacccacaaatttggggagtgggagggaaaatactgcattgcaggtttagctgctgctccttctttttttttttttttggcagagtttcactctggttgcccaggctagagtataatggcacgatcttgactcactgcaacctccacctcctgggttcaagcaattcccctgcctcagcctcccgagtagctgggattacaggcatgcaccaccacgcatggctaattttgtttttttagtagagacggggtatctccatgttggtcaggctggtctcgaactcccgacctcaggtgatccacccacctcggcctcccaaagtgctgggattacagtcaagagccaccgcacccagctggtgattgatttttaaaacgttaagaagctaaagccgctcacacctgtaatcccagcactttgggaggtcaaggctggaggatcgcttaagtccaggagtttgagaccagccgtggcaacatagcaagaccctgcctctgtgaaaacaaacaaacaaataaaaaacaattagctgggcacggtggtgtgcacctgtaattccagctacttgggaggctaaggttggagggtcacttgatccaggaggtcgaggctgcagtgagctgtggtcatgccaccgcactctagcctgggggacagagctagatcctatctcaaaatgaataaataaacaaatgatttttaaaattactggtttattatataggattcaaatgaacaaccagaagaaaaggtacataggacaaggtctgaaaaagcttcaaggggccagccacagtagttcatgcctgtaatcccagcactttgggcggccgaggcagcggatcatgaggtcaggagtttgagaccagactggccaacatggtgaaaccccatctctactaaaaatacaaaaattagttgggcgtgatggcatgtgcctgtagtcccagctacttgggagactgaggcaggacaatcgcttgaacccaggaggcagaggttgcagtgagccgagattgcgtcactgcactctagcctggcaacagagcgagactctgtctcaaaaaaaaaaaaattattcatgctcactataggacatttggaaaattcaaatgagtagaaaaagggccacccccccccatactttgtagagaaatacattgtaacaatttggtttctttcctgatggcctttatcgttccctgtgtacagttttattttgtttccattgttgctaaataaataaaatgatgctttctgattcacaacttacagagctgatttcatgtacttctaacaagcttgtgatgattccaaaagctacgactctttgtcccctctgggaattgcatgggtggggcacatcaccctccctgtattctgatactttttagaatgccagtttcacagcaccatggccagctttaagtagtatctttttaatcatatagttcatttcaggcttccacattgtccttctagaacctaactctattttttttcttttttaaatcccagatcttctgaatgtgtccctgctctgtgagcccacagtgatctgtttgttttgcctggtcccagcttatgcattcttcgagtcttggtaaccaggatgttttgtctgttcaggctctaaaacgatcagtgggataggaaccgaagttaagtagctcaggatgcgtcaagatgaacctgggaaaaccgcgagctgctgtgctgactggactgcttctctgaatcggctggaacttctttttgtgtctagttttaaaagctcctcagaagcaaccctaaatccagaatcgtttcaattactgtgaggggaattctgaagttctcattaaacacacgaatgtctcaagctttgaaaagagccagatgccaaaggcaagaatcccagggcattgcccacctgggtgtgatcccctgataattgtctaacaaattcagcatgtgtcccctgggcatgaccatctgctgggaaaagttc

SEQ ID NO: 724 - DNA, 2300 bp, Homo sapien
gactttttgttgattaacttggtaataataattatgtgttggttccttgaaggttctactcagtgttaggtgctttaatgacaacataggagaaggcaggaaccaataatttttgtaaattggtgactgatatcagtgtcattttcctagcaatttctcttactacctgtaacaacacttttagcacttaatgttttagaggagaaaagctatgctatgaagacaggaagaaacacttttcaggtaaaattaagtagccaatgacggttttgtttatttgttgcttactaggtaaaagttttgtttgtgagaaacttggctactacggtgacagaagaaatattggaaaagtcattttctgaatttggaaaactcgaaagagtaaagaagttgaaagattatgcatttgttcattttgaagacagaggagcagctgttaaggtaggaattttgaaattttggttcttgatatttgaattttgtttttgaaacttgccaaacacaaagtaactttaaaaactgaaacaatattggttgtcagcttttgctgaactctttctatttaatctctgtaaagtggtaatagtatgtaacagataagactccatatttcaaagccaggttattactgagtttgtgatcttaggcaagttatttttaatctctgtattgttttgtaagattcgatagcatgatgccttggaagtattacaaggtataaaaattagctgctgtaaacactgaataggtaatgaatgcattataactacttagttgacctcagtttgtgtacctatgaaggaaactgagtggtgtacatgactcatacagtataccatgtttaattgagtagatagattttgagggtatgattagttttacctttatttaatcattttagagttaaaatagcattcactatgttttactgatttcggtaattgttagagatatcacttgtgtataatagttgatttagtctttgatgataatgaaaagtttgaagaaagtattttcatatggtatctggaacacaaaacctgctttctatcgacaatggtttaggactatctttaatgggtgaaattttcagtttcttttttttattcatctctccttccttgggggggtgggagcaagacaaaacactactaaaatcttatttatgttattaggaagatagatccagaatgcttagtgacacaggcatggttctttttctgcatgtttggtcggtgggatactgccatctctaatctgagcattttttggttttgttttttgcccaggctactgcttttaaaacaggctttatagaatccctgattggtttataattaattggcttgctcattgatggtagctaattaatgaggcagtattgttcataaaattcataacttgtccaagatcacaaactcagtaataatctggctttgaagtatggagtcttatctgttatgctgttatactcttatccgttcatttgtggcttctgaaatttcactggtatagaatgcagataactaataattttatgctgtctaaatattcctcctgactcgactggtttcaaataactggttgtcctgattgaaaatatttataggatggtttgccaaagaagcctatgaaattataaaatatctagtccaggaactgggagtcaccaggatggtcagggcagagggtagatgtttcattttttaatttatgccaggaagcttttgtaaacttgtttagttgctttaactgaagcaacgcaaagctgaggtggtaaaagggaaaattgcagtcttgaggactagtttcgtttttgtctagatacttataaatcactgatagctccaatagaacatttttttatgtgtgcccagagtggggaaaggtatagggaaacaaaaaataaaatatcatgaggaggtgacattttgttactgagtacctgaaccttttgatgtatggcagaggttgttaggtggaacaacgtgaacaaagggctagaacatggaatgtttgattactgctttctacataattgcttgagtcttcattagtccaggccttttctggctctgtacttttaactgttcaagcaaagtacattttgggttaagcattgtgagggaaacctaggcttttttgtgttagtatcttcttgaattttacagataatctcactcagtaacctcatttgtgcttcaaatccttgaaattgtcgtataagaacagtggaagacctgtatgttgtatgctacatgtttattttaaaattctaatcctgagaagttaatctttgt

SEQ ID NO: 725 - DNA, 2300 bp, Homo sapien
gaggccgaagcagaaggatcatttgaggccaggaattcaagaccggccaagaccggcctgggcaacatagcgagattccctccgcacctcccgtgtctctattaaaaaaaaaaagttaagcttcggggtcctccctcacttttacaatgcccttccaagactctgttcctaaatttgtattcgtcatttaatatgatttttcttaaagactcccaacatttctttctttccttcttcctttcttttccttttctttccttttcttctctctctctgtctttctctctttctttctagaaggagtttcactcttgtcgcccaggttggagtgcaatggcgcaatcccggctactgcaacctccgcctcccgggttcaagcgatactcctgcctcagcctctcaagtagctggaattacatgcacgcgccaccacgctcggctaatttgtgtatttttagtagagacggggtttcactatgttggccaggctggtctcgaactcctgtgctcaagtgatcgtccacttcggcctccctaagtgctggaattacaggcgtgagccaccgcgcccggcctaagactcccagcatttctgtaaatctcacaccccataacacaaaacttggatctacccagagatttaacttggtactgggcacatagtagtcgttttcaatatttctttttctttttttttttttttaagacggagtttcgctgttgttccctagggtggagtgcagtggtgcgatattggctcactgcaacctccgcctcccgggttcaagcgatttttctgcctcagcctccggagtaggtgggtttacaggcacgtgccaccacaccgggctaatttttgtatttttagtagaggcagggtttcaccatgttgatcaggctggtctcgaacttctgaccgatacacccgcctcggcctcccaaagtgctgggattacaggcatgagctaccacgccccgcccgttttcaataattaaatataggtttgtaggttctgagaaatttaatcatccttgagtgcatctggaaatctgcagaccactgcttgacttcctccacttcctaagggtggggcattggagtttggggttgggaaaaaagcgcttgcaccacagaagtgagttcggaaggtttctatgagacgagacaggtttggactaaggacagggaacaaatcagtaggaatggcaggtgagaaataggtttaggactaacacgaattatagtgtcctttgggaattacccctttcccctgcatggctcttttggcttcagagatgtatatagctgctttattttatgaatatcaagtagctccaaaccctgtggggaaaagctccctgctctatcacttgtgttacacattgcttttgagtcattttaacgatttccctcacagtctgccaccaacgatgtgtggacggcagccagggagggaaagaggcatttctccgatcgttccaaggaatgattatctagacaaaatcctcagcaaaatgacgagccaaatcatccttaaatcgtgtgctcactagaggcgaaaagatgaccgaaagaggcccgaacgcgtggctatgggcgtgtctggggggaacgccggccgcgggggtgcgagggaggactcgggggctaagggcggccggtggcgggacgcaagcgccatggcggagctgggccagtgctgaccatagggggcggggctccggaggcggccacgcggcgcgaggcctagattttcggcctcgcatcggcggcagacgaagagggaggagcttcgtccacccaggacccagcgcccccaagccttgcagccaccaagggcttccaccacagacccctttgtgtgcctgcccccgccccggaggcgccccagccaggggcgctgagcaccctcattggttcagccggcagcttcatcgattggctctcgagtcgtccggcgtggtccgttttgcctggatactactggtcgtctgagctgcctgtcaggccgcctcgccaagcgattgccccgtagctcggagtccctggaagcagttccgggaaaccccgcgtgctgccgggatcgcgtctcagtccatcaggggggggagggggtggcgcgcgcgccatttctagtcgttttcaaagcgcctcgcgctgattctcacgggcccggctgccggcccccgctctgccctggtgagtctcgcgccggcccgtggggggaggggccgggagccccgatgcgacccgactcagcccgggctccgtgcctggtcccgtttcgtttgcgctccga

SEQ ID NO: 726 - DNA, 2300 bp, Homo sapien
agacaatatgacctggatgttcccatattcaaagatctgcctgaggactcaagtcaagccaatatccaattaagtgctttaaaaaatcaaaccactaggctgtgttgaaagaactaagtcattttgacacgatctcaaaaacgtggaggcaaagaaaggtagaatccttacttacctagtgagacaacatttccataattctcctgcataacatcccggtaaaggtccctctgtgcagcgtccagaggtctccattcttcccgggtgagatacatggccatatcttcaaacgtcacaggtgcctgaaatcacacgatacttccctactattctgtatttaggacttcttgaaattagaaacatgattagaaatattcaggaggaaaaatatattaaatgtgacctatagagtccaaataagaaataaacaagcaaaaaagagatgtggtaaagaaggcagcaatttatgagctgattgctctggtcccatggccagctatccctgccccactcaggaactttatcctctggctgtgactttctcaggacatatctggcacttgcatcgctccatacctttactcataatgttcctcttttcctggaatattcttctcacactagagaaattctactactctttaaggtcccgctgcagtactaactgttcttcaatgccccctacccctctgcacggctccactccccttggatgccccagatagacttaatcacgccgacttcttgggagtgattcccacactacagcactttgttcctacagcaagtagagcacttactacgttgtgccacgcttaagtggatgcgcctttctccctacagattgtgaactgtgagctgtgagctagaaggtagcgcccatctcgtccatcttttatctccccagtatttaaaggcatacagcaggtgttcgatatatgtttgtttgtgactatactggcctggtactaggcccctggaggcagaatatcgaagccagcgaattactaatcccagggaatttcccacagggacttgcagagcagagaaacgccggacgaggtgggtaagcagagacaaggtctgagaagccacctccggcttacctgggacccagccatgagcagggtggctgccatctcgagcacaagggttcgcctccagggagagagagcaggaaaagcagctagcagacagcgctgaaggaggcgaaaagcagggcgtgaggcacggaaaacaggccctgcccactccccagggctggagttctggccccaaggcgggcagggagggccctggaccagggccgggtcactctcctccctgaccctcgagcgcgacccgccctctgcgtctccgccacagcggggtggaggcaatgccggaatctactaggacagccccctggctgggtccctcccgcgccgggggttagaccgctgctgtctcagggaggaggtgctcagctcagcccagggaacgcctccgctctgccatctcgaggccgggtcctttccggcagctgcctcagccaatcagcgagcgaagttcgtgaaccactctgccaatcagaggcggaacactatgcccgcctcccacagcctggccaagagcctctagtgcgcctgtgcctgcccccatggcctgccgggagttggagttccactcccgcgtacaaaagctagccagaggccaaaagccaaggagggaaaagaacaaaagggtgaaaaagtaagcgcgtcctcccagtcagggcggagtattctcgcttttttcttatggagactgcagcacgattaagctagaggctgccctgcttcgcctcacgtccctagaagcttctcttgagtcgggccttattatctgcgaagtcaggccaatttaggcgctggcctgtgttgagctgagctagaatgagcccctgcttgacagcacaggctggagagggaagcggcagccgcccactccccaggggagactcggaggccgcgctggaactttgagccccgcccacgcactacatctcccaacagcgcctgcggcggcgcggctctgtacgcaatacaactcccgagaggccccgcgccgccccgcgccggggcgactcgggagtgcggtcggcagtagagcctggcggtgtcttggcttcggcgctttaaccctgtaggggcgtgcgactgcgtccttctcaagggggcgcccctcgagcggcgggctgagtggcgtccagcggcggggaggcgaaaaccctgggggactcagaagcgggtggcggtgtagggcgtgtaaggaggagatag

SEQ ID NO: 727 - DNA, 2300 bp, Homo sapien
atgactttccaaaggatacacagcctggattccaaaccaggcttgtctgaccttgaggcccacgctctttccactggggatactgcctctaggggaccctccaggattccattttatatggtgctcagatcaattttatttttatagccaaatttagcagtggggggttgtatactaactttagagttattaatgttattaagttctggtaacccactaccatcggaccagcctcggatcgactttagatgaggtaggatggtataattctgtgacatcttaagaattcttagccccacagttgcgggtggaaagagaaggaatgggaaagtctgcattatggctggggtgggtccttctgttctttttagacacttcagtaatttaatcataaataaccgggcactgggaacaggacactcactaataaaagcaaggcctggagttatgtttgaaaaaaattttcaagttcctcagtgggtggatctatctgcaaaacaaaagaaaggcccctttcccagcccaggcagagaagtctcctgtacagttagagacaacaggcttccgggcacgtagccaaggttctggggatatttataacttgaagagggtgggagtccctaataagctgctatattctttttccatcacttccctctccaaggctacagcgagctgggagctcttccccacgcagaatgcctgctttccccagtgctcgacttccattgtctaattccctcatcctggctggggaaagggagagctgcgagtcctcccgttccgaggaactccagctgaatgcagcttagttgctggtggtttctcggccagcctctgtggtctcagggatctgcctatgagcctgtggtttctgagctgcctgcgagtctgaggcctcgggaatctgagtctttaggatcagcctacgatatctgggcttcgcctgcaagtctacgaattcgagatctacctgcgggtctgagacctccgggacctgcccgtgctctctagaatcttcctgaacgccaggtctgagagaacgctgcggctctggaacccgttcgcggtctctcaggttttggagacgacgatctagtggatcttttgcgggacaggaggtaagtctgttcgtcccccactcgggttttcggcttcctaccttcaaccggacagggactgctaacatcctgaaggcccgcccggatcagggcctcagacgcccagggtcccttcggtgcgggaggccgctgggagcccctgtagcagacaagccctctgggacgctaaggagggcccgccccccccgcaggggcctggctatctcctccttacacgccctacaccgccacccgcttctgagtcccccagggttttcgcctccccgccgctggacgccactcagcccgccgctcgaggggcgcccccttgagaaggacgcagtcgcacgcccctacagggttaaagcgccgaagccaagacaccgccaggctctactgccgaccgcactcccgagtcgccccggcgcggggcggcgcggggcctctcgggagttgtattgcgtacagagccgcgccgccgcaggcgctgttgggagatgtagtgcgtgggcggggctcaaagttccagcgcggcctccgagtctcccctggggagtgggcggctgccgcttccctctccagcctgtgctgtcaagcaggggctcattctagctcagctcaacacaggccagcgcctaaattggcctgacttcgcagataataaggcccgactcaagagaagcttctagggacgtgaggcgaagcagggcagcctctagcttaatcgtgctgcagtctccataagaaaaaagcgagaatactccgccctgactgggaggacgcgcttactttttcacccttttgttcttttccctccttggcttttggcctctggctagcttttgtacgcgggagtggaactccaactcccggcaggccatgggggcaggcacaggcgcactagaggctcttggccaggctgtgggaggcgggcatagtgttccgcctctgattggcagagtggttcacgaacttcgctcgctgattggctgaggcagctgccggaaaggacccggcctcgagatggcagagcggaggcgttccctgggctgagctgagcacctcctccctgagacagcagcggtctaacccccggcgcgggagggacccagccagggggctgtcctagtagattccggcattgcctccaccccgctgtggcggagacgcagagggcgggtcgcgctcgagggtcaggga

SEQ ID NO: 728 - DNA, 2300 bp, Homo sapien
cttctacacacagtaggtactcattgtttgctgaatcatgggaacaaatacagctttccaagttggttactgaaaatccacatacagtaagtattcccaagaaacactgcagtccagaacaatggggcaggaagccacctcctcctccagtgaccccaaccctgagtccagctgaaggctgcaacaggaagcccctcagccactgtccttccactccctcttccccactccccccaggggctccagatgcagtcatgctttccatccgctcccagcctctcttctctttccaacctctagagggtcccaggtgaagaaaaaaaaagcacttacagaaggaggcaggcagccaagctgagcccggggagtcgtcctgggcgccaccccgcccccgccccgcaggcctgaggaataaaagaaacagcaagaagacaaagaagggcttaaagcactggggcaaaggggtggggggaaggcctaagaaagtttacaaagcaatctgtcagagaagggatgaaaagggacccccgctgggctgaggggctcaagccctcagctcaccttaggcccagttagaaacctgcaattacttcagctagtcagaaaggctcccctcctccttgctccaaggagcgtggttattaacctctgacccagaagtttccctgagcgtgaagcctcaacttgctggggttttggcaaccccaagtacctatgctctactaggctcaacacaccgctcactggaacccaccaaactggcctaacctctgttgcgtctgaatttctggaagaaacacgatgtgaggataaagtcacccacagttcctcacagctattgagccactttgatttcccagattttctgagctatccaatatacccacaagcatttctggaagtttcccttaccaccaaagccagggttaataaaaagtaacggctatcatccaagagcgcactctctggaacgctttaatcatctcactcacgcctcacaacatccttaggtatgatgaccctcattttagagaaaaggaaatgggcctggattcaatgactttccaaaggatacacagcctggattccaaaccaggcttgtctgaccttgaggcccacgctctttccactggggatactgcctctaggggaccctccaggattccattttatatggtgctcagatcaattttatttttatagccaaatttagcagtggggggttgtatactaactttagagttattaatgttattaagttctggtaacccactaccatcggaccagcctcggatcgactttagatgaggtaggatggtataattctgtgacatcttaagaattcttagccccacagttgcgggtggaaagagaaggaatgggaaagtctgcattatggctggggtgggtccttctgttctttttagacacttcagtaatttaatcataaataaccgggcactgggaacaggacactcactaataaaagcaaggcctggagttatgtttgaaaaaaattttcaagttcctcagtgggtggatctatctgcaaaacaaaagaaaggcccctttcccagcccaggcagagaagtctcctgtacagttagagacaacaggcttccgggcacgtagccaaggttctggggatatttataacttgaagagggtgggagtccctaataagctgctatattctttttccatcacttccctctccaaggctacagcgagctgggagctcttccccacgcagaatgcctgctttccccagtgctcgacttccattgtctaattccctcatcctggctggggaaagggagagctgcgagtcctcccgttccgaggaactccagctgaatgcagcttagttgctggtggtttctcggccagcctctgtggtctcagggatctgcctatgagcctgtggtttctgagctgcctgcgagtctgaggcctcgggaatctgagtctttaggatcagcctacgatatctgggcttcgcctgcaagtctacgaattcgagatctacctgcgggtctgagacctccgggacctgcccgtgctctctagaatcttcctgaacgccaggtctgagagaacgctgcggctctggaacccgttcgcggtctctcaggttttggagacgacgatctagtggatcttttgcgggacaggaggtaagtctgttcgtcccccactcgggttttcggcttcctaccttcaaccggacagggactgctaacatcctgaaggcccgcccggatcagggcctcagacgcccagggtcccttcggtgcggg

SEQ ID NO: 729 - DNA, 2300 bp, Homo sapien
gctcactgcaacttaaacctcccaggttcaagcaattgtcctgcttcagccttccaagtagctgggattacaggtgcccgccaccacacccagctaattttttgtatttttagtacagatggggtttcaccatgttgacctggctggtctccaactcctgacctcaggtgatccacctgtcccagcctcccaaagtgctgagattacaggtgtaagccactgcacctggccacatccaataaattttgaatgggcaaatgctttatgctctggaaaatcccctcaaattaaagtcagctactttttactcatatgggtaaatggctttcattgacttgtttttctatattctcctgccattggttagggcctagcctttgaatttaacacactaggacttaaacattaatacgtaccagaataacttgaggacactagtgaaaatgcatattctggccaggcgcagtggctcatgcctgtaatcccggcacttcgggagtccaaagtaggcagatcacttgagctcaggagaccagcctaggcaacatgggaaaaccccatctctacaaaaatatacaaaaaataattaaccaggtttggtggtgcatgctgggtgtagtcccagctacttgggaggctgaggtgggagaatcgtttgagcctggggaggttgaggctgccatgagtcacgatcgcaccactgcactccagcctaggtgacagcaagatcctgtcccaaaaataaccaaataaagaactttaaaaaatgcatattcctgggcctgcccttagcaattcagattcataggaatctgcattttatcaagaagcctaagtggttataatgaaaggtgagcacactaaaatgctttgacctttatgccagcattcttctccatggtttaaggactcaggacagacagcaacaattaaaatgtttaagccaggcatagtggttcatacctgtaatcccagcactttggaaggatgaggtgggtggatcacaaggtcaggagatcgagaccatcctggccaatatggtgaaaccccgtctctactaaaaatacaaaaattagctgggtgtggtggcatgagcctgtagtcccagctactcgggaggctgaggcaggagaatcgcttgaacccaggaggtggaggttgcagtgagccgagatcgcaccactgcacttcagcctggtgacagagcgagactccatctcaaaaaaaaaaaaaaaaagtttaaaatcctcattttgagattcgcgtcagccaccctccttccccttccaccaacccttaactggagctccctctctgctgtcctctggcagaggcttaaggggagacaagtggccagggagatggacagagaaagcaaaggtgtgggtgatgcagacccggagtgtctactgtgagctggtgggagactggagactcttctgtagaaactctcagaaaaagatgatcttggatgcatgctcatcagatgaacagttagttgtgtgagcccaggagcttcaggatgggggtagcagcagcaagtcatgggtagttgcgccaaggttcccactaagcagaacagcagggcagtgatcacagcgtaaaagagcactgggtcaagtctagagaggaaggctaaggggaacatcatagaccaggtggcagtgatcaagtcagctcaagcaggaaggttcaggccaaggccaaggtcctggcaggcaggatgagccccagatctgaagaaatgtacacaggagtgctcgtcctcgggcagaggctgtttgcctgctgctcacctgaatgtgcattatgaccttccagccgtgggcggcaggaggactctgcggggacagctttctcccagctggggcaggacccggaatccaggcctccttccagctccttgcagtcaataaagcatgttacctccttttctgttcaggctttctagaaaccgggtgtagggcagggcccctgaaactcctcagccctgaagggtagactcttttttctccaggaaatggccagtgatgaactgagggagttgaggaatgccatgacccaggaggccatccgtgagcaccagatggccaagactggcggcaccaccactgacctcttccagtgcagcaaatgcaagaagaagaactgcacctataaccaggtaaggacagtgaggggacgggccggaggtgcaggaggccgcaggggcatagaggtggaaaatcagagagaagcttagggaagagccagaggggagaaagcgttaaaactctctaggctttgccgggtgcggtggc

SEQ ID NO: 730 - DNA, 2300 bp, Homo sapien
gatgtccagaacaagaactacctggcacatattaggtgctccataaatatatgttgaatgcctcttcctttcttccgtgaacactcttcctcctcccctcaacggccactgtgtacttcagcccaaagtttaaacttcgtttcttcagagaagttgacaccctaaatagtgcaggtcccctcaaatgtgtccttaagctatcctccactgcttcctgcccttcaccccagctatgataaatgcattaattgactatgtctgtttttgtttaaggtttctcttgcccatagactgagtctcaagctttctgggactgggtctgtcttgttcattgcttggacactcaatacgtatttgttgaatggatgaaaaaaacccactctgtcctaccttgatccccgtcacatagcaattagaagataggtgtccacaccaagctgcctctgcgacccaagctgaaatgcggttctctcaggaaaatcaggagatttcactcgacaccccaaccccagctcccacacactgtggaccacttttcatgccttccctccaggttcctgagccccacccccatcacaggaagatcattttctgtccattaaactcacttatttagcaagagaactgggtctgcaggagatacttgaagatcattggagatcattccacaggaaggcagatccctgcatggctggggaagataggcacaattgtgtttccacccctccactaagatgacttccaaacccaaccccactgaggggatactggcctgacctggcagccttgcacctggatcaatatttctcaaaatttggtgcacttaagaatgaatctcggcggggtgcggtggctcacgcctgtaatcccagcactttgggaggccgaggcaggcagatcacggggtcaggagatcgagactattccggataacatggtgaaaccccatctctactaaaaatacaaaaaaattggccgggcgtggtggcgggcgcctgtagtcccagctactcaggaggctgaggcaggagaatggtgtgaacccgggaggcagagcttgcagtgagccgagatcgtggcactgcactccagcctgggcgacagtgcgagactgcgtctcaaaaaaaaaaaaaaagaatctcatctgtaattacagcactttgggaggccaaggcaggcggatcgcttgagaccaggagttccagaccagcctgggcaacgtagtaagacctagtctttacaaaaaattaaaaaattagctgggcatgatggatggctcacgcctgtagtcctagctactcaggaggctgaggcagaaaggatcacttgagctggggaagtcgaggcagtgagcctgattgctccactccactctggcctcagccacagagggagaccctgtctcaaaaaaataaaaagaatctccccgataagctctcactactcgagagtgtagttctgggaccagcagcacccccagcacataggagcttgttaaaaatgcaaagccttactaacaaaacagccagcaaaggaagttttaggtagacagaggcaaacaggagcctggatacacgtggcatgcacaggccgtgtgcacgatggagtgagtgcaggttaaagcagagctggatttagtgatctacacacacacacacacacacacacacacacacacacacacacacacacgggattcgagcgcaccgagttgcctccacttgggcataggcgcggaactgtgtcctcccgctttgagatgcaacggtgcagagacgcgggagcccagaacgcttcccagggcccctgggacaccctcgggcgccctccgcgccgcgaccgccgcctgtggccaggtcacagcctcccagctcgccagagagccctccttcccaaatctctcttcggtcccccggcgcccctggaagggccggagttggagggtcccctctctcagcctcgtccctcccctgaggcccgatcggccggcgcgggcaatcagtgcccgggcaagtccttgaagtctatatttagtgcccgccacccctcccccgcacagttgggaggcgggcggtgggggggtgggggtggggagagccccgcccccgccgggcgtgtgtgtcgtgtgtgtttggggcccgcgcgggttgcgcgccctccgccttcgcgcctcctgcccccgaggccctactgctgcccctgtgcccctcgccccgccgggcgtcgcgggccaacatgggccaggaagaggagctgctgaggatcgccaaaaagctggagaagatggtggccaggaagaa

SEQ ID NO: 731 - DNA, 2300 bp, Homo sapien
tgaggagacaggattagcatgatgaaaggcatggaagcaggagagtgggtctggccggtttggccagagtggagggttcatgtagcagagtgagagatgaggcctggaaatccctcttaaaagtttggaccttatttcctggcaatagagagccatgggagatcttggggcagggcagtggtgtaattagagcagagccttgggcacaacagttgggagctggtacaggctaggggaaaggggaaatgggaagcagggagaccagacaggaggcctggtcgcccaggaggagaccaggaagggcccagtggggtggtgacagttggttcagaggatgccctgcctcagagctgggttctctggggttccaagccctttgagacctcgtctgagcctggaaccagggcttcacgcagagggagctttgttgggatcctacttcggaggccagttctgagaaactgcccctggtgctggccactgtcattccactcccttcccactcctagcttgagagtccgacttgtcagggacacatctccatgtggccccagcggctttggtgggggctccctgggctccgggaaggccagcagcatttctgtgggtcagaagcccccttctctcccgacagacaaccggacgtaccactttcaggcagaggacgagcacgagtgtgaggcgtgagtgccccctcggccagcccggccagccttgtgggtgggggccggcggccctatctcttcccacttgacatccccatcccaccccgttcaatctccgcaggtgggtgtcagtgttgcagaacagcaaggacgaagccctgagcagcgccttcctcggggagcccagcgctggcccggggtcctgggggtccgccggccatgatggggagccgcacgacctcacaaagctgctcatcgcggaggtgaagagcaggcctgggaatagccagtgctgcgactgcggggctgcaggtcggtccccggggccggggcaggagggaggcttaagtggaggggaggggctgcacctccaggctccagctgctttcctctgcagaccccacgtggctcagcaccaacctgggcgtgctcacctgcatccagtgctcgggcgtccaccgcgaactgggcgtgcgcttttcgcgcatgcagtcactcaccttggacctgctgggcccctccgagttgttggtgagggcggggcggggcctggaaggggccagaagcggagttaggggtgtagtttcatccgggggcggggcttgcaggttgtgggtgggacctggccgaggtgggctgggacaagccaggtagcgggtggtcaggggcggggcctgaaccgggagggcggccgaggggcgggactctgggggcttggagctccaccctatgcaggcttaaccgcccggtcttactccgccccacgtctattttcctacgactccagctggccttgaacatgggaaacacgagcttcaatgaggtcatggaggcccagctaccctcacacggcggccctaaaccctcagctgagagtgacatgtaaggggattctcagagagaggggcaccctgcctaggggattctgcctccgcagtgtccagggtcgtagaaaagtcttggatcagaagtctggggaggctgggcgcagtggctcacgcctgtaatcccagcactttgggaggccaaggcgggcggatcacttgaggtcaggaatttgagaccagcccggctaagatggcaaaaccccgcctgtactcaaaatacaagaattagctgggcgtggtggcacacgcctgtaattccagctactcaggaggttgaggcactagaattgcttgaaccctggaagcagaggttgtagtgaaacgagattgcgccactgcactccctcctgggcaatagagtgagactgtctaaaaaaaaagcctggggagaggggagcctcagatctagacgtcttcaggacatggttctggagaaaaagagagctgtatctcctgtgggagggccccagggatcagctgggcagacacggtccatgctctgagatcctgtggttgtttttggtaggggcacccgcagggactacattatggccaagtatgtggagcataggtttgcacgccggtgcacacctgagcctcagcgactctggacagccatttgcaacagggacctcctgtcggtactggaggcctttgccaatgggcaggactttggacagccgctgccagggcctgatgcacaggtgagaacccctccaagggccacttataacccacctgtctaaca

SEQ ID NO: 732 - DNA, 2300 bp, Homo sapien
ccagggagctggagacccgtttgggaggacagatgggacctgaaggccccaatctagtcttagtctacacttcacatccttgaggtgctgctgggtgaggagaaacacaaatggaacaggatgattatgcccatttaacagagtgggaaatggaggcctaaagaatgtggagggccagaggtaatgcatacatcctccgcccctaaattcccacagataaaccggcccccggtgaagctgaccctgctgacgtgccaagtgaggccaaaccctgaggagaaaaagtgcttcgacctggtgacccgtgagtggtccctgtgcctctcccccacccacagctgctcagggcttctctaagacacctgtcagctcccggggggcttcagtgaggggtctgtgtccagttccacacatggtgtcgaattgctgctactgcagacataagaatccttaggtctaggatacccacatcacattaaatgtcaaaatgcacccactttacataataaatgtggctatttatacagagcatatttgagtggatttgggtcatctgggttttgaaattatttctttttttaaaattttacctttttttcccaaatacccagacttgaaggagatgaaattattgtttctttacattttctacttttcgttcttcagagcctttggtgcaggctttgtgtgagagcagacacaggctgagaaagacctagatcttgtcctcaggaaactctctggcaggggtgtggggtgggtacccaggactgtaagatgagggggctgtccagaagatgggtgcagatatagccccatagaagattagggagcaggaaggcctgcactgctgtggggaatcaggaaaggctcctggaggagacagtatttgagtttagccttgaaggacatgtagaatgaagagtttgtggggtgggggcttttgaggagacaggattagcatgatgaaaggcatggaagcaggagagtgggtctggccggtttggccagagtggagggttcatgtagcagagtgagagatgaggcctggaaatccctcttaaaagtttggaccttatttcctggcaatagagagccatgggagatcttggggcagggcagtggtgtaattagagcagagccttgggcacaacagttgggagctggtacaggctaggggaaaggggaaatgggaagcagggagaccagacaggaggcctggtcgcccaggaggagaccaggaagggcccagtggggtggtgacagttggttcagaggatgccctgcctcagagctgggttctctggggttccaagccctttgagacctcgtctgagcctggaaccagggcttcacgcagagggagctttgttgggatcctacttcggaggccagttctgagaaactgcccctggtgctggccactgtcattccactcccttcccactcctagcttgagagtccgacttgtcagggacacatctccatgtggccccagcggctttggtgggggctccctgggctccgggaaggccagcagcatttctgtgggtcagaagcccccttctctcccgacagacaaccggacgtaccactttcaggcagaggacgagcacgagtgtgaggcgtgagtgccccctcggccagcccggccagccttgtgggtgggggccggcggccctatctcttcccacttgacatccccatcccaccccgttcaatctccgcaggtgggtgtcagtgttgcagaacagcaaggacgaagccctgagcagcgccttcctcggggagcccagcgctggcccggggtcctgggggtccgccggccatgatggggagccgcacgacctcacaaagctgctcatcgcggaggtgaagagcaggcctgggaatagccagtgctgcgactgcggggctgcaggtcggtccccggggccggggcaggagggaggcttaagtggaggggaggggctgcacctccaggctccagctgctttcctctgcagaccccacgtggctcagcaccaacctgggcgtgctcacctgcatccagtgctcgggcgtccaccgcgaactgggcgtgcgcttttcgcgcatgcagtcactcaccttggacctgctgggcccctccgagttgttggtgagggcggggcggggcctggaaggggccagaagcggagttaggggtgtagtttcatccgggggcggggcttgcaggttgtgggtgggacctggccgaggtgggctgggacaagccaggtagcgggtggtcaggggcggggcctgaaccgggagggcgg

SEQ ID NO: 733 - DNA, 2300 bp, Homo sapien
ccacagggtcccctggagaagtctccctgagtgagcccccgcagaatggggctcttcccactgagatgccctgaggtctcctttgcatgtccgagggacaggaacacctgagccggaagaactcaggatgtggctatagcatccaccagcaccaaggcaacaagcagtttgggacggagaaagtgggctttctatacaagaaaagtgacgggtaagtgattcagagcttacataatttgcccaatgtcacactgcaagtaaatgacagggttggggaagctgcccaaaggaactgttctaatcatttgtgtagacaccgagggttgcaatgtaaaatcctcaattcctgggttgtccaggacacctgggcatgtgaacttctgctaaaggtgactggttattttaagttaaagaagaagaatagcagtagctaacacttttttttttttttttttttgagatagagtctcactctgtcgcccaggctggagtgcagtgccatgatctcggctcactgtaagctccgccttccgggtcatgtcattctcctgcctcagcctcccgagtagctgggactacaggcactcgccaccacactcggctaatttttttgtatttttagtagagacggggtttcactatgttagccaggatggtctcgatctcctgaccttgtgatccgcccgcctcagcctcccaaagtgctgggattacaggcatgagccaccgcgcccggctggcagtagctaacacttattgcaacacttactatgccctcattcttttttttttttttttttttttttttttttgagatggagtctccctccgtcacccaggctggagtgcagtgacgtgatctcagctcactgcaacctccgcctcctgggttcaagcgattctcctgcctcagcctcccgagtagctgggactacaggtgcccgccactacgcccagctaattttttgtatttttagtagagacggggtttcaccgtgttagccaggatggtctcaatcttctgaccttgtgatctgccagcctcagcctcccaaagtgctgggattacaggcgtgagccactgcgcccagcctatgccctaattaatctctgcaatatactgaatatgcctagaaatgaaagtattggctgtgccttgcttcctagtgtaaaaaaaaaaaaaaaaatcagtctgtgggccaggtgcagtggctcacacctgtaatcccagcactttgggaggccaaggcaggcagatcacttgaggccaggagttcaagaccagcccagccaacatagtgaaaccccatctctactaaaaatacaaaaaattagctgggtatggtggcgtgagcctgtagtcccagctgcttgggaggctgaggcatgagaattgcttgaacctgggaggcagggattgcaatgagccgagatcgtgccactgtattccagcctgggtgacagagaaagatcctgtctcaaaacaaaacaaaacaaaaaaacaaaactgctgtgaaatgcaaaggcccttgtgggatatattcatgtttctacctaccaatcagtttaatcggagaagaataactttgaagaagaaaccaatgaatatttacctgttacaggagaagtgttacggagttttggatcatggacttgctaattttattttggggatattaatattgatcttgcttagttgaaccacaatttatttgttgttgtcaagagcctgtgcctctcagactaggagctccctaatgatataagctatgtctcccccatcagactgggagctctcagagggccaaagtcacatcatccccttagaataaggattcccagggagtgaggctgtgtttctccatcagactggcatcttcctaagagcagaactgtgtctcctccatcagaagggagccccagagagtcaggggtcaggggtgggggtgtagggttaggagaagaaagaggtaaagggatgtggctagagatcatacaggtgggggcaaatttctgttctctgacacctgcgaactaggtgtgagccttgggtcactgtccttctatccctctgggctttagaattcgaagagtctggcagaaaaggaagtgtggagtcaagtatggctgcctgaccatctcacacagcacggtgaggcctagaggtggtgggagtctcagggcacgatggaccctcttcttctggtgttctgagcaaataatgtcaagccctccctctaagactggcccccaaacctaggtccagggagctggagacccgtttgggaggacagatggga

SEQ ID NO: 734 - DNA, 2300 bp, Homo sapien
tgtcatgcaggctggagtgcagtggcacgatctcagctcactgtgacctccacctcccaggttcacgccattcttctgcctcaacttcccgagtagctgggactacaggtgcccaccaccacgcccggataattttttgtatttctagtagagacagggtttcaccgtgttagccaggatggtcttgttctcctgacctcgtgatccacccgcctcgtcctctcaaagtgctggcattacaggcatgagccactgcacctggctggagtttttttttaagatagagtttcactcttgtcacccaggctggagtgcaacggcacgatctgggctcactgcaacctccacttcccaggttcaagcgattctcctgcctcagcctcccgagtagctgggattacaggcgcccgccaccatgcctggctaatttttgtattttcagtagagatggggttttgccatgttggccaggcttgtctcaaactcctgacctcaggtgatccacccacctcggcttcccaaagtgctgggattacaggcgtgagccactgtgcccagcagtttaaaagatttaaaagatgagattagaatgctaagggggtgcagcaagacttggagggttttgaatgccaattgagcattctgactttttgttgggcggtgtggaccagtggacccaatcatgttgctcaaggaatggatggggttggccctgccagcatagtgcctgggggactgctccatgccaggccctgtatgaggcactgggcagatgcatcgctcagttagagatgcagtccctgccctgtggaccttacagtcttctggcaaagcccaacagtaagcaggtaaacaaataagtcacagccgggtgcagtggcttatgcctgaatgccagcactttgggaggccgaggtgagaggatcacttgagcccaggagattgaggctgcagtgaactccgatggtgccactgcatgctagcctaggtgatagagcaagaccctgtctccaaaacaaaacaaaacaaacagaaagaacaaataagtcagaagttgctcattgtactaagtggcacgaagactcatcctcctcgtcaaggccttctttgaggtttgttctgggtcctcatctcttcagggaatcttgtccacacgtgtggccttagttacctcccatctccaggtgactcacacatttgtacctgtagcctagatcctcatgtcccagtgcatacttgaccacactcctaacttccctcaggctcccttccagagctgttttcacaatgagtggtgcgacctctcacctccacgtgtgcccctcatcaccaaggaacatcttcttttttttttttttttttttttgagatggagtctcactctgttgctcaggctggagtgcagtggcgtgatctcggctcactgcaacctctgtctcctgggttcaagtgattctcctgcctcagcctccccaaggcagatggatcactggaggtcaggagttcgagaccagcctggccaacgtggcgaaaccctgtctctcctaaaaatacaaaaattagctgggtatggtggcacgtgcctgtaatcccagctacttgggaggctgaggcacgagaattgcttgaacccgggaggtggaggttgcagtgagcccaggtcacgccattgtactccagcctgggcgacagagcaagactctgtcccccgacaaaatattattttattaagatctaatttgtcaatagattttgacttctatgagaatagaaactaatctcactgttgtgtccctagtatttaccatagaaccatagtgtgttttcagaaaatgttggttgaataacaaataaatgaaagaaaaaaaaaaactaaaaaggagcattcatagagaataatggtatgggggtgctccagatggaggggacctcttaggcaaaggtcctgaggcagtaaagaagctgaaatatatgtgaccctgaaagggggcccaaggggcaaaagcactgagatgggcaaagggaagagtggcacctgctgagtttgggtggtggtggcaaggccatattcaagtttgatggccctggtagtgagtttaagttttatttagtacacaggcaagcagcataatccagtttgtattttagaaagatcatatcagttgctgtatggaaactagattggaagggccaggagaggacccaaggaggccattctgttatttagggaagagatgatggtggtgtggatcgggttgtggttggtggaggaggagagaagtgcacagattgtagaagtg

SEQ ID NO: 735 - DNA, 2300 bp, Homo sapien
agtacagccccactgataccttgattttagcccagtgaaagttattgcagacttgtgacctccagacatgtaaaagaataaatgtggccaggcgcagtggctcatgcctgtaatcccagcactctgggaggccgaggtgggcggatcacctgaggtcagaagttcaagaccagcctggccaacacggcgaaaccccgtctctactaaaaaatacaaaaattagctgggtgtggtggcacgtgcctgtaatcccagctactcgggaggctgagggaagttattggtgatttgttatagtagcaacaggaaactagtacagaagacatcaacattaccgttgggattggatgaagaaatccaggaaggctgatagagtgagacatgcagaggatttagcagagagctcccaacaactccagcatttaagatccctgcggaggaagtgcatctcagaaagggctcttggaacagccagagggagagggccaccaaagaaaatagttctcctaggattcaggggcaagggtgtttcaaggagaagggagtggttaacattgtcagatgctcctaaaagtcaagcaagaaaagtgcctaagctcaggagtttgaggctgccttgagctatgatcattgcactgcacttcagcctgggcgacagagtgagaccttgtctctaaaaataaataacaagaaaagtgcctatttggtttcaacaggagaagttgaccttgaaagaactcttggaatagttgtcgtctctatcagatggtacacatttttttcaacttttaattcttttttctttcttttctttttctttttctttttttttttttttgagacagggtctcactttgtcacccaggctggagtgcaatggcaggatctcagctcactgcaaacttgacctcccaggtttaagccattttcctgcctcagcccaccaagtagctgggactacaggcaagagccaccacgccgggctaatttttgtatattttgtagagacaaggtttcgccatgttgctcaggttggccttgaactcctgaacaatccgctcacctcggcttcccaaagtgctaagattacaggcatgagccatcgctcccgtcaacttttaattctattacacagtagtatatggtcattgtataaaagttaggatatacagattcaccaaaagaaaagaaagttactcataatgtcttcagctagtgcatatctgtcttcagctagtgcataaaatgttgctggtgcaacattttagtgcatatctttccggattttttcttttcttttcttttctgtgcgagaaaagaaaagattctctcaatcgccgccctgtggggtaaaataccatgaggccattttaagagggggaaatgcaggcttagagaagcaagcaatttatccaaagtaaccaagattggaatctaggttcctctgactccaaaaccaatgttccttgctgcggtgctttcctagctttttacttggagaacttttccccagaggacctcaggcttcagaactaaacctaagtggatttctatcctgaaccccatccctcatccgccccaaaggatggtgagccagattaaggggtgaaaggcaggagcaggaagagtaaaggcgtgggtgcgatctatggtcgggtaagagggaactagtacacgcacgtgttcggttcttcgcaacatcacaatcaagcgggcatcaggcttcccattgtacagataaggaaactgaggttccagaagagaagtaattttccccaagtcacacagctagccaggggccccgatccacacatccccggggcggcgggggttatcaggagggagtctccggatgcctgcaaagctgaggctgagagctgggcgtacgcagcaaaggaggggtggggcgattcggggcggagcgaggcaaggagattgggcgggactggggagagaggagggaagggtggcgggggggtggtagggcagaaggggcgaggtcatggggaactcggaacgaatcagcagaggagggaggaagagggagggggctctaagactcgacgcggagatggaacagcctgggccgtgcaagggaggaggatttggaagacccagagcgggatgaaacgggacagagccctgaaggggcagggatgggggaaggcggaggagtttctactgaggccaggggtggggcatcgcgccagggggcggggtctgaggcggtgaggggctgggggcgtggcctagggggccggcgaggggccggggaagcggcctgacgcggtgcggggccg

SEQ ID NO: 736 - DNA, 2300 bp, Homo sapien
ctccttaaccacgggccctaagccggctcctatacctgctcctcaccccaccacacccagaggatgataccaggaggaagcagtgggtggggcctaaaccacatcagggtggggaaagggcccccctacagaagcagctggcccagctagactgagtgcccatcacagtcccacagctggtccttatcagggcggggctgggcatccgcccagacccaggggacttcctggctcagtgccacaacccagggaggtgcccacagtgggaagcagtgcaaacatccccacccccatgtttgggctccagcttgagggccccagggcctcctgaatagactgcatttgccattctttctttgccgagaggggcagacaatgaatccttcccgtgtcttaaggacaagcagctgaggccaccccccccctccagctccccctttctgttcccgccaagcttgggaaacacctgctggggaaatcaaaccacagacccatctgctcctctccaccctgttgccacccgggccccaattaggcccagagctgcactggcccggaaagggcctctctcctggttagggctgggcaggggcagggcaggggcagagctggggcactgggacactgggacataggtcagagacccatgcttgaatctccagctccttcgcaggctcacggtacaagttgggggaaatgttacacatctaaggagcctcagtttcttcctctgtaaatggggtaaaaatgcctacctcaaggggctattgtaaggattcaaggaaggcactacctgggcagcctctgcatcttaaaaaccctggaacaggctgaattaatccccgcgtggcttccctttgaagcacttatttagctccctgtctgcatgtgggagaaagaccctggttagctcctgctcctttaacttctgtaaagttctcagcctgtgtctcagcacacagtaggtgttcaggaaacacagagtcccttccctaaaatctaatctcgacctcttccttcatacatccttctgggggtcatcgagcccatttctttcctctttccaactctggatcccccagacacccctaccctggcttggacagagaggcctattttaacatttagtggtgaggtcatgctcagcagggctgagacttctaactgctgctgagcacagctgggctgacaggtgttggaggtggtgacagctcttcctgctgtcagttccccttcccccactcctgccccctccaggaagtcttcctgggctgatgtgaggagccctgctccttggtttgaggagcctggatataacactcttgctttccaccactaccgagacctggaaaccatccaaacactttactgctcattcttgaatgagtctcttgaatattccttttctaccttcctaactggtgaaatcctatattctagagatttagccccatgctgtcactagagaaagggccagtcactggctgagaccttccacatgccctgaaccacgccccaacattcatcacttcactgaatcttcccataccactaatccccattgtacagctgaagtaattgaggcttggggagctccgaggcctccatcaatcctgaccaaggctgcacatcctagtattcttcatatatcccccagcaggagcaccaagggcagggagaggaagggaagctcaggtggagttctacctgaggcagaggtggggcagcccagagcctccccagccacacctgtctcccccgccagaacaaaccagaaagaatcccaggaagaccttgaacagaatatctatgctgagcctgttacatgctcgtaacagtcctaccacatcagtattggcactggctctcggaagccaaaaaatggagacttacagagagtaagcacatgcccaaggtcacacaaaggccggagccagggtttgaacccaggcctgtctgactgcaaagccatgtaccaggctgcctcagctgcatcccacacacgctgccccaggatttgctagaatttgggccaaggcctgggctacgcccacctgcccccatcactgcatgtacttgcacacacacacacacacacacacacacacagccttctctcttttctcactctccttcacccttattctgcactcccagggtcccaatgcggcaagtgtccccctaaggatacctccctgacacctttggacagtgcccagaggaaagtcagcctatggcttgggctgaacctgcagaacacaggtggcagaggacaagcccaggaggatcagcatcaaggt

SEQ ID NO: 737 - DNA, 2300 bp, Homo sapien
ggcagatgagtgaatcataatcagtatttattacctgccttctgcactccaagccaggccctagatgctaaggggcattctagagagatctgacctagattcttgaaggagcatagaacctaactgataaacaaggtatgaaaacgaagccttgttttgttgaggtagaacacactaagggtcccaagagggtaagagccattctggctgagaggaagcaggcaggggaggcttcttggaggaggtgagatttaagctggccctcaaaggaccaaaaaggaccaatgagatacgtagactagagtaaaagggtcttatgcactggagataaggtcagagatgtgaccgggagcggtgactcacacctgtaatcccagcactttgggaggccaagtagggcggattgcctgaggtcaggagtccgagaccagcgtggccaacatggtgaaaccctgcctctactgaaaatacaaaaattagccaggcatggtggctggcgcctgtaatcccagctactcgggaggctgaggcaggagactcacttgaacctgaggcaggagaattgcaccgctgcactccaacctggtgacagagtgagactctgtctaaaaaaaaaaagtcagagatataacaacagctgccaattcttgaggctccttatgatccaggttctgtgatgaaagctttatatgcattatctcatgagatttcctcatgatcatatgaggtaagtgctattaggaggagaaaatcaaggatcaaggatcagagaatttacaaaatttgccttggtcacacaatgaataataaagtgtctgggcctgggtttgaattcggggctgttggctacaaagcctgggctcttaatcatcatgggttattgccaccttggcctcaaccatctaatgaggaattaagctgtggactgtctctggagggctttgaatgccaaggctcagacttgcataaaaatcacacagcaccaggcaagaaatcagacctgaaatctagcagcagcttctagcaactttttaccactcactacccaagtttgcttctctgagcctctctaaaccggagtgatgaggaatgtattatcagcaatgaaggtttttgaatgaggcagagaggctcttgtgacaaaaggattgtttaaaagaaacctagagatgttcaaacatttactgagtattgggtcctaataatacaactgtgaacaagacaaagctctgcagtgggactctgaccctgctgtgcccccaggcagcttgggagagtagaagaaccccttaactggaaaaacaagggctccagagctgggacctgtcccagattctgttgccagctctcaaatcagggaatctctctgtatgaccttgggcaagttacccagcctttcagactgtcagtctttatcatggggatcatcattcctcttcccaggattgttggaataaattaactaaaacaacgcttgtaaggatctagcatggtgcctggcatcctgtaggcgctgaatagatgttagttttccctacaaagaagtagactagtttgcctccgtccctcacccctctgccattaaagggaacaggttcctggccttcattttagcaggaaaggggatatgaatgcacatgtgctagctaagcaacaatgcaaactaacaaaagggcctgtggcctggggaatacactgctgggtctgggctcaggctgggaccccgcgccaaaatgtttcccttcaatcccagggaatccgggcccatttctcggggcgctgtgcactgctctggccgcctctgcactgtgaatcccggaaccaccctctgtctccgtctcgccggctgctaactagcgcggccggcggctggcggcaccaacagcaggtgtggctgcccctttaagcagcgaagctagtgttgcaatcgccgcctcgaggacgcgttctttccgggggggggggggggggtggagcctgtactgtcgcagcagccaaccggagcgcggcattttccgcgggagatccgaatttcgcggcacgacgtttggcgctaaaaaaaaaaaaaaaagaagaaaaaaaagaggcagagaaagactcaaggactagagagcgagccgcaaggaagtcggtgcagtcgagacccccctccccatcccagcgcatcgcgtctccgccgagcttgagggcacgccggggacccctccccagagccggccggaccccaggtgccgaggccttggggagcgcggggcgtcccgggtcgcggtgccctcgggacgagacagcccctggcagtg

SEQ ID NO: 738 - DNA, 2300 bp, Homo sapien
ctgccttatgtcacacagcccatgggcatttcagcctggaagcatcctgggaaataataaatgcgaaggtgctttgcaaacctaaatcactatacaagcctgaggcatcagctgcagtagtagaggaaggaaaagaagggaggagaatctgggtagactgagcaccttccacacaactggcccatgctgggtcccccaggcagtaagaagactaagatcagatggagtgaacacatcaagtgctttgcagagaagaggcattcaataattatcgaatgaatgaatgagtagacccaattagttccattttatagatgggaaaatagaagcacccaggataactcagccaaagtctacacaattagtttaaacaaaaaaagaagaagaagaagaagaatgggcatttgcacagaaatctgcctggcccgtgatttttctagaaccctctggacttgaccgttttgccacagaagtctgcaagataggaaaagaaggatcttctcttcggttattcaggagttcctacagccattattttgcctttcctgaccaaatagctggcacttgacggctgtagcatgtaaagactgacttgcccactcacaggttttcttcctcttttcttactgaagagcctgtccttgaaaaaaacattccaggaagaaatctttcttgggccacagagccctgtggtttgatggaaaagaacgaggcttcaagactggctctgctattacttgtagtgtgacattgggcatgtcttaaatgccttccttgggcccctcagcatctttcacctacatatccaaatttcacacaaccttggacttctacaattggaaaggattttaaataatcacttagtaccatcgtctattttactcacaaggcaattaaagccagagtacctgggcttgttcaagattacatgacaaattattgtcagggctagcatgatgaacccagggctctcaattcccagtcagtgtccttttcaaccgttttgcgactctctttggctctgagcccccttgtcctgttaatcagtgccacacattatcgaactcttgtttcctgtgttaatcttgtctccccaaattgtgagattcttgaaagcaggagccactgttttatgcggagggactccataaatattcaccaatgattcattaggaaagcaactattgggggaatcccacttggtcatttccaaaatggaaagcagcatcttggaagtgcaggtccccaaatgtctagggaggtgacaagaaggcaagcaaagaatcaaagaatactgagcacagtgtcctgttgcaatacaggacttagtttgccggccctctggttcctttcctggtctttcagatggagctggagctacttcagcagggctaagaataatcaagtccaggtggcctgcccttccatagcagaaagggacagacaatagagcaatgaaattaccactgttttctacacagaggtgtgtggaaagtgaagagaggggaagttaagaaatttgctgacccaattgggtgggggggggctcttaaaaaggtttatgtagaaattgtcccatctgtgcctccatatttaaaaccttgtccaaaattctaattgaactcacaaagcacaactgtgcatatatttagttcgttatggagtttatggggcagagggtccaggctccttttttccccatgcaaaaagcatgggctcaagctttcttcttttcccctgttgctcaaataaatagtgttctttgctcaaaccccctttccctcctccttctgcaatctcagcgcctagcgcaaatctgttttcttcattgtaacctcagcttcaccgcaattaattttttttccctctggtcacaagataattcctgacgccagtgagtctggaggtcagacgaacagcaaattggggaacaaggcggcactaattccttacaagtttcccttgaaaaatctttcgcttaaaaaaaacggggggtggggggagcttctttgctgttcagggatttatgacctcggaggagctgtggctcgaaccagtgttgggctaaaggcggactggcagggggcagggaagctcaaagatctggggtgctgccaggaaaaagcaaattctggaagttaatggttttgagtgatttttaaatccttgctggcggagaggcccgcctctccccggtatcagcgcttcctcattctttgaatccgcggctccgcggtcttcggcgtcagaccagccggaggaagcctgtttgcaatttaagcgggctgtgaacgcccagg

SEQ ID NO: 739 - DNA, 2300 bp, Homo sapien
gtctacctttcccactagaccataggcagcactaatgtagtatgactgctgtgcccctggctggcacactgctcatgctcagtgaagatttgctgagccagggtggtagtggtggtggtggtggtgataacaataggttgagtagtgatgttccccaaaagatatgtgttaatttttttttttttttttttttttttttttagatagagtcttgctctgttgcccaggctggagtgcagtggtgcgatctcggctcactgcaagctctgactcccgagttcacaccatactcctgcctcagcctcctgagtagctgggactacaggcgccggccaccatgcctggctaagtttttgtatttttagtagagacggggtttcaccgtgttagccaggatggtctagatctcctgaccatgtgatccacctgcctcggcttcccaaagtgttgggattacaggcgtgagccactgtgcccggccagatatgtgttaaattttaatacccagtacctgtgaatgggaccttatttggaaatagggtatctaaagatagaattaaggatcttgaaatgatatcctgtatttttggtgggacctaaatccaaggactgatgtgcttataagagaaaggagaccaggcacggtggctcacatctgtaatcacagcactttgggaggccgagatgggcggatcatgaggtcaggagtttgagaccagcctggctaacatagtgaaaccccatctctactaaaaatacaaaaattagccggacgtggtggtgcaagcctgtaatcccagctactcaggaggctgaggcaggagaattgcttgaaatcaggaggtggaggttgcagtgagccgagatggtgccactgcactccagcctgggtgacagagcgagattccatctcaaaaagaaaaaaaaaagagagagaaaggaaagtaagatttaagacacagagacacagtgagaagaagtacaattgaagatggaggccgaaattggacttatgaagcctcaaaccaaggcatgttaaggccacctgtagaagctagcagaggggcatggagcagattccccctcagagccttcagggtaaccccaccctggcgacacctgcttttggactgctggcctctagaactgtgagagaacaaatttctattgttttaagccactgagtttgtggtagtttgtaacagcaaccctacgagatgagcacagaaggtgagcaggactttcccgcctatgaaattcagggttttggggaaacagcttccactctggggcctgacagacctggggttggcacctgcctgtcctatggtcttgactttgctcccctgagcctcagtttcttcctttgtaaaggggagagccagagtaaagctgcatttgtagagtgccagacagtgtgctaagccctttatcgcatcctaagactccgcttggatgataataggccaggaacgccattaacaaagaaactgtgtttgaaattgacagcttcacattgccacataagaagcaacctccacctcgtgtttttgctttgaatctgaccatgtggtaactcaagaaaactcatgaatattggagtcagacaggacaaggttcaaagcctggctctggtgtttaccagctgggtgaaactgtgtgatctgtcttgcacttctgagcctctcatagtttgcaaaatgggaatggtactggtccctacttgatgttgatgtgatgattaaattaaacgataattttaaaagcatgctgttacgagctgtgccacagagggtagcacagttccagcacataggggaggcttctctctgaagatgctactgctgaagatgctggttcaggaggggacaatccaggaagagtaagccagtacacagaggacggcaacagctggggactgattttcccagaggaggaatgagggacagcgcaggcctcttgggcagctgcttcctggggttgtgatgtcaccggcccatccaggaggccacagtaccagcgcctgttactgcctcccagctggccggctccacttcctgcgccctgagcctgcccttgccttctttctcatgaccctcgggaggcagctgggctgcagctcagaaagcaacgctcatctgcaagttgggacagcagaggcccttcattcctccccagggctcccacaccttgggagggactgtgaagagtgactcttgtccagtggttttcaaactgggttcctctaagccctggggtattagtgccccagggacccctgaaggtaaggaggtggcgcg

SEQ ID NO: 740 - DNA, 2300 bp, Homo sapien
cctgggtacaaatcccaactctgctacttactagctttgtgaccttgggcaagctacctaacctccctcttcctcagttttttcatctgtaagtcaggaataataatcatgtaaatggtatgaggctgagctaaagctacaaagattgactggcttgacatggtactgagcattgggtaagagctcagtaaatgtcactgaggcaggagaatggcgtgaacccaggaggcggagcttgcagtgagccaagatcgcgccactgcactccagcctgggcgacagagtgagactcggtctcaaaaaaaaaaaaaaaaaaggctgttagaatcatccaggtgagagattatggagtcctgaactaggggacctggggtgcagagggacaggaagactaggaagaaggggacagattctggagcaaaactggggagataaaatggattggattggaaagctggatgaggagctgaggagcagacctcacctgggacaatatccaggtgtgttgccctgagacagagaaaccagaagaggcaggtggcaggggagagtgagatgatgagtttggagctggtcaagttgagttggatgcaggggagttgccaagcagagatgtctaggaggtgctgtgtttatgaatcagggactcaggaagggcagagctcagcttaaagaaggtaactgggagtgggtgagttgtcctgggaggatgtagaggctgcgcagtaggccgaggtgcccatgactgcggaggcaggaggaggaagggctgcgggggcctgcaagggagctgctagctagataggaggaagacgaagaaggggatccaaacttgccctgaagttgagggaggtgacagcttggaggagaaaggtgaggtccactccagagtcaggtgtcacagaagggctgagaagaggtcactggatctagccatcagggttgtccatgccctgggcaggaacattttcctggtgtgagggggactggactctggagaagctcaacggtgaaaagtctttctcagtgcacccagggtgaatcatggccccttcccagccgaggtccattctgcctgcttcttcatcctgcccctcacactccatggatggtactccgtgcctagtcctggttggtctatacactccaggagcaatcgctaggaatcacgataagtgtattctccatttgagccttgtttcagtcagtcctgagaggtctgtattattttcacccccattttacaaataagcagactgaggctctgccccacgtgcccaagactggggataggtttcatccctaacttgtgggtcgcatttgagaacaggaaacccacatcatctgaacctacaacatccagactcggtggttctcaaacttcagcctgcctacaaatcacctgagattcctatgaattctgctcttgggccccaaactgcaggaattgatcgagcaggtgtgaagccgtatttggagatgtgtgttgttaaccagcaccccaggtggttcccatgcaggtgaccgaagtccacccttgaggaagcattaacccaaccctgtgcggcacagagggtatttcaggcactggattggtctggaccccaagcaaccggtttctggcgatcagttagggctctggctgcagctgggagcggattggggcggagggaggcagagggcggtaataaagaaacaacaggaagctctgcttttattagccctgggtagtagcagctgcaggtgagtaatctgatttctgcggcgtcctgttttctccgctgcctggcggttcctcgacacccactcacctgccgccagccacgggagagagggcaggggggagggaggatgggcgtggggccccgcccgcccaggtccctcgcccacgcccacgcgggcgcacccgccgcgccgacgccgccaccggctgcgcacctgccgcgcttgctgcggggaagccaggctctgctgtggcggcggcggcggcggcggcggctggcggggaggagacgcggactcccactcgcggccctatcgcttgctccccgcctccccgccagagctgcgccaccaggctctgggcgcgctcccatgatcggaaggctgagagccgtctcccagctccacccttgacttctgaacctcagttgctgcttctgtcaaatgggagcacgtccacctaccagtgctagactggagagatcaggaaaggggtgctaaagttacaaactgtaaagggctgtagcgatcaccaaggcatcggaaggaaactggccaagaaaggcaagtctcttagc

SEQ ID NO: 741 - DNA, 2300 bp, Homo sapien
tttattttattttattgaaacaagagtcttgctctgtcacccaggctggagtgcagtggtgtgatctcggcttactgcaacctctgtctcccaggttcaagtgattctcatgcctcagcctccagagtagctgggattacaggtgcccaccaccacaacaaggaaattttttttttttttttagtagaggcagggttttgccatgttggctgggctggtctcaaactcctgacctcaagtgatccgcctgccttggcctcccaaagtgttggaattacaggcgtgagccaccatgctcagcctaatttatgtctttaaaagatcactctgactgccttgtgatcaactatctatgaactgatctaaatacttcttgaagccactagtatttttagccagtaccccctctgtgtgaagcaaaacttccctttactggtcttaaatttacttctttcgagtttcaaggggagcccccttctgcctcctatcttagggttagtggcccaatgcgagatctctagtaaaggttttcacagagtgggtgggaggagggtctcccagtttataccttacctgctctgtgatgtttcaccacctgtaaaatgaaaataatgagagtggccacctcaagaggctttgatgatgaaatgggacacagcttggcagcagggagtaatcaatataggctagcttccatgcagatgacaattatggtgatcaggaggaggatgataatgatagggatgatggtgatggtgatgatgatggtgatgatggggatgatggtgatggtgatgatggtgatgttgatggtgatggtgatgatggtgatggggatgatgatgatggtgatggtgatggtgatgatgatggggatgatgatgatggtgatgttggggatgatgatgatggtggtgatggtgatgatgatggggatgatgatgatggtgatgatgatgatggggatgatgatggtggggatgatggtgatggggatgatggtgatggggatgatgatgatggggatgatggtgatgatggggatgatgatggtggggatgatggtgatggggatgatggtgatggggatgatgatgatggggatgatggtgatggtgatgatgatgatggggatgatgatgatggggatgatgatggggatgatgaggattctgttgtgtgatattgggggagtcagtgaatgacattttccatgtctgtcaaataagggtgttggaccaaatgatctgtgaaggtccatcgaggtctgatgttctagaattttctagtttaagtgctctcttcctcctttcagcctgggttaccctcttccctgcaattttggtgctccctagtgatgtgtgatgagagatggagtattatagtagagacaaaactgatgtggagtcaggaggcccgaggttccagcggcaccatttatagtggagtcttcatcatggtgcatttaacttacacacattttttttttctctttgagacagggtcttgctctgtcacccaggctggggtgcaatggcgtgatctcggctcactgcaacctccacctcctgggctcaagtgattctcatgcctcagcctcccaagtagctgcggttatagatgtgcaccaccacgcccggctaatttttgtatttttcacagagacggtgtttcaccaggttgcccaggctggtctcgaactcccggcctcaagtgatctgcccaccttggcctcccaaagtgctgggattacgggcgtgagccactgcacccagcctaatttacacacatttaaacacgcgtgtaaagggaggggagagagagagagagcacgttgtgcatgaatcactgctacagagtcacactccaattccacttggtgagcactcaccccttgagagggaatgtgacctgccaggttccccccgccggtccaagttcctgcacttccagcctcatgtgggctctcatcatgctgagtgtgatcctgctgttcaaatggtttttatgtggtgtggccccagatacaagccaaccatttcacctgtggtgagcggaaggcgcagctatctataacacctgagaaaaaaagaacctgctgtactagctgtcagctgctggagaccttgctttctgtttcactgggaaacagaagcaatcagaaggaaacttcctcagactccacctctcccttcactcccgcctgtatccgtgcctgttacctggacgccttgtggaacttgaattctacgccctccactgggacactgcccttcatcctctctcacctcctccaggac

SEQ ID NO: 742 - DNA, 2300 bp, Homo sapien
accctgccaaatccccctctgcgagaaacatccaagaatgatcaataaaaattaaaaaaaaaaatacattgtacagtaatcttttaatcaaaacactgcatcataggtggagactgaaagcctgccacttgtggtcgctgttttttgtttgttcgtttgtttgttttgagacagggtcttgctctatcacccaggctggagtgcagtggtgtgatcttggctcactgcaagcttcttctcctcggttcaagcgattctcctgcctcagccttccgagtagctcggattacaggcatgcaccaccaggcccggttaatttttgtatttttagtagagacggggtttcaccccgttggccaggctggtctcgaactcctgaccttaagtgatccacccgccttagcctcccaaagcgctgggattacaagtgtgagccacagcacctggcctggttggcggggccggggtcgggtgtggtggtggggggagggggggtgggtcgctgttgtttcacagctgatccaggttttctggtgatgctcctctgctgcttagttgccctgaacacattactttttcactgtattaatgacatagcatatattttgctgttaagaacttattttttatttttgagacggagtctcgctctgtcacccaggctggagtgcagtggcgcgacctcggctcactgaaagctccgcctcccaggttcacgccattctcctgcctcagcctccagagtagctgggactacaggcgcccgccaccacgcccggctaatttttttttttttttttttttgtatttttagtagagacggagtttcaccgtgttagccaggatggtctcgatttcctgacctcgcgatccgcccgtctcggtctcccaaagtgctgggattacaggcgtgagccaccgcgcccggccgctgttaagtacttatatgtgaataagcgtaagaaagtattgcttatcaatagcatatacatttacagtctggaaaaatggttaggccaaccaaccagagattgtccacaagggtggctgagatagtgacacctttgctttctgatggttcaatgtacacaaactttgtttcatgcacaaacttacttaaaatattgtataaaattaccttcagactatgtgtataaggtgtatatggaacataaattaatttcatattcagacttgggttccatccccaagatatctcattatgtttatgcgaatattccataatccggaaaaatcccaaatctaaaaaccgtctggtcccaggcttttcaggttaggaatacgcaccctgtagtaacttgcccaaggtcacatagctactagctggtcgagacaggaccacatctgcctgtcttcaagctcgggactcttaaaccaccactcctttccgtttgtataaattctatttgtgcccggagtggtggctcacgcctgtaatcccagcactttgggaggccaaggcgggtggatcatttgaggtcaggagttccataccagcccgaccaacatggtgaaaccccatctctactaaaaatacaaacaaattagaccggtatggtggtgcgtgcctgtaatcccagctacttgggaggctgaggcaggagaatcgcttgaacccgggaggcggaggttgcagtgagccgatatcgcgccactgcacttcaacctgggtgacacagcgaggctccgtctcaaaaaataaataaataaataaattatatttgtttacgttgttacagaataaatttgcgtcataatttgcatgattgatttaatgtagttttggcgttctcatcacacaaggaccaccagctcgtgacactgggaggagagaacgtcctcaaggtccggaaactcaaggacgtgctgattcgggagctttcaaaaactatttttggaaaacccagatcccggtcttcagccagcgtcgcctgcagtggctagcactacccacaagggagaagccgacgctgcagggctttgccaaatgcgcctctcttcctcgtcttcatctctgtggttagcctgggaaaagagcccgcctcctggcccataaggccctcggccggaagctccgctttctcttcctgctctccatcatggcggtgagtagctgggacctggatttgctttcctttatccgtcgccatccatggcaggccgagcctgcgggggctacttcgcccgcagcccgaggaatatggagcccgcaatgcctgctggcccaaaactagcagagccgttcgagccaaggacgcagggttgaattctgtcacttt

SEQ ID NO: 743 - DNA, 2300 bp, Homo sapien
aggggtggctgtctgggagcagcacacccactccaggatcccccagaagcattcgttgtttctttctgtttttttttggttttgttttttctgttgcccaggctggagcagtggtgcgatcatggctcactgcagtcttgatctcctgggctcaaatggttctcctaactcagtctcccaagtagctgggaccacaggcacgcaccaccatgcctggctaattttaaaatttttgtattttttgtagaggctgggtcttactacgttacccaggctggtctcaaactcctgggctcaagcagtcctcccgtcttgacccccaaagtgctgggattacaggcatgagccactgtgcccaacctcattgtttcttttcattttggttattgagctctctctggataacatctgcagaatgtttcatgtgtcccgagtatgtgccaggccaattactcagcaattctgcttcaagaatcagtctgtattccattacaccagtggtacattttcaaaatggaaggaatataaaatgtaaaagtatttgctacgcagaggagggagacactactgctgggactagaatcgaagttttctcacacccagttcaatgccttttctacaacatccctcagttgagccttagggtaccaagtggatggtcattagtcttgtatggactttatatccaatgctgattataaggtctagatgatgctaggtggcagagattcaaagttggacaggtcggttactgtacttgataaataaacagcccagtggcaagacagataaataaactgaccatttacaccctgaaaaggtggtcagttgcttagggaactgggggaggggcgccaaatggaggagtagggacatggtagagagggcttttcagcatagtgagtgaatgaatgctcatttgaagaaacaacttgtgtttaagatgtttttctttcttccagagctagaatctggaagaatctctgggctttcctgctttgagggagagatcaggctaggtgcattgccaatttgctgctgaagatctgattaggttctgctttgatgtgatcaaatgagatgtaatcagtgctggtactttaagtgagtttgcaactatttagttgctctttttagtagtagtattagtaatggtaaaacttagtgcttttaggatgagagtagacggcctgaagaataatatcttgggctcttctaatcaagccatacggctcattggcaagtcatcagaggaaacatctatctatctatacattcatgcaataagtatttatttagtgcctatgtgccagacactgtttgtggggaaaacaagacacatgggctattattgcctcatggaaggaactaagctgtttggattttgaaaaatccctttctctgggcctcaattcctcgacctgttcagaaatgtgcgctcacaatggtcctagacatcttagattcaggttccattttcagttctttcctgtcctgcggccatctgcaagttaatttggtctccctgaacctcagtttcctcatctgtaaaatgaagatcatacaactcgtttcatcaggttgtactgaggctggaaaagatagtctaactactgacgcatcgtgtgctcagcctagggtggctgctaccgcgggtgcctgcggactcctaggacgggcaccagcccgggacccctgacaaggtgttgattagggtgtggctaagccccaggcgggagaaagcgttggcatttataaggccagggtctggcgcggtggcctcattccgtcttgaagtagaccctggagaggtcttccaggcttgggctcagcacgcgagcacagggagcgggggtgccggcggcggaggcgcgtacggcccgagcagcccccagcccccagcgcgcacacttgggccaggggcgcgaggagtgcgcggccgccgggtgggcgctggggagcgggccctgggggcggagcctgcagcccaccgccccccacacaccccagccgaggcccggaaggggccaggcgcgcttccgtctccgccggggatgcacggagggcggagctgcggcccgaggacgcgacgcgagcccagttccggcgaggaggccgcgccagtgacagcgatggcggcggagtcggcgctccaagttgtggagaagctgcaggcgcgcctggccgcgaacccggaccctaagaaggtaagcgagggggcggcgcgtagcgggatgggcgttgggtcggtgagggccccgtaacggtcgcggcccgagcgtggcggggttcgggggctg

SEQ ID NO: 744 - DNA, 2300 bp, Homo sapien
tttctcaaagtagaaagccttatttctttagaaaaacgttagcctagttccagacccctctaacaattactttgtcaaattttaggagactggggttgggaaaacagtaaatagcttgcgaaaacacgagcatgttggaagctttgccagggacctagtggcccagtggaagaagctggttcctgtggaacggtaagaacatttctctttaggtttgttcaatttcatggttaaatttacagatagaaaaggttttctttattatttctcttttgccttctgaaattgttttgcctcaattataaaaaataatccatgatcattgtagaatattagaaaatattaaaaatagaaatcaaaatttcctatttctatcacgcaaagacaaacgttatgaacattttggtacgtttctttttttttttttttttttttttgagacagagtctcgctctgttgcccaggctggagtgcagtggcgtgatctcggctcactgcaagctccgcctcccaggttcacgccattctcctgcctcagcctcctgagtagctgggaccacaggcacccgccaccacgcccggctaattttttgtatttttagtagagacagggtttcgccgtattagccaggataggatggttttgatctcctgacctcgtgatctgcccgcctcggcctcccaaagtgctgggattacaggcgtgagccaccgcggctggcctggtatgtttctttctaactgctccttaaatggcatttttttaagttgtgaactagataaatagtgagcagcccccattttatataacaaattaaacatgtccccatgttttaataaatctccacattttcatgtatatgagatatttgatctttgcatcttgtggttaaactcaccatttctcatttgggttttcccagttttaagatttgagtatctttaagcataacctacttatcttcttcttaagaccttgttgtttctaactctgcatcttcacttctttggtgagttcagattctgtgactttgtccctcaagaagcaagatttagacctactttgtctgctttttcttttattttagaaatgctgagcctgatgaacaggactttgagaagagcaattcccgaaagcgccctcgggatgccctgcagaaggaggaggagatggagggggactaccaagaaacctggaaagccacggggagccgatcctatagccctgaccacaggcagaagaaacataggaaactctcggagctcgagagacctcacaaagtgtctcacggtcatgagaggagagatgagagaaagaggtgtcacagaatgtcaccaacttactcttcagaccctgagtcttctgattatggccatgttcaatcccctccatcttgtaccagtcctcatcagatgtacgtcgaccactacagatccctggaggaggaccaggagcccattgtttcacaccagaagcctgggaaaggccacagcaatgcctttcaggacagactcggggccagccaagaacgacacctgggtgaaccccatgggaaaggggttgtgagtcaaaacaaggagcacaaatcttcccacaaggacaaacgccccgtggatgccaagagtgatgagaaggcctctgtggtgagcagagagaaatcacacaaggccctctccaaagaggagaaccgaaggccaccctcaggggacaatgcaagggagaaaccgccctctagtggcgtaaagaaagagaaggacagagagggcagcagcctgaagaagaagtgtttgcctccctcagaggccgcttcagacaaccacctgaaaaagccaaagcacagagacccagagaaagccaaattggacaaaagcaagcaaggtctggacagctttgacacaggaaaaggagcaggagacctgttgcccaaggtaaaagagaagggttctaacaacctaaagactccagaagggaaagtcaaaactaatttggatagaaagtcactgggctccctccctaaagttgaggagacagatatggaggatgaattcgagcagccaaccatgtcttttgaatcctacctcagctatgaccagccccggaagaaaaagaaaaagattgtgaaaacttcagccacggcacttggagataaaggacttaaaaaaaatgactctaaaagcactggtaaaaacttggactcagttcagaaattacccaaggtgaacaaaaccaagtcagagaagccggctggagctgatttagccaagctgagaaaggtaaccccttcagccccttggtggct

SEQ ID NO: 745 - DNA, 2300 bp, Homo sapien
tgagtagatctccggggtaaggcctgagttggttcttcaaaaggacactcttaccaaagaaaggctaccaagtatatcagtcaagtaaacatttactgtttgccacattccaggtcccttacctgaaactgtgacctaaaagcaggaataattcacggcactgagctattttgaaacagaaccaagcttgcttattgcacaagtaactaaaataggacatcaaaatatttttcttgtttttatttttttgagacagtcttgctctgacacccaggttggagtgcagtggtatgattacagctcactacagcctcaccctcccaggctcaggagatccttccacttcagcctcccaaatagctgggaccacaggcatgagccaccatgctgggctaatatttttaattatttttgtaaagatggggtctccctatgttgcccaggctagtctcaaactcctgggctcaagtgatcctcccaccttggcctcccaaaagtgctgagattacaggcatgaggcactgcatgtggcccagaaaatatttctgaatggaacttgaaaaaatggatattttggtctatacttcaccagccccactgagcactccagagccagatgtgaagggaagagggtagccagggtatcccataactctctttctgtatcctgtcttttccccaccagggagtaggaaaacattctatcctgaaaacaagattatttcacctctaaacagtgacttttaattattttgatctcaacccacaatatgaaaaacacatcatattgtgtctgaatacaaactcaaaactgaaacaaaagtttcatcaattgagacttgaaatgtgtgatacattctgggtttttttttttttgtattctattttttttttaaatgttgatcacaattctctataaacggattttaaaacctattgacaggccacaaccagctgttcgaaaaaaagtactttgaaatatcacatgggggaggaaacgcagagatcatctagtccaatcccttcacttcacagggggtaaactgagtctcagaagatcaagtcacttgcccaaggccacgcagctagtaagttgctgtggttggatttgaccgtaataaccatcggctactgaatgcccatcatgtgtcagccatttgctgagttttttctttttttttctttttgagacagagtcttgctctgtcgccaggctggagtgcagtggcgcgatgtcggctcactgcaacctctgcctcccgggttcaagcgattctcctgcttcagcctcccgagtagctgggactacaggctcgcgccaccacgcctagctaatttttgtatttttagtagagacggggtttcatcatgttggctaggatggtctcgatcttttgacctcgtgatccgcccgcctcggcctcccaaagtgctgggattacaggcgtgagccaccgcgcccggcctgctgagttctttaattgcattatttcatttaatactcactgtgatcctatgaaacagatactattctttccaccttacagacggggaaacggagtctcagaataggggaaatgacttaaggtgtcacaatggccagtagcagacccaggagtagtctttaggtctggccgtgcacaaagccccatgctctcaagctgtaaccccgctatcaagaaagtggttatgcaagtgggcctgtgagctctcaacgtctaagccgtgcgcatgtgagacagcgataagctcgcgttctccagtctccagggccttatcattcctcacgctttccttcatcggctcgcaaagaaacgtggcgatcaaggaagacagcgaaggctccatcctcgtcgggggaggataattcgaatctcagcctgtgagtttactcagcacacctgtttaatctcttggtccttcagtttccacacctaggaagctggaacagcagcagcatccagcgccaggactggagtcatatacgaactctggcacctgggaggcgcgcgtcctacgtcagttccgctcgaccccaccccccccgcccccccgccttctccccacgcgcatgcgccgcgcagcggcgctttttacgacgcggcaggcgcggcgcgcttagttgccggagctgaacggcgcggagctggtctgaggcgagccgagccgagcgagcgcggcggtggggccgagaggacgcgcaggtggcggcgttgccatgtcgcacggtcacagccacggcgggggtggctgccgctgcgccgccgaacgggaggagccgcccgagcagcgcggcctgg

SEQ ID NO: 746 - DNA, 2300 bp, Homo sapien
gctaactaaatgccacgcaaagtcaggtggagcaattccatgtcaacaaaacacataagatcattactgtatgaaatagcaaggaaaaatgttgaagctaacccctagaatccataaagatcatatgagatctgcagctagttattaagaaaactgcagagtcatcaacaagtgacatttacacaatgctctctgaatgaatcatgtcatagtaagcactttgaaatatgagacacgctgttgggcctaaagatgcttaatctaaaaaagtcattaattcaggaagaaatatatgtattccaatgcagaatgagaacaggaccaagatattttaaaaggggaaatattaaacccggtaagaagaaaatgatactattctggaataaaatgttaccagaaaaagagaattaggagctcctttgagggcctaagcctttgccacttacagtctcatctcagaggggtgtgagtcatcatcctctcccattataatgatgcctttgagcttgacattgcccgtaaatctgccagaatgcaaaagagaaggttgtcaaacctgagtttgaatacctgtttagttgtgtgaccctgggcaagacccttcccctgtatgggcttcagtttactcatctgtcaacttgtactagataatttctaagatcctgtctacctctagcattctacaattctaagaaatctacctcaatttctcagttattgttctacaaatacatctgtttccagtctgcaccaagaaagctatgatgctttcctcctcaaacccaccaaagtaatttatcccatttctagaagcaaatgtgtgctcttgacaccagtgaatgaatccatctgaggcaactgggtacagcctatttagcctgaggtaggcaccaaggagatacttacggaatattaaacagaagctcttcatctgcatcactttcaacaaactggaggggatggggaggggggaggagaaagcaacaaatatttgctgagagcctacaatttcaggcatctcccaccctgctctacaactggggtgcaatgggaagagtcactctcccttggttttccaagacttattaacttgaagctaaccagtcttatccagtgtcataacagccacaggccacccaactggaaggttcttaacaaaaagcccatgaatgaatttccagggtcgaagagccttctgaagtgtgaactgaaaggcaggtgtttatgtgcatttttctgagaagaaggtccactgctttcaaacagatagcaaaggggcctgcgaccccacaatgtaaagaacatttgctctatatgggaaccacctttcatctccctaggctcatcttcaccaggtaatatgatgaggcagccattagcaccaatggtccaacggccctcacgaccatcctctctagcccacacagccctggaatagagcgttaggctgtgtagcttgacaaaactgtccccgttccctctaggcctcagtttccctatatgcaaaatggggagacaacgctgctcgcctcccaaagagctggcaggagacaggcacggaaaagcgcttggcaaccaggctgtcgttattcttaacatcagaaatgagtagaccgacggcccgaggccccacacgcaccctgccccgcccgccccaagccccaggcggcccaccttggagcggtcggtccgctcctcccacggcttgaagacgccgcggccgctgccctcgcggctctcgttaaggcattgcagccgctccaggtcgatgcgcaggtacaggccgtaggccaggccgcgctgctcgggcggctcctcccgttcggcggcgcagcggcagccacccccgccgtggctgtgaccgtgcgacatggcaacgccgccacctgcgcgtcctctcggccccaccgccgcgctcgctcggctcggctcgcctcagaccagctccgcgccgttcagctccggcaactaagcgcgccgcgcctgccgcgtcgtaaaaagcgccgctgcgcggcgcatgcgcgtggggagaaggcgggggggcggggggggtggggtcgagcggaactgacgtaggacgcgcgcctcccaggtgccagagttcgtatatgactccagtcctggcgctggatgctgctgctgttccagcttcctaggtgtggaaactgaaggaccaagagattaaacaggtgtgctgagtaaactcacaggctgagattcgaattatcctcccccgacgaggatggagccttcgctgtcttccttgatcgccacgtttctttgcgagccgatgaaggaaa

SEQ ID NO: 747 - DNA, 2300 bp, Homo sapien
ggaaagtaattgagcagctcatgtggtctccaggtagaccaaagactttggacttaaattttgaaagtcagtttagcaattgaagagaatgtaagtatctaaaaaggggatttgatatggtcagtattctctcccttgcagaaaacaggaacaggtaataaagggaattagtgttgaatctgatccttttgggagaattcctctgaggcattggcccatgctgttgtttggaggatatagccactgtttctccagcctgtcctaggaaaggtctgctaccaccaaaccttgttggccctcaaaatttctaaaatgcagcctgaaataaaccagaatgcaaatgctgttcttgaaaagcatgaagggtcctattcactcagccacagcctctttatttcagttggatcattttttggagttaaaagaagggctatgtttaaatttggagtagggggaaaaataaagttaaaaatcttagagcagactagcccttcactaattccactaattaaagcattaatcacagctcctgggactgagcctctgaatttgaagcttcactctgaagaatttgttttaagtgtcatggtgtctcaggtgatcgaggttgcaggaggaactgttcattcttccataagtggggacattaccctccattttcttttgacattcagtcctgggtccttggcttgtggtggtcccataggctcaaaggtttcctgccccgaatcctggtattgtaggctccctgacctgttgagtacttaggaccaaagtgcctctgggcctgggggaaagtgctttgttgagcttccaactttgtactgttttctttttcttttctttcttttttttttttttttttttttgagacagagtctcgctttgttgcccaggctggagtgtagtggcactatcttggctcactgcaagctccgcctcccgggttcacgccattctcctgcctcagcctccccccgagtagctaggactacaggcgcccgccacagcgccaggctaattttttgtatttttagtagagacagggtttcaccgtgttagccaggatggtctcgatctcctgacctcgtgatccgcccgcctcagcctcccaaagtgctgggattacaggagtgagccaccgcgcctggctgtactgttttctttctgttcaaagaaaacactagtataggttaggctgggagagtgagtcctaagcggctgagggtcaagtgtgactcatttcctatttgcagatccccacacattctcagggacatgctccttcaactcagtttgcctgccttctgacttttctgtggtccctgatacctatttccacttcagcttgatggcagcgttttgtgcactgtctgcatgacattgcttgtgaagggcagcgctaacactgccagtgcctgtccagctctcctgatacggcctttgtatttttcctaggtccttttttgcgtgattaacacctcacgctgtgattttactgtataaaccatgttcacacaacctcatttaagcctaccaacaaagctgtgaaggaggcagggtggttattaccattttatatatcaggaagcagatccagagaggcagaatttaaatggaatcccgaggttgctgtttacatgccttccttgagcctcagtttccccatcttcaaggctggagaactagatgatctgtaaggtctcttcggttcagagtgtgtcattccattcatgatcctggaatagggcatgaaagccagtggcagacacccgaggccttaagaggtgtgtcccatgaggatgggaaggtggtaaagtttatgcaaacaatagtgtgagggatgcctctccttccggtcggccctcctccaggaggcgcatgggtggtggtagcaagtgggagtcttgggtgccctgtctcgaatctacaaggtgggagcgggtgagaacccagcgactgcgcggctgaatgacagggagtagccccgccgcctccaacatggcagcttctatccagcgaagccgggtccccgcttccgggttccgtactgtcggccaggctacttccggcagcgcgatggctgggttcccgggactcgaacggaagttccggcgggggcggccgagggggaagagtgtgtctgcgggagaaagaggagaatcgcccaagcggcctcggaagtcccagggagtggaggtacccagccggcggctgcggaggatgggcgtgtagggggaggtcggcctcgggagggtcccggagagcggggagggggaaccgtgatgggggggatgggg

SEQ ID NO: 748 - DNA, 2300 bp, Homo sapien
ttctttcttttttttttttttttttttttgagacagagtctcgctttgttgcccaggctggagtgtagtggcactatcttggctcactgcaagctccgcctcccgggttcacgccattctcctgcctcagcctccccccgagtagctaggactacaggcgcccgccacagcgccaggctaattttttgtatttttagtagagacagggtttcaccgtgttagccaggatggtctcgatctcctgacctcgtgatccgcccgcctcagcctcccaaagtgctgggattacaggagtgagccaccgcgcctggctgtactgttttctttctgttcaaagaaaacactagtataggttaggctgggagagtgagtcctaagcggctgagggtcaagtgtgactcatttcctatttgcagatccccacacattctcagggacatgctccttcaactcagtttgcctgccttctgacttttctgtggtccctgatacctatttccacttcagcttgatggcagcgttttgtgcactgtctgcatgacattgcttgtgaagggcagcgctaacactgccagtgcctgtccagctctcctgatacggcctttgtatttttcctaggtccttttttgcgtgattaacacctcacgctgtgattttactgtataaaccatgttcacacaacctcatttaagcctaccaacaaagctgtgaaggaggcagggtggttattaccattttatatatcaggaagcagatccagagaggcagaatttaaatggaatcccgaggttgctgtttacatgccttccttgagcctcagtttccccatcttcaaggctggagaactagatgatctgtaaggtctcttcggttcagagtgtgtcattccattcatgatcctggaatagggcatgaaagccagtggcagacacccgaggccttaagaggtgtgtcccatgaggatgggaaggtggtaaagtttatgcaaacaatagtgtgagggatgcctctccttccggtcggccctcctccaggaggcgcatgggtggtggtagcaagtgggagtcttgggtgccctgtctcgaatctacaaggtgggagcgggtgagaacccagcgactgcgcggctgaatgacagggagtagccccgccgcctccaacatggcagcttctatccagcgaagccgggtccccgcttccgggttccgtactgtcggccaggctacttccggcagcgcgatggctgggttcccgggactcgaacggaagttccggcgggggcggccgagggggaagagtgtgtctgcgggagaaagaggagaatcgcccaagcggcctcggaagtcccagggagtggaggtacccagccggcggctgcggaggatgggcgtgtagggggaggtcggcctcgggagggtcccggagagcggggagggggaaccgtgatgggggggatgggggtggggagtgaggtgcgaaggcgctgtccagtcttggggacttcgggagtggagcggggctaggcaagggggtgtctgagtataaagagacagacttcagggtcggaaatagaagagcccattgtggggcgggggcttccccagagtcaaaggtacaaagctttattgtgggcaggtgggagtcctgggtcagggtagaaaatttcactgggtagggtgacctttggtcagaacagaagttcccattgtggggagcgggagatcctgggtcagggtggaagttctcaaggtgtatagagagagacaggtcagggggaaggcacccctccgaggagggagcctgggcgggaggtgcaagtccccacggtggagaaggaagggaatcgcagctcagggcaggaggtgcattccccatgggaagaggaaccccgggtcacaggtgaacgatcccattgtggggagctgccctcaggggtcagagatggaaggtgaggccagttgggaggggtgggcaggcacttgaggcaggtagtggaagcttccggcgagtttggaggacgccgaggatggggaggggccagccagcctgacattcttttgtgtgtttgggagtcccagagcgtggtcaagccagggctcgtttgcagtcagtggcagcagcagcaggtagctccgtttagggggggcgtggagcaccagtttgggggtgggtggagttcttacgctttctggggacatgggcagccccctgggggtctgggaatggatgggccagaaactgctgtgaaggctggatgggggctgggtggggggaggttgagatgggggttggaggcggca

SEQ ID NO: 749 - DNA, 2300 bp, Homo sapien
ggaagttctcaaggtgtatagagagagacaggtcagggggaaggcacccctccgaggagggagcctgggcgggaggtgcaagtccccacggtggagaaggaagggaatcgcagctcagggcaggaggtgcattccccatgggaagaggaaccccgggtcacaggtgaacgatcccattgtggggagctgccctcaggggtcagagatggaaggtgaggccagttgggaggggtgggcaggcacttgaggcaggtagtggaagcttccggcgagtttggaggacgccgaggatggggaggggccagccagcctgacattcttttgtgtgtttgggagtcccagagcgtggtcaagccagggctcgtttgcagtcagtggcagcagcagcaggtagctccgtttagggggggcgtggagcaccagtttgggggtgggtggagttcttacgctttctggggacatgggcagccccctgggggtctgggaatggatgggccagaaactgctgtgaaggctggatgggggctgggtggggggaggttgagatgggggttggaggcggcactgagtaggggatggaagctcctttccctggcacttttctctccatttcccatagggcccggagttggggaggcagggacccagggatgattggagaggagggggaaggcactcacccctgaggagttagagggggaatgaagcaggcgtgccgctgcctcccctctgccccctgccctacagtccctatgccctgcctctgcctgtctccagcaagctcaggtcctgtggttgggccagaaccagagacacatgttctgggccactagggaggctgtctctgcctttcagccctggaactgaggcagacttcttctcctgtgccctgggacttcttgcttgactattctttgtgcccaggacagaacctgggtgctgtgtggggctgatggcctggtggcctcttgggccaggagtgtgtcctgtgcctggttttgctcttgaccgccgccccgatgtatgcaggcccccgccgtggagccgtgtggtgtatgtgtggtaacaccatgtctgtgcccctgctcaccgatgctgccaccgtgtctggagctgagcgggaaacggccgcggtaagggtcccctttcacccacggccagacactgtgggagcagctggaggaccggctggagggggtgtgggaaaatggaggtggcagtgatgagcagggagtatcctgaggccagcaggctcggggtagtaacctgtttggctgctacctgggttcccccaggtccttgggggtgggggaggggtgggcagaagttggaggacctaggggaagccttcctgtctccccatttcccatccttttccaggttatttttttacatggacttggagacacagggtaagtgactgaggaggggtgctccttaaggaggggtcctggcccagcagcggactggagaggccttctcttcctaccacatcggagccttttctcccgtccctcctacaggcacagctgggctgacgccctctccaccatccggctccctcacgtcaagtacatctgtccccatgcgtgagtgtcaccccagcaagggaggggctgaggctggggatcatctgggggtggtcctgtcatcccaggcctgttctctcctgtcagttgcatcctggggcttgggctcagggcagtcagaagtggcattttcagcctgagctcctgtggagcccccaggagtggggtccagcaccagcccccagccctagggcctcctagacctgagctctcctagaacccacacctccctttgccccttccccaagtactcaccgactacctgggaccccgtcacaccaagcgctgggctctgcttctccattactggcgctttgccccaaccacagcctccagccccacgtggcaggttgcctggcaacaccttaaacacaggccctgcctgctgggaggggccaccaggggcggcgcggccccactccgggctctgagctctggcctcctcattcctcctgagcatgatgggccctctggctctctttccccaggcctaggatccctgtgaccctcaacatgaagatggtgatgccctcctggtgagtttgggagtgggggtgggcagggggacgaggacacttgggctgagggagccacagggggctggctggggttttctatagctgccagtgcctctactcccaaggtttgacctgatggggctgagtccagatgccccagaggacgaggctggcatcaagaaggcagcagaga

SEQ ID NO: 750 - DNA, 2300 bp, Homo sapien
caattgtcacttgaatatcagttttttacctctgtgggccaggccctgtgctgggccctgaagagggagtactgaacaagactgataagatctgtgccctggtagtggcactacaaaccatgacagagattgggcatcttacatgagggggagtcagaggaataacccaggtgccagacagacaggagctcacaggcagctggtgccccgctgtcaaggaaaaagcctgtttatcttcacctttacttttcagtatcacagttgtctgtccatgctgatgttttccctggtgttgagggcataccatgacttaccgcatcctctaacttgtttctcaaagggtgtgaatctccagaagcttctggaagctggaaactttatctgtcaagccctgaacagaaaaactagctccaaagtggctcaggctacctgtaaactctgagccccttgcccacctgaagccctggggatgatgtggaaataggggcacacacagatgattcatggatggggacatggaaatgagaataggttaaatggtgcaggtacctcatagccagctctacacagaggtctctcctggcagaaagcaggcgaagggcaggaggagctgcttggcagaaggacctcctgcccagacctgaggagtgagaggctttgagggctgaagtctccctttgttacggaccctggcccaggagttgaatgcctgaggacgtgtgggaaccccgttccctacttagcatgatccttgagtctcctctctggatggaatccgcgagctggccacctggccaccctctacacggctccaccctgccatggccgtggggcccttgctctctgacttctcaggacacaggtcatggaggttcttcccaagctggcagaggccatttgtggaaagtggagagctacgtggtggccgtctgccaactccagcatctctggaaaatctccacgctgaatgtgatttttgaaaacagcttatgtaattaaaggttgaatggcacatcataattccagcattcggttgtgcagctgtgtgtatacatgcgcgtgggggagtaaaatactttaccatgttgcactctgagaggaaaatggagactatgaactagtttattaatctttggatttcctccctgtttccccacctgagccccaaatccatagtgactggaaatcagtggttttgggcttactcaggaggctgcttgcggcagttgctggccagaacacccgacggggttgtttctgagctttgcctctgtgactggggctattgcacaagctcccctgaggacacacttgctgctttgggcctcggtggcccggcctctccctggcgctcccgggcccgggagcgctcacctgtcggttccctggactctgcgggcaggcgctggctgattcccggctgcgcggacacctgtgcgctcctgcatttagggctcctttgctctggtttcatcacgcaggatgtcacattttgtgcatattattctctagctctactacttttcattgtaaacaaacaatcattttctaacctgccgtcgtggaaggcagagtgcagaccgacccttcccggcaggtgggggctgagagccaagagcgctggaaccgctagtgtggcctgacagcttcctccagctccttggtttatttgcaaactggacttccagcaccaggccccctgcgaccccctcctgccttagtcccgtgggatcgggtagttcaagattttgaattcatggtttggcacacaccggcaagtctgaaaacctgcgggtcagagtggggcggaggcgtgggccccctaccctctgccccctgccccctcggaagcgcagccctcttccaggggttgggacgagctagcgcggggacccggggcaccggcaaggacccacccgctactgggacctggcgccggcggcgcctctcgcggggtggcaccgcccacttccgccttccgcgggcgcgcgctgcgcagtcttcgtcacagcgcggaggccttttgtcctcccgccctccccgtagtggccgtaacccgagtgacatgtttccttgggggcgtggaggggcggggtcggggccggagtgggccgtcagcacttaaagggcccgcggctcgggcgtaggaggcggtgcctctgcagcaagcgtggggcgcgggaacccgagcaggttcgggagacggaatgaagggccgggtgggctcgcgaggggccggggagtccgcggggagcgagggagtttccgaggggcgggtcgtgttcctggcagcgtccctc

SEQ ID NO: 751 - DNA, 2300 bp, Homo sapien
tcaggctgaagtgcagtggcgtgatctcggctcactgcaacctccgcctcccaggttcaagtgattctcctgtctcagcctcctgagtagctgggattacaggcacgcaccaccatgcccagctaatttttgtatttttagtagagacggggtttcaccatgttggtcaggctggtctcgaactcctgacctcaagtgatccgcccacctcggcctcccaaagtgttgggattacaggcatgagccaccacacctggctatttttcttatttattgaatagacttggggtctcactttattggccagagtggtcttcaagttctgacctcaagtgatcctcccacctcgacctcccaaagtgctggaattactggtgtaagccactgcacccagccttttctcttttattattatttttatttttttagatcactcttttattattttatagagcaatattttatatttggggcctggcacagtggctcacgcctgtaatcccagcactttgggaggccgaggagggtggattgcttcagcccaggccaacatggtgaaatcctccatctctactaaaaatacaaacattatctgggcacggtgatgggcacttgtaatcccagctactccggaggctgaggcaggagaatcgcttgaaccccggggtcagaggttgcagtgagccgagatcacgccaccgcactccagcctgggcaacacagtgagacttcgtcttaataaataaatatagatggatagatagatagatagatagatagatagatagatagatgatagatagataaaattctagttctttgttttaaataaagtttgtacccactaaattgatactgtgaccaattagtggggtacaacatacagtttgaaaacagtgctctggccgggggcggtggctctcgcctgtaatcccagcattttgggaggccaaggcgggcggatcacctgaggtcaggaatttgagaccagcctggccaacacggtgaaacctcgtttctactaaaaacactaaaattagccaggcgtggtggtgcacacctgtaatcccagctactcgggagactgaggcacgagactctcttgaactcgggaggcggaggttgcagtgagccgaaatcgcgccactgcactccaacctgggtgacagagtgagactccatctcaaacaaacaaaacaaaccaacaaaacaaaagagagaaaaacagtgttctcagcattttctttgcctcagggccattgcgaatgctacaccgtctggaaagtttttcttgtatcctcttcacctggatagatttttttttttttcagcccttcagaaagtacacctagataaatcttaatcatttttttaaggtatgaaatctaaggatgccccctctctggagctgcctgcctgtgtttgaatcctgaagatcgtgatgcgtgagttaatccgtgctaagaactcggaacagtgagtagcaaatcgttgcttcttatagtgcaagttagaaatgacacaactgtttgtgtaactattaatatgtgtctcctcacacctcccacactctaaacacaagaagccacagaatttggttaatttcttttcatgtttttgtttgtttggttttgggttttttgttttggacaggctctcactgtgtcgcccaggctggagtgcagtggcacgatctccgctcgctgcaacctcgcctcccgggttcaaacaattctcctgcctcagcttcccaagtagctgggattacaggcgcccaccaccacgcccggctttttttttttttttttttttttttttttttttttggattttttggagagacgggggtttcgccatgttagccaggctggtctcgaattcctgacctcaggtgatctacccgcctcggtctcccaaagtgctaggattacatggtgtccaggctgattctgttcatctttatattcctagcgtctcacttggcctggcatggaagaggcgctcggaatcaaaacggagagaggctgggggtggagccagcttcggaagtcacggcggaggggcgggggcggggccgcgcccaccagacgagccatcggtcacgcggggcccagctggactgccgcgggggattctgggccaagatggcagcaatgaggaaggcgcttccgcggcgactggtgggcttggcgtccctccgggctgtaagtgccccgagccgccgaggcggcggccctgcaggcactctgactgtcagggttgggggcttggcccgtggtgactgctctcttagaggcgag

SEQ ID NO: 752 - DNA, 2300 bp, Homo sapien
ggcctgcagcagcagatcatctatatcaatttttgaggaaaaaattcactttgtgtcccaactgaagagaactggcgattaacagcccaaacaacagccaacatcatagacatctaattggttcggcttacacaattctgactgaaaaagttcagcaaactttccactgaatgggtgctaaaagtattgcacccagataggccaggtgcggtggcccatgcctgtaatcccagcactttgggaggccaaggtggatggatcacaaggtcagggattcgagaccagtctggccattatggtgaaaccctgtctctactaaaaatacaaaaattagcctagtggtgcgtgcctgtagtcccagctactcaggaggctgaggcagaagaattgcttgaactcaggaggtggaagttgcagtgagccaagatcgagccactgcactctagcctgggcagcaagagcgaaacatcgtctcaaaaaaaaataataataataaaataattttttaaactcaccacctcagctttataaagcagaacttttatttatttatttatttatttatttatttatttatttttattttttttgaggtggagtcttgctcttgtcgcctaggctggagtgcggtggtacaatctcggctcactgcaactctgcttcccaggttcaagaaattctgcctcagcctgagtggctgcgccaccataagcgactaatttttgtatttttagtagagacggggtttcaccatgttggtcagtctggtctcgaactcctgacctactgatctgcccgccttggcctcccaatcacttgaacctgggaggaggaggtttcagtgagccgagattgtgccactgcactccagcctgggcaacagagtgagactctgtctcaaaaacaaacaaacagaaaggccagggaaagcttcaccaaagagtacttccccacttcaggacaacgctcctgacttcttattgttttgtaatcttaaaaaaatctttaaaggggccgggcgcagtggctcaagcctgtaatcccagcactttgggaggtcgaggcgggcggatcacgaggtcaggagatcgagaccatcctggcgaacacagtgaaaccccgtctctactaaaaatacaaaaattagcccggtgtggtggcaggcacctgtaatctcagctactcaggaggctgaggcacgagaattgcttgaacccgggaagcagaggttgcagtgagccgagattgcgccactgcactcaagcctgggcgacaaagcgagactccaaaaaaaaaaaaaaaaaaaaaaagctggaggccggtagatcacgaggtcaggagatcgagaccatcctgactaacacggtgaaaccccgtctctactaaaaatacaaaaaattagctgggcgtgatggcgggcgcctgtagtcccagctactcgggaggctgaggcaggagaatggcgtgaacccggaaggcggagcttgcagtgaaccgagattgtgccactgcactccagcctggacgacagagagagactccgtctcaaaaaaaaaaaaaaaaaaaaaaaatctttaaaaggcacccatttttcttcagttaataatgcaaaaaagactgcattgacgtggtttaattcccaggaccctctgccctttaaaggtaaactaaatgcatatcatagctttacaaaaatgtcttgcccttgatagagcttatactgagaaatgaggtttatattttttattttaatattttgattccattttccaataagtttttaaagtcccctcatatacctagaggcgaaattactgggtcatatggtaactgtatgtttaaccccttttgttgtgtgtgataaaatatatgtaacataaaacttgtcactttaaacatttttaagtgtacaattcagtggcattattttcacaatgttgtgcaactgaaacgggtaaagttccttttccccctctcagggcgtgcgaggggggtgtggcgtgcgacgggggtgtggcgtgcgaggggggtgtggcgtgcgacgggggtgtggcgtgcgaggggagtgtggcgtgcgagggcggtgtggctcgcttcttcagtgccaggctgctcaaacctctaggggggcatacagacaggcagaggctgtgggcctccaaccccacggcagcatgtaggggtggatgcttacagctcctggagccccagtgggcgtgtgttacagggtgctcttttagttttgctgtctataggcgacttgtgttagttaaccagctcgagtgggctctcaaccttgt

SEQ ID NO: 753 - DNA, 2300 bp, Homo sapien
agtggctcatgcctgtaatcccagcactttggaaggctgaggctggcggatcacttgaggtcaggagttcgagaccagcctggccaacacggcgaaaccccatctgtattaaaaatacaaaaattagccaggcgtggtggcgtacctgtaaacccagctactcgggaggctgaggcaggagaatggcttgaacccaggaggtggaggttgcagtgagctgagattgcagcactgcattccagcctgggcgacagagcaagactgcatctcaaaagaaaagaaaagaaaaaagaaaagaaaagaaaagaaaacagctgtgattcagcaatagtcattttctctccttgtcactgccagagtgaggaagtgctgggttctgtcaacataggctctgacttctcatgaggtgcaagaaagaagcagcatgaacaaaggcatagattttgcacctggagacacgtattctagtcccacctctgactcaaactagctgcatgatcttgggcagccccccagccctctctgggcttcagttccctcctcggtacaatgggaagggtagggaagaggatggtgcctaggatcttcaaagtcccaactctgatgtgctgccattctctcactggcatgtgggaactgagtgtgctacgtggagtcatgagacttcttcttccttttctttttctttttttttttttttttttttgagaccgagtctcactctgtcgcccaggctggagtgcagtggtgcgatctcggctcactgtaacctccacctcccgagttcaagcaattctcctgcctcagcctcctgagtagctgggattacaggcgcaccccatgcccggctaatttttgtatttttagtagagatggggtttcaccatgttggccaggctggtctcaaactcccgacctcaggtgatctgcccacctcggcctcccaaagtgctgggattacaggcgtgagccaccttgtctgttcagagacttctgacttccgtatttccctcgctaatggcctcacctcccgtttgagtatgtgcagcatgtgcaaattgcagaggaactggggaacttccctgccaggcaatcctgggtcctcttggctctccacttcctccttccttccttccttcctccttccttccttccttccttcctttctttcttccttggtctggctctgtcgcccaggggctggagtgcagtggcggtatctcggtacaaactaagctatttgaaatgcctcggaattcccaaagaaagctcagtaaataccagacagatgaaacggtcctgcccgctctccctctttcagtacccagttttctctttcctctcctttcataacgtttcttcccatcatccctctacctccttatttctgtcagggctgttagatacccttccggtctgttatctcctcctccagccttgtgctacaggacaactcaaaagccccctatggctcccaagtgatcactaaataaaactcgtgatctcacttcagcctacccctgcaggattgctgcggcaaaatggactactcccagaggcgtgatcacggttcggttcactgcagcccagacttcccgggctcaagcgatcccgaacctcccacctcagcctctcgagtagctgggactccagacgtgcaccactacgccaggctcattttgtttattttttatagagacaggctagtctccaacttgtgggctcagagcgatcctcccgcctcgacttccgaaagtgttaggattacaggcgtgagccactgcgtccggctcaatggactccttcttaaatgtgagttctccgcacacactgggccttgctcacctccacgatttaacctcgcagttaagtcccttttcaaggtttttattcgtccttcagcgaagcgctgtcaacgcctccctgcgtctttcccttcttgagcaccagagggcgctcctccgacccgaggaggaagcgactcgggccaacctgtccaggttgtcccacccctttttccttccgggccaatcgttagtcagagtgggcggagccgcccgcgggcacctgcgcgttaagagtgggccgcgtcgctgaggggtagcgatgcgggctccggggatgaggtcgcggccggcgggtcccgcgctgttgctgctgctgctcttcctcggagcggccgagtcggtgcgtcgggcccagcctccgcgccgctacaccccagactggccgagcctggattctcggccgctgccggcctggttcgacgaagccaagttcggggtgttcatccactgggg

SEQ ID NO: 754 - DNA, 2300 bp, Homo sapien
ctaattttttgtattttagtagagatgaggtttcaccatgttgcccagggtggtcttgaactcttgatctcaggcagtccatctgcctctgcctcccaaagtgctgggataacaggcgtgagccaccacgctaggctgagcattctaatcgcacataagcaacaagtaatttttagtgcctgaatgtctcaactattgttgcattacctcacatacttatttttgtggtgagaacacttaaaatctactctccatcatcttcaagaatataattcattgggccaggtggggtggctcatgcctgtaacattttttacttgaagaatcttgcaactctacctcaggggcaaaatctttcttcattggcccagatcagggtctggggtgtggggagcagttagtgagaggatctgatgagataatcataggccatgagtttacaagggcaaaaactttgccataatcatctctgtatccttagaatataatggcgtctcattaaatattttatctgagagtgggtgtgaggacacttggaactatatcagataccatacctgagtacatccagcccaggactggacattagggacatactccctaataaatataaactgaagataatgtttagtttgactcacatagcattttttaaaggtgtgactttgggctttacattctaaaattggcaactggctgagcatggtggctcatgcctgtaatcccaacacttttggagactgaggcgggaggatttgcttgagcccaggagttcaaaaccaagctaggcaacatagtgagacccccatctatacaaaaaaattaaaaaaaaaaaatagccaggtgtggtggcacatgcctgttctgccggctacctggaaggctgagatgggaggatcactggaacccaggaatttgaggctgcagtgaactatgatcgtgccgctgtactccagcctgggcaacagagcgagaccctgcctcaaaaaattaaaataaaataaaataaagtaaaataaaataaacaggaagtggctgggcgtggtgactcaccctgtaatcctagcactttaggaggccaaggtgggtggatcacttgaggtcaggagttcaagaccagcatggtcaacatggcaaaaccctgtctctactaaaactacaaattagctggaggtggttgtgtgcacctgtagtcccagctactcaggaggctgaggcaggagagttgcttgaacccaggaggcagaggttgcagtgaaccgagattgcgccattgcactccagcctgggcaatagagcgagacttggtctcaaaacaaaaacaaacaaacaaaaaacaaaacacacacacacacacacacacaggaagctatcacataagtcaagatttctggtatctcttgaaaaatacagcacaacttccaaatgcttggaatatctgacaatttgcctatactcccaagcagaaaagcttggctggaactaagaggtacctgcccctctctactggcccagatcagggtctggggtgtggggcagatacctctcagctgggccagtagagagggtcaggtacctctcagctccagccaagcttttccacttgggtcctgtgttccccctattacccacagtccctaccactccctattgccccacaccaggatccatcacccattatgttaatctgcctgtaggcatttgcatttcaaagctctggcctagtggtgaagaggcattggaatggcatgtccttttaggtgatctactgtaatgttggtgcattatccccattttacagataaagaaacttgcctttggggaagttaagtgaatcaacattttaacgaggctgtattagaacccaagtcccttgactccagggtctaggcccatgccccaccctggccagagttcgttgtaagagataactcaaccgcaggggcaagagcattgtggcaccagggacctggaggggaagtggtaacaggcacggaaggccagacctcctcacactcactcatctgtgagaaagtacaaaagcaagagaaagctggcttggggtggcactcaacaggtgctctgagtggcacccacggccaggtcctgggagaggacagaaaacaactgggactcctcagcccccggcagctcccagtgcccagccacccacaacacaaccgtgagtagctttttttgttgtttattttaggcttcttcctcattccccaacacctgtattcttttttgtttgtttgtttgtttttgagacggagttttgctctgttgaccaggctaaa

SEQ ID NO: 755 - DNA, 2300 bp, Homo sapien
tgcagtgttgtgatcgcagctcactgcagcctctacttcctgggctcgggtgattctcccaccttagtctctcaggtagctgggactacaggcgtgtgccaccatgcccagctaattgttatttgtagagatggggttttgccatgttgcccaggctggtctcaaactcccgcgctcaagtgatcctcctgcctcggcctcccaaattgctgagattacaggtgtgagccatgccctgccatgaaaagactaactctagactgcaatggctttgaataattttctaaacgtttagagtttagattttattccgtatcacaatttggagccacggaagtgtttttttgtttgttttttgttttttaaagtgacaccattaaaaattcattaaatacagctggctattatctggctagacgtctaagcaaacttcttgaatgtttggaaaacagattacactttcactaagacacctgttggtttaccacatacttcttatttgaatatgattagcatcagaaagtccctatgctcaaaaatacctcttttatcaaattagattaacaaactgcatcccgtaagatgcagtaacttttcttaagatccaatggctagaatataggaatttgggttggattgggaagtgggggataacggtggcaaaaaattgaagattaaaaaacgaaatacaggccgggtgtggtggctcacgcctgtaatcccagcactttgagtggctgagacgggcggatcacgtgaggttaggagtttgagaccagcctggccaacatgatgaaatcctgtctctactaaaaatacaaaaattaggagggtgtggtggcaggcgcctgtaatcccaactactcaggaggctgaggcaggagaatcgcttgagcccaggaggcggaggttgcagtgagccgagattgtgccactgcactccagcctgggcgacagaaggagactccgtctcaaaaataacgaattacatgagatttataaaaagttggtaaatataaattctgtaacgtaaacttgggtatatatgtgtatacacgaacaaactgtgaatgagactgattttgtaccgtttggcccagaattattcacgctcattgaaattagtgctcttttaaaagattcacattgggttacttatacatttactccaaagaaattgccattttccccttacctgcatctggctggcataatcaactgaacaatattctctttcttcccctttttcacttacaagtggggcagaaaggggaggagagcagtcctcattctttcagcaaacttactgtgcacttacaacgcgcgaaggcgctgtgctcagagaaacaaaacctaaccggttgtggccctcgagggtgtgtgggtggggagagctgcagccacaggaaacggtaacacggcgcgtaaagggctctaattgaacttaaggaccaatggggccaccaagcaggaagtgactgacttgcccgcgtgtgtctgaaccgccttcacagggaggcaacttttgagtaattgcggggctggagggtgggggcactggagggaaccgcggggaggcgccggcttcggacgcggagttgtgggtgtgggagagaggcgacccagaagccgaggcccgaggcgggagggggctgcgccctggcaagaggctttccggagtatcttccatctgtcaatacaggctacaggactcagtggccctaattcgagaaccaaacgtcccccgccggtcagtcttttcccccagggcagtcccaagggcggcgagcccgcgcgcacgagagccgagcggtaggaagagccgagagctagcggccggggcctcggcgggccaggggcgcggagaggccgccggagaaaggactaagacaccggtggaccgagcagttactcccggcatgctcctcctccccgggcagatttcaaaccctctgcagccccacctccgcgccttcgcccccggccagccccagcaacaggcggcggcccgcttctcattggccaggcccgcgctgtcgtgttttgattggccgcggagcctcccggccctgcttctgcagtcgctgccgactccattttgtcggtagaggcagaaggagaaggtcgggttgtagaagctggggtggccggcagctcgctcatcggtgttcgtgggctttgtcggtccgtgcctcgtctctccctggaaagggagggaggcttcgacgtcgagagggagccgctgccgcgttagttccgagcttgaagtcagtaagtagcggctgcgctaagggcgcggc

SEQ ID NO: 756 - DNA, 2300 bp, Homo sapien
tacctgcatctggctggcataatcaactgaacaatattctctttcttcccctttttcacttacaagtggggcagaaaggggaggagagcagtcctcattctttcagcaaacttactgtgcacttacaacgcgcgaaggcgctgtgctcagagaaacaaaacctaaccggttgtggccctcgagggtgtgtgggtggggagagctgcagccacaggaaacggtaacacggcgcgtaaagggctctaattgaacttaaggaccaatggggccaccaagcaggaagtgactgacttgcccgcgtgtgtctgaaccgccttcacagggaggcaacttttgagtaattgcggggctggagggtgggggcactggagggaaccgcggggaggcgccggcttcggacgcggagttgtgggtgtgggagagaggcgacccagaagccgaggcccgaggcgggagggggctgcgccctggcaagaggctttccggagtatcttccatctgtcaatacaggctacaggactcagtggccctaattcgagaaccaaacgtcccccgccggtcagtcttttcccccagggcagtcccaagggcggcgagcccgcgcgcacgagagccgagcggtaggaagagccgagagctagcggccggggcctcggcgggccaggggcgcggagaggccgccggagaaaggactaagacaccggtggaccgagcagttactcccggcatgctcctcctccccgggcagatttcaaaccctctgcagccccacctccgcgccttcgcccccggccagccccagcaacaggcggcggcccgcttctcattggccaggcccgcgctgtcgtgttttgattggccgcggagcctcccggccctgcttctgcagtcgctgccgactccattttgtcggtagaggcagaaggagaaggtcgggttgtagaagctggggtggccggcagctcgctcatcggtgttcgtgggctttgtcggtccgtgcctcgtctctccctggaaagggagggaggcttcgacgtcgagagggagccgctgccgcgttagttccgagcttgaagtcagtaagtagcggctgcgctaagggcgcggccatgttggtggccgcgctccccattgttggaggaaggaggcgagcggaggcgagatccgggtaacccgggcgggcgcgggcggtcacgggcggtcgcagcgccgcgacccctgcggctccggagagatggggccactgggaagccaagcccttgtggcgtcggaggaggcgttttccgggttcgagttgggaattactcacagtccggaaatggcaatttatttagggttgtttatctgtttggaaagctctcttacccctttgaaaggagggggcttaactatttggtaacttattttcttggaacatcaaattaaaaccaaaccttgaaagttaagctgttccctctagggagacatttttatatatttaagatgggcttagactgttagggcttgtgagaacttattttaagacggggaggaggcgagagcgttcataaccaaaggaaacactgcgtgatgtctacatgttccaagagactgaaaatggatgtgacatgtgtggaaagattggaaaattctggtgggagtttaaaaacacggtctctttagaaaatccgcctgaagccaattttttgatatgactcaacatttaacacttccttgattttatacgcgagagaatctgaaggtctttcccaggaaaaagataaagataaaacttattgcgggacttggagacacttacaaaaattccccaggagtgactggatctcaagggtgaagagtttttttaaatggtcgtggttataaggtcaaagaaagccatcttacgagaaattttctaccttttagttcaggaagtagccttctttacagtcaacgattttcgtagtaaatctaaatgatcactttctcaacgtgtttttgaaataatgaagtaatctttacttttctagctaggacttctctcaaacttgtgtgctgaggagactcagatgttggcctcagctcctaggctgaactcagcagatcggcccatgaaaacttctgtattgagacaaaggaagggatctgtcagaaagcaacacttgttatcttgggcttggcagcaaggaagaggacaggtagtggagatcctgcaatctgaaaagcagactgaaaggtaatcatcataatgggcaaacattttatgatggaaccatcctaaaccaattgtttttattttaaaatagattatgtagatttgt

SEQ ID NO: 757 - DNA, 2300 bp, Homo sapien
tcacagtctaggtctaggtcaaaatctagatcaaggtcttggactagtcctaagtccagtggccactgatagtataaaccatggtcatttttaggcatgtatcattcatttactcatagtttggtttacttaaattatcaggaatacaatgttgcaatgatgcttaaaaaacacttgttagttttccctgtaccaggcaatggttataattaaaatgatatgctgttgagaagccactcttaagagtccagtttgtttaatgttatgggcagctaccaatttgtggtgtctctgtatatttttgtaaagattctcattttttatgcttgaagtatttggtgaaaagatgttggttgaccataatttgcaacattgtctcattaaaaataaactttcatattcatatttggtagaactgttaacctagaaatgtagcttgctaataagatagaatgatacaaaagtgaagtagtagccacagtacaacactgactgctcagacacatttaggttcagggtggacctttatgtcttgtcaagatgtctaggcccggctgggcgtggtggctcacacctgtaatcccagcactttgggaggccgaggcgggcggatcacgaggtcaggagttcgagaccagcctgaccaacacggtgaaaccccgtctctactaaaaatacaaaaattatccgggcatggtggcacatgcctgtaatctcagctactcaggaggctgaggcaagagaatcgcttgaacctgggaggtagaagttgcagtgagccaaaatcacgccactgcactccagcctgggcaacagagtgagactccgtctcaaaaaaaaaaaaaaaccggatgtctaggccaatgataattatttttgatgcagtgtggattagttcttttgttaaccccactgtcttggggaatgatgccagctgggaaattgagtttttgactgaaacatggagccttcactgctttttttctggttcctatgaagatttggaacatagaaaacacaaaaactcaccttaaaatttgagcaggtcgttgatggcaaaaataattttaaggaaaaaggaatattcttatgtagttattctaaagtttaaggagcgttgttgaccataatattgcttagttttcttactgctgttaagtaagtaaattgtttcaaagtaggttttgtgtgtgtgtgcctagtgtaaaagaactgaaattttgatgcttacagcacttggctcgtgcatttgtatcaaaatttgcctgcctctttatgagggaggcctgcttttcacacctcagtttatttaatacgaggcaagttgtaagacaacactcattctaggtgattctgtggtgccatgaaatttaaggtaatttggggaaaaggattagtcagttttaagcaagagtcacatcttttgagctttcgattatcagtgtagtacctgactaaaaatgaagtaatacccttaaaccatttataatttctagtatttctctgaaagatcgttttggggacaaaagtgacttgacatgtccaatttcatttcagaataaaaagctagcatctttaaaaatctcagattgcttgcttacagatacaagtacgaattatggacaaacgattccttttagaggattacttttttcaatttcggttttagtaatctaggctttgcctgtaaagaatacaacgatggattttaaatactgtttgtggaatgtgtttaaaggattgattctagaacctttgtatatttgatagtatttctaactttcatttctttactgtttgcagttaatgttcatgttctgctatgcaatcgtttatatgcacgtttctttaatttttttagattttcctggatgtatagtttaaacaacaaaaagtctatttaaaactgtagcagtagtttacagttctagcaaagaggaaagttgtggggttaaactttgtattttctttcttatagaggcttctaaaaaggtatttttatatgttctttttaacaaatattgtgtacaacctttaaaacatcaatgtttggatcaaaacaagacccagcttattttctgcttgctgtaaattaagcaaacatgctataataaaaacaaaatgaaggaaataatgattaactggaattattacagtattgaatatgattctaaaataacaatggaaacagtcctttatagatttaggaatattttaaatcattgttgcactaggcacaactaacttttactttggaaatgatagaacttgccagaaaggtacatcttttacacagtagt

SEQ ID NO: 758 - DNA, 2300 bp, Homo sapien
cacttgatcaaaaacaaattgtataacaatgaggtaaacttctttaatattgtcccctaatttgctgtcctctgttgttacctcagagaatgtaaagctgtacagttatggcgaccccaaagagaaagcatgaaagaacctttagagtagagttcaacacttaaggcaagtagacaagccaaagacctcttaaggatcaggcttgaagagaagggagagtttgggaaaagaaaaaataaagaaaagctggaagaaggacaagcctaatgggagacaaagcctcgctttatctacaaaagggggaaaaggttgtttttcaaagttaaagataaagccatctgtcatatttggccaagcatctcatgacaagtccttctgacaagcacttaaagagttaaaggtcaagatgaagttgaatgatggccaagattaaaggagtcatacctgatgtatcctacagaataactatttttcttttttttttttttaatgttttgtaagcagttaattttcaaaattattctggtttggtctagtgacaaaacctgtaacttgatttatgtgggcctttgatgttgtgattgtggtcttgtgtaaatgcactctctcttatgaagttaaagtgtaacaggatgtatattcttaagattaaattcagcatattttggttttggaccaggtggtcagatgccacggagtagcaggcagtgctctttggagtagcgtggggttctggggttaagccacagagccctgcttaaaggagagacaggtgcatgcactggggactacttagaaacagctctggtggtcttgtagggtcagaaccactagaaattttgtttatatatagattttaaagtggttgctggggacacatataaacccttaacttctttaacttagccctgtgaagactgctggccctgcgctgctttagcacaatgatcagttggccctgaatgagttgcagaaggccttctccctggtataggtacctaactgggacctatgggagactggtccctgacccagagtttcaggtgaccttacttccgttcctttcagtgagatcatctccctgcaacaagggtttgggttgtggacctcagactaggaaaagttcttcctgcttaaattcagtgagcctcaaacttttaagttagtggagtcctagtgagacttagggaaaagccaaaaactactcctgcagggccagtgatcaaggacagttgtgagaattggttgcaaagctccattacagagaaaataatagctatatctggcttagtaaataaaggtagcagtgcgttctggcttacaacatagacctcattttacctagtgttgggtggccgaggaatcaaggtcagtagtagtttgattcaagagtgtgtgatatttgaggcaaaaaaggctagtaattcaaagcaatctaaaggagaatgataattttaaaatacatattcagtaagtctatggttttaaaatagttgaaaagaaataagtaacaggcttatgaatttcatttttgaaaagaccataaagtacaaatttctccatgactgacatcagagtgatactcggctgcctctgctgctgctgtctcttctgtctgactccattcgcaatagccttttcttcctatccctggcttaccgagtaaagtagaaacttgccatcagcccaggattctgttttcgagggtagccccagagaggatgctctgttctcattaataatttttacagctctcaatataaatcctttttatacttattatattctgtctcttggggtaacaaagtagtgtacccattaagtgaacgtattccttctaattagtttagagcccagctgcattaaccttgagggatgttcagttacagtattcaaggttctgaactccccatcagcctttcccttttcatgttgaaagcccagttatttagaatttgtccttccatttaatctgttcataatggcctcgggaagacagagctggaaacctgcagtccttaattcctttcagaacaaaaagtgggaagtctagtaaggcagaccttttagtctctataataaaaaaataccagtatcggtctcaaaaaaggagtgtgtcacttcagggatattttaaatcacctctctaaatctgcagtcttgtgttgtctctcaaatttaggaaaaagaaatgtgcaaactagaatggggatttttgggatagaatgaaaacctatacctgtacctaacctagctctctttccaaaccatttatatcaaacactgtcttgaatgtgtac

SEQ ID NO: 759 - DNA, 2300 bp, Homo sapien
gctaccatttatctttgttgttgttgccgttgttaatatttgggggttttaatcagttggaggtgtttggagaaagggagcgttgagatttggggagttagatttttccagttaaatgttgcgagtagtttttcttatttcctggaaattctggtcaccctttgaaaagggaggtttgggaagcgtcagtcattaggacgttgacagctaagttagattaattcagacgtaccttaaataggctttgttctcaccattcccttgtttcgagttgccttcagattattttggaagagttcttactacaagatgaggctttttatttcacaaataatgaatctacacacagaaaataagtggtttgggtttttggtgtttcgtgggggttttttgctagctttgtgatttgcttttgtcttaaatttaagaaggaaagaaagcaataattctttccataaataattctttccataatttctaatagttacgttagcatctagagaaattttctctttacgtcatcttgacacttaactatttaagaagttcgatatttgtgactttttcagaccatatttatctactgttaagtgtgtaaatctgtcgctaaaattggggagtaaaaataagtgcttggtatttttcagagtgctagagtcgatttgatgctgtaaaagtaaaaaaaaaaaaaaaaacaaggcttatatacaacctaatgctgctgtaccttttatgaaaaatgacggctgtagataaaaataagttgtggtcattcccttgtaccatacatatgtctgctgttgtcctgttaatgtaaactgcatttttatcttccaaattcttggatcctagctttccttcatcaaaaagatatattgcctatacatcttaaggacttggacataaaaatttgaggtctttttatgatgttttaggtctgaagacttgcggcgtgaatttggtcgttatggtcctatagttgatgtgtatgttccacttgatttctacactcgccgtccaagaggatttgcttatgttcaatatcctttcttcagatggctgattagtgaggggtgttgaagtttgaaattcaagtttatgtaagtggtaacatctaaaaagtagttctttttgtcctctaataaatgtctgtcttcaaatttttgaaaattaattctgactcacacattgctctcgttattaaagttaatccaaaaatggtaaaatatataaattcccattcatgcttctgaaactcatatcgatgattatatatgtgatttaaatttgaatgcactctggttgctactacctttaatgtaagtcctttaaaagttaatatgttcttgtgcttagcaattaaaatttggtattcttgtttgttaatttgaatcacttgatcaaaaacaaattgtataacaatgaggtaaacttctttaatattgtcccctaatttgctgtcctctgttgttacctcagagaatgtaaagctgtacagttatggcgaccccaaagagaaagcatgaaagaacctttagagtagagttcaacacttaaggcaagtagacaagccaaagacctcttaaggatcaggcttgaagagaagggagagtttgggaaaagaaaaaataaagaaaagctggaagaaggacaagcctaatgggagacaaagcctcgctttatctacaaaagggggaaaaggttgtttttcaaagttaaagataaagccatctgtcatatttggccaagcatctcatgacaagtccttctgacaagcacttaaagagttaaaggtcaagatgaagttgaatgatggccaagattaaaggagtcatacctgatgtatcctacagaataactatttttcttttttttttttttaatgttttgtaagcagttaattttcaaaattattctggtttggtctagtgacaaaacctgtaacttgatttatgtgggcctttgatgttgtgattgtggtcttgtgtaaatgcactctctcttatgaagttaaagtgtaacaggatgtatattcttaagattaaattcagcatattttggttttggaccaggtggtcagatgccacggagtagcaggcagtgctctttggagtagcgtggggttctggggttaagccacagagccctgcttaaaggagagacaggtgcatgcactggggactacttagaaacagctctggtggtcttgtagggtcagaaccactagaaattttgtttatatatagattttaaagtggttgctggggacacatataaacccttaacttctttaacttagc

SEQ ID NO: 760 - DNA, 2300 bp, Homo sapien
tgtaatttcagcactttggaaggccaaggcaggcggatcaattaggtcaggagtttgagaccagcctggccaacatggtgaaaacccatctctactgaaaacagaaaaattagccaggcatggtggcaggagcctgtagtcccagctactcgggaggctgacgtaggtgaatcgcttgaacccaggaggcggaggctgcagtaagccaagatccagccactgcattcacgcctggtcaacagagcaagactacatctcaaaaaataaaataaaataaaaataagtaaaaatcaaaaacaagaaaaaacctatcacattactgtttctttcatataacaaacctgcatttactttattttctcattgccatcgccctagaaatataagctgtatgtttttcattactgaatttcaagcttctagcacaatgtctgacacataacagggaatcaaacttttttttgttttgttttgtttttcacatcaccctcccaaaatgctgggattttggggccaccttgcctggcccaacattttaataaattaagcatgcaaatcttgggaaacaaaaatttagaatagctctgctacagagtgctacaaactatcatcacctgtatcgaatcacttaattgtcttagatgctgattgacacaaaaataatgcctttatgactttttattaaataaaagttcatttaatttaacagtacttgagtccctgctacctgcttggcactgtgccacacgctggaggcattccaactgaagtctctcatctccagaagttgactcttatcgagcaggaaatggctctcaaaagggcctccaaaatcaaaaccatactaaagattatttgctattttcatgctcattctcttacaaacgtggagttttccagagggtacatgatgtgtgataaagggtagtggagtgtgtcaaagttttctctattttttttttttttcttttttgagacggagtctcaccctgtcgcccaggctggaatgcagtggtgcaatctcggctcactgcaacctctgcctcccgagttcaagcgattcttctgccccagcctcccaagtagctgggattacaggcgcgcgccactacgcctggctaatttttgtatttttagtagagatggggtttcactgtgttggtcaggctggtctcaaactcttgacctcgtgatctgcccgcctcggcctcccaaagtacagggagggattacaggcgtgagccaccgagcccagccgaagtttcctctattttaagttctcattaactatttattaataggtataacccacactttttttaaaaaaagctctttggaatcttccgtaatacacaagaatataaaggcgttctgagaccaaaaagtttgagaactgctgcaatacaggtccgatgcatacccaggaagccgtcagcaacaaagaatacactacaaatgaccacagtcatgaacctacagtgtgaggtttggtcccacccaggttgggagccaaatgcgtgactaagtggagatggctagggtgtgggtgaggggcaaaggcaggctgaaaacactggagagacaggcccagctctgcgcaagggcacacacctccttcctttacacactcaatacaagctgtaaatccttctttcgcaggtcagggcataacctggaccaaacgggaaatttaaggcaaaataaaagcaggacattaacttggaccaaccgggaaatttaaggcagcctctctgaactaaatagtttaaaaatctgtccatttagtagtaaccgcaaagtttggcctagagactaaaacatctgcttcctgatttgggggtggagatgaagtggagtgtaaggtagaaaacggcgggaaatgaagacctaaagaaagaaagaacaggcttgggggagggtaagaggcaccgcaagaagccaacgaatgacaccgacgctgaggcgcgtgcgccagccctccgcatgcgcaggcggacgcctggtgttctcgcgggaaagaaccgttgcgcccgactttgcgcggaggtaggagggggaagtggaggcgggagtgaagtctcgcgagaagagtcggttgccgtagcagagccctctagctgtgtgtgtctgaggctcggccgcctgagccgcggacggtttgctgagcccgttagtgcgcccggccgagacacgccgccgccatgtcccgctacctgcgtccccccaacacgtctctgttcgtcaggaacgtggccgacgacaccaggtaggtacaaggcaggtactccgggcctaggcgg

SEQ ID NO: 761 - DNA, 2300 bp, Homo sapien
tgggcgacagagcgagactccatctcaaaaaaaaaaaaaaaaaaagggacactttgagtgtgaggcggaaagcaattctggtgagtaaatatatgtccctcagttgcctgtattatttctcaaggcattatgaataataataattgctggcattcagggccagcttcttgagcgtgctacttgtgcactggaatgggccccatgctcagaaggaccctgcacttggcttagtactctgcgattgtcgttttgaatttcttaataaatattgaatgaagggccttgcattttcatgttgtactgggcccctgtgatcctgttaacattttagggcactttctatgcatcagactccattctaaatcttcaccctattaaacatgagtggctggagtagcaccagacagtgtaaatttcctccattacttaaggtaatttgcaggactctgttttcttgccactgaaagtatttaactgagaggggcaggggagacacttgctcagcaaggccttcctaggcaaacctgttttaaaaattaaaaacaaggccgggggcacagtggctcacacctgtaatttcagcactttggaaggccaaggcaggcggatcaattaggtcaggagtttgagaccagcctggccaacatggtgaaaacccatctctactgaaaacagaaaaattagccaggcatggtggcaggagcctgtagtcccagctactcgggaggctgacgtaggtgaatcgcttgaacccaggaggcggaggctgcagtaagccaagatccagccactgcattcacgcctggtcaacagagcaagactacatctcaaaaaataaaataaaataaaaataagtaaaaatcaaaaacaagaaaaaacctatcacattactgtttctttcatataacaaacctgcatttactttattttctcattgccatcgccctagaaatataagctgtatgtttttcattactgaatttcaagcttctagcacaatgtctgacacataacagggaatcaaacttttttttgttttgttttgtttttcacatcaccctcccaaaatgctgggattttggggccaccttgcctggcccaacattttaataaattaagcatgcaaatcttgggaaacaaaaatttagaatagctctgctacagagtgctacaaactatcatcacctgtatcgaatcacttaattgtcttagatgctgattgacacaaaaataatgcctttatgactttttattaaataaaagttcatttaatttaacagtacttgagtccctgctacctgcttggcactgtgccacacgctggaggcattccaactgaagtctctcatctccagaagttgactcttatcgagcaggaaatggctctcaaaagggcctccaaaatcaaaaccatactaaagattatttgctattttcatgctcattctcttacaaacgtggagttttccagagggtacatgatgtgtgataaagggtagtggagtgtgtcaaagttttctctattttttttttttttcttttttgagacggagtctcaccctgtcgcccaggctggaatgcagtggtgcaatctcggctcactgcaacctctgcctcccgagttcaagcgattcttctgccccagcctcccaagtagctgggattacaggcgcgcgccactacgcctggctaatttttgtatttttagtagagatggggtttcactgtgttggtcaggctggtctcaaactcttgacctcgtgatctgcccgcctcggcctcccaaagtacagggagggattacaggcgtgagccaccgagcccagccgaagtttcctctattttaagttctcattaactatttattaataggtataacccacactttttttaaaaaaagctctttggaatcttccgtaatacacaagaatataaaggcgttctgagaccaaaaagtttgagaactgctgcaatacaggtccgatgcatacccaggaagccgtcagcaacaaagaatacactacaaatgaccacagtcatgaacctacagtgtgaggtttggtcccacccaggttgggagccaaatgcgtgactaagtggagatggctagggtgtgggtgaggggcaaaggcaggctgaaaacactggagagacaggcccagctctgcgcaagggcacacacctccttcctttacacactcaatacaagctgtaaatccttctttcgcaggtcagggcataacctggaccaaacgggaaatttaaggcaaaataaaagcaggacattaacttggaccaac

SEQ ID NO: 762 - DNA, 2300 bp, Homo sapien
ataggcaaaatcatggcacagcaggggttcgggacttattattaaattgtaactgatcgctccactgcaccccagcctaggcaagagtgagactctgtctcaaaaaaacaacaacaaaaaattgtaacttattcaagcaccccgggggactaggtgtggggggagcagcagagggttacccaacggccagccccagtctctgaaggctgacagctctgtgcttaccacccccaagcccactacactctgatgtgtaccccacaacaaagttcccagaacagggaaaaggactctggagtttgtccttttcagaaccgcaaaatcaattttgaccgagagaagggcctggtggaagtgatcatccagaacttgtctgaggaggacaaagggtcgtacaccgctcaactccaagatggaaaagccaaaaaccagattaccttgacactggtggatgacggtcagccatgcccagcctcgccccgcccagccctgccccgccctgccccgcacacctggcctgccctgcagccctgagtcctcggctctgcagcctgctgagcacagccccctcgacttctgtccaccccatgtcccctctccagacccacactcctctcggctcatgccagttcctccctctgtgttcacagattttgacaagcttctgaggaaggcagatgctaagagaagggactggaagagaaaacagggtaagagctgctggggtgaagttcaaaatccctggccactggttcgtgctagagatgctggactgcggattaatgggaaccccagccctgctgggtccccaagggaggtccactgtcattcagtccagttctgtcccagtgccagatcaaaatagctcttgcctgacctgagggtgagagctgagccctcttaaattttgcaccctgaagccaggcacagtgccccacacctgtaatcctagcactttgggaggccaaggtggtcagatcacttgaggccaggagttcaagaccagcctggccaacatggtgaaaccctatctctatgaaaaatacaaaaattagccgagcatggtggcacacgcctgtaattccagctactcaggaggctgagccacaagaatccttgaaaccaggaggcggagcttgcagtgagccgagattgcgccactgcactctagcctaggcaacagagcgagactctgtctcaaaaataaagaaagaaagaaagaaggaaggaaacaaaggaaggaaggaaggaaggaaggaaggaaggaaggaaggaaggaaggaaggaaggaaaaagaaagaaagaaggaaagaaagaaagaaagaaagaaagaaagaaagaaagaaagaaagaaggaaagaaagaaagaaagaaggaaagaaagaaagaaagaaaggaaggaagaaagaaagaaagaaatttgcgctctgagcaccgcccctgcctcaccccagtcccagccctggcagaggcagcatctgagaagtccatagccattagctgtccctccccccagcactgcctggacacaggtggcaccctggctgagcctggctctctgacagtgggcacatttgttttgcacgcacaggtccctattttgagcggccgttgcagtggaaggtcacggaggactgccaagtgcagctgacgtgcaaggcaagtcctgccctgccctgcccccaggcccagtgcagggggacctgtggcttgtccccaagcccagttgctgtccctgcccacccggccccctaaattccatactctgtgcttggctgatcgcacacacagaaagtacccccgaggagaccacacgtaacccaaaaagcaaacccaccttcccagcgcccatggggtaggattcgtgtgaggtggaccagccttgaacgagatcctagtggctccagaaggggttctgaggggtcagggggtctaggagcccacgagggtttatatgttgaggggtatccctgtgtttatgattaccctgtgctcagagactcacagtattatttcatccgcctcacaatcatctgtgacacaggcattactatcctcacttcatagatgagaaaacaaatggagaaatagctcaaggccacacggtaagagggagagcccaggtttgaacaagtctatctgattccaaagcctaaggtccttcttagcactcttcagcctgtttagataactggggaaggggagggtgggtgctctcccagaagcatattcattcagtaaactcagagcatctattttgtgccactctgcacggtactgaacgtacaaagatgatgaag

SEQ ID NO: 763 - DNA, 2300 bp, Homo sapien
ttagagtatattattttgtaaatcatatctgtagataggttgtattagattgaaccacatgatttgtcaatattcaactgtttactgctgacatggcgatgtcaacctcatgagagattcaaattcatgactcaatctcatattatttgtgaatttcatctccagatggcaaagcagccattagaaaatacgtgttgtggctgggcggggtgcccatgcctgaaatcccagcacattgggaggccgaggcaggcgaatcacctgaggtcaggagttcaagaccagcctggccaacatgatgaaaccccatctctactaaaaatacaaaaacttagccaggcatggtggtgcgcacctgtactctcagctactcaggaggctgaggcacgagaatcgcttgaacccgggagacagaggttgcagtgagccaaaatcgtgccactgtactccagcctgggcaataaagtgagactctgtctcaaaaaaaaaaaagaaagaaagaaagaaagaaaagaaaaaaggaagaaaatatgtgttatatatatatcaaaggtccaatgacaaaaaaaagaagaaagaaaacatgtattatagaaagagggcactagttctgacaggagtctcatgtccacctgctgtgggttatatgaccttggcaggtctcttcacctgtctgtgcctgtgtttctccatctgtgcaatggggctggttgtcccagcatcaaaagatgcaaatcagaaaactgatttgaaagttctgcataaagcttgtgcaatgaccttaccacatggtaaaggaagtgttacaaagtctggactcattagtattcagtggtgggacaatcagttgtccctatagaaaaataaaacaaaattagattactcccccaaatcatacatacaaataaagccagaggaagaaagaacctagatgaggaaaatgaaattttaaaaactgttagaatatggtaaaatgtaaatgagtgttaattctgggtagcaagtacacgagtatttttttttccattatcctttacacacgccaatggggtttttcctattttaaaagaagtaggaaataagctgctgggcacaatggctcacgactgtaatcccagcactttgggaggccgaggcaggcagatcacttgaggccaggagttcgagaccagcctggccaacatggtgaaacccagtctctactaaaaatacaaaaataagctgggtgtggtggcgcatgcttgtaatcccagctactcaggagactgaggcaggagaattgcttgaacatgggaggcagaagctgcagtgagccgagattgcgccactgcactccagcctgggtgatggagcgagactctgcgatggagtgagacactgtctcaagaaaaaaacaaaaaacaaaaaaagaaagaaaaagaaaagaaaataggcaaaatcatggcacagcaggggttcgggacttattattaaattgtaactgatcgctccactgcaccccagcctaggcaagagtgagactctgtctcaaaaaaacaacaacaaaaaattgtaacttattcaagcaccccgggggactaggtgtggggggagcagcagagggttacccaacggccagccccagtctctgaaggctgacagctctgtgcttaccacccccaagcccactacactctgatgtgtaccccacaacaaagttcccagaacagggaaaaggactctggagtttgtccttttcagaaccgcaaaatcaattttgaccgagagaagggcctggtggaagtgatcatccagaacttgtctgaggaggacaaagggtcgtacaccgctcaactccaagatggaaaagccaaaaaccagattaccttgacactggtggatgacggtcagccatgcccagcctcgccccgcccagccctgccccgccctgccccgcacacctggcctgccctgcagccctgagtcctcggctctgcagcctgctgagcacagccccctcgacttctgtccaccccatgtcccctctccagacccacactcctctcggctcatgccagttcctccctctgtgttcacagattttgacaagcttctgaggaaggcagatgctaagagaagggactggaagagaaaacagggtaagagctgctggggtgaagttcaaaatccctggccactggttcgtgctagagatgctggactgcggattaatgggaaccccagccctgctgggtccccaagggaggtccactgtcattcagtccagttctgtcccagtgccagatcaaaatagctcttgc

SEQ ID NO: 764 - DNA, 2300 bp, Homo sapien
accccatgggcatctgaaatcacagcataaagcaggtagacactcaggagtcagccagacctgagttcacatcctggctctgctgccaactggctgtgtaaatctgggaagccacctcacttccctgagcctctatttcctcatctgtgaaagggagaatcctacaatcctaccacctctctcagatgcccgagttgattaaatgagatgatacgtataagccttggcatgtggtacccattcccatgaccagggcagggcactgcccaagggggtcacacctttgggcccagaagaatgccgtgccctgagttccaggacccccgggagagagaagcccacgtgtgcacacatacacacacacacacacgtgcactcatacacacacgcgcactcatacacacactcctgaggcagctgtcttgggcagtagacaggtggatcccaggccaccctccctgcctctcatcagaccttgttaaactgtcctgcacagccctctccacccactgtcctgttccctaaatagctcttaggaggcagatcctgctgccaggccaagctcttgtgcagaaatttgagctgtccccacagtccatgcccagagtcaagcccaaggtcagggactggggccctgcctccctctgcccacccgtccttcccaccactccttccagatccctgtccctctctccatcaaggctggcaactccagggtccaccaggcttgctcttggccccagactccagccaaccctctgcttctcctactccactcaccgccactaccaccctcttctctgctttcatctccgtagccacttgggtgattttagtggcctgggggacaggagccctgagttccaatcctgactcttccactgacctgtgtgatctcgggcagcctcctgcccttctctggaccttgctcaggaagggcctttccagggaccagtgtcatgtcatagcttcaggctgctggggtgttgtctggacggctgtgcctcagttttctcttctgtttgagaggataataatagtaccaactgacagggctgttgtgaagatagaatgagtcaatgtgtttatgtgtttaattggctcgttcaatcctcagagcatggggcgagcactgtgtgagtgagagctgctgttactattctctggtggtctgtggcaacattaccttggatttcacccttcagcccctggatgcctctcagtgctgcccctcccccaccactctccctgatcccaccagaaatccccgcgcctctgagcgggcttgaccgctgtgaagacagtgcataatcctgggggcaagtttgggtagggaaaggaaaccagcatgtattgagaacctgccatgtgtcaggctatggctggtggcttgattcatgtgaacccgctcgttccttgctccaggtaggaattactgtcccattttactgctgaagaaactgaggcacagagaggtaaaagaactttcccaaagccacaaggggaagccaccaacagaccaggactcaaactcatatccaaagcccatgtccccaaaatagcataggaatgtgggctctgaaccttctccaactctgtttgcctttggtttttcagcttacctggggaaggatgctggcttcgattcagagatcttcaaaagtaagtcggctgggggagaacgggacctgggattctttgttcaggctttgctccccgacccccacagtccctgtttagaatatagccatcccctgcccataaaaggacgtccaccggggtttgtctatgagctggtaatacctgcacctgacttctaaaggccgcagggtaccccagagctgtccccagctgctgagctgttctctgacctaaactgggtttgaaaggcaaagccagaaaaaccaacggacttggccttgggatgtttgctctttggctgctctgaccactacctagataagtctcttcccctcctaccccaaggccaggtccccttctcctagtcaagacccagaagagaagggatgccccagaaatttcctcactcctaagtcccaggccaggctggctgcctcaaaaacttctgccccaaatttcattcccacgccaggatcgacgtttggccccagcgtggaattcacctcggtgctgaagccagtctttgctcgtgagaaggaacccttctccctgtcatgcttgttttcggaagatgtgttagatgctgagagcatccagtggttccgagatggtaaggacccccagtcctggcccccagcctccagagctggcccctccaa

SEQ ID NO: 765 - DNA, 2300 bp, Homo sapien
cacagcccgagccccagacacctccaccacatgccccttccaggccaacggctctccaataaagccagtgggctcaccttccatgccatggacttagagaaatggtcacctaggtgctgtgttcacatccaggcagaagacagcctacacatgcacgcacacacacacatacacacacatgcacgcccacacacacacacgctgccacctccagcaggaccctctagagaggcaggggccagacagagctgaccccacagaagctgacaggagcaggccaaggcaggcggtcatccctcttctgtttccatccccacgcctgggcaggaaccctcccatgccagaagcctgcagaccaggattcccacctggaggaggtgtgaaagccattccagggattttagctttagcatcaggggggccctcagagacccagcagtgactgaagcccggatatgagaaaactcagtgcaaaaacccacagccagcgggcacacgggcctcccacacccctcgtttgcctctccatatccatggatccgcttcctgagcctcccctgggtcaatctgatccggccccactgggcgccatcacgggcctagacttgagccttgggaatgcaaaggagatgtgtacattgcaatccccttataaggagaaaggccctgtggcccaccgtgtccccagcctctgccacggcctggccttgaatggacatatgacatagagatcagaagggctaggggttgggctagggattggctgccagtcatggccccaccatcatgctgggtgaccttgagcaagtactgcccctgttcatcagtaaaatgggataataatggtgctgtcctcatttgggttattgcagggactggggataatgcatttgaaaactaacatgggcatggaacatagtaagttctcactattgttacttttaattcacttacagtcttgttgaacagtcaagatgcacagatacaaaataattacatagagaaagcattgtctgaatcaatgctaaattgtggagtgctagaaaataagtacaaaagaaatgagaagagggaaaattctaggtggcctgtagtctttctgcaaggcttcttagaaaaataatgctaatgcctaatacttatgttgtacttactaagccccaagcactcatctaaccttcacaactaccctgggaggttagtagacccattttacagatgaggaaacaaagtcatgagtctttcccaaggttacacacttgaaagctgggataaggagctgggatcacaccctgtgggctggactcagagtctctctgctaattagcatgccctcagttggggtttgaagcatgactagagccaagcgggccaggaggaggggaagggtgtgccgggagaggaaaccagcgtgggcaaaggcccagaggtaggactgaacatggccggtgcaggaagaatggggacgcctgcccgtcctgagtcatagacacagccgtggacatcacagtttcaattactcattgtctggggagctgaggcccatagaagcgaaaaccttgccacagatcatacagtgagacaagggctgggctgcagctggaagcagctagaagccagggccctgctccctaacgtgggggctctgctcactcagctggggagcacatggggtggaggagaagcctggctcagagcccaaggcctgcctctgtcaccttgggcaggtccctctccctctcagacctcagtttccctgtctgccgactgcagagaggacacccccaccccccatcctgccagcctcctagagatgttgggaagactgcatgggaggggataggcgggcacctggtggaatgaccgtggaccttggccttcacaggttgttgctctcgtaaccatgactctgccgcacagcttgggaggtgcgggggacccccggcccccccaggccatggaggttcacaggctggagcaccggcaggaggaggagcagaaggaggagcggcagcacagcctgcgcatgggctcctctgtgcggaggcggaccttccgcagcaggtgggagccacagggtccccgcccagccactgccctgttcccagggcccccagtctgaggagggaggcccagcctagccctctggaggctccaacctgatggggggagggacatccctgctttctgaaccccctgtctgaggggggagacacaattggctctctggagacccccatgtgatggaagaggcacagccctgtcctctggaaaccctgtttgaggagggaagcacattc

SEQ ID NO: 766 - DNA, 2300 bp, Homo sapien
ggatgcaccctgtctctccagtgcaccttcattcatctccccagattgccttgggaggacggggctagaggacctgtttaaatgactgtctcctgctcagttggaagctcaaagccctctttgctgttcgtacggattcactcacactcatccctcacagcaaatgtatgaagatgagtcttggaaagcccttgttcgattgggtcaatagaagatgggagagaaatgttctctcccaaaagatgctgtaagagagagccacagaagagcttagaaaggggttttcaaatagggcaggggattcagattttgcctgcaaagttcacttgtgctctctctctccttctctcgagtgaggagtccctgaggcaccagcaagagtgacaggtgtagtgtgggtggccacctgaggtcgcaggaaggggtgagggagggaagctgtgctctctggctaggggccggtacagccttcccctcaccggctcatcctctgagactcgacccaggtgcaccttcctgatcacctcctgtcgtaagtgcctgacttcccctgtaggttagggtctggcatagggtaggtgccaatgaatgtgagggggaaagaattgagactgagggaatggcaggagagggcaaagggtgggaagaggtgtggtgccgaacacctattaacctcagtagggaaggcaccaggtttgagaggccaaagaaaagatccatagccagcaaacggaacatgggggtttcaggaggcggaggttgcagtgagctgagatcatgccactgcactccagcctggacaacaaagtgagactctgactcaagaaggaaagaaagaaggaaagaaggaaagaaagaaagaaagaaagagagagagaaggaaggaaggaaggaaggagggggggagggaaagaaggaaagaaggaaggaaggaaggaaagagaaagaagaaagaaagaaagaaagaaagaaagaaagaaagaaagaaagaaagaaagaaagaaagaaagaaagaaagaaagaaaaagaaagggagagaaggaagggaaggaaggaaaggaaggaacgtgggggtttgttaggggcttgcctacaggagagagagtccactggtgatgaactggacaggagaaccgccttacatacagaaatggtccaggggcggcgggctggacaacataccagtggcggccgactgggcaggaaaacctcagccccttgcaaacagcatgcagtttatagagcattttcactttacaccatcccctaatgacctccacctggcaatcttcatttaacccaaaactcagggcctcaatcccctgtatggccagcgttccaccagaagggacgggacgggggctcagatattcatcgtaggtaagaaacgggttggctactccccagattccttagctcggaacacatattcaggtcttccacacagggtcattcttggagcgtgcttcagttatccctgtcaggtgcgtttaccctataagaaggcccttcaggggacactctggcagcctgagcagtttgcacagtgaagcagtaggtggctccccagctcctcctgcctgcaccacaccacacacacatgactgtggtcagggcgggggccgtgtagtaactaccggagtggtggagggaccaggagccacacattgctgttttagccagtgacaacttctgagcacgaaacactcacttttaggtcatattccttccaccgtcttcatgaagtccaggtgcccagtctcactgtctccgtttttcagaaggcagtcagttcagggaagctgagcgccttccccagggcacccagtcagccggggcagaattcagatcagaactcccgacagctgagaacgccgcacgggatctgccctccatacgaccatgcctgagccgttccctcctttccattttaacaggggcttgggttgggcagaaaggacccagctgagaggaggagcagtgtggggggacgcggcggacagctccacctgtcgctgctgcccagcaggctggagacacggaatggcccctccccttggccccctgtccccgatgccatagttctcatccattgtcattgtactgtctcagtgctgctatatttaagacggtgcagtctccgggatcgcattcttctcccggtgcccgctgagccgagggcaagaagagaacaaggaccctctcggcctcaggaatcttctccccagagactcctaagtgggcacactgcttctgtgagtcacccccagaaatcagggtgggggagggatgcctcctaa

SEQ ID NO: 767 - DNA, 2300 bp, Homo sapien
tgggattacaggtgcccgccaccatgtccggctaatttttgtatttttagtagagacagggtttcgccatgctgcccaggctggtctcgaactcctgatctcaggtgatctgcccaccttggcctcccaaagtgcgagattacaggcatgagccaccacgccccacctatttttttcttaaactgttagaaatgaagtctgggtgttcccacattccttagcaatccaggtgtcttccttcccgttaattcctacataaccacaggccctcgaaactacaggatgcccttttcctccatcaagttccttcttccagtgcttctgagaggccccaaggaacactttcgtgttccacagacctgttggggctgcgtcttgtcctctcggccagccacttgggaccaaagcctgctcttctccctaagcgtcccttgtaacctgtttttctcgctgtagcttccccacactgccttgtcatcaaagtcatcaaaaaccctctatccatcatggttcattcagtagcacagaaacctctccagtctttcagaccaagggactttaatgtaaaggagctcgtcacccagaggatgaaggagctgggacactaatcaggacagacagttcagagatttccccaaagcaggaagctgtgccatcccaccaactgaaaggaaagatgaggggagaaggtgttgccagagccaggagctggcctccaaacaggaacaagaaagacataaggggttgcctggctgatggactgtccagagggagccagaactgcagagggatatggccattgctggggaagccactcaaacagaaaacgaggggagaaatgctctgatctctgcctccccagtcttcccccaggggctaaacctatcagaaagcagttgataaaggagtctagaaaatgtagtttcctgcagtttcaggaaatgactggcatgggccctaccttaattcctccaaagcacagcttagatttggctgttttgtcaaacaaactttagcaatcagggctgataacaattacaattcaggaaagaaaaacttaaacaccgatctcagcatatcacagcccattacacccaacccgttggcaggatccctgctaaaatttcgcttgcctttgtgtgcttggggccaggcaaactctccccaggggcaggaccctccaatcgtgtccaccctgaccagagtccaggccccagggcccttctaccttctccaggccctgcaggaaggagaaaaccatttcctaaacacctgtcccttcattcacacgaagctcatgtgcagatcctgccctacgtggcaaaatgatgggagagcagcctgaatcttcatcgtcccgaaccaaagccccattcatgaagttcagccccatctctagcacagcagaaagaatcactgaagtttgagttccattttttttctaaacttttgcagatcctagacccaaaggctcaaggtaagagcggctgggcttcctcacccccaacggcctctctaggggagagctgttcccaagcccaccccaagcgtggggacctgccttgatatggaggatcaaggaggagcatcgggtgccctcaatctcctcctgccagaaaagcaaaggagtcacagcttttcctttgctgcaagaaacattctgggaccttttttttccccctctgttgtccagttattttcatcagggtaaatcccctaggaatagaattattaaagcaaaagatatgtatgtggtgtaggcttttgatccacagtgccaaattgctttttgataaggctgcatatcgtggattattcttgccttttctgcccctcagctccttgataaaccacttgggatgaatcagccaccggaccagataaacaagccagcctgttactattgctgttttctgcaagtcggaagggaactcccttagatcccgcccagaacctggaattccagagcacacagggccaggacacctttgtacccctgctccccaccggcacaggtcccacccacccccttctccccgccccatgcccgggtggagccagctgccagggcgccaagactcccagccctctctctgtgcacggcagagtagaggccaagggagggctctgtgccagccccgatgaggacgctgctgaccatcttgactgtgggatccctggctggtgagtgcccatctaccctgtggtcagacctcccttatcccaggggccaacgatcagggtcatctccccagcaccctccccagcccgagcatagccagtttcagtttctcccctgc

SEQ ID NO: 768 - DNA, 2300 bp, Homo sapien
ggtagaggttgcagtgaaccatgatcacgctactgcactccagcctgggtgacagagtgagactcttgtcaaaaaaaaagaaagcaagaaaataagaaagcaagaaagaaggaaagagagagaaaaaagaaggaaggaaggaaggaaggaaggaaggaaggaaggaaagaaagaaagaaagaaagaaagaaagaaagaaagaaagaaagaaagagagagaaaggaaggaaggaaggagaaaagaaagtcaacagtcaacatttcagagatcccaagataccaacactgaccgtgcctgctgctcttccatcctcctccaccctgcgcctttgaggtggaattgcgtcctctgtgagcagggctttgttaagagatcctaattaaggccaggcacagtggctcatgcctgtaatcccagcactttgggaggctgaggtcacctgaggtcaggagttcaagaccagcctgcccaacatggtgaaaccccatctctacaaaaattagctgagcatgatggcaggtgcctgtaatcccaactacttgggaggctgaagtgagaaaatagcttgaacccaggaggcggggttgcagtgagccaagatcacactattgcattccagcctgggcgacagagcttttgtctaaaaaaaaaaaaagaaaaaaaatcctgattaagcagaagccttgatgctagtcccagaagcatcctgaaatttccaaaagaaatttcccccgcggttaaactcagagcaacttttggacccaccaagctctgtgaaaatcattttctcttccaaaaactgatgggaccaaagctgatcccagtttcaaataattatcaaaaaattggaaacgaaatatgatcagaaaagaagaaagttgaaaaagaaaatcctcatcacccaaagacaacaaccattaatattttggtaattattattccaaatatctttctatgcatacagacagactcacacacacacacacacacacacacacacacttttttttttttttttgaaactgagtttcactctgtcgcccaggctggagtgcagtggcgcgatctcggctcactgcaacctccgcctcctgggttcaagcgattctcctgcctcagcctccctgatagctgggattacaggtgaatgccaccacgcccggctgattttctgtatttttagtagagacggggtttcaccatgttggccaggcttgtctccaactcctgacctcaggcgatccacccgcctcaccctcccaaagtgctgggattacaggcgtgagccaccgcgcccggctacacacacacttttttaatgggcctatgttttagcactcgcttttctgtttctcagtgtgttgcaaacacctcggtgtcgatacacaccattcggcaacgtcctcctaaagggccgcataatattgcgcgtcgtggcgtgtgccttactgggaagctactgctgtccaggtgaacaccacagccttcggggtcagaaagacagctttccccagaacaagcacctgaagctctggggcctgccgctccccgggagagaagtacgtggagaagggcagcacggatccgccgggatccccgggggcattaaagggaatcgcgtgtgtaaggcgcggagctcagcatccggctcagaaacgcgctcggatcccgccaatggcattgaggccgcgtagccaaaccggccttgaactctccctaatcctgccaaaatggcccgtcctggagcactggactggccgtgggttattgatcatcagccggtttcttcccctcccctgcccttcccccgtgcacggatttactgatttttttttccgggaattgagtaaaacaaaactaagtgcagatgaagcagaggtacgggcgagtttcgagcgcggggaccggcgcgctcccccccccccctccccccgcggcggggctgtccccagggaccttctcagtgaatcctaggcggcagggacgggcccgcggctctgcgggccattggctgccgactgcgtcacctgcccgcggtgggctaggagacgggaggcgggaggcgggaggcggggacctgggcccgggcggggacgccgcggcaggaaggccatggcggggcccgagcgctggggccccctgctcctgtgcctgctgcaggccgctccaggtaagggcgcggggccgcgggagggagggggaagagggctccccgggccgggccgcgcctaccctcggacccggagctcctgggacaggcacggggtccgcagccacccgagccgggtgcgaatcggcc

SEQ ID NO: 769 - DNA, 2300 bp, Homo sapien
ttcatttttgaggtcaaagtttcttcctctctaggagtctgttcttcttcctccggcccctgctgggactctggaatccctgagtaaagcaaggcgttcagaagctcctccactgtaatgcacacgtgttctcactggtggacaaatctttaactctcctgttgctcactgaatagtgctccagagatgttctgaccagcatacagcagatgacagggacaggaaaccagatggaaagggatttattataatttttccttcacaaaactatactttagaaaagtgaaacatgctgaatgccgaaaattgggaaagtatagaaaattataaagaataaaaataaaatataatctcactctgcagagagactcattgctaccatttgtgagtttagtacatatacagtattttatatatatgtttagtagctcacattatatcatgagtatgtcatttaaaatattttttaaagttttaactaagaaaatttgttttagagatgggttctcgctctgtcacccaggctggagtgcagcagaacaatcatggctgcctgaagccttgaactgggctcaggcgatcctccagcctcagccacccaagtagctgggactgcaggcatgcaccttcacacccggctaagtattttaattttttaagagatggagtcttgtgatgttgtccagactagtctcaaactccaggtgtcaagtgatcctctcaccttggcctcccaagttaatttttttttttttttagacgtgatctcactctgtcatctgggctgcagtgcagtgacacaatcttggcttaccgcagtcttgacctccgaggctcaagaaaccctcccccctcagcctcctgagtagctgggaccacaggcgtgtaccacgactggccaattttttgtattttttgtagagatagggtttcaccatgtttcccaggctggtctcaaactcctgagctcaagcgatccatccacctcagcattccaaaatgctgggattgcggcatgagccaccatgtccagctattttattttattattattattttaaatgacttttcaaaaaggctgtaccaatttgggttcccactagaagtcgtggattggtgaatttttaaaggagcagtgtggccctcatcaacctggacgcacacgctggtctctaaggcatggaacagttgtgctgggagggagctcctctgagagggtggtcagaagagcccccaggcatcacctccaccatgaaagctcacccctctcccctaaagcttagataaccagctgcatttcctaagagtgagcaccagggggcaccacataccaaaggaaagtggtccagactgcgagaccgcggattagaccaaagagataacgttttttttttcttagactggggccctccaaggcagagagaagaccaactctcctggcttccttgacattctccttacctgacgttctgcagcctcttgggagactctcggatgtacccataggaggctgtgggagacagagggtcatgtccagaagggaaatggcagtgtatggcgtcacagtaagagctggggcaactcccccgctgtgtctttgatgtctttgcatcacctttccaagcctcagtttttctcatgtgtcaaatgggagtgacaatttcctgcctcgctttactctgtgtgtgtgtgtgtgtgtgtgcgcgcgtgtgtgtgtgtgtaacttatgccaaagtgctttgaaaaaccgagaagtgggaggggggagggatagcattaggagatatacctaatgttaaatgacgagttaatgggtgcagcacaccaacatggcacatgtatacatatgtaactaacctgcacgttgtgcacatgtaccctaaaacttgaagtataattaaaaaaaaaaaaagaaagaaaaaccgagaaggcctaaggatgtctgctgagttgagactaaggtgtagtgggtgatatgtttggctgtgtcgccacccaaatctcatcttgaattgtagctcccataattcccacgtgttgtgggagggacctggtgggagacagttgaatcatgggagcagtttcccccatacggttcccatggtagtgaataagtcttataagatctgatgattttataaggggtttccccttttgcttagctctcattcattccctcttgtctgctgctacgtaagacgtgccttttgccttctgccatgattgtgaggcctccccagccacttggaactgtgagtctactaaacctctttttctttgtaaattacccagtctctggt

SEQ ID NO: 770 - DNA, 2300 bp, Homo sapien
gttgacagaaactccacagccttccatgaggtgggcagacaggtacatacagaggagtgtgccatcctttggactgcaataagctttgcagttacagttggcaccaaatagcccttcagccaccaataagctctgtgaagtggttgggcacccaggctctgctctcggattaaatcccagctctagctctaccactgcctagctctgcagcttgagtagtttacttcagtattctgtacctcagtttcctcatctataaaatgggggtatcaaaaatgtctatctcccagggttgctgtaaggattaggcgacacaatgtatgcaaaggcgcacaatgcccggtgcctgtggtatatgaagcacctactaggtgccagacactggagattccacagtgagcgacacaaagtctttgctcttatggaatttacattccagaggaaggggagaaagacaataaacgattagaaaaatatcataggtcatattacattgtatcataagtcataagggctctgcagagaacaaaaagtagtgtgatccagagtgattgaatgtctactttattaacaagggtgactgaagagggctgctctgaggaggtggctttattagcaattatttactattatttattagggtcccctgggcttcccccaacacagcctccagggagaaaccaatctctgagagttctcaaacccagtaccccctctccagagccctgaccccaccccaagagggctcctttgaattctgactttaccctgaaaaacctccataaattggcaggggtagctgaaacctcacttgccgttcccagagaagagagagaggagtgggccaagttgaggtttccaggaagacacagcaaagagataatttgccaaaaggggaagggtgggggaggggagaatagaaagagagagagggaaaaaaagatgccaagatctctggcttagatttaatttcaaactaatcctggaagaagctctttaaaaagctcttacattctcctgtttgtgtttgtggatattctggggtttaccaagcttgttctttatagtagacagctcacagcaattactccacaattacttcatctgacaggcattgaatttctcccaagttcccaatacagaacgaagcacttggagcctgtgaaatgaccagctggctgaggcttcagaggagccttcaacttttctatcccttctgtgctgaccagaggtatgtggcttgcccacacccccttcacacccaataaaagcctgttctcctttactcccccaccccctgccaccaacacacaccccccagattgtaaactcctttagaacagtaacccctgttttttctggcctcagtttctccagaacccagagtagggtctggcacacaacgggtgctcaatgaatgtctactgaattgaggccactgacttcagcccaaggggcagccagacttggagtgagatgactgcagattggatctgggctgggacctcgctagctgtgcccttgggcaaggcactttgcctctctggcctccatttcctccctcatctgtaaaatatgtgttgaagaggaagggggaagcgataataaatctaccacggtaggttactttaagaaccaaaagaagtcacttgagtaactgcaaaagattattcaaaaatattaccttaaaggggaaactgaaaaaaagggaacttatacaaagatctacctgggaaaagttgctctctcctttgagaattccccagtggtacagaaggagggggcaaagaaatttgggggtggggatgtttctgggtatctgggacaatgactagaaacaggaatcaagttttcctttaagccaagttatctgtttgtccctgtacttttcctctagttatcttgcttctttccaacattttcttctccatccctcctccctcatctccaccccccaccccctcaccaaggaaggaattggccagctccacccagccagtcccccatagctccgccctcctcggcgggctaagagttaacagctgcacctgttgaggtatacctccagtcgccggcacctgtacctgtagccaatcagcgccagcgctgctgggaacctacctgtcagcaaaatctcgacacccaaacctcaacataaatcaaacactttcccgggcagagaatgtctgtgtcaggcaagaattagagacaagcggtcagcagagcctcagtgctgatcgtcggagcttgggagcaggaagatgtcgaatgaacttgagtgagtaaacatcggtggatac

SEQ ID NO: 771 - DNA, 2300 bp, Homo sapien
atttgacaattttagaatagtgattgcttttaaggctggtggagaacacaccagtaacaccattgtcatttcatgtagaactaaccaatcaatgagcattcccaaacctcttgctatttttccatactttgaacgcgcaaaaaaatcttgacatgtgtctccatcccacttaaatttgctggctaaaactgcggaggctacagacagaatctattcattactgcacgttagggggtatgtgttctgaagctgggttacttgaacagaaaggtttcttgcttttctcctccctaatggtttggatttgaagtcagatccgctgacagttgaggcttctcagtttggggtggggtgagggaagccagttgcctgctgagtaattgcaggcggactccaagccaccatttgagattacagtggcagagcctgggggctcagctgcccctactggtaaggggagggcacccggcgcttggcttgcaagttctgagctgctgttgcttctgcggcctcgacattctcctaaaaagtgccaagttaagaggactggccatagcttacagcttgggccctcatggaatggccaactctggccaggccttgatatagtggcaaaagtgggacttgcctgtcactctaaattctgccacttaccaacagcaggatcctggtgaatttgtttgtcctccctgaccctcagtctgctcatctgtctgtaacacctacctggcaggaacaactgtgagctcccaaatgtggaccagagctccatccgcgcccgcccggtggccaggccccgggtgtaaggcggcacttcgaaggctggtctctgagaagcatggaggccccggcggtgtagttagaaaccagctggaggtggctggcgggtgctgagcgccgggcctttcatgtggtcgcagcgctctgggtgcctggagcccgcagccctgggcagccccgggctaccgcagggcgcaagggatcctgggctgcggccgagggcgccggaagtcgccgccgaccgcctgggtctcgcaggaaaacagccggcgcccgcgagctgcccagcgtcgggttttcctgaaggtgcgtcggggcccccggggagctggagccgcaggcgacctccccggtgacctgttgttcccctctggagggccggccggcgctccaggcaggccccgttgacagcccaggaagggagagtttcgccgcaaaggggcttggcacacagtaggtctaaggcaccgaggcaggagcgtcccccgcggcctcgctccctgctctctgggccccaccgctgccgcctggagtctcccctcagcctcgcagagacgcgactcggttgggggaaggggactagaaccgtcgcagtcctgaccgcggccgccgccgccgttctatctgatctccaggagcgccggctccagactgcctggagcgctgaaagagttaatcaggaacgcctccccgctgtggttttgtggtcgaaaccatgattgccaggagcaaatttttgtcgtgcacgaggtgtgttattaaaagtcggagctacgctgctgctgaatgaaaagttaaaagccctctttgagttcgggctgtaaaactggcggactgggccgagaggcttgagccaaccctaacggcggcggcccgggcggcgcgggggtcctgcggctccgccagctgctgggagcgggcaggctgcgcagtcccagcagtgagtggccgcagccaggcggtcggcagagctcccactgacccaccggaggagtgaagagggaaaacggggctgaaacccagatgggatcatccagctttctcttacgttagaacaaaaatgacagccaacatttatggagcgctgactccgcatctgacattgtgtcgagtgcttgataaatacacgctcttctttaaaccctcccaacaaactaatgcgggatgggagtgtaaatgcagttttgccgaagaggggacccagacctggttcaggcttgcccaaggtctcacggaagcactgggatcttaaccgggtcttagccgagcagccataggccaccccgcttcctctgtgcttagcctctgaaaagaagacagaggagatgtgccaaactgttaagagtggttatttctgagcagaagaatgtggatgaattccattcttcctatttttctgtaggttctacatgttatatatttgttgtattttacaaacctatgttacctttggagtcgttaaggggaagagagggagtcattattttgaaagagaacacctagaacagtgttctcaaact

SEQ ID NO: 772 - DNA, 2300 bp, Homo sapien
cagtcttttttaacctgctgaatattttcctggccccatggggaaatcttccagcgacacacactcagcgtatacaaaaatgctccctttttcagttgcttttctgtctgggtgaaaaataaagctgaagtgctgttttgtctacaggtggctttttttcaggccaggagaacaatggttgagtcaactggtgaggagtagaaatgcagtaatcctgttagccacactgtgctttgaggtctgtcaaagcctttctctgcctttgctgccaccatccctcacttgtatattcgagtcctcttccttggtaatgtgttattaccttctctccggcaacctggctcctctccccaactctccgtgtccagtaattaacctgtcccatctggtctctttgtttgccctctctgcatgccgtctagccattagggccctgggaaaagctaaattcctccacctttgtaaacacaaaatcaaaatgccatctgcatttctcgagaaacattttttttgacaaaggagtatcacagcaaatcaaaccatcctggccccagcaaatagtttcactcattcagcaaatatccccagcaatcacaggtttaatttgtattgcctctgttctccaatgaatacaggagaccgcaaattggcatttaaaatatttatgattcacgtgtaacagaagaatgatctcagggtttttttcctattatttttagagttctgaacacatcgcgcactctcaaatgtatttcgtgagttggccagaattcttaatttctggtcagttcaggaaagttgagacaagggaatgcttgcaaatgtgatcacaatcttaaatgatacgactttcttgtgtgccccaaatgctgcatttatagaagggctgtttgaacagtgagcaatgcacctaggaatgaggatggggatgggtaggactacgtgtcctgaaaacagtaaaaatagtagaaaaccaggtgcagtggctcacgcctgtaatcccaacactttgggaggccgaggtgggcagatcatttgagtctaggagttcaagaccagcctaggcaacatggtgaaaccccatctctacaaaaaacacaaaaaattagccaggtgtggtggcgtgtgcctgaagtccctgctattctggagactgaggtgggatgattgcttaagcccgggaggcagaggttgcagtgagctgagatggcatcactgcactccagcctgggcaacacagtgagactcagtctccaaaaacaaacaaaaaaaaagtagcaacaataatgaagataatttgcgggtgtagcattacacacttaaaaaaaaacactttccggctgggcgcagtggctcacgcctgtaatcccagcactttgggaggccgaggcgggcggatcacgaggtcaggagatcgaggccatcctggttaacatggtgaaaccctgtctctactaaaaatacaaaaaaattagctgggcgtggtggtaggcacctatagtcccagctactccggaggctgaggcaggagaatggcgtgaacccgggaggcagagcttgcagtgagtggagatctcgccactgcactccagcctgggagacagagcaagactctgtctcagaaaaaaaaaaaaaaaaacaaaaaaaaaaaacactttcctagcggtgatctctgctgggccacccccactccctgacagaactccacagcaagtggagctgactgtccaatccgttttacagatgagaaaactgggtttcagagaggttacagaactgatgcggggccacacagcctgtccttagcagaagtgagcctggaagccaccctgcagctagctgtgtgttctgttccttgttgagtgaccagcattttccagggatcacaaactcatagaccacttgagctgggatgacagggaagccacagccagtgtgacgtttacagctcacatctgttcatttgctaagaaggacaggtttcggtttgattttttttacgtagatttgccacttgtccaggcatgatgacgaagacaaagaaaggaaaggtactgagtacattgggtgtattttctccccctaggcctctgtctcttgctgcaagcagagaaacaacgtctgtactcgagccgggtttatgtcaaaaacccaaagaggatctttcgcttttgctgataaaggacctcccccaggtaagcagctgctttgcactggccttgacctaagggttaagtgtcccagatttgatttgcagggcacctacttcttcacagggagtctttggaaggatttagtct

SEQ ID NO: 773 - DNA, 2300 bp, Homo sapien
aattaaaagtagctctcatcagagaaagatcagaatgaccagtaggaatgtgattatgggtgaggctgaccaaaaaactctgtgggtctataaattttagaaacttcctcatgactgttgaaacaactacacccaaccttttgagagacctgtcatctctctaagtctgaatgatataaagagctttattagtatattccaaatctttgctccagaatcttccacaggactgactaggagaagtgtatgaggcaggtgggtggagagtttgatggcctctctgtatttgcatgctggcaggagtggctctagaaaagttagtaggtgctggagagaagttcataaatgccggcatttggccagattggaggccacaggcctggcaagtaaaccaaggggtgtgtagtgttggtgagtgagtgttactgtagccacattctgagactaattctattacgatactttataaaacattgcctctactgggacttttttgggaagaagttttttcattttcaaaatgtaagttgtaggtgttctaaaccaaaaaagagtctatgattgaatgggcttgctgttatcccagagccatgtcgctcaaccctttcccctttagaatgggctctctgatccatgtcatgtagtggaggctgactgcttgggtaggaatgctggtcctccgcctgaattagctggggaagttcagcttcctcatctgtaaagtagagataatcataagatccactgctcagggttgtcctgaggattcaacacaaaaacccaccaaaggtattggttaactcttggccagaatgaaaaagatgaagcacgttcaaagctggggtgaccttacttctaggagcatcagcaaatccttacacactgcatgtagccacttcttattagaattcgagtttggcagagttggatactcaaggaacagatcagcgttggagttaacttcccattactgaagaggctggggttgagctggggcttgaacccaggttaggctctgaacaacttaggctctggacaagaacactcccgcttctggtgctacacccccccaaatgctagtgggggtccataaaccagacgctgaggaccgtcaccaccaagcacagagtgaagtaggggggccctaatgccttccttttggctcacccactttctgtgtttgtgtagttattgattcctatcaagtgagaaaatccagggcaatgttctcaagcttttgaccattaaatagtgggaaattttttgttttatcagactccaatacttgccatgctatcttaggggaaagtgatgttatcactgagtttctgtgacttttgtccctgttcttttgacaaacattgattctgtttgttttttaactgaagataatttatcgtggcttcctgaaagggtgggattggttctgttaaaccgtgaaaatactgtaggatttgatgaaaacagtaatttggtggagggtaggaggcacagatggacaacaagccccctggagctttgtttgaagcaaactcgttgcttaggcagttcagatcatttaaccttagaaacaagatgtgagattttactcagaagaaaagcctaggctgagaagagcatctaaagcttcctatcacataaattacccaacagctgatgagtcaagggtaagtggcctggaacaggattgggtggaaatgcatttatggcaaaatcatttttgccaagtcccaaacagaagatgaataatttgagttagtttacagaagcgagtacaggtctgaacttgcgttttccaagggaagatcctcaaagcctgaggtcagtttatcattgttactgccagagtttcgccttttataaaatgcatttagaccttgtgctggtcaccatctttttgacatctgtccttcagatccacaatattatgtgacaatgctgattcctttggttgtctccttacagtgcgcccgattggacaccatcatttctaaataccctgcagcgaatgcatacactatcccatcggattttatttccaagagagactttagtaattcgtgttccagcatgttccagttgccaagctttatgaaagctctcaagtttgaaactcctgcaccaaactattacaatgtaagaactctgcctatgcttgctaaatacagatcgaattaatggtttactaaaataaaaggaagaggggatcttggggacatcgtattttaatgcagttgtcaagccagttagcatttgttgactacccaatgggtgcctaaggctgtacaagactcttacag

SEQ ID NO: 774 - DNA, 2300 bp, Homo sapien
gattgctttatatatcttgcccatttttaactttttttttccagctgggagggcaaatctagtcctgttttggtaagaaataggagttcagtcatccagagtgtttttcaaaaattctactttttaaattgtttcatcaagagggctgctctgacacatgcatttctgttatagccagaagccttggatctcctttccagtcaggcagaaacctctcctttccccaggagaatgtccttcctttaaccttttttaaataactctctttttactgcctcctctgcacactctcttagctgttctataggcttaggcttttagaaacaaaagccaggaagtcttgcagctgcttctgccttttgatttgctgtatagctctcttaaagcaaacaaaccaaaaacatagccattcatctacttaaatggggaggggaggagaagaatacatttactgtatattggtatccccaaatattttctacttaaacacgtattcagctccttttacttgcttcatcctccacccaggcagattaggcttcagtgtccctctccccatcgtgtttattgagcacttactagaggccagctcaggaagaggaagcacagctcagagctcaagagcctggactcattaggcaaatcatgttcacaccctacctgttccgcttaagtgctgggtgattcggatgagtaacttaatccctctaagcctcagtttcctcaactgtgaagctggttcatgattgtaccccttgaggggtccctgttgtcttcaggcttcctgctctgaaaaggagtattgttttttaaaaaaattcagagatgaagaaatgagccttactgatagtttccatacaaaccaccctctgtcatggctaacacatactttcttctttccttctcttgactgttttttttcccccatttctgcgcgtatttcctctctgaaggttaggattctgatgttaaaataatttggcttactgttgtgaacagcctacagagtcaggatgcacccccccacccaaaatttggtttggatgtcaagacttacggtgccacacacacgctcatgaagagtgtaggaaaaggcttatcacccacatagtgaggccttctgaggacagcagcacagccttcctaacctgatccaataatggcttgagagagcagggaaaggagcctggcttgggggttttcttatggttggaaagcgaggctggactgagggcaggggtctgcgtggtttgaacttccagctggtgccacaggagggagctctgggctttctcatccgcttgcccagtggtagggcagaagggaatgagggagtggtgaagctgaagagctatcagccatcaaacatcaaaaaactggagtcagagtccattacacttacaggttagagtctataatcaacctgctatgcagacagatgctgccaagttctagcagttgtggaagtctcagcaggaggggagtttatacatcagacatgcatgtatacatcgcagcctagacaaaggaacttttaacttcagtttctatagatgatccctttctgctttttaaccccatgtctgctcaaaacagaaacgaaaacttacacctgtcttgcacagtgccctgaaaagtgagagccagccccaggctgggatttccctaacctctttggattttaacggcctaatgctggtgtctgaatctaggccaaggagcagtgaggacgcttcctctgtcctgaccgcgcctcgtccaggctgctcccagaatagttttgctgtctccttcctgcctggcaagaatgtctttactatcatctccttccttttctccgggacagcctgtttaaggtactttatgtgaccacatctcactaatttaagagctggaggggggaagtccgataaattgccgagagggaaagaaagtggggaattttttttttaatccggtttcgtgtctgtttcctgtcaaaaggcaagtttctcttctctaccatttaaaataaaactttaatatacacctttgtgttttccacatttgtcaatcattgttttgtattcattttgattttactccatttttgttgtttaggttttactgctgcatatccaacacaatcctccattccttttaaatctcaagcttcagtaatcccagaatcagaaaaaaaaggattcaatagtcaagccaagagatttcctcataagaaggtaatgacgttgtctcaggggttctttcgttttagtctggattttagccttgcgggacaggcacgttctgtctggctgctg

SEQ ID NO: 775 - DNA, 2300 bp, Homo sapien
tgtaaattctccctaaattgttctatagattcaatgcaatctcaatcaaaatccagggaggttttttcttttagtagaaattgacctgtaagttatattcaaaagggctagtacaagagctaatatagtcgaaataattttgaaaaataagacaaagttggaactacctgattttaaaacttactctaaagcaagatagtgagctgttggtataaggatatacacagagttcaaaagaacagaatagagaatctagaaatagcactatgtatatctaaataaacacatacacacagtagatttttgatgagtgtgccaagataattcagtgaaaaaagggtattctttttagcagatggtgctggattaattgaatctccaaatgcaataaaatgaaaataaaatgaacctgacccttaccttaatactgtatacacagtttaattcaaaatggatcctaggcctaaatgtaagagctaaaactataaaacttctaaaagaaaatgtaggagaaaatatttgtgaccttgagttaggcaaaaattgcttagatctgacaaaagaaatcttaaaaccttaaaagaaaattttgacaaatttgatcaaaatttaaaaatttgcattcataagatagtgttaagaaaataaaaaggcaaacctcagccggggagcaaatattttcaaaacatatatgataaaaggcttgtatccagatgtattaacttgtacaactcaataaataacccaattaaatccaattgtttttgggttttgtggttttttgtttttttgtttttttttgttttttttttttgagataggctgttgctctgttgtccattctggagtgcagtggtgctgtcatggctcagtgcagccttgatctcctgggcttaagcagttctcccacctcagcctccagagtagctgggactacaggctggctaattttttatttttcgtagagatggggtctcactatgttgcttaggctagtctcaaactcctcgcttcaagcaatcctcccgcttcagcctcccaaggtgttgggattataggtgtgagccacaatggctgtccccaatttttttgttttaaaggtagaagatttgaacacacttcactaaagaagataaataagcacatgaaaatatccaaattaaaatgacaatgagataccactataaaatcactagaatgcctaaaattaacaagattgagcaaacacatgttggtgaggatgtagaacaactggaacaaagtactgatctatgcaacaatatggaagaatttcaaaagcattacactaagtgaaaaaagagtgtctatgattgcatttctgtgacattctagaaaggcaacaattgtgacagcagagcagtggttgggagggtgctgactgcaaagggacacagggagcttctcagcatcatagataaattaatatcttaattgtggtggtatttaacttggctgtaaacatttgccaaaacttggaattgtacaactaacactgatgaattttatttgtgtatacattatgtctcagtaaagctaaatttaaataaaaataggccaggcatggtggctcacacctgtaatcctagcactttggatggcagaggcaggcagattacctgaggtcaggagttcgagaccagcctggccaacatagtgaaaccccatctctgctaaaaatacaaattacagatggtgggcgcctgtaatcccagctactgaggaggctaaggcaggagaatcacttgaacccaggcaggggcagcggttgcagtgagccaagatcacaccattacactccggcctgggtgacaagagcaaaactccgtatcaaaaaataaaaaataaaaataaaatccaagccttcagtagttctgtaagcaacatcaacagtgacttcttacgcagttcctactgcaggcagcaccagcacaatgtgcttgggactttgggtcactgcacttggtagatctcagccggcacccacaccatttctcagtttaccctgtagatagaacagaacccatttgcaataattaaccaatgtgaaatgatctctacaaatgctgtgttttgctgtttcaggtgcttaggagaacatgcagtagaacttttcatcaaacaaatggaacacgtcacagaattttgctaacatggacaactctgcacagaaaaatgaacgcactggcaaacatcccagacgtgccagtgaagtacagaaaggtacatgtgtctttgcagggaggagatagctcctgacatatgcttattttagtacataa

SEQ ID NO: 776 - DNA, 2300 bp, Homo sapien
caacccggaggcacagcctccttcatcccttcccaattcagagctgccaagatgctgcagtgttttgctttcaaaggtcgcgatttgatttgccagactgcctgccagtcagaagttggcaggcatttcgcgcaggcaagtggctgcgaggacggggagtaggcgggacagcccctggcaattggctgcgctgcaaagcttgcttgaagcataagggagcgacctggggctagagcttggcgctcacctggagcggggaccccctagcggccacaggaagaatggtgcggcgactcccctgccccctctcccgctgtcccagagagcttaggtggttgctcgcctccacctgcccggcaggtgggcctggttttagcagcctgccaggtgtcctcccttcttatcctcatagccaccttccgggctttgctcctgctgttcccctacccgacgctctcaccaagtattcaaatccaaaacgtccttgaagacccagcgctccccagagccctcgcgagacttgggaccaaacatatctctcctttcctgccctcctggaacacctgtcggataccaagcctcccagcaatactgaaggtcctgaaacgagcccagcgcttggttaatgtttctataatgtacataattatcacggccatgataattaacatgcgcatggagttttacagatgacaagcttctcatcgctcacacgttgtcatatacacgcatttgctttcagatcgtcacagccatgagtgagacttgaagcccgttttacgtatgaagaaatgtcatttgggcctagacatcaacaatgagaaagaggcagttctagtctcagatcgtggggcagagaaagctccttgggaacatgggagaggaacgagttggtgcattgtagaaactgcccgaaggccagcagggctggtgagagatttttctgggggcgtggttgggcctgcgatctgagggacgggccagggacagtttataaataacatatttgggggccggcgcggtggctcacacctgtaatctcaggactttgggaggccaggaggatcacttaagcccaggagtttgagaccagcctggacaatatagtgggaccccatctctacaaaaaaatttaaaaattagccgggcgtggtggcgagcgcccgtggtcccagctactcaggaggctgaggcgggaggatcgcttgaactcgggaggcggaggttgcagcgagtcgagatcgcgccactgcactccagctgggcgacagagcaagaccctgtcaaaaaaaaaaaaaaaaaaaaaaaagcttggatttcaccctaaatttaaaggcgagccattggaggactttaagcaggggagtgacaaggtcgctgagaccgccctgccctgaagcgtgtgaagaggggctcctggaatactaagtggctgcccttgtatagtcgcccatgtcaatttttttttttttcttctgttagaaacagggcttggggccgggcgtggtggctcacgcctgtaatcccaacactttgggaggccgaggcgggtggatcacctgaggtcaggagttcgagaccagcctggccaacgtggtgaaaccctgtctctactaaaaatacaaaaagaatagcctggcgtggtggcgagcgccggtaatcccagctactcaggaggctgaagcaggagcatcgcttgaacctggagggcggaggttgcagtgagccaagattgcgccactgcactacagcctgctcgacaaagcgagactctgtctcaaaaaaaaaagaaacagggcttggatgaatgttaattcttttaggtatattccttgaagcaggatttttgagtgagcaaaattctgaggcttttggtttatcacaagatttttgaagcatggcctagataaacctcttattagttccccaccccgctacaggccctgatgtaattaacctaagccctaaaattcggccggcttctctgcggactttgaaacgcctctaatgattggtcaacaacttttcacgttaaagaaacagaggatgccattggctggagttacctcgcggacggcggaaggtggactcgcgaatgttaggcctgtgggtgccatagcgaccgggaggttgggctggccagattcagctgccgggaccggaccaggtaggaagcagttccggcggggggaccggtccctgaggtcgtggggaagaggacacggcgcaccatgtcctccgcatgggacgcccgcggagaccccccggcctccgggtgcttgcggaattccagggctgag

SEQ ID NO: 777 - DNA, 2300 bp, Homo sapien
gaatctggccagcccaacctcccggtcgctatggcacccacaggcctaacattcgcgagtccaccttccgccgtccgcgaggtaactccagccaatggcatcctctgtttctttaacgtgaaaagttgttgaccaatcattagaggcgtttcaaagtccgcagagaagccggccgaattttagggcttaggttaattacatcagggcctgtagcggggtggggaactaataagaggtttatctaggccatgcttcaaaaatcttgtgataaaccaaaagcctcagaattttgctcactcaaaaatcctgcttcaaggaatatacctaaaagaattaacattcatccaagccctgtttcttttttttttgagacagagtctcgctttgtcgagcaggctgtagtgcagtggcgcaatcttggctcactgcaacctccgccctccaggttcaagcgatgctcctgcttcagcctcctgagtagctgggattaccggcgctcgccaccacgccaggctattctttttgtatttttagtagagacagggtttcaccacgttggccaggctggtctcgaactcctgacctcaggtgatccacccgcctcggcctcccaaagtgttgggattacaggcgtgagccaccacgcccggccccaagccctgtttctaacagaagaaaaaaaaaaaaattgacatgggcgactatacaagggcagccacttagtattccaggagcccctcttcacacgcttcagggcagggcggtctcagcgaccttgtcactcccctgcttaaagtcctccaatggctcgcctttaaatttagggtgaaatccaagcttttttttttttttttttttttttgacagggtcttgctctgtcgcccagctggagtgcagtggcgcgatctcgactcgctgcaacctccgcctcccgagttcaagcgatcctcccgcctcagcctcctgagtagctgggaccacgggcgctcgccaccacgcccggctaatttttaaatttttttgtagagatggggtcccactatattgtccaggctggtctcaaactcctgggcttaagtgatcctcctggcctcccaaagtcctgagattacaggtgtgagccaccgcgccggcccccaaatatgttatttataaactgtccctggcccgtccctcagatcgcaggcccaaccacgcccccagaaaaatctctcaccagccctgctggccttcgggcagtttctacaatgcaccaactcgttcctctcccatgttcccaaggagctttctctgccccacgatctgagactagaactgcctctttctcattgttgatgtctaggcccaaatgacatttcttcatacgtaaaacgggcttcaagtctcactcatggctgtgacgatctgaaagcaaatgcgtgtatatgacaacgtgtgagcgatgagaagcttgtcatctgtaaaactccatgcgcatgttaattatcatggccgtgataattatgtacattatagaaacattaaccaagcgctgggctcgtttcaggaccttcagtattgctgggaggcttggtatccgacaggtgttccaggagggcaggaaaggagagatatgtttggtcccaagtctcgcgagggctctggggagcgctgggtcttcaaggacgttttggatttgaatacttggtgagagcgtcgggtaggggaacagcaggagcaaagcccggaaggtggctatgaggataagaagggaggacacctggcaggctgctaaaaccaggcccacctgccgggcaggtggaggcgagcaaccacctaagctctctgggacagcgggagagggggcaggggagtcgccgcaccattcttcctgtggccgctagggggtccccgctccaggtgagcgccaagctctagccccaggtcgctcccttatgcttcaagcaagctttgcagcgcagccaattgccaggggctgtcccgcctactccccgtcctcgcagccacttgcctgcgcgaaatgcctgccaacttctgactggcaggcagtctggcaaatcaaatcgcgacctttgaaagcaaaacactgcagcatcttggcagctctgaattgggaagggatgaaggaggctgtgcctccgggttgcacgaagagtccgagtcatttctcagaaggttttgataggtgggccttagaggagacgccgccggtgagtagtgattaacaccgggaggaaggggaattgaatttaaccttcgtttttttctggaaaaagcgaagtcacctaacgtcccctag

SEQ ID NO: 778 - DNA, 2300 bp, Homo sapien
cagagcctgacagtgacttgtatacataccaaccgactgactaaatgcaggctggttaagcactgggtgcactgtggccccttcgcagtcaagaatgcctttctaaggcctaatcaaccacaactccagagcttcaacaagcagatatactcagccccacccacaggaggtcagagaaagccaacagaccttagcgacatgtcaatcaagggagtggtgggaacccaggcctcctaacatccttcagagtagtttgcccaagtgcttttctggttttgcttttgtttgtggtggttggcattgctgtggtttaatttttcttttaaaaagcagcttccctctctgcctcaggaactcgcaggcctctgaagcatcgcctgcaaagattgaaggctctccctcagctgggtgggagtccggactgaaagcctggaggaaccctttgcaagctgtactcccttataagacacatacttttcacctggtgactctcttttcctgatttcgaagcatttcttcaggacctacatatgcccgagaggcaagcagtcacctctgcgttgtcaaccaccccacaattagagcacgtggtcactgacccaaggaaggaatgagaattcactaggtgctctgcttccattcccaccccgtttatctcgatgacggatttcaccaatcccacagagcacgttttacaaatgagacagccgtggctcatagcgtctgtattcgaatttgcctctttctgaacaaatcaataaaacacgctctttcccaccacccgacgatctggcttctggaggtgagcgccagttccctgccaagcttcccgttcctcggctttggctcacgagaaggttacattcttccgtcccgtcccactgagctggaaacttacaactcgaggagacagcacctctgttccagaagcgggcttagaccaagaacgcctcccctcatcccacctgctaactccaccatctgctgccgccaggaagcccgagccgctcggcacgaagaggagaaattctggcaaagttaactccatgtcacttcctggtttggtagagcctggcatcacctttagtaaggtagcccatgcccccgctcctcttggcctcgatgcaaaactggaaagaacattccaaggcaacgggacccaggttggcgaggctggtgacagtaagaaggaagggtatgtacactaggggacgttaggtgacttcgctttttccagaaaaaaacgaaggttaaattcaattccccttcctcccggtgttaatcactactcaccggcggcgtctcctctaaggcccacctatcaaaaccttctgagaaatgactcggactcttcgtgcaacccggaggcacagcctccttcatcccttcccaattcagagctgccaagatgctgcagtgttttgctttcaaaggtcgcgatttgatttgccagactgcctgccagtcagaagttggcaggcatttcgcgcaggcaagtggctgcgaggacggggagtaggcgggacagcccctggcaattggctgcgctgcaaagcttgcttgaagcataagggagcgacctggggctagagcttggcgctcacctggagcggggaccccctagcggccacaggaagaatggtgcggcgactcccctgccccctctcccgctgtcccagagagcttaggtggttgctcgcctccacctgcccggcaggtgggcctggttttagcagcctgccaggtgtcctcccttcttatcctcatagccaccttccgggctttgctcctgctgttcccctacccgacgctctcaccaagtattcaaatccaaaacgtccttgaagacccagcgctccccagagccctcgcgagacttgggaccaaacatatctctcctttcctgccctcctggaacacctgtcggataccaagcctcccagcaatactgaaggtcctgaaacgagcccagcgcttggttaatgtttctataatgtacataattatcacggccatgataattaacatgcgcatggagttttacagatgacaagcttctcatcgctcacacgttgtcatatacacgcatttgctttcagatcgtcacagccatgagtgagacttgaagcccgttttacgtatgaagaaatgtcatttgggcctagacatcaacaatgagaaagaggcagttctagtctcagatcgtggggcagagaaagctccttgggaacatgggagaggaacgagttggtgcattgtagaaactgcccgaaggccagcagggctggtgagagattttt

SEQ ID NO: 779 - DNA, 2300 bp, Homo sapien
cactctgcttccttcctcccatcgcaccctaacttaaatcctccctttttccatagctcttgagcacaagaagtagaatactaacttctccaggtctcaaaaaaaaaaaaaaaacaattccactaccacgaaaagggaactatttaagtttcagcttaggaagaaaagaatcagaagaaaagctacatccatggaaaacagaagaactggcctgctaccgaggattggcctgacacaggtgaggtgacactggtctcggaggtggaaaacctgtgtgaccaggtaactctgcctctcagagattcagttgcctcctctgtaaagtgggggtaataatgtggcctcaaataaacccagcaatgatgagaatccctactaatttcatcggacttatattttcagtgcttcccgaacttttcctttttttggagacagaatctcactctgtcatccaagctggagtgcagtggcacaaacatggcctcaagctgggctcaagcaatcctccctcagcctcccaagtagctgggacctcagacgcgtgccacaaggcctggctaatttttttgtagagacagggtttcgccatgttatcaggctggtcttgaactcttaggctcaagcagtccacttgcctcagcctcccaaagtgctaggattacaggtgtgtgccacttctcaaaatttgctaccaaacagagaagagaaagtatacttctagtgtcctaggaggcatggccaaaaccctgcttaaaagtgttagggttttctttgaggactttttatacattttttagaaatgtattctactgcatagtctatgtttattttaatagaaaaatgttttaaattgcttttgatgtgccatgtgctacctgttttacctttgccaggtcatttaacttttcagccagtttctccagctgtgaaatatagataataatgttcccactccacatggcagtcatgagaatttgatgaaatcatacatgtaaaatgcaggcatagcaaatggtccatgaatgtgagctgctgttaagattaattttattctctcctgtttaattatttattttgtccattcctttctctctcatgcattcatccaacaaatatttactgagggctcactgtgagctaaacaatttctgccactccctgaggcttcagagagctgcctcctgtgtatcctgtagcttccagttccttctgctatccggccctaggcccaggaattctggttcatggtgtggacagcacatacatatgtgataaggggaacaccatgtccagtcctgggatacaacaaatgcaggtttagcatagggacagctacagaaaccatttggcttggtttcactttgtcagagggcctcaggatgaaattattgctactacctgcagacgaggttatatatccaatatacagacatgagatgtaagcattcaccgggtaactttatcaggtaattcacatcccatagctagacttccctgcctgtaaaaccctatgaatatgtgtttgcaatcttgtggaaagcataattgttcactatactttcacgtacatgtgaaaagcattattgtgttacatttctgtaaaaatgttttagcatttgtaataatcataagagccttaagagtggctcagggttctttctacctctgagaggccccgggaagcattcaaccatgaagcagtcatggagttgaggagcgcaaactccagtgaggtgtttgcggaataccctgttcagttgctcccagctgagatctagcccagagcctgacagtgacttctatacataccaaccaactgactaaatgagatctagcccagagcctgacagtgacttgtatacataccaaccgactgactaaatgcaggctggttaagcactgggtgcactgtggccccttcgcagtcaagaatgcctttctaaggcctaatcaaccacaactccagagcttcaacaagcagatatactcagccccacccacaggaggtcagagaaagccaacagaccttagcgacatgtcaatcaagggagtggtgggaacccaggcctcctaacatccttcagagtagtttgcccaagtgcttttctggttttgcttttgtttgtggtggttggcattgctgtggtttaatttttcttttaaaaagcagcttccctctctgcctcaggaactcgcaggcctctgaagcatcgcctgcaaagattgaaggctctccctcagctgggtgggagtccggactgaaagcctggaggaaccctttgcaagctgtactcccttat

SEQ ID NO: 780 - DNA, 2300 bp, Homo sapien
gctaatctggttgtttgacttaggatctctcagggccattttttttgtgtgaacgtgcatcagacatctccaggcagggctatggaatgcagctgtttccaatctcatttgatgtgaaaactcaattttttggccaggtgcaatggctcacgcctataatcccagcactctgggaagccaaggcaggaggattgcttgagttcaggagtttgagaccagcctgggcaacattgtgaaaccttgtctctacaaaaagtagaaaaattagccaggcatggtggcatgtgcctgtagtcccaactactcaggaggctgagatgggaggatcacttgagcctggatggttgaggctatgattgtgccactgcactccaacctaggcaacagagcagacccatctcaaaacaaacaaaaaaacaccaaaaaaaaaaaaaaaaacaaccctcaatttttgcaaaagttgctgtgttagaggaatttagagaaaaaataattactatagtccttagagtgaccttgacaaaagaagcagcttgccatcaatattagttaaacgaatgaaagtgaagaacttagtttaagacaagatggggagcaggagcagcacggttggaggcagcaggaaccacagaagcagcaagcaggaagtaggaggggcgatctgctggacatacctcggtgactatgctgggctcaactgctggggagcccttggggtcataatccaaccctgatttcttagtttacatctaacagggattagatgtgctgtacacattttagtccatcttcctgccccatgatgcaggcgctgagtgcctttgatgttaagcttcactgtgcctcactttgcctctgaaaggtcttgagtgggtaatgagagctgattttcttctaactgcacattcctttttttttttttttttgagacggagtcttgctatgctgtccaggctggtctcagactcctggcctcaaccgatcctcccacctctgcctcctgagttagctgggactacgggtgcgcaccactgcgtgactgcgcgtccttgtaggtgggagatgagcccagttattttccctgctgtgtgaccctgcttccttctctgccggctaagggaagagacaccagctgccttccaagttgggctcaggagctttgtcatcatagttgttattggtggtaataatacctgccaatgtaagcctcggtcctatcactgaaactcgctcaacagcttagaccccggctcttccctttgcgtaatagttgtaatcatgtcccatggtctcctaaggcgtcggagacaagcaagactgcgtggaagggtttttacacgaaaaagaaagcattaaacatgtggattgtatgacaacggtagatagggcatagggtgaagaggagtaagaggaggagggagagcgggaggagggagaagagcacgagtggggaggagaggaggggaggggatgggaggggaggggaaggagtgggtaaggggaagagggttgtacccgccagggcgggacccagcctgtgccgtcccacaccttgtgctagctccagctcagctacctgcggccgcctctcctcgggcaatgaggcgccgggaagcccacagcatctgataatatccgggccgccggttgccgggaggtgaaccgaggtaaactcgccgcgcgcggggcgcagtgtacatagtaaccagccctgagtaaacgttcgtcatattcctatgagctgctccggggactgtcctacggggctagcaggaaaaggagatcggctctctccgctcccggtggaaaacgagaaggtcgccagaggtcctgttttcggggtgatctaaagcccccgccccagcgctacagcccaagccccccacaggctggggaccaggaacccggaggagcgggaggagggcgcgcgcggcgagacacccccaccccggcccccgcgcgcccccgccccggtccccgcccgggtccccgccttgtcctgggctctggcgcctgcgccgccgtgcgcgcgccctgccagaacaggaggggacgaggcgggcgcgcggcgccggcagcctagctcagccgggacaccgccctagtcccagcccagggggccgctctcgccggcgtcgagggcgtggcggcgaggctgctgctgcaggcggctcccggctctgccttcggccccgcccgccgcccaccaggctcccagaggccccgcagctcgcgccgtccggctccccgcagccccgtcgggcagcccgggcccgtccgctgccctcccggctcccgtc

SEQ ID NO: 781 - DNA, 2300 bp, Homo sapien
gtgaatatgcagcgcgatgaagagccttttcatgcttctgcctcctgggcttggctggtgtctctgaccctggttatgggagggctggtgcaaggaagagctcccttcccaaaccccttactgtcggtgtgcacaaactcattctgacagggcaggtgtcctgtggcttagccagcctggattaagggacaaagcagaaggtgggcttgagccatagataacagaaggctgaagactaccaaaccccacagagaaggacctaagacatcaaagtcccccttcccagctcctgccacttggcataatcattctcccacttacctggcacttcacaagtgtgatctcatttctaatcctcaccgcaactatactgaagtatcttctcttcattttacagaaagaaacagtctcagaaactactcccatcttgcgaatagtaagcagtggagccaggatttgaacctgagaccatgcactgggggctcttgcccccacaaacaaacctggaaaaacttccagaagcatcctgaagtggccccccccagtgccatttactgtggaactcaggcctcagggccagagcaggctcccactggactcctctccccacattgtggcctctccctgtaaccaggtctgcctcccccacaacagggaagctcttgaagccatggattagcaccatgctccttaaagaccatactcaagtgtctcaagtctttgatgagaaagtagaattacaggattatactctcaatcaatatttgttaataccaccttgcagctgggcatggtggctcatgcctgtaattccagtactttgggaggccaaggtgggaggatcgctagagcccaggagttagaggctgcagtgagccgaaatcccgccactgcactccagctggggcaggagagcaagacccagtctccataaaataaaatgggttgggagcagtggctcatccagcactttgagaggccaaggctggtggatcacttgaggtcaagagttgaagaccatcctggccaacatggtgaaaccctgtccctaccaaaatatatatatacatacacacacaaaaaaattagccgggtgtggtggcatgtgcctgtaatcccagctactcgggaggctaagccaagagaatcgcttgaaccaggaggcagaggttgcagtaagccgagattgtgccaccacactccagcctgggctgcagagtgagatcctgtctcaaagataaataaataaataaatactaccttggagtttcctataaaaatacgtgttttcttcctataaaaatcttagttcttagctgaggagagtttgaaagcatctcacaggcactgagcggcaaggcagtcggcccagatgcaatcactttctggaaatcaattgaaaatagaaccgggaaaccagcctccactcctgatactgttactaacctgctataagactttgtgctcacctttgcttcctgggcctcagcttccctgtttctgagagaagagatcccctctccgagatctcttcccgctttctataaatattgattgagtacccgctgcctgccagggatatcgccctgggctcctgggatacagctggaatctcgacagcctggggaggaaggagcctttgatcctacagcggcaagagttcttgacacttgccggctgccaagcctgtttcctcccggtctaacgttctgtggttgtctgaatctccagctgcccctcaaaaccttcaatcagattagcgccgtgctcctttaaagaccctactcaaagtgcctggagctcacctgggtgtgtttgtgaggccctttccctctctttaccccgcggaggagtccgacctggaagcctcctgctggacttctctactggactgagtgcccgggagtgccagagccagtcccaaaaaggacccaggagcggggacaccacggggaggcgccgccactccagtgtgcgggaccctggcacccccggcgcgttctccggcctccccaggatcacctgcacggggcggggccgggggcgggacgccccgggcgggggcgggatcccagggtggcagcgccgggcggcggcggggaccctggctgggagcgcggcggtgccggcgggaggccgagcggggctcgacagagcaggtaggaggcgcctggtcgccggggttgcccggggctgcggggagcgaggagcggtccggcccaggtgcggtggcttcctgtccacctgccggccgcgctgggcgaaggagggcccgggggtggggacgaggggtccccagt

SEQ ID NO: 782 - DNA, 2300 bp, Homo sapien
tagaactttgcttctcacatattcgtggtcaacccagggagatggaaacccactgcagctgcctgccaggacgtcacaaaactgaaactagctttgcttagagtggctctacctcaaggacacagctccttcctgacttcaggcaggaatggccatagtccacatggtgctacggagcccaggaactggcccaggggataagctgttgataggaaaccactacactagattcccacagagcccagccagttcctcaagcccagctcactatatgcccagctcaccgcacgcgccgcggctggctggcttggcaccatgctgcctccccacagctcatctcggccccagccagcacagagcccagcagggacaaggtgaagaaagccacaggccatgaaggggtcatgggaacccccttcccatttcctcctcccctcccaccaggcattcatggtcctttggtgtctcttggctgcccttctgtcccctctccccacttagaggacatgagtaaaggtattggcctacctagagttcctgccccatcatccactcccacgggctgatgggactcaggattccagggtattatgtgccctcttctatcccggtgctctggctgtgcctgtcactttctactaccaccaccaacacacacacgcacacacacgcacacacgtgcacacacccacatgcacacacatgcacacaagcgcacacacacacacatgcacacatacacacatgcaccataagagggggtgcctataatctgttgctcttggcttctgcttataactgttccatccacctagaccactgtctctagtatccatacccacctcttagaaccagccatctgtaaattcactatttgtgccaagcattgtacttcatatgcattcattcattcattggacaaatatgtattgagacctactgcatgctgggcaccgtgctggtgctggggatacaagggtgaaccaaataggcatcatccctgcccccaagcagctgctagcagacattaatagctcatgttcattgagtgcctactatatacccaccctgtattaaacactttatgagttatctgatttaatctgtcagagaaattgtttcatttaaggagcacatcaaactgaaacatagagaaaagtgtggacttgcccgagactgttggacggccttggctgaggggtaaagcagggactccaaagcgctgccctaaccaccacctttcctttccctgccccactcagatgccacctcctccaaggggccttccagaatcttctcccagactcaagggctgccttggtctctctaatccagccttcatatttgacacagccatctcctcccacaaggatacccagaggactggagccgtctctgcatccttcctcaggagcgctgctggatgagcgacccccgagcccctccaaacgtgctgtggatggaaactacggccctgggctccttctctgccgtgggttttcatctcgctgaatcgcagatcttccggaggggcctctgcatagggcagacccatcaaggcgcccatttaacagatggggcggataaggccccaagtgggtaaaagttcctttatctccaggccgggtcaaggtcgactcccttttcttccagcgagcctcggcccctccgccagatgcttgggtggggaggggacaaggaaacgacctcgtctccaagacccactggagatgatcagcctccctcccaccaccccggaccaacgccctcccgcgcagaccccaggcacttcctccaacagatgtgggggtgagactggggacccctcgtccccacccccgggccctccttcgcccagcgcggccggcaggtggacaggaagccaccgcacctgggccggaccgctcctcgctccccgcagccccgggcaaccccggcgaccaggcgcctcctacctgctctgtcgagccccgctcggcctcccgccggcaccgccgcgctcccagccagggtccccgccgccgcccggcgctgccaccctgggatcccgcccccgcccggggcgtcccgcccccggccccgccccgtgcaggtgatcctggggaggccggagaacgcgccgggggtgccagggtcccgcacactggagtggcggcgcctccccgtggtgtccccgctcctgggtcctttttgggactggctctggcactcccgggcactcagtccagtagagaagtccagcaggaggcttccaggtcggactcctccgcggggtaaagagagggaaagggcctcacaaa

SEQ ID NO: 783 - DNA, 2300 bp, Homo sapien
ggatggttaccaacctacagacaactactatcgccacctattggtgggaggtaacattgatgtggtgataccagctaccccaactgctctgttccatcggtgaaagtttgaattgaacctttcatgcacaaaggtcaaaggtgccttcttttcttttcttttcttttttttacagggactcactctgtcacccaggctggagcgtggtggcatgatcttggctcactgcagcctctgcctcccaggctcaagcaatcctccagcctcagcctcccaagtagctaagactacaggtgcacaccaatatgcccggctaatttttgtatttttgtagagaagaggtttcaccatgttgtccaggctggtctcgaactcctgggctcaagcaatacacccacctcggcctcccaaaatgctgggattataggcataagccaccactccccaccagaaaagtgctcttaatcctgacaggttttcacttagaagaggtagcagatttacctttgtggagagataatttgcaccaataagtaaaaattacaagatgccaatatgaaggtcaattttctttttcttttattttttcttttatttttttttaggagtttaggagcggaggtttaataggcaaaagaaagagaaagaaacagaaaggaaaacagctctgtctttagtgagaaagatgggacttctgagaggaaaagactcaattttcttttccttttaattttttgagatggtatcttgctctgtcacccaggctgaagtgcagtggcttgatcatggctcactgcagcctcaaactcctgggctcaagcgaatctcccacctcagcctcccgagtagctatcattacaggttcacatcaccacacctggccttagggtcaattttctgaccattaaaacatcccaatatctccaggagctgcttgggagtagtgagccacttgtctgtggaggagatcaagtcctgctgaatctcccatccctcaggagattgggagaaatcaatcccaatgttttggtgggtcgagggctttcgtgggttacctgctctgagttacaggtggtcaattgaggagaggtctgccggggttggtagtctctctattgtcttatccagggaggaacttgtaagccaggccagagggagagggggtacccctagggcagagcttcaggggagatattttggacaggtgggagtctgacagcgtttatcttccacattcagctcttagacttggccaagagctagtcagagaaggatggatccgtgaataaatggttatgacctgccatcacttcccaaactcgcctcccacacaggcctttgtaaacaacccaagaaaacaacagtcccttgtagattctgtaaatgtgatcgaggctctgctgaacacagaggctcagagtgtggccaagggcaggagtagttgggtaggagtcagggtcagggtcataggcctggggcaagggccctcgtctgtctgctgaaccctggcctgtgtgggttttttcatcaaagccccacattgatttgggccctggatgctgggccacctgtgctttgtggatttgctgggagggtttttgaagaaggggctgtgaaatcggatagaccctggtttgaatcctggcatggttggcatagttttcatattagccttgtgaagttaaggcagtttcttctctgctccaagcctcagattcctcatcttcagaatggacaaagtgcctgtgccctccttacaggactggtatgaagattaagtgagatctccaacataaagcaccgagtgcggtgccggacacatagcgcattattattattattaaattaacctctgtcagtgaagactggcctccctctccctgtcctctttgtgttttctatggtcatggcccctggtcttagggacgtttgatactgaagtgctcctgctggccctcacttggttaacaactgttgctggggccccacacatgaaaacacccacatgcttggccatggctgtgctaccaccctccctcccaccttctctgatgcagcagggacagagatgcaattgagagccctcagtcccgagatgaggcaagatatgctctgagattcctcactgttctctgagagagaagagctactgggcccatccaaaagacagtctgcacctggaactcggcacccaggaggtcacccctgcaggacctgtagaggagcctgtgtcctggtggccttaggtggctgcattactggtcagtgtgtgtatgtgtgtgcatgtgtgtgcctccatg

SEQ ID NO: 784 - DNA, 2300 bp, Homo sapien
ggggactttaagtttgcccagtagatatccaggagtaggtcagcgtggtggctcatgcctgtaatcccagcagtttgggaggccgaggcgggaggatcagtgaaggttgggagtttgagaccagactggccaacatggcaaaaccccatctctactaaaaatacaataattagccgcgcgtggtggtgcgcacctgtagtcccagctgccagggaggctgaagcaggagaatcgcttgaacccgggaggcagaggttgtagtgagccgagatcgcgccactgcacttcagcctgggcgacagagcgagactcggtctcaaaaaaaaaaaaaaaagatatctggaagtagagcattctagattacatcaaagacgaaatagcgtgcatcaggtaggattttggcttttgttctaacaaaaatgagaggctgctggaaggttttgagaaaagtgtctgattaaggttttctaacagaactaccctgccggctacacttagagtagatgctgagtggccagggtagaagcaggaagaccacttagggggttagcgcagttcagggaagagacgatggtgccctgaaccacgatgacagcagggagggtttcttgatggtttgaaagccgaggtaaaggaaaggagtcaagagtaacacacgcttgcgtcctacaccaaaggaaagccactgcggtcagcgggagccagggaagaccctgggaagggcaggtggtttgtggttttggtggatggagggcgaaggaatcaggatttcaacttggggcacgtgggacggtcaagagagaagtctgagctggagatgcagggatgtctccagcacacagctagtgtctccagccacgagagcaaacacacacatactttcaggtgggctaagtgccatggaaaaaaagagaaaagggaggcgagagtgtgtgtgggggcgggaacgatgcaaaagatggccggaggaggcctttctgagaaagggacgccggctttccctccgagaaagggaagcgagaagggcgagaagcgcttgcgaaaaagctggcagagtggggccgggcgcggtggctcaggcctgaagtccctgcactttgggaggccaggagttcgagaccagcaacagagcgagacccccatctctgctttattagataaaaataacttttttttttgagacagtctcgctctgtcacccaggctggagtgcagtggcgtgatctcggctcactgcaagctccacctcccgggttaatgccattctcctgcctcagcctcccgagtagctgggactacagacgcccgccaccacgcccagctaattttttgtatttttagtagagacggggtttcaccgtgttagccaggatggtctcgatctcctgacctcgtgatccgcccgcctcggcctcccaaagtgctgggattacaggcgtgagccaccgcgcccggccaataattttcaaaataagaaaatctagcagtgcgcatccaacccaaggccctcgcagccagagcagaggcaccagggcggccaggcgaggcgctgcgaggaagctggtgcttctcggagtccgagacccgggctggggagagcccgaggcagagcccgaggaccacggctctctggcgggcgtcctgcccagcggcgtgattaccgggccgccgaaaccgaaacccatctactggacacttccagcttcctccaaaggctgagcaagctgagctacaaggcagatttcatgtctgctgccaggctcgaccgctttacagacaatcctctctcgtctggtaaacgcgtaaaacctacacaatcacaactttcacaacgagagggaagccgcaggcctctcgtcggcgcacgggccgcctcgcccgcgtcactctgaggtaacagcctttctcttcaatcgcttcatggaactccaggacgccaagcctcttccactacgggtcgaaggatgggtcacgtcacattgcgcgaacaaggatggtcacgcgccacaaaaggacttgcagggcggggcgactcgacggccttcccttttgctcccattggctgcggtcgtcaggttcgcctcctccactacctaccggggagtttagggcctgacagaagcccgcccccgctggcgctcgtgcgcacgcgtggcgggctctcggcgcactgagcaggcgcggcctcgtgtcggccggagggggcgggcgcaacgacgcgcgctgcgtcccggcgctcggctttccctccgccggtcccgccctccgtcgcggcggcgcggtgtaccctgggataggga

SEQ ID NO: 785 - DNA, 2300 bp, Homo sapien
ccaggagcctgaagtacagattcaggtttgatgggcaacaagtgctcgcaggacagctcagcaaaccacatgcgctgacagcccagaggcacctcaaagagtttttggtccaatgctccaaaaatgctcattttccagacagggaaactgaggcatgcataaaatattttgtttttgtctgtcttattcactgcttcattccatctcccaaaacaatgcttggcacatagtaggtactcagtaaatatttgtagaatgactgactcatgaatgaatgtggtttttccaaggcacttagcattgcacaggggcaaaggctcatacaatagaaagctggctgtcgggaacaaagcctcttctcctccaacccctcaagtcaaatgggaagactggggggctcagagtaaagagtccacaatcaaggatataccctcacaaggaaaacaggctctcgtaggcacacagcatttaatccatttcccccaatacctagacacacacacacgcatgcctcactttagttacaagggcagcagaacccattcactctgtttaagcataaatggggaagggggaatttactggcaggatccctgtgcaacccaagggcaggaaactcagccagtgctcccaaacgggccagaaacaaacacagaaagttttttttttaaatgacattatgggccgggtgcggtggctcacacctgtaatcccagcactttgggaggccaaggcaggtggatcacgaggtcaggagttcaagaccagcctggccaagatggtgaaacccggtctctaataaaaatacaaaaattaggccgggcgtggtggctcacacctgtaatcccagcactttgggaggccgaggcgggcggatcacaaggtcaggagatcgagaccatcctgtgaatggtgaaaccctctctgtactaaaaatacaagaacttagccgggcatggtggcagtcgcctgtagtcccagctacttgggaggctgaggcgggagaatggcgtgaacccaggaggtggagcttgcactgagccgagattgcgccactgcactccagcctgggcgacagagtgagactccgtctcaaaaaaaaaaaacaacgaaaaaacaaaaattagcttggcgtggtggtgggtgcctgtaatcccagctactcgagaggctgaggcagggaattgcttgaacccaggaggtggaggttgcagtgagccaagatcacgccactgcactccagcctaggtgacagagtgagactctgtctcaaaaaaaaaaaaaaaatgacattacgggttggacacagtggctcacacctataatcccagcactttgggaggccaaggcaggtggatcacttgaggtcaggaattggagaccagcctggccaacattatgaaatcccgtctctactaaaatacaaaaattagctgggcgtggtggcgggcacctgtaatcccagctacttgggaggctgaagcaggagaatcacttgaacccaggaggcggaggttgcagtgagctgagattgcgccactgcactccagcctgggtgatagagcaagactccatctcaaaaaaaaaaaaaagaaagaaaaagaaaaagaaaaaaaaatgacattacccgccatcgccccatccctctggtctgcacatccactttcttcttctcttccctgctcagaactttctcccagcccctggctgtcccaggcccagctttataggtcctcttggttcaaacacccaacagagactgggtgtctggatctcaatcacacattctcagcagagggaacctgactggctggctggtcttgggagccgtgggggtctaggggccaccgcccaccactcagggctgtgggggcagactcagagaggggtgtggttgtggagggtgggaagaaatgaggcctgcccaggcccagcagcttgtctaattcctttcaacccgccccctcccgccgcctccccccgtcttcccagacaagaggtcttgaatctctcccaggatgaggctgttaggctacccacacaaacacgacgtcatccattgtccctcattattcattattgttagagggctcttaagtcatcctttctccttctgaactagccgttgctcatctgctcatgtctgtggctgcagcaattaatgccagtttcagtcagtacaaaccaatcattccctcggtttgcttctttggctgctataaacaattttttttttttttttttttttgagacagggtctcgctttgtcacccaggctggagcgcagtggtttgatctca

SEQ ID NO: 786 - DNA, 2300 bp, Homo sapien
catttggttcctttttggtagggcagagagggtggattctggaaggaaactttgcttcagttcatgattctatgaaaaattaacacggttcagtccagagtctagtcagtcacttcaggattttcatggttcaagcccccatctaaggggagcctcctggaatttatttatttattttcaacgaactagccgggcatagagagagtagaatatgatgccacattctagcctgcaggggtggtagggacagaataagtctcaatgcagttaacagccatactgacggagcagcacatatggtaaggcaagaatcagtaattagccccacccacttctagataatgaaactgaggcttaggggttttaaggacactgccttgtcagatttgaacttaaacagtcagactacagagcacgtgttcctgaccactgggatacactggctctttcacagagcctctgtgagaaaatttgagcaacttactttgggctggcagaggaagaaattgcaagtttcactgtattttcatgcctacgtacaatttgttcaaacattctggtatgtgctaggcaccgaggatatggagacaaacctcccatgtctgggcctcctggaactcactatttatcccaacctgggaagttgggaggagtagctgtgagtcaagtattatggaaagtcagaaaagggcacaagtaattgtttccagaggaggtgaaacttgccccaggcactcaacagcagcaaactaggaccaggtgcctacaatctcaaggcaagcacagctcttgccctcgggggcttaaatcccagggcagtttaactggtttgcggaccacctacttcagaattgtcctggtgcttgctaagatgtggatttctctttttcccagaggatctgggaaacacaaaaagcggggctgcgtgtagcacctaggtgattctgatgcacactcaaatttgacaggtgagccggggggaagaaatgggtgtgggcagtggggaacaagatggacaacgacttggaagtccttagtggcctgcaggcactgagattgcagttcaagatcttgagctttgggagttgttactctccaagggctagctcagagcctgaaacacagtaaggtttcataaatatttgtgaatatgcgcccggcgcggtggctcacgcctgtaatcccagcactttgggaggccgaggcgggcggatcacgaggtcaggagatcgagaccatcctgactaacacggtgaaaccccgtctctactaaaaatacaaaaattagccgggcgcggtggcgggtgcctgtagtcccagctacttgggaggctgaggcaggagaatggcgtgaacccggggcagagtttgcagtgagccgagatcgcgccactgcactccagcctaggcgatagagccagactccgtctcaaaaaaaaaaaaaaaaaaaatatatatatatatatatatatttgtgaatatgctggctgccaagatcgaaacgatcaggagcgtcaaagggaaaaacgaagtcagaggcagaagaaaaaggtgttccccaggcgatgaaaactttccagtaagttgtcttggaaaaggcaactccgcgtaatagagggacttggggaggtagccgctgcgggaaagggcgatgagtcctggggtgctgcagcgggggagtgggtaggaggcgcctcctagcttccccagggcggccgaggcatgaggtcacctggcacagcaacagcagcagctgcggaggacgcgcaggcgctgcggcgggaggcagtgtcaggctcgggcccctggggaattcctcccctcctttcccccccgcaccagtcccctagagaggcgtacccgggtcccgcccgccagagcctgagctttgtaccgcccaccaaggccacgccccctaccagctgtggggcgccgcagaggtcctttcttcggctccggagcggtccctccgccttccccgctcgaggccacgcccccgtgctcctgccgccttattttccccggagagtcccgaggcgccgcgccttggccctgcctacagcccgaggccccgcccccggcgcccctcccagccgtttgaagcggctcgggctgcggctggctcagagtggcgcggggggcgtggggcggtgctgaggagctgaagccgtggccagctcgacgccggacagtccagcgagcagcacggcgggaaccggcagccggagcagtcccggagcagaagcagcagcagcagcagcagccctcgccgttcgcggagcgcagccgagccggccatg

SEQ ID NO: 787 - DNA, 2300 bp, Homo sapien
cgcccaggctggatcactcgctttcctctagttctgctgctcgtgccagcgcgtccgagggcgcgcgggcctgggtccgcaatcgacaactgccaggcgcaggctctcttaaaaggttcagtaagggacctttgccgtccttcctttcgacacggcctgagggcgtgctgtgaggtcccgaggtgggtaggggccagctctcccggtggtcggggtgagtccagagtccttcgcccctggagcgcacgcggggcttgatttcgtttggcaacgacgaaatggcgcgcgctgagcaggggtcagatccatgatgagatcttgcggccaccgtcggatcctaagcttctttgcttccgaggcttggaattcattgttttgcacctgtcgagagccggaggcaacgaaaatctagccccgtctccaaagcggcggggaggctcagcacgcgttcgttccccagagtctagggaggtgtctggggcgataattcggaatgattgtggcttgatctttcccgttgccctcccaactgtagccggcccctaggtctgctcgacagacttaggaggcgggagaggaaggggtgatttgcagtgaagcccaggagaggttgggccacgcggctgggagtgggagcggggacccggagccgggcgggcaggcagtgccttggcgaagctgtccgcggtccctgcggcgcagccggagcgcacgggcccaagaagaagtggggttggacccgcagaggccactttccacccgcatggagaaagaaaattctctcctctgaaagcgagggcccttagctttgcagccactgctgtttttcttttgccaccgacgcgcgtaccgtttcacgatgcaggaccgtggttacatgcgtaaaggaaaaaaagaaaaacgcattttgcaggcctcgtcgtgtttttcaaagagccacaggccgccacaacgaagaacgacgccgcgaggcctgcaagatcctgaaacttgttttgaggggagagcagagaggaaaggggttgttggccccaggctacttagggtccctaggagactcccttccgcctgtccccggtttggcacaggggccaccgaggctgggaccaaagccgcgcagggctgggagcagcaaaggccgccggccgggcgtggacgacgcgcaaaatcccgtgtggggtggaggctcttgggtcagaataatgtgcgggacgagggaggtgagtaacctctttggggcggctcccagtgcggcgtcaccggccctgagaccccgcggcccccagcccggggttgcagaagtcacaggcccgaagcagcaagagctggggaagcccggccgcggccagcggggaggaggagcgaaggggttgcgccccagcgtcagggagctacgacccgagagagggcggcaagggcgccttccgtgggacccggacgttctaagcaaatttctagcatttgccccgggctcccagagctctcgggggccctgggctgtggcactggggcctcctccgcggggtggcgccttccgcccctccccgttgggcggcctccggcaggccccgttcctccccgcgaacgccaccgaggtgcccgcgatgggggctccgccgattggctgtgcgacgcgtcgctccgccagccccgccccgcgggccccgggggtactaaccccgcgcgggcggccgcggccccgccacttgattctggaggatttgttctggggctgcggccgcggagtcggggcggccgcgggcgagcttcggggcgggaggcggcggcagcggcacagccccgcgcgggccccgccgcggcccaggcagccgggacagccacgaggggcggccgcacgcggggccgcgcgccgaggatgcgggactagccgggcaggctgcgggcggccgtcgggccagcgaggcctcgcagcgggcgggccctggcgagtagtggccgggcgccgccccctgcgccctgaggcccgggccccgccgcttctgctttcccgcttctcgcggcagcggcggccgaggaggcgcccgcgccggccgcccccgggggaagccgcgccgtctccgcctgcccggcgccctgacggccgctgttatgcgtattcccgtagacccaagcaccagccgccgcttcacacctccctccccggccttcccctgcggcggcggcggcggcaagatgggcgagaacagcggcgcgctgagcgcgcaggcggccgtggggcccggagggcgcgcccggcccgaggtgcgctcgatggtggacgtgctggcggaccacgcagg

SEQ ID NO: 788 - DNA, 2300 bp, Homo sapien
gctgtgtcattctccaatctatttcacagatggctgactccaaaaggcatcaaattcaaccaggaggtcaaggccccttggcaggtcccccctgtgccattgacccctgagggtcccatgcaggctggccagctgatgagtttacaacacagggtgggggcggggcagcctctccccctgcatgactgtcatagctccttacttgagctgactcataacggagcccaaattgcgtcatggaggctcagccaaggaaaccaatgtttatgatgccctcaccccgtgcctgtccctttgaagaaggtgttatccccattttacagggaagaaaactgaggcccagagaaaggaagtgactttccccagggtctggctgctcagattcagcagagctggggctggaagccaaatctgactctagagctctgtggctgtcaccataaacctgcttcctctctggccaaattagaactcttgtccccaccacccccaccctcagcaccaattgacccaccattcagggacagaagactgaatcttcatgaggcttgagatgaggctgagtgagcgtttccaaggccatcttctgcacatgtgccttgggcagaaacaagtctctttgggaccttggaccagcccatcctcttccagggatgtccccaccccatccttgttggcctacagaggctactgtgagtcagaggctggtgctaggttctagccccaagcctggggtccctgggagaggccaggggttggtggccaggctgcagagggactttctgaagtcttcatttaaagggcatggaagggcactctggtgtcatgcccaaggtcggggctggtgagtcagaggctgaagttccaatcccattccagaataccacatgaccttagacaagctggcgtcaccaccctgggcctcgcagcctggcctgtgaaatgggagagtagagcttgcaagggaaatggtaaaagccgccacctttcccccactctccaccctctctcccatcctgacatgactttggggaacatgcaagtatagggttcaatcgtcttcatgacttttctacttttgagcctctctgggccttgactcctcaaggacatgaagacacaaagggcgcttctggtgaggggaacagcatgagcgaaggcccggaggcagggaagctcccgagcatcatgctggggcagagacccccaaggggatgcgcaggtggcaacaagaggagtaaagggccctgaatgacatgctggggactcagcccccagccctgcagagggccccccagtgcgggcaggccaccaggtttccacaggaaggcccttctcggtgggcaggccgaggccaggcgtgagtgctggcaatgccacttcatgtgtttcccgttgtacttagtcccaactcccataaaagccccagaggtgccacccagccacacatgtggacacctctccctggcaacaatggtggtggacaatggcagggagtcagccgcagcccaggggcgaggtggcatggcagggagctctccggccgctggtggatccgggctctgggcactcggtgaggggcccgcggggctcctagcccgcccaggccaatgctggccttaattaagaaggagtctcccacccaggagccaaaccaccctcctggccacgcccactgcaaccgctttcagttctgtttcttgggccgcgtgctgaggccagcctcacaaataaaagccatcacttttctatttctctctctctctctctttcttttttttttttttcttttccaaaaagagaggcagccacaagatcttctaaaaggccgtgacatcacggcccaggtgaccgcggcccagccaatgagccaaggccgcgagcaggcttctcgcatcctgtgagctgaggttgggttgacactgggaaggcctggtccctcaaccacagaaccacaaggccaggcccttgccgcctccagggccctgcgcgggagctggttggctcctggtgctccccacccccggccgccctcgtacccaccagagcctgggctctgtcaagggtaagcctcattcattcattccccgtggcactggaggcggcccactctgctctgtcagcttcggagctcctccaccctggctgccgaaagccccttcccgccatctaatgatacactctgcatacgcttctgttgagaatttgtggctagacattcctgtgggaccgggaatccaaattcttgggtacaaacagaaacttactttccttggggatttttttctctctctcactca

SEQ ID NO: 789 - DNA, 2300 bp, Homo sapien
gtgttggtggaatggaaacagctcctgggctgggaagcaggggcttgggttccactgactcattgggtgaacttggatgagtctctgctcctctgggggccgcagtttcggcttctgtataagggggggtcttcccagctgtgtcattctccaatctatttcacagatggctgactccaaaaggcatcaaattcaaccaggaggtcaaggccccttggcaggtcccccctgtgccattgacccctgagggtcccatgcaggctggccagctgatgagtttacaacacagggtgggggcggggcagcctctccccctgcatgactgtcatagctccttacttgagctgactcataacggagcccaaattgcgtcatggaggctcagccaaggaaaccaatgtttatgatgccctcaccccgtgcctgtccctttgaagaaggtgttatccccattttacagggaagaaaactgaggcccagagaaaggaagtgactttccccagggtctggctgctcagattcagcagagctggggctggaagccaaatctgactctagagctctgtggctgtcaccataaacctgcttcctctctggccaaattagaactcttgtccccaccacccccaccctcagcaccaattgacccaccattcagggacagaagactgaatcttcatgaggcttgagatgaggctgagtgagcgtttccaaggccatcttctgcacatgtgccttgggcagaaacaagtctctttgggaccttggaccagcccatcctcttccagggatgtccccaccccatccttgttggcctacagaggctactgtgagtcagaggctggtgctaggttctagccccaagcctggggtccctgggagaggccaggggttggtggccaggctgcagagggactttctgaagtcttcatttaaagggcatggaagggcactctggtgtcatgcccaaggtcggggctggtgagtcagaggctgaagttccaatcccattccagaataccacatgaccttagacaagctggcgtcaccaccctgggcctcgcagcctggcctgtgaaatgggagagtagagcttgcaagggaaatggtaaaagccgccacctttcccccactctccaccctctctcccatcctgacatgactttggggaacatgcaagtatagggttcaatcgtcttcatgacttttctacttttgagcctctctgggccttgactcctcaaggacatgaagacacaaagggcgcttctggtgaggggaacagcatgagcgaaggcccggaggcagggaagctcccgagcatcatgctggggcagagacccccaaggggatgcgcaggtggcaacaagaggagtaaagggccctgaatgacatgctggggactcagcccccagccctgcagagggccccccagtgcgggcaggccaccaggtttccacaggaaggcccttctcggtgggcaggccgaggccaggcgtgagtgctggcaatgccacttcatgtgtttcccgttgtacttagtcccaactcccataaaagccccagaggtgccacccagccacacatgtggacacctctccctggcaacaatggtggtggacaatggcagggagtcagccgcagcccaggggcgaggtggcatggcagggagctctccggccgctggtggatccgggctctgggcactcggtgaggggcccgcggggctcctagcccgcccaggccaatgctggccttaattaagaaggagtctcccacccaggagccaaaccaccctcctggccacgcccactgcaaccgctttcagttctgtttcttgggccgcgtgctgaggccagcctcacaaataaaagccatcacttttctatttctctctctctctctctttcttttttttttttttcttttccaaaaagagaggcagccacaagatcttctaaaaggccgtgacatcacggcccaggtgaccgcggcccagccaatgagccaaggccgcgagcaggcttctcgcatcctgtgagctgaggttgggttgacactgggaaggcctggtccctcaaccacagaaccacaaggccaggcccttgccgcctccagggccctgcgcgggagctggttggctcctggtgctccccacccccggccgccctcgtacccaccagagcctgggctctgtcaagggtaagcctcattcattcattccccgtggcactggaggcggcccactctgctctgtcagcttcggagctcctccaccctggctgccgaaagccccttcc

SEQ ID NO: 790 - DNA, 2300 bp, Homo sapien
gtgcagtggcgcaatctcggctcactgcaagctctgcctgccggattcccgccattctcctgcctcagcctcctgagtagctgggactacaggcgctcgccaccacgcccggctaattttttgtatttttagtagagatggggtttcaccgtgttagccaggatggtcttgatctcctgacctcgtgatctgcccgcctcggcctcccaaagtactgagattacaggcatgagccactgcacctggcctactttttcatttctgtatctaactagtagttgttagtgcagaaaaaaataattttcatatattcctcttatatccagcaccttacttatcttagtaactttagcactgttagtaattctggcattgcctctctgctgagcatgtaagagtaaacaagatgggtggactctgctgttctccagtaataacgctgatgagaaaaatagaaaatcaacagacaaaaataaaacttatgcaattggagagaattaaaatagtgtcaaatgacagtactaaaagtgagacagggtagtcagggaagacctgcttctatttttaaaaatttatttttatggccaggcacagtggctcatgcctgtaatcccggcactttgggaggctgaggtgggcagatcatgaggtcaggagttcgagaccagcctggccaacatggtgaaaccctatctctactaaaaatacaaaaattagctgggcatggtggcaggcacccgtaatcccagctactcgggaagctgaggcaggagaatcgtctgaacccgggagccggacgttgcagtaagccgagatcggtgccactgcactccagcctgggtgatagtgcaagactctgtctcaaaacaaaaaaacaaaaaaaaattacttttattttttaatttagagactgattcttactttgttgtccaggctggtcttgaactcctgggctcaagcaatcctcccgcctccgccccgcaatgtgctgggattgcagccatgaaccaccacaccaggccaagggcaagacctgcttcttggagaaagtgacaacaccttaagctctaaatggaaagaactttccactcatgggaatgaatggcactgcaggtttttcctgcttactgcagacaaaaccaattcactgaaaagtgctactgcagtatacagttgtattaacctgaggctggcctcagggaagaagggttaccactcaagtaagttttcctgaagggtcagctcagaggttagggtatttcatagtttggtgtgggcagggcactagggaatggatgctgctgattggttggagatgcaatcacaggggtgtggactacactcctcaacagctgagtccgcctcttgggggaggagtgggacagaagaagcggttgggtcatgggtcacgagtctgggtggggtcagttagttgccagaatgcgaaagtctgaaaaatgcctcaaaagaccaatcttaggtgctacgataacgttatctacaggaataattggggaagttacacatccgatgtcctccgaaacaatggctggttatcgtttactacattttagcagaattctcccctcataatcctaacctcccggtctttcattagttttataaaggcagtttcagcccccaaacaaggaggggccctgtttaaggaagggactatgatcatccttgcttaaaagttaaactataaattctcccatggttagcttggtttatgcccaggaatgagcgaagacagccggcctgcgaggctagaagcaagatggagtgagccatgttagatttctctcactgtctttgcaaaggcggtttccaggaacagcgtgcagaatagggggctatcaggctccttttggtcatttcttcctagccgtccgattctgagctcttcccaacccttttcttggcgacttacctcccgctgtcctggcccacgctacttttcgcggctgcgcaagaccctacgcaatccaaaatatttcatagctaaaagggtcccaacttccggagacctcccggaaggggcggggcttatggtagcccattcgtacgtatcggcccgtttgtctgaaggttgacggaagtgctctatcttgttgccggaagtgggaagagagaaaggttgtgatggcggctatagctgcatccgaggtgagttccacccaccgtacaccgggggttttgttggtgagggttccggggagcggcctggagagaggtggaggcgaagtctagtttcgcttcagggaggctcagacactgtggggtcaagtcggcggtgg

SEQ ID NO: 791 - DNA, 2300 bp, Homo sapien
caggcagatcacttgaggtcaggagttcaagaccagcctggccaacatggtgaaaacccatctctactaaaaatacaaaaaaaattagctgggcatgatggtgcacgtctgtaaacccagatgctcgggagactgaggcacaagaattgtgtgaacccagtacgcagaggttgcagtgagcccaagatcacaccactgcattccagcctgggcgccaaagcgagactgtcttaaaaaaaaaaaattaggatttttctggtcaccattttttaggcacacattgactgatactttgaactgtctacggagacttgttccatcctttcctattcataaccaagagctcaaaactgtatcgtaagtatactttaactttagttccccaacacatcatttttatacttgtcaaatgtgaaactcgtgttgttattattattatttgtttccagacggagttttgctcctgttgcccaggttgggttgcaatgttgcaatctcagctcactgcaacctccgcctctcaggttcaagcaattctcctgcctcagcctcccgagtagctgggattacaggcgcccgccaccatgtcaagctaatttttgcatttttagtagagatggggttttgccatgttggccaggctgatctcgaactcctgatcttaggtgatcttcccgcttcggcctcccaaagtgctggaattacaagcgtgagccaccgcgactggccttgtgttatttttctgtccactcacacagctttatgagaactttcggcaaaggtttctgatggatgggcattgtatcttcactgtcttgagatttagagaagaaactgtttaagaactacttccatcatgatgcatcctcaggagatgtggatgaactgcggagatgtggggtgaagatgaacaagagatgagtgagtttgtgtctccctctaaagaaagtggcttttgtcaaaatgtacttgtaaagaagtgtataggctgggcaaagtggctcacgcctgtaatcccaaaacttcaggaggctgaggcggaagaatcgcttgagcccaggagttggagaccagcctgggcaacacagttagatcccgtgggtaaaaaagtgcaaaaattagcatggtggtgcatgcctgtagttccagctcttcgggagcctgggctgcagtgagccgtgatggccccaccacactccagcctgggcgagtgagaccctgtctcaaaaaaaaaaaaaaaaaaaaggcaattaacccacaattttcaaggcaattgttatgctttattacaagaagtgtttgaaatgcatcccatttgtagatccctagaagtaaaatagtcacctttgtttacactcacaccaaacacagtttttggaagagatatcgcagacttcattattatccccagattaaaggtcagttttgagtctttttattttgtctcgaccttattaccttcctagccaaaacatggaagtaaaacatcttttctacgttaatactgcatttccaggggtcttggggtgttccgggggagggtgcggtcccctctctgtcatggcggggtgtggacgcggtcgccttctcctggcgccgcggtacctaggacaggaggaagaggccaggaagggtccagggaggctcaggccgggtctgcgacttgccggtgggtggcggcaacgaccctgtgggcaccagcccgtcagacggccccagctccgagcccggctgcgagccctctccagcctgcagccgctcctctcccggccctactccccgcccggcactgacgtccagccccgcccgtgcagtgaggccagagcctggtgtagccccacgcggggccgttccatcttcgaagttttctggtgactgggtcggtcccgcaattatctcagatcaggggggaagccaagggcaacgggacaccctgatgtatcaaacacctccccctggagccccatcgcgcatgcgcaccctggaggcaagagctcgaggcacagggcgcggcttggggagggaggaggcagggcggtggttgggcaagagaagagccgcgcccaccacggaacatctctgcgcatgcgccgggggccagcttctggtacttttgacgcgtctgctaacgtagtccctcagtgcgcatccggacgtaggaggtggaggttgtggaattcgccgttcgaaagcagggactaaaagccccacttcgtcttacgttccgaaaggaaggcgtctgttgagcctttctctcagtcgtgagggaggcgtcgacggcgtgcggtaagttttctgct

SEQ ID NO: 792 - DNA, 2300 bp, Homo sapien
ctgagctccgcctcctgtcagatcagcagcggcattagattctcataggggcacaaaccctattgggaaccgcgcatgagagggatctaggttgcgtgctccttaggagaatctaactaatgcctgatgatctgaggtggaacagtttcatccccaaaccatccctccaacctcaccccggtccatggaaaaattgtcttttacaaaacccgtccctggtgccaaaaagcttggggacccctgatctaggctacagttaagtggtcaaacacccaggtcctgaagttaggctgcctgggtttaaatcccagctctactgcttactagccctgtgaccttgagcaagtcacttagtttttctgtgcctcagttcactcatttgtaataaatcctaatagtacccatcccagtgtcatgaactaagttcatatatgtaaagtacttagaatggtgcctagcaagtacttaataacagttagctctgaaaatgtataaagcaaaattaaccaatgttttagtggtttgcagccaacttttttctatgcgtgtgctaacatattattttataagagtgggaatatattgtacatgctgttatataacttgctttttcactaaacagtctatcctctgtgtcagttttgataaaagcgttttcctcttgcttttcctgcatatgttcagaaccatcatattggtagcaagtttcatgtcctgtagttttcttaaccaaccccctgctagtggacatttaggttagtctcagttttttccttctgtaaataaagctgcactgagcaagaagtgactgatgccaagtgactagatgaccttaggtatgacctctctgggtcttggtttcttggtctaaaaacaaaatgacaggattcgactgggtgattaaaatctcctctgatctacataggaattgttttcaagacatttctgcattcctctagtgacagggtgctcactacctcatgagtatttcagtggacaactgtaatggtcaataaagtatccactttccacctccctgcagctcctggccctggctttattctctggggctccacacattcagtttacactcagtggccagtggctgggaccattgtagaaaataaggaaactccaattccttccttcttttcttcctctttcatctcttcctccctctctacatccctctctctcttccttccttcctcgacacttaccatgtaccagaccttctgccaggcacatggatgggagcacaggggaagttggctgcagggttagaactaagtcccaagccccctaaagctcatgccaggggactggactgtccagtactgagggatggggatgctgaggctggtggccttcctcaaatgcactgtagtgccccaggcagagtcctgggctgccctgtgaggaggtgaccagaggtagagcaacttcaccctaaggctggatcaggatcccctccaggtttttactagagccaaacccacatctcctttctcttctgccacccccccttaaaatgcttagaaacacatagatttaaatacaaattcaaatgtaagtaatttcaactgtgtaactatgaggagtcagttctacgtgggtcctatctgtatcctccccagggctcagctccattctttgctttcattcattctcattcaatacattgttgttaagagctcactgggtgccctctctgtcatgtagtaaggttttaaaaagaaagcctcttctgagcttcagtttccttattcataaaataggagtattgatccattccttgcttttcttacaaggatatgctgaagatgactgaagtacagagtaaagaaggattatgtttgggtgtcaaaggaatagaatgccctctttcaaactgagcacagcaggaacctgtaacaggaacacagcaacttgttgaatgaatgacaatattggaaaacatacatttcctcccctccccatcatagtccctctgcttccgtgttaactccatagagaggccagcacaaccagccttgcagcctgagataaggcctttggcgggtgtctcccctatcgctccctcaagccctcaagtaggtgttggagagaggggtgatgcctggtgctggtggaacccctgcacagagacggacacaggatgagctctaagtacccgcggtctgtccggcgctgcctgcccctctgggccctaacactggaagcagctctcattctcctcttctatttttttacccactatgacgcttccttagaggatcaaaaggggctcgtggcatcct

SEQ ID NO: 793 - DNA, 2300 bp, Homo sapien
gagctcaagaccagcctggccaatatggtgaaactccatctctactaaaaatacaaaaattaactgggcatggtggcatgcccctaatcccagctactcgggagggtgaggcacaagaattgcttgaatccaggaggcggaggttgcagtgagccgagatcacaccaccgcactccagcctgggtgattgatggagcaagactctgtctcaaagaaaaaaaaaaaaagaaatgtacactgaagtatttaggggttaaagtcacatacacagatgaagacaaccaaaaattaataaatacaaacttccaggctgggcgcggtggctcacacctctaatcccagcactttgggaggccaaggcgggtggatcacctgaggtcaggagtttgagaccagcctggccaacatggcaaaactccgtctctactaaaaatacaaaagtaagccaggcgtggtggtgtgtgcctgtaatctcagctactcgggaagctgagacaggagaatcacttgaacctggaaggcagaagttgcagtgagccaagattgcaacattgcaatccagcctggatgacaacagcgaaactccatctcaaaaaaaaaaaaaaaaaaaaaaaaaaaaatttcccatattccctcccagaccattgttcttttttccaccccaaacatccccagctcccttgaagaagatgccatcacactctccctttcttgctgtggtctcagcctcccggccgcctcttggtcactgatgatgtcagcccctgcccttcagcctttctctccatcattcttccacaaatgatcttagtccacccaactccttccctctcggctccttgaccgctcgtctctttccctgcgttacacttctgccacccactgtcaagccttagaccttgtcattaccagtaactgttgcctccgaagcctcagtttcaagcatcgcacctgataaccaccaccacctcctatctgtccggctcacttccttaaattgcctcccttcagcagctccaatcaacgcagcctgagaacaatggtgatgatgaaaataacagcactgccgcaacacttaccccatgccaggcactgtcctaaatgctttagaacagtgttcaaaattgaacaagtgttcggtcacttgttcaatcctcacaacagccctaggaagtagccttattcttatccccattctatagatagggaaactgaggcacagagaggtcaacgaaggggcccaaatggattcagctagtgtgggttgagctgagatgtgtacccaggctgccaggctgggctccccattttcactctctctcctttcttaaccagctcagattttgtgggctactgttatacttcctcctttgcaaacagccccatctctggtctcccctgggctttgggctcactctgggcagcactccaggctgggcaagttcaactctgcttcttccacacctgcctggagcagctgcacacagccctggtcactgatgcactttccaccaactacaagccctagggaccctggtgccagcctgcagtcccgctgcacccctgcagccctctcactctcttccactcccacagatgaccataccacactttccctctccgcaaaccccatccctccttcccaccctcacatgaggctgatgacggtgcctcttgtttctctgagaaaatacaaggaattagtaaggcattttctcctctccctgcaggagactgaacctgtggcacccgccaccaaatctgccggcctattcacagtccctgccatttctctcgttaagatgaactctccgcctcaggaacgagatggcggttccctggaggctgagtgccgtttgcggtgcccaaggaggccgagctctgttgctgcgaactccagtggtcagacctgctcatatctcagcatttcttcaggaccgacctatcccagaatggtgtggagtgcagcacatacacttgtcaccgagccaccattctggctccaaggctgcatctctccactggactagcgagagggttgtcagtgttttgctcccgggtctgcttccggctgcttatttgaatccttgctctgcgacggactattccctggctgcagccctcactcttcatggtcactggggccttggacaagttgttactgattatgttcatggggatgcctcgcagaaagctgccaaggcagggcttttggcattttcagctttaacctttgctgggctttgctatttcaactatcacgatgtgggcatctgcaaagctgttgccatgctgtggaa

SEQ ID NO: 794 - DNA, 2300 bp, Homo sapien
ggcccacccctctctgggcctcagggatgggttgtgcttagcatgtccctgcattagcttattaaatccagtagcatcccaacagtcctgtgaggggagatagtatcattatctccatttacaatggggcgactgaggctgagaaaggttaagccacatgcccagctagtacgcagtgggagcacgtccacagcaaagctctgcatcacgacctgaaccacagtctcaattggcttgggcctatttgacctgctctgtgtttgtgggatcacaaaagatttcgtgtctttggtctatacctaggtggccctatttggaaagaagaggtggcctggagaggtgataaatccatccaaggtaggggctggacagaatttctgaataaatcagccaacaaatattcaccgaagcctactgagcacctggccccgagtgcacacgccccagctaaggactctgcacacatttcttcctgagttggaggggagtgttaaggggatggggggtaagcccagtgacccacatgccattgccggctccgacggtatcaagcaccagcagcacaatgtagatgatctctccaagcagacccagcaagctgaagttgtagcccatgatggagctgtggggaatccccagcactcggttacaacacccctgtggacaagtgttattataagcagattggcaggtgagacccatattccctacccacccctttcacacacccttggtatccggggccaccaaagggggatgggcactaaggctcacctcaaagaagcccttctcagacttgaatgtgcactcacatcatcggggagtttgttgaaatgaagagctggctttagtggatgtggggtggggtctaacagcatttctaacaaggtcccaggtgatgccaatgctgctggtctacggaccacactatgagtagcaagggtctagtgtagacactgttcacaatttcagctgataattccttgtggtgggggctgccctgtgtactgtaggatgttaagcagcatccctggtctctccccacgagctgccagtagcagccctcaccccactgtgtcaaccaagaacgcctccagacattgtaagatgtcccctggggggtgaccaagacccactggtctagcccaaatttaagcaccatcccaaagacaacacagctggttagaaagaaagcatgaggccacaccttcagatccctactcagtaatccttcctccccatcactcagcctcccacacagccgtgagccagcagatgtggacacatatgcaaattcaatcaggctggttccttccttagaatccctattagtcttcagaataaaaatccaggttgggcacggtggctcatgcctgtaatcccagcactttgggaggccgacatgggtggatcacctgaagtcgggagttcaagaccagcagggccaacatggtgaaaccccgtctctactaaaaacacaaaaaattagctgggcgtggtggtgggcgcctgtagacccagctactcaggaggctgaggcaggagaatggtgtgaacccgggaggcggagcttgcagtaagctgagatggcgccactgcactccagcctgggcaaaagagcgagacaccgtctcaacaacaacaacaacaacaacaacaacaacaacaaaatacatacacacacgaaaattagccaggcatggtggtgggcacctgtaatcccagctactcaggaggctgaggtaggagaatcacttgaacccaggaggtggaggttgcagtgagctgagattgcaccactgcactccagcctgggtgacagaatgagactctgtctcaataaataaataaataaataaataaataaataaataaatatccagactcctcaactagcccaggaagtgtgcctgagcacctcccatctttcagggatctgggtccaccatgctcctgggtggaccctatgcctttagaatgtctgtttcctggttgggccacacactcttcttaacaataagctttcatacacactgtgccttctgcctggaatacattccccatgtctctgcctggctaatactacttctctgtcaacacttggctgtcaaccgtttcctctgctccaggaagcatttccagacccatcccaggctagctcagatgtgccctcttgctgttctcacactgtattgtgtgtatccatttcgctcactaaactatagcttgaaaagcaagatgagtgttaaaacgtatgtgttgaatgaaggaatgatgaatgaatgaatatatgaatgaat

SEQ ID NO: 795 - DNA, 2300 bp, Homo sapien
ctgacacagccaaggggagactaaggagacataacaattaactgtaatgtggtattctggaggggatcctggaacagaaaaagacattaggcaaaaaactaaagaaatctgaataaaatgtggatgtcagttaataataatgtatcatattagtccagtaattgtaacaaatataccacaataatgaaagccattaattatagggaaaatggaggggttaatatgggtggctggcttttgctatttctagcagctccattttatctacaaaagacaaacattcattaagtcccaaaaaggtaaagaatgacaaattaagcatgtatcttattagtaagagtaatataaagatgctcactcatatttataaatatttgacaatcatgttaaggccagaaaagagaaaaaagggtaggggcaaaaaacgcaaagagaaaggagttagtatcttttctcccgcactcattagctattaaaagaggatgtttgtttaaagctgctcagagctggtaaactaatgttaagtcactaacgggaatttaaaaggtttcattaagaactgcctgcactagattcctccaccctgagacattaaacaatcacgataaacctcctgagtggtaagaacgtgtccatttaaaaacaggctatagattgtcatgcagttttatctactaatcggctaatgcaccgccaaaaacaaacaaaaaaacccaaagggatgaaagtttcatccatcaaaggaaacaacagtcaccttggttcccatcccactcatatactgccgccgtacatgtcaatcagatgaacctgtgcgtatctcttaacgacaattgacccacctttttaactgaagtgaaggggggttctgctccgcgaccacttcctggatctctcccttcaccctctgtgttctttcgggtgcaccatcgggtcaaagccgcagcaacgccgtctctgtgtgatcgcatgtgcccttctgcacacgaccttcccccgagagtgaccagctaccggacaggcaccaaggagggctaccgagcacctcccggaccggcggctgcaggatcgcgagcgcctccgctagggagaccgcacgttgcgcctgtgcttcctgcggtggcgccttctgcaaggagacctcgaccctgctccctctccggggctggatctgactccttgacggtgattccagacgcgagacccaaactgacggcttctagaagaggggcgagcccggccgcaagtctttcacgtagctaagtcatcgttgcttccggcttcttaccgttctcccctttgtaaacggttacctcccgaaaacccaggctctcctccaacagtggttctcaagcgaggcgatcttccccgggaggggatatttggcaaagtctgggggcatttttggttcactggggctgctacttgcatccactgggtagaggcgggggatgcagctacacaacctgcgaagcacgggacagcaccctccccaacccagacagaattagccggcccaaaacctcagtagtgcccaggctgagaaaccctgccttaaacaaacaacaaagaaaggccaagtcccataagtgggtcaccgcgccgagactggggtccacgggacaccccagccacgccaagccgggaagtccccgcctcctggagctgaacccgcccctctcccagaggtggagctgcggggggcgggaacaggcacggagaaaataaacaagactaaaaagtcctgagtagcgctgtgtggccgcaaacctgaacccaccttttgcaccacgcgggacccggcactcttcctgccacccacccctgagagggctgcgcggccgaccccagtactagaaaacactcgtcacctcactcaagacgggtacgaaggccaacggacgccttcctttagaacgctcagcacacagagcaacttctcacgcctactctcaaatggcgtactccaaactagcactcccgacgtccagctgtgaacccagagcggcggaaagcccctgaacccagcgcccgggcatgcgcagacgcgttgttgtggtgggcgtggctccctccggacccggcgccccgccctccgccccgtgtccgcatgcgcgactgagccgggtggatggtactgctgcatccgggtgtctggaggctgtggccgttttgttttcttggctaaaatcgggggagtgaggcgggccggcgcggcgcgacaccgggctccggaaccactgcacgacggggctggacgtaagtgtcgggcggggagtgggggtaagagagtagcggcc

SEQ ID NO: 796 - DNA, 2300 bp, Homo sapien
tatcttttttaatgtaaaaaatggtttgggggccgggcgtggtggttcatgcccgtaatcctaccaatttgggaggctgaggtgggtgggtcacctgaggtcaggagtttgagaccagcctggccaacatggcaaaccccatctctactaaaaatacaaaaattagccgggggtggtggcgcatgtctgtaatcgcagctacttgggaggctgaggcaggagaatcgcttgaacctgggagtcgaaagttgcagtgagccgagatcgtgccactgcactccagcctgggcgacagagcaagactctgtctcaaaaataataataaataaatagaaataaatggtttggatatatttaagcagtattaacaaaggtgggtctccaaatattgaaaaaattttaactactggttgacctcctcctgaaaatctgtcacatcctattatttctaagtaggtattaaattagtttaggtggtacttttaataccaagtatatgattactaatccacaggagctcttttgtatcattttgattccaaacttattaaatgaatttgatatttacagtccaggagcactaacattagtagagagacaagtgataaactttggctctgagtggaattacagattcaaatgaaaaatatttctctaatttacatattttatcacagaacgtgtgtttcttcacacctaaatcaagaaattaaacactgcactgcagttcttacctctacccacatcatttcctttcacttcattcattatttttctttctgcaagcctgccttttggtgtcatttctatataaagaacatccactttaatatccctatctctgatcctaacgggtgtttccagccaaaagcaagcacagaatcgtggttaatagtaattcagattacaaaaatccaactgctatttaaatatagccgacccaagctgtctttacaaattatataaaacattcctgtaagccgagcagtagagacctgagatacagccatgttatctctatttcagagtatgaaaaagcctgaaatacatataacttgcgaataacaacacccaaactcctacagcgaacttgacttccttaagatactttgtagccagcaattatggttgtccaaaaatatgacaccctacaatagagcaacgtctcccatttttaacttctcttttaaaaattaaatattaaaatatatgattacagccaatgctaagatgcctttgggacaagttcaatttaggaaattcactcatttgattcttccccgggaagaactgcaattcaataagtgttattttcggttcatcccaatggccccaccccgaatccatttttctttgcacgacgactggtacgctcaagccagaccccgccctccaaactctgggacttttaggtctcgagggacgccgctggaagatgggggagccacctttagccggggcacccctcgctgagggagctggccgggtcacgctcctttctcggggcttcggcttgtccagctgtgaagtgggggatcgggggattttccagggatcctggggtgtcccgggggagggcgcggtcccctctccgtcttggcggggtctggacgccgtcgccttctcctggcgccgccggacccaggagaggagaggtccgcggcggctcagcccgggtctgcggcttccgggagggtggcggcaacgagcctgtgctgtgggcaccagcccgtcagacggccccggctccgaggcctctccagcctgcggccgctactctcttacccccactccccgcccgacacttacgtccagccccgtcgtgcagtggttccggagcccggtgtcgcgccgcgccggcccgcctcactcccccgattttagccaagaaaacaaaacggccacagcctccagacacccggatgcagcagtaccatccacccggctcagtcgcgcatgcggacacggggcggagggcggggcgccgggtccggagggagccacgcccaccacaacaacgcgtctgcgcatgcccgggcgctgggttcaggggctttccgccgctctgggttcacagctggacgtcgggagtgctagtttggagtacgccatttgagagtaggcgtgagaagttgctctgtgtgctgagcgttctaaaggaaggcgtccgttggccttcgtacccgtcttgagtgaggtgacgagtgttttctagtactggggtcggccgcgcagccctctcaggggtgggtggcaggaagagtgccgggtcccgcgtggtgcaaaaggtgggttcaggt

SEQ ID NO: 797 - DNA, 2300 bp, Homo sapien
agtgttctcttgcaagctcaagttttagaaccactgacctatagccaaaaaagaaaaagccaatcagtggtttgctggtagaggattaacttaacaactggctttccatgaaaataaagccttgattggtagcacttgcaatttctatggtacaaacgcttcccacatgactgagttcaagctatcaaggagacgtcactgcacatggacttgggaagagatgagaacaatcagcccactgagcctatgggaactggctccagcacatccctgcaagtcaactctcatcagggtgagtgagttgaggaccaagaagcagttatcctcttgcctttgcaggacccaggcaaagggaagggcatagtgacagtgatgatctctcttccggaagtctttggtttgctgagagtaaaaggcgtgggcttcaccagtggtgaagccagtcatgcagccttagtcctggtactcaaactccctaaatctcagttttctatctgtaaaatgggaaaataagtcctatgtcacagggttgctgtgcagatttagcaatagaacatagccccgttctttatgatgactgatgctgcatcagtatggggacatctctatgtaatggaaagatggagagaggattaagtgcaaagtcacagcacttaatgggaactgtggattagctacttggtggcattgggcaagtcagttgactttgcattaattccacaaacaatatttcccaatttcctattcagatgagcatatgtgactgagtcagatgctgtgatcagagccaggatggagcatttcccacaaactgtgggatttttaagtgatgggaaggcacactgaaatggcattgaatcatgcagttgcagatactctttttcaattctcagtcctttgattacatcagggagaaaagaaagtccccacttgggctgagaatctctgcacccttctagctcttgttaaccactcttttgaatagcagagaaaacctcagactgccatatctgggagagattttagcaacattttgttttcattgtatctctttttacagctacctcccatttcccttctatttcaagctagtaacacagttttcttttaaattcatttatttaaatgtaaaaataagtctatttggagaaaaaaaatttttaatagcatctctggaatgccagtatggctaaattcatgaatgttgtcctcaaatgctgaaatctgggaagcatctggccaagctttgtggacaggccttcctagtttgaatcccaagagccactcattccgagccacaaaacattggaattcttggttcacttccctaacctgaacttgtcctctgtgaaatagggacattaatagctcactcacagggctgctgtgaggacatgtgttgagctgagggtctggccaggggagaccctgtgcagggagactgttatcatggtgatggatttctgcttcattcatttctttttccagacagcatcatatagaatgagttgtggggtggcagtcagcaggtttgggtttatcctctattctgccacttattacttaaaaaaaaaaacccaacttatatagtataagctatatccagaaaagtgcaaatatcatacaagtaccatttgatgaatcttctgatatccccacataaccaacacccagaacctcttcttgtctcattccaggataaccactaacctgacttctaacagcatcagtcagttttgtctgtttttgtacattatatatgtgatggtttgaatgtgtcccccaaatttcatgtgctagaaacttaatccttcaattcatatgttgatgctatttggaggaagggcctttgggaagtaattaggattagataaggtcatggggtgaggtatgatggcactggtgacttataagaagagaaagagaaatctgagctggcatgctcttgccctctcaccgtgtgatgacttctccatgtcatgatgcagcaagaaggccctcaccagatggtggcaccatgcttttggacttcccagcctctagaactgtgagctaaatcaatttattttctttataatcacccagtttgatattttgtcatagcaacagaatatggacaaagaaagaaaattaatgcaagaagtagagtttttactgtaacagattcctgaaaatgtggaagtggctttggaactgggtgatgggaataggttggaagagttttgaggagcaggctagaaaaagcctgtattgtcaagaatggagcattaggccaggcacggtggctcagacttataatc

SEQ ID NO: 798 - DNA, 2300 bp, Homo sapien
cagcgagcactaccgcctgagctccgcctcctgtcagatcagcagcggcattagattctcacaggggcacaaaccctattgggaaccgcgcatgagagggatctaggttgcgtgctccttaggagaatctaactaatgcctgatgatctgaggtggaacagtttcatccccacaccatccctccaacctcaccccggtccatggaaaaattgtcttctacaaaacccgtccctggtgccaaataggttggggacccctgatctaggctacagttaagtggtcaaacacccaggtcctgaagttaggctgcctgggtttaaatcccagctctactgcttactagccctgtgaccttgagcaagtcacttagtttttctgtgcctcagtttactcatttgtaataaaagcttaatagtacccatcccagtgtcatgaactaagttcatatatgtaaagtgcttagaatggtgcctagcaagtacttagtaacagttagctctgaaaatgtataaagcaaaattaaccaatgttttagtggtttgcagccaacttttttctatgcgtgtgctaacatattattttataagagtgggaatatattgtacatgctgttatataacttgctttttcactaaacagtctatcctctgtgtcagttttgataaaagcgttttcctcttgcttttcctgcatatgttcagaaccatcatattggtagcaagtttcatgtcctgcagttttcttaaccaaccccctgctagcggacatttaggttagtctcagttttttccttctgtaaataaagctgcactgagcaagaagtgaccgatgccaagtgactagatgaccttaggtatgacctctctgggtcttggtttcttggtctaaaaacaaaatgacaggattcgactgggtgattaaaatctcctctgatctacataggaattgttttcaagacatttctgcattcctctagtgacagggtgctcactacctcatgagtatttcagtggacaactgtaatggtcaataaagtatccactttccaccttccacttccctgtagctcctggccctggctttattctctggggctccacacattcagtttacactcagtggccagtggctggggccattgtagaaaatgaggaaactccaattccttccttcttttcttcctctttcatcccttcctccctccctacatccctctctctcttccttccttccttgacacttaccatgtaccagaccttctgccaggcacatggatgggagcacagttccgggaagttggctgcagggttagaactaagtcccaagccccgtaaagctcatgccaggggactggactgtccagtactgagggatggggatgctgaggctggtggccttcctcagatgcactgtagtgccccaggcagagtcctgggctgccctgtgaggaggtgaccagaggtagagcaacttcaccctaaggctggatcaggatcccctccaggtttttactagagccaaacccacatctcctttctcttctgccacccccccttaaaatgcttagaaacacatagatttaaatacaagttcaaatgtaagtaatttcaactgtgtaactatgaggagtcaattctacgtgggtcctatctgtatcctccccagggctcagctccattctttgctttcattcattctcattcaatacattgttgttaagagctcactgggtgccctctctgtcatgtagtaaggttttaaaaagaaagcctcttctgagcttcagtttccttatttataaaataggagtattgatccgttccttgcttttcttacaaggatatgctgaagatgactgaagtacagagtaaagaaggattatgtttgggtgtcaaaggaatagaatgccctctttcaaactgagcacagcaggaacctgtaacaggaacacagcaacttgttgaatgaatgacaatattggaaaacatacatttcctcccctccccatcatagtccctctgcttccgtgttaactccatagacaggccagcacagccagccttgcagcctgagataaggcctttggcgggtgtctcccctatcgctccctcaagccctcaagtaggtgttggagagaggggtgatgcctggtgctggtggaacccctgcacagagacggacacaggatgagctctaagtacccgcggtctgtccggcgctgcctgcccctctgcgccctaacactggaagcagctctcattctcctcttctatttttttacccactatgacgcttcctta

SEQ ID NO: 799 - DNA, 2300 bp, Homo sapien
acacaccagaagcggcactgacagagatactgtgttggggcagaggcaggaagggggaaagatcggttgcagtggatttaaggatagtgagaaaaacggtttgcttgcctggcgtagcctggaaaaggagggtgggtccccactgtgaccagctctggatgcccttcgaaacagaatgggttttctcttccaggcactgggagatctttgaaggtttgtgagcagaagaaagtaacacagagtcatgattgaggacaacgcatttggtgtaaagtttctccctggggtagatgttgattaagggaggggtgattacaggccagagagagttctgtgaaacccaggacaaaacaaaatggcatctacttcctgggaagttttttttttttttttttttttgagacaaagtctcgctctcctgcctcagcctctcgagtagctgggactacaggtgcccgccaccatgcccagctaattttttgtatttttagtagagatggggtttcaccatgttatccaggatggtctccgatctcctgacctcgtgatctacccgcctcggcctcccaaagtgctgggattacaggcgtgagccaccgcgcccagcccttcctgggaagttttaaaaatgcactggaagactaactgccccattgtcgttgagggattacactgataaagctactggataggacattctgcaatattttcagaaatatttataaaagctgcattaaaacatgtaaaaatgcttatgttaaaaacagtatgactactattctagtatgactactattctagtatgaccactattctatttaatagcaatagtaacattatcatccataggggaaaattggaaaacaagcaaatacaataaaatgtcaactgtatttgtgttaatgtgatgagactcattggtgttttttccttttcggccactttcctacattttccccagttttctctaatgataaacattctttttatttctcttaaaaaaaaacaccatgcggacttttctaagtgttactttgccatacgtacgtggcaggggagttataaggagtaaatgagcaaatacacgcaaattacccagcacggtgcctggcataaaatcggcgctcaatgagtacgaagcgtgaagggtcgccggccccgcgtccccgccttgcaggagcccggacccgccgagcaggctcccggtccggcccggcccggcccggaggccgatgcttcgcggtagtgccctcgcgggtcctgcggactcggcgcccgcggggcccacagcgctgcccagcctgtggacgtggagcccgggccgcaccgccgcacacgccccgggcatctctgcgctacgtcgcgcgcccccacggctccgccccgtggcgtaacccggggcggggccgccacctccgattggccggcgcgctgtcaccacgtcgcgggaagctggcagggtgtgtgtctgtgtgcgtgtggggtttgctttgtcattcgtacccccggtgcgcgctgacgcggtcggcctggccgagctctccagcatccgcagaagggtccccggcgctgttcctgggatgctcccttacataatgacgcgactggctgaagcgcacgtcagcgcagacaccgcacatgccgcaaacccgggccttccgatttcatacattgctagacgagagcctacaatgccatgccgtacggtatgctctagtagggattacaatacaatgaaacgcaacccaataataataaagcataccttcgcaacaaggcgtaatataggatgttatatttatagggcctatttataagcctctatttaaatcttttctgataggctcagccggggacccagacactataatgattggcgcattcttccgtccttcaaaggggcgggttctagagtcagttttgcctcagcgggccctgggattggccgacagcggtttaccggtggcttctattggcctcccgggccgtccgtcggagccgaggaggcggggcaggcggctggctggtgctgggcgggcgggccccggaattgtcatttctttgtttccgaaggcggaggaggctccgagccccccctccccgtgctaccccctccccccgggtgctggctccatgtctgtgtgaccggcctcaggggtagagtccaggcccgacgcggggcgggccagcggcggcggcagctgaggtgagagacggcggcggcggcgcgggcacccggccccccagcgggaggatgaagcggcggaacgccgactgcagtaagctccgccgccccctaa

SEQ ID NO: 800 - DNA, 2300 bp, Homo sapien
aacaagagcatgtgcaaggtgtacagttatgttaagacaacttgggtgtcatcagctacctcacatatttcttgaaatcccacagctagagaagctaattgtaaaacaccatgaggactcaattaagcctacatccacatgctgagaattcttctttgtaaactaattacttctccaccgaaatctgtatcaaggcaaataccatttacaagtaacattctgagaagaaccagaaaataacagtcgtacacaaatcgacttggggaagctatgatagtaagttgccccatgaacctgttgtctttctctaccggtggactgaattcaatttctatttaaagggacactgcttttcttgcggatgaaaaaaaaaaaaaagagtttggagaaaatccctttttaaaaacgttcaaagcaagctatctgcttggaattgtcaaaacaatatttgctgaaaaactggtcatcagacccttccgaatctggagcagggccacagggcatgatttgggggtatcagcttcagccctgggtgccaagtttgagatcccatatgggaagcagaaggtgaaagaagtgacagcatggccccaggccagtatgctggcagcttgggggaacgaggggccacagtgggctctcaactttgtcagcctcccccacccccccgcgctgtggtccacgcgcctcctggctccggccggcaagcccccaggccaccggggggctcgggggccagcggcggccagtcagaggtcccggaagcggccctcccggcccagcggcatggccgggatgctgaggaacgccgggctggttgggggctctccgcccctccccccggcgggcccggcgcttccaacggcggcgcggcggctccctcagccagcgcccgccgcgccctgcccgcccggccgggccgaccctcgccacgccccgcgcacccggggcggaccccggcgggcgggccagcggctccggggccagcgctccttaggagagcccccggcgcgggcgtgcggcctactcggggttacataacggggccaggcccctcggagctggagggggaccgcagggcccgcgcccgcggagtgggggtgcagccgctcacctgccgtaaatgccctcggtgatccggttccgctttagggggcggcggagcttactgcagtcggcgttccgccgcttcatcctcccgctggggggccgggtgcccgcgccgccgccgccgtctctcacctcagctgccgccgccgctggcccgccccgcgtcgggcctggactctacccctgaggccggtcacacagacatggagccagcacccggggggagggggtagcacggggagggggggctcggagcctcctccgccttcggaaacaaagaaatgacaattccggggcccgcccgcccagcaccagccagccgcctgccccgcctcctcggctccgacggacggcccgggaggccaatagaagccaccggtaaaccgctgtcggccaatcccagggcccgctgaggcaaaactgactctagaacccgcccctttgaaggacggaagaatgcgccaatcattatagtgtctgggtccccggctgagcctatcagaaaagatttaaatagaggcttataaataggccctataaatataacatcctatattacgccttgttgcgaaggtatgctttattattattgggttgcgtttcattgtattgtaatccctactagagcataccgtacggcatggcattgtaggctctcgtctagcaatgtatgaaatcggaaggcccgggtttgcggcatgtgcggtgtctgcgctgacgtgcgcttcagccagtcgcgtcattatgtaagggagcatcccaggaacagcgccggggacccttctgcggatgctggagagctcggccaggccgaccgcgtcagcgcgcaccgggggtacgaatgacaaagcaaaccccacacgcacacagacacacaccctgccagcttcccgcgacgtggtgacagcgcgccggccaatcggaggtggcggccccgccccgggttacgccacggggcggagccgtgggggcgcgcgacgtagcgcagagatgcccggggcgtgtgcggcggtgcggcccgggctccacgtccacaggctgggcagcgctgtgggccccgcgggcgccgagtccgcaggacccgcgagggcactaccgcgaagcatcggcctccgggccgggccgggccggaccgggagcctgctcggcgggtccgggctcctgcaaggcggggacgcggggccggcgac

SEQ ID NO: 801 - DNA, 548 bp, Homo sapien
gaattcagggaagcccaaaggggaaggaaaagacctggagaagaacagcctttgcaggcaggggccctagagtgagagtgagaactttggtggggccagagatagtaaagatggggactctactgcctctgcgaggctatggccttatgacaccccaggctgctttggagacctgggaagggccaggaccctgctctgcccagcaggcattccagagcctgggatggagctgcagaagctgcagggagggagccagggggcctggcctggaggccccagccctccagtgcagacttgctctgccctggctgacactgcacccctccccatccccacttcctgttttcaggcacaggctgttaccctcaccgtagcccaggccttcaaagtcgcctttgagttttggcaggtgtccaaggaaggtgagactttgcatctacattgtgggtgtggtgggaggtggggagacacataaaggccctggggtcagacctggaccgacttcctgcctcatcacccacctggcttgtgactgtgagcaggtccct

SEQ ID NO: 802 - DNA, 2300 bp, Homo sapien
gactgagtcccagccgcccatccccagcaggcctcagggaagaagcaagatttacgaggcgagagcctgcctggcccgcttcttctgtcgggaaaggcttccctgcagtattttctgtctcgtcaacactgcatttcattttaaattgcagctgaaagtagatattttccctcttgcctattacaaacctcttaatttgtctctccctctgctgttatttgtctctataaagtgttttgcatgaaagacccacacagcacaatgttgcttcaccctgggttaggtttaacaggaagggaagatgcagagactaagtccaaggaggaagatgtgagggccttggggttgaggacacgcgtgtctgggagttgatgcctggctgtttttggaggttatctgttgcctgagtgtctgtgggtatgcgggtgcacatgtccatgtttgtactaatttacatatatgtctatgcatactgtggtataatcacttgggtgtccatacccaaattaagtgtatgtttgagtgcatgtacacacccacatgccagtctctgtgtgcatatagatctatgcccagacgcacacatgtgcatataaacacacgtaggcatcaaggtagacgtccgtcacattatgtgtgtggtcttctgtagacacgcccggggctctcttcctttcgctgcttctcaaggctgcggtcagcctccctccgtgctccacccaggagccctggccccgtttagggttgtgggaaaaggaaggcacgccagtggtctgcgagggggccagtggaaacatcacctccgccgacccggccgcggtcacagctctctggcttggctccagccaccagcagcacccctgcagcccggcgttagcgctgagaagcccggggcagccgccagggcgcgggctgccagctccctgacaaccccgggctggcactcgggggcgagagaggtcacccagcgacgggcacacccctccagagcaacaccgtctccggcccgcttccgggggccaccaacccgagcctcgcgggcgggctggggggtggtctctgtcgcttggggtccagcgaaggctgggcagtaaccaatggacgactgtggcccaacggggatccctcggatgcagccaatgccctcgttgcgctctccgcccccgccctcgcctgccccgcgccgctggaccattggcgcccgctggatggggggtgcgcgcgacgcctgcccttcggggagggcggggcttggagcgggctgcgctcccgcccgcgctcggcctctgccccgcccccggacgcgcggccctcagccggctgcggcgcggcggcggcgggagggggcgcggggcgcgcgcgtgggcgtggccggcgggcgtggccggcgggcggcaggaggcggggcggcgggcgctgtcgcagtgaaagcccgagcggcggcggcggcggggacggcggtggaggcggccgggtggctgtgcgcgcgtgtggggcgcaggctcggcggcagcggccggtctggagcggccgctgcgaggaagacagctgcagcgggggaggcgcggccagggctgcgcgctccgcggagccggcggggccgggaacaggtgatcccagtgggagccccgcgccctgccgagttcgaggggcgggagcccgcgctcccgggcgcatctgcagccgcccagccgcggctccggacccaggcatccctgcgctgtctggggcccgggggaagccccctgcccccgcaggctcggaagtgcctgctcctgctccctggccactccggctcccagctcccggcgccctctccgcggcggagaaagttgtggacgtgtcccgatagtcgagcccgggcgctgtcgcgaccgggccgggtgtgcgcgcgctcggggcggcgctgacacgccagccccccatcgcctcggtcccctccggaaactgcttctgaagctgaaactttgggcgcctaccagcgcgggcgggagcctagggggcggagggcggcttggtgcgggcctgcgggcgcccctcggcgcggacagccgggacgccgcggacggcatgtgacggtcccggcggccgcagcgcgggaaggcgcgggccccggcgcggcggggagggctcggccggaggggaggctgcggcgcgcggccggtcgctgcgggcccgggccccaagccgtgccgctccgctcgcccgggccccgccgaggccgctgcgcccccgcctcctcgcgggaggactcgctccaaactccctgaacttcggggacagtcccccgaagcggcgaa

SEQ ID NO: 803 - DNA, 2300 bp, Homo sapien
gccacgcagcacagctgcatccagcagtgtgcggtttaacaactaaccctctgcatgtagctccaacatgggcgatggttgatattttcatgtaccttaacaaataaaactgaaattaaaaaaaaaaacagaatttcatgtgtttatcaatgatgtgagccacttctttgctgaattggatggtaagttttgaatactgtcatttacaatgacacacttttggccaggcatggtggctcacacctgtaatgccagcactttgggaggctgaggcaggaggatcacttgagcccagaagtttgagaccagcctgggcaacatggtgaaaccccatctctacaaaaaataaaaaaattagctgggcatggttgcatgcacctgtggtcccagctacttgggaggctgaggtgggaggaccccttgagcccaggagttcgaatctgcagtgagccatgactgcaccacagcactccagcctgggtgatagagtaagagtctgtctcaaaaatggagtttcaggccgggcatggtgactcacacctgtaatcccagcacttttgggaggccgaggcgggcggatcacgaggtcaggagatcaagaccatcctgggctaatgcggtgaaaccccgtctctactaaaaatacaaaaaattagccaggcatggtggcagacacctgtagtcccagctattcgggaggctgaggcaggagaatggtgtgaacctgggaggcggagcttgcagtgagccgagatggcaccactgcactccagcctaggcgacactcaaaaaaaaaaaaaaaaaaaaaaaaaaaaggaatttcactcttgttgcccaagctagagtgcaatggcgcgatctcagctcaccgcaacctctgtctcccaagttcaagtgattctcctgcttcagcctcacgagtagctgagattacaggcatgtgccaccacgcccagctaattttgtatttttagtagagacggggtttctccatgttggtcaggctggtctcaaactcctgacctcaggtgatccgcccaccttggcctcccaaagtgctgggactacaggcgtgaaccaccacactgggccatatataaacacttaagtttaatctgattagcattctctctatcactttcctaagtctaggcaattatcaaaacaataaatcaaacccaagtttatagtgtttgccaatttctgtggcaaacagaaatattcccaccagggctgatttagagctaccaacatgatgtcactgaacatggatttggtgtgggctgcgacatatcattatacatagatacaacaggtgaaatagataaataatacagtaaaacaatcaggaagggatgagttttgagtattggctacccttgtttttaatttatttaactataattttatataatttgtttttaaagaatggctattattaaccattggcacacaacatttctgaaaatttaacaactggctctcaggagtcatccctgagtgcatcctacaggcagaccaagccttgctttgggcactggcaaagctggagtccaggagattctgcttcaatggactcacctgggactgcacaattagaaatgctagaaagaagctacatcaatgtttgtacaacatgtaacttttatcactaaaaaagaaagatttcttttgaattatattttaggctccataatctcccccaggtttagggattctaaaagtcatgttctggccacatcccaggcctgctcagttcctggagggaagagcttgagaaagaggtagccagcactgtgctttttacataaggaagtatgtaatgtaggaaactgcagtctgaggaccaaagcagcagctccctggaggtcatccaggtgagacgtatttctaggtctgacgtaagggtcgggggcagagccaaggctgctacagaaatagaactgtaagccccagggagtgtggggagataaccctggagacaagccacctagaaccaaacagccttgactctgaaggcttcccaggatgctggctcagcaacaggacaaaccaatccccaacccgagtcacatccaagtcccagctgggtacagctgggcttagatcagggaacatccgaggcaggcgggtgccttcgcagctccagtccttcctcagccttgcaacagcctcctgctcttcccagtgcatcccctctgggcagcaggctcaggcacgacgcaggggtgtctggcagggccagggccactgatgctgctgctggccaggactgaaaaatgcagactgcaggcaacata

SEQ ID NO: 804 - DNA, 2300 bp, Homo sapien
tgtgtcacatgggaagccacatgtctggccaagcctgggggggtgtcagctgccctgggagatgagtgaacggggttctggcctggctgctgtgctgccatgaccacttctcatctctgggcctcagttacatcatctgtgaaatggggcagtggtgctagattattctgccatttcacggagagtccaggccatgcacctgtcaggtcttcctgcccacctggtctgtgcgtttgggctgcagcagtgagagtagctgtttactatccctgtgtgcctggaagagacgtctcctaagcgcgggcaccaggagtggccgagcatggagaatacaggtggtgatatcctagaaagtgggccgctaaggcgggaaacacaggctgggagagaggaggggaaagccagcggacgcaggactgtctgggcgtgaggtgagtgatacaaacaatataacagattggtgcttctcacatgtggcccctgggccagcagcagcacaggggaactggtagaaaagcagattcttgggccccaccccagacctgctgaatcaaaaactcagggtggggcccaacagtctgttttaacaagccccccagtgattctgatgcaagctaacatttgagaactaagagactggatgaaaggaggggtggatagatgaggcttggagagccagtattttaaaggtcaaggaggaaatcgagctagtgcttgtcaatcacttgctgtgtctggtcggaaactgggcattcccactacactctttcatttaaacctatcaggatggtggcaaggcctgccttgtcccttgctaaagcagatctcagctgatgcaactgatttcacgccaaagtcacagagatagcggcagaggtgggattagaacctcggcatctctgatctgggagcctgagtatttcccagcacactaggctgcctccccatccacctgcgcctcagctctgctgccaccgcgggccccggctcctcctctgctccacgggtcaccccagaactctgctgtgttgtgctccctctgcagccagccatgccaagggaaaaggggcacaccataaaggcaagtgagggagaccttgggggctgcagcgcagggttgggggtggactgtgaccttgcatctgcttcagcctgaaggtcctggggcagctggggagcaaggtgctggcgtgacgctcctgagagctgatgcagctgccttgcatagtaagaactcatgcatactctgggtgacagtccacataggaagaacttgtgcatactctgggtgacagtccataggcatccattgtgccaagccctgtgctggttgctgtgggagaaactgaggcaaggcaagtgttgtttctagcctcaaggagtttatgatccagagccagaggaacaacaagtaactggggtgagctggagtgcatgggaggccagggcaggtcaaaggagttcaaagagactcgtatggtgattttaggggacaaaaccaaggctttggggacagacctaaggctttggagccagaggggatggctcaattcccaacattctcactgactcactgagcgatgttggatgagttacctcatgtctacaacccgtctccttagctataaaatgggttaacaatacctagctcggagtgttccattatagcaagcactcattttccttcccttcggaggatgactttaagccagagcaaaacagggaaggcttcctggaagaggtgacttttcactttggcactgaaggatatctagaatttagtgctttttctgtcttctctaagaaatctgtgggtaggccctagacacatggcgttgtctaagaagaatgaccttcccagcagctataactgtacaaataaaatcatgttgcgaggaagtcactttctccaatttggaaaatttggaaggttatcttttagtttaaaaacacgttgcaaggggcaaagccaggcggccagtgcgcactgccaggaatcgtcacactgaggttctctctatgctgctttttcttgcagatgatgcagtttgcttggcagagctataagcgttatgcaatggggaaaaacgaactccgtccactaacaaaagatggctacgagggtaacatgttcggtgagtcgattcaaaccactttgatattgggagggacccaccgccccgccagtggccgagtggaattttacttttggcttttcacctcctgagctgtgggggctccacagttctccagatctggggccttccaagtctgtgtttcctctgggcttttcaggcttc

SEQ ID NO: 805 - DNA, 2300 bp, Homo sapien
aaaggctacttcaggccttgaggttgggaaggtcagcttctgttctgctctgagctttgctgtaaccttgaacaacttcgcctcttcctccttatcatcagggtccctggtacaatgaaccagccactggacaggacttaccattcattcatttgttcattcagtgagccactgttgaaccgctacagaaatccaagtagtggattaggccctggagatttcagagataaacccgacctggatctgcatttacattgcttgtaattgtcaaatggaagacagctgcaaacagttaagatgcaggcgtgggaaacaaatattgggagtagaaaggaagggcctgtagcctctgtttagtcactctatgaggaactgcctggggcaaggattgtggcttctgttcctatctgggggaggctgggatggacccccaggatggaccctgtcagaagtcatgaactggctgtaggagagcagctgtttgctccttttgttcccagaaaggggtcccaatccagatcccatgagaaagttcattggaccttacacaagaaagaatttggggcgagtccataaagtgaaagtaagtttattgagaaagtaaaggaataaagaatggctactccataggcagaacagcagcctgggctgcttgactgaatatacttacagttatttcttgaccatatgctaaacaagggatggattattcatgagttttccagggaaggggtgggcaattccctgaactgagggttcctcccttttttagaccatatatggtaacttcctgatgttgccatggcatttataaatagtcatggcgctggtgggagtgccttttagcatgctaatatattataattagtgcctaatgagcaatgaggacaatgggaggtcactttcatcaccatcttggtttttgtgggctttggccagcttctttaccatagcctgttttatcagcaaggtctttgtgacctgtatcttcagctacccccgcccatctcatcctgtgactaagaatgcctaacctcctgggaatgcagcccagtaggtctcagcttcattttacccagtccctattcaagatggagttgcagccaggcacagtggctcatgcctgtaatcccagcactttgggaggccgaggcaggcggatcacctgaggtcaggagtttgagaccagcctgggcaacgtggagaaatcctgtctctactgaaaatacaaaaattagttgggcagttgctgcgctcctgtaatcccagctacttgggagactgaggcaggagaatcacttgaacctgggaggtggaggttgcagtgagctgagattgcaccactgcactccagcctgggcaacaagagcgaaacgctgtcaaaagaagaaaaaaaaaagccactggcttggaaagtatctgagaaagtccctggtaaatttcattccactccaactggggtcttggcacttgcattttcctgagcccagccccagggaccgcaggaatccatacatctgcagggatgagacacagccgatgcccaccgccatgcagaagcctaacacctactaggctgaaagtcaccccagggcactaagccagggagggttgaagggggtggaagatcatcagggagagagtaggttttcctatttgagaagtgaaaggcggtatagacggctgtcctccatgccttggattgtaggtggcatttactgctcaaggagaagggacactcagagacctgatgcagaacacggaggaggcagtaagaccggctaagctaggtgagtttaggaaagtccagcagggccacctacttattttgcagtcataaaaacagcagctccaggccctcaatgctggcatgtagtaggtactcaataaatgtctgcagaagcaatgaatgagtcctgtcaaaagtaacagtactgaatcaaaccagtgttctgggaggcaggcacgcagatgtttcttgtccaccctaactctccagctccaaagcccatgctcttacccagggctctgtgagccctattcagttgtgttaatcagatgtggctgcattgcctccccgccgtcttggttacagtaaatgtcctttaagttgcaagggcctggggtggcaggggtagaggaatgcatgaagattcctcaccaatgcctgatactgtcagtcttcgtaacgttagcctttctagcagaaggaaactctatctatctatctatctatctatatttatttattttatttttttgagatggagtctcactcttgtcgcccagactggagtgca

SEQ ID NO: 806 - DNA, 2300 bp, Homo sapien
agatcctgcagggctgccccagccagaaccacccactaggccctatctctcacggccttgccctgccggggatcttggtttgggacaagcccttctgggaagggcgccctccagtgggaaaccagccctgctccactgccagtcccagagctgacacctcccagagctgacatctcccagagctgggcccaagattgatccttttcacagaggcacactgatctgacctgattgtcattaacccacccccactgtgcgccttcccgagcttctagaatcatcccccaagtcccgcaagccccagaaacccatttcttcagcactgggcagcagagaccagtggggtatctgtatctttaagaaaaagcaagtgtaataaataaaagttatctgggaaagaaaacttcctttgtttattttccagaagccttagctcatcaatcttcccctcctaacctgctttgtgctctactagttttgcttccaatagaatagaatttggttttctagtatcatgtatcgtacacagggtgtccccaaacagtagcaataatgagttgaaagtggcacagttggaagccttcagaagccaacgccagatgtcaggctctcagtgggtccctctaaggacactggggccagagcacagggcaagggttgggtgggcccacaactctggaaggtccctgggagtcattcatctgacagacactgaggagtgcccacgatgtgccacgccctgtgtgggctctgggaaggcctcacctggtgctgccatggctggccaccaaagaagaacaggatgggcagtggaggcaggaccccacccccaactcagtcgaccgggtcatcccgtgggaagcctgggaggcaggatggcaggagatttggacccatagacctgggtgccagaggtcaggcttcttcatttgaaaaccagggaagcagtctctacctcacaaggtggcttgagaacagagtgagagaatgtgtaaatcaccccacctgaagtccagcacatgggcagagctcagcatcctttggatccctcaggcctgacaggtgcccctgcgctgggggggttggtggggctctgcaaaggcaggcactgctcacctctgggctcagaattcttgtctagaggcttctgcagctgccaccctcgcctgagaaaatgcaggtagagacatctagagccaccccatggtaactgggggctttgaaagaatggaagagagccccaaggaaccaaggtcctggggattgacaggcatgaaaatatgtcctcaacaccacccacccctatttccaaggccctcctccaagcatgccgcatgctgttctccagaaaagccagggcctctggtagctccagctgctgaggggctggagcctcgccttcccctcaccagaccagagcccggagggtgggggttggggggctcttttaactccttggtggagatgaggaaatttgggcccagggaagtgcaggttcagagctgcacctgctgtgcctggaacaaggccaatccccataacccatgcatctgcggaggtggccccccaactgcacatgaggggaacaggggctgggctttctttttaatttgtcttgctctagatgacagaggaacttttagaaaactggtgggataaggatggacggatgcccctcagcagtctctggcctcgtgcccggctgccagcagaggaggacacgaggcctcagaggcccccgacgccccttctccaggaaagcacagggtgtgtggcttctccccagccccttctttgtcccagtccccagtctggaatcgctctctgggctgggccaggcaagtgggccgcagaggcctggcttagctttgggaacggaagcacgggaaggggcgcggagaggcaggaagcggcctggggaggctggggtggccgggactacggacccgaccgcatagacgcgatcagcccctcttggcgttccggtgtagctgaccccgccccgggctctggccgggctgcgaagccgggaaccagcgaccccccgcccagcccctgcggccgccccgcccctccccgccccggccgccccgcccccggccccgccccgctctttcgcttcccgggccgccggcagccgccgccagccgcagccatgggccgggcccggccgggccaacgcgggccgcccagccccggccccgccgcgcagcctcccgcgccaccgcgccgccgcgcccgttccctggcgctgctcggagccctgctggccgccgccgctgccgccgccgtccgggtct

SEQ ID NO: 807 - DNA, 2300 bp, Homo sapien
ctattctcctgcttcagcctcccgagtagctgggactacaggtgcccaccaccacacccggctaatttctttgtatttttagtagagacggggtttcaccatgttgaccaggatggtttcaatctcctgacctcgtgatccacctgcctcggcctcccgaattataggcgtacagggattatagggattacaggtgtgagccaccatgcccggccgggagcccctttcttaacctcatcgctgcaggttcagggagggacagaaattccaaggaggagctcacagggaagggcattgcccgttttgggtcctgtttacttgccgtctcccactataagctccaagaagacagggtgcacagtgtaccctgatagaaacttcctatacagtaggtgcataaaacattttgtggaatgaacaaatgaataaacgtgttcttctcagccaaggagacagtgcagcagataggcaggagtccaggaagtggtcaaaaccggtctgaccttccacaaaaggagatggggaacccatctccatggatttggcagtgatgggctggtctgagcagataagtccgcacagacaacaagaactggggtgaggcaggagcagcacccctagccctggcccccgagcagagccccagcaagcccagcacccatcgctggcaggtcccctgcagggggtggcaagcctacaagcaggacccaggaaggcgggctcggcctggcccggcacagccagctctgccttgagaaccgcctgttaaatctgtctctgtgggagctccctgcctgctttcctcctacctcccaccaagcctgagctcctgctgccagggaggtggcgacagaagagggaatctgctgttccccaaatgctggccgacgtgtagacagctctgtggtctctgagcgtcctctccgagccatcagcttgtcagacagaggcgaggcaggtcaccgatgaggactcgggcttagggaaggccttttgcccagggtggggcaggctgtacttaaggcagggcccttctgggggtggccttccttccccttccctgtggtctcatcctgctcttgaccctagagatttcacctcaaacatgattggccaccaccctcatcggacttagctccaaaccgaaaccctgagctggccagtgggacattagtccctgggaggagacttggagaggagactggggagggagagtagggctgctggagggccagggaagccaggcagggtggtggcacccaaggctggcccatgggcttatgcataggatggaggtgggactatgtgaggcacagagccccaccatccccattccaaccttgccctcgagcgagctgctctggcctgggctgcgcctgggtgggctgtgcctgggtgggctgtgcctgggtgggctgtgcctgggtgggctgtgcctgggtgggctgcagaggcactgcagcagggagaggagcctctctctggcgggatattgctaagcttgtggccatcataagggcaggaacctccctggggtccatctgctcccttggtgtgggctggctcggggcttgagggagacctccacccacatggtacaggagaccccggagtcaggttctcagattcctggagctttgctttcccccgccccaggtctcccgcctcgccctgtccggcctccgaaactggacagccgccgcctcaccaagtgcagtgtttgccacccgccacttccagcccttccttcccccgccaggccaggagctgggtgagccctggtggatcatccccagtgagctgagcatgttcactggctacctgtccaacaaccgcttctatccaccgccgcccaagggcaaggaggtgaggacagctggggtgcgacgtggggcccctccgcccgagcccaggagtggccacccctctgtctgcgcctggaccccagtgccaggcctgctccacctgctctcctgccttcctctggacctgccccctccccatggggcccctgggccgtcgggtctgggctgacccccaccccagcggatccaggcccagcgggacccagcaagccagtacgtgcctcccgccgcccccaggtcatcatccaccggctcctgagcatgttccaccctcggccctttgtgaagacccgctttgcccctcagggagctgtggcctgcctgactgccatcagcgacttctactacactgtgatgttccggtgagtgggccacactggctggcctggagcaccggggaggcatgacggtacagcgcccagaggggagggccca

SEQ ID NO: 808 - DNA, 2300 bp, Homo sapien
aggcctgtttcctcatctgccggatgggagactgactcctggcctacttcacccacagggcaggcgtgagaggatggtcgggataacatgggaagagaaaattgcccctaggagtgggggtggcttccctccctccccagagtgggaagggcaggggcttcccggtcaaagggaaaaggaagaggagggcacaagccctccatctgctcacctagggctgggcacacctgcctccatcgcagggttgttgaggagggggcctggactgtatgggacaggaggagagaggcagtggccagctccaggaccagctgttcctgggctcatgtctgaggaccaggcaccagggactgctgacccccgggggttacctagctctgccctctgtgccccctgctgcggaggtggtggtttgccagtgctggggctccctcgtgcggcggatctgcagattgcactgctcggctcagatttcctgctgcccgccagaggcctgtgcagggaccacggtgctcgttttcattcctgccccaccctgtgacccgccttgaggcactggccatctctctgcttcaaagggtcctggagagtacacgggccatggctgtgcaggccctttgtgaattgcgaggggcagggctggcggatggtgaagtggctccagtgccttaggaaggggcagcctggtggggaagagggccagggctctgcagccagaatcccagtggctctgagagcaggtgttcaccttgagaaacctcagtgtcctcatctggaaagtggagacagttgcaggtattatgtgagataaagtgtgacacagataatgggctttgatgatggtgtcactctgccctggccatcccaggtctctgaatgtggacatggagtggctttacggggccagtgaaagcagcaacatggaggtggacatcggctacataccccaggtgagcgcacaggaggctcccatccaggtgggctcggctgcagggccccgccctccctctgcaatgagtggagcattttggagggtctctaggggagcccctgaggattcttgcccatctctgagccttccccctaccactgacctctggcccagatggagctggaggccacgggcccctctgtgccctccgtgatcctggatgaggatggcagcatgatcgacagccacctgccttcaggggagcccctgcagtttgtgtttgaggagatcaagtggcagcaggagctgagctgggaggaggctgcccggcgcctggaggtggccatgtaccccttcaagaaggtgaggctgggcaggggtgaaggccagggtcaggctgcatgggcagaggctgggagctgtggagcagcagctgggcacagacgctggtatgtgtgcagggcttgctactgaggctgtctcactgttgggcccagctgtgccagcggggcctccccgctgccattcagaacttggaggaagaggccaggtgcaatggctcatgcctataatccaaaactttgggaggctgaggcagagaatcacttgtggccaggagttcaagagcaatctgggcaacatagcgagaccccatatctacaaaagaatttttttaattacctgggggtggtggtagcacgcacctgtagtaccaaagctttggggaggctgaggcaggaggactgtttgagcccaggagttcaaggctgcaatgagctatgattgcgccactgcactccagcctgggcaacagagtgagactccatctcaaaataaaaaataaatgaaaataataataataaatagaacttggaggagacatccatcccctggcttagtagcacccacttcacacacatacaaacacacacactaacatatatatacacacacacatacacacatatacaaacatacacaaacatatatacacatacaaatgtacatatacacagacatacacacaaatatatatgcctacacacaaacacacacacacacacacacacacacacacacacacacacacttgcacacactacagactcagcccgagtgggaccctggccgctttgatgatggcttcgctctgtctcggtgtggccccaggtctcctacttgccgttcactgaggccttcgaccgagccaaggctgagaacaagctggtgcactcaatcctgctgtggggggccctggatgaccagtcctgctgaggtgaggggcccggctggatctaaggggagcagtgggaaagtccacaccttgtggggtaccagaggctctgagaccaatgggactcttctgttg

SEQ ID NO: 809 - DNA, 2300 bp, Homo sapien
gccagctcagccaggctccctgtgtcctgggaggaagtgtccccatcccccatgccccttatggggagggagggcgtctgatgctctctctctgcctccccccccatcctgtcaggcacaggtgacgggggcagcccatgcgagcccttctcctgctgctctgggagggccagttccacattgagccagcctggtcccatggaaaatgatggcctgggctttctgaggccttatctgatgcctctgcagttcatgtcccccaccaggcctcgaggctcagggtgggagagggccccgggctgccctgtcactcctctaacacttccctcccctgtccccaacatgccctgtaataaaattagagaagactaactagagtggttctaagtgcttttcctttgagtggcatgttgctcagctccgtccttccatggggtggctccctcttggggcagagttgagctggaatgctttcaggtactatcttacctatcgaaggcttgagtgacttgcccaaaataagttttacgatagaacaagtggtaggacttactgttttgagaatctggtgctctctgttgagagagatctgggagttaaaatcattgtcttaaaagcagagcctgagacaggcatgaagtgtttttttgtttgtttgttttgtttgtttggtggggctgggggggagtgtacttccagaaaaaccagtaaaagaaggaaggaagcagaagagggaaaggaaaaatgctgagcaggaacagtctcagcccagccttggcctgacccacagtggaagagctgtggggcataaaccacactgcagagctgaactggccttttggaccttttatcagtcattggcttgggaggtgaaggaaattcccaggtagggagctccgttcttcctgcaaggggatctgagtgggacaccaaatcagcatctacacccaggacagacagccagcgtggacttgcatgatccgccatcgcacaggagggaaaggtaatgattaaaacacaatgtgccatcctgggaagagggccagacctggaagtcaatcttcagcgtttgagatatggtggagatcagggtggacgacctctgaggtctctagccaggaccagtcacataatttgcacagccccgtgcaaaatgaaaacacaagaacccctattagaaaatcatttcaagacggcaacagcaaagtactaaaccaagtacaggattctgagcatgcggcccgttgtgactgcatgggctgttcacccatgaaaccagctctgtctctggcagaggggactgcaggctttggaaccaaggaactccagcctgggagccaggcacagcccgaggctgtgctgaaggcagagaaggaaatgtgacccaggaactgcatgccacagaccaagacagtgagggctggagcacaaagagggagtgggttagtgagcctggaaggaatgtggctcttcccacagagcctctggagtcttgtacatcaagtacccatctaataagcaaactcattgaatataccgtgtgtgtgtgtgtgtgtgtgtgtgtgtgtgtgtgtgtgtgtgagagagagagagagaggctaaaatagaagaaagctgcaaagtgctggagggcaggagtcaagaggagaaagaggcccattctgcgcattcttgctggagagaggctttgcaaagggacctgcctgggaaccaagaactgggaagggggccagggtgaggattctgaagtttgccctaggggtaggagcatattttaggggtcgagcgacacacccctgggcttccagaagtcggatggggctaaacgtggagagcaacaagcagggagacgcgacgaataccaggccgagggatctccaaacgcagccaactcctcccggggacacagaccccgcgggggcacggtctcgatggaggggagtgtgctccgcggtatcggagcctacagccgccagcgcctcgcccactcgggggccgcgctcccctcgccaccgagctggacccgcctcctgagggtgcgcggaggtgcgcctcggtgcgcagctgcggaggatcgcttccggggggcgggtcagcggaagtgagggcggttgaggctgggcggcccaaggtggaaggaggggccgtgaggtgagagagtccgggagcccgagcttgaggtgagaaaggttctagggaggcgcggaggcgggagcgcgaccttccagcccgttagtagactgggtctacgtgccgggcgctgtgcggagcccgcagctcctgttcccgcgcgagttctc

SEQ ID NO: 810 - DNA, 2300 bp, Homo sapien
ctgcagttcatgtcccccaccaggcctcgaggctcagggtgggagagggccccgggctgccctgtcactcctctaacacttccctcccctgtccccaacatgccctgtaataaaattagagaagactaactagagtggttctaagtgcttttcctttgagtggcatgttgctcagctccgtccttccatggggtggctccctcttggggcagagttgagctggaatgctttcaggtactatcttacctatcgaaggcttgagtgacttgcccaaaataagttttacgatagaacaagtggtaggacttactgttttgagaatctggtgctctctgttgagagagatctgggagttaaaatcattgtcttaaaagcagagcctgagacaggcatgaagtgtttttttgtttgtttgttttgtttgtttggtggggctgggggggagtgtacttccagaaaaaccagtaaaagaaggaaggaagcagaagagggaaaggaaaaatgctgagcaggaacagtctcagcccagccttggcctgacccacagtggaagagctgtggggcataaaccacactgcagagctgaactggccttttggaccttttatcagtcattggcttgggaggtgaaggaaattcccaggtagggagctccgttcttcctgcaaggggatctgagtgggacaccaaatcagcatctacacccaggacagacagccagcgtggacttgcatgatccgccatcgcacaggagggaaaggtaatgattaaaacacaatgtgccatcctgggaagagggccagacctggaagtcaatcttcagcgtttgagatatggtggagatcagggtggacgacctctgaggtctctagccaggaccagtcacataatttgcacagccccgtgcaaaatgaaaacacaagaacccctattagaaaatcatttcaagacggcaacagcaaagtactaaaccaagtacaggattctgagcatgcggcccgttgtgactgcatgggctgttcacccatgaaaccagctctgtctctggcagaggggactgcaggctttggaaccaaggaactccagcctgggagccaggcacagcccgaggctgtgctgaaggcagagaaggaaatgtgacccaggaactgcatgccacagaccaagacagtgagggctggagcacaaagagggagtgggttagtgagcctggaaggaatgtggctcttcccacagagcctctggagtcttgtacatcaagtacccatctaataagcaaactcattgaatataccgtgtgtgtgtgtgtgtgtgtgtgtgtgtgtgtgtgtgtgtgtgagagagagagagagaggctaaaatagaagaaagctgcaaagtgctggagggcaggagtcaagaggagaaagaggcccattctgcgcattcttgctggagagaggctttgcaaagggacctgcctgggaaccaagaactgggaagggggccagggtgaggattctgaagtttgccctaggggtaggagcatattttaggggtcgagcgacacacccctgggcttccagaagtcggatggggctaaacgtggagagcaacaagcagggagacgcgacgaataccaggccgagggatctccaaacgcagccaactcctcccggggacacagaccccgcgggggcacggtctcgatggaggggagtgtgctccgcggtatcggagcctacagccgccagcgcctcgcccactcgggggccgcgctcccctcgccaccgagctggacccgcctcctgagggtgcgcggaggtgcgcctcggtgcgcagctgcggaggatcgcttccggggggcgggtcagcggaagtgagggcggttgaggctgggcggcccaaggtggaaggaggggccgtgaggtgagagagtccgggagcccgagcttgaggtgagaaaggttctagggaggcgcggaggcgggagcgcgaccttccagcccgttagtagactgggtctacgtgccgggcgctgtgcggagcccgcagctcctgttcccgcgcgagttctcgcgggagccgcagctgtccgtctcacttggcccgggggaaactgagtccccgaagggtagttgctcgtcggagttccccagcaaacagtgaccaagccagacctcaggcttctagtttcggcttcgctgcttgacgggccgggctgccccgccgcgcattctgagacctggccgcggctcggaggcttccgcgcactcgggtccgggtcctgtgggtccaagggccgctgggcaggcggcgag

SEQ ID NO: 811 - DNA, 2300 bp, Homo sapien
attcccaggtagggagctccgttcttcctgcaaggggatctgagtgggacaccaaatcagcatctacacccaggacagacagccagcgtggacttgcatgatccgccatcgcacaggagggaaaggtaatgattaaaacacaatgtgccatcctgggaagagggccagacctggaagtcaatcttcagcgtttgagatatggtggagatcagggtggacgacctctgaggtctctagccaggaccagtcacataatttgcacagccccgtgcaaaatgaaaacacaagaacccctattagaaaatcatttcaagacggcaacagcaaagtactaaaccaagtacaggattctgagcatgcggcccgttgtgactgcatgggctgttcacccatgaaaccagctctgtctctggcagaggggactgcaggctttggaaccaaggaactccagcctgggagccaggcacagcccgaggctgtgctgaaggcagagaaggaaatgtgacccaggaactgcatgccacagaccaagacagtgagggctggagcacaaagagggagtgggttagtgagcctggaaggaatgtggctcttcccacagagcctctggagtcttgtacatcaagtacccatctaataagcaaactcattgaatataccgtgtgtgtgtgtgtgtgtgtgtgtgtgtgtgtgtgtgtgtgtgagagagagagagagaggctaaaatagaagaaagctgcaaagtgctggagggcaggagtcaagaggagaaagaggcccattctgcgcattcttgctggagagaggctttgcaaagggacctgcctgggaaccaagaactgggaagggggccagggtgaggattctgaagtttgccctaggggtaggagcatattttaggggtcgagcgacacacccctgggcttccagaagtcggatggggctaaacgtggagagcaacaagcagggagacgcgacgaataccaggccgagggatctccaaacgcagccaactcctcccggggacacagaccccgcgggggcacggtctcgatggaggggagtgtgctccgcggtatcggagcctacagccgccagcgcctcgcccactcgggggccgcgctcccctcgccaccgagctggacccgcctcctgagggtgcgcggaggtgcgcctcggtgcgcagctgcggaggatcgcttccggggggcgggtcagcggaagtgagggcggttgaggctgggcggcccaaggtggaaggaggggccgtgaggtgagagagtccgggagcccgagcttgaggtgagaaaggttctagggaggcgcggaggcgggagcgcgaccttccagcccgttagtagactgggtctacgtgccgggcgctgtgcggagcccgcagctcctgttcccgcgcgagttctcgcgggagccgcagctgtccgtctcacttggcccgggggaaactgagtccccgaagggtagttgctcgtcggagttccccagcaaacagtgaccaagccagacctcaggcttctagtttcggcttcgctgcttgacgggccgggctgccccgccgcgcattctgagacctggccgcggctcggaggcttccgcgcactcgggtccgggtcctgtgggtccaagggccgctgggcaggcggcgagcacttggccgaccttggcccaggtcgggtcgtctgccgcgggggaggggcgactcgccctggcgggtccccgcggggagagggtccgcgcgggtctccggccactgctgcgcgcggcaaagtttcactgagcgcggcggcctccgtgggggcccccgggaccaggggtgctgagcagggccctgcgctggaggagctcccgttctcctgaggggacgcctgtcagcagacagcaactgcagcctccggagggctgcggggcgcagaggtgacaagacccaccggtgctgccggcgaaccgggggaagatcttctagccagtgacacttgggggcgggggtgacagctgagttggtgttccccttcattcgtttagttcagcgcgttgaagcgctcactgtgtcctaggcagacaccgtgctgtgcgcggggatcacagttatctagttcctctcgcgaggactccgagggacaggcagggtgctgcggagcgcacaggaaaggacctgaccctgtcgcagggaaggaaggtgatgcttaagctgagctctgaggaatgatgaagaatgagctcggcgaagggggtgctggtgtttgatgcagggctcagaggtgggcccagtgttgggggttgag

SEQ ID NO: 812 - DNA, 2300 bp, Homo sapien
tgtgtgtgagagagagagagagaggctaaaatagaagaaagctgcaaagtgctggagggcaggagtcaagaggagaaagaggcccattctgcgcattcttgctggagagaggctttgcaaagggacctgcctgggaaccaagaactgggaagggggccagggtgaggattctgaagtttgccctaggggtaggagcatattttaggggtcgagcgacacacccctgggcttccagaagtcggatggggctaaacgtggagagcaacaagcagggagacgcgacgaataccaggccgagggatctccaaacgcagccaactcctcccggggacacagaccccgcgggggcacggtctcgatggaggggagtgtgctccgcggtatcggagcctacagccgccagcgcctcgcccactcgggggccgcgctcccctcgccaccgagctggacccgcctcctgagggtgcgcggaggtgcgcctcggtgcgcagctgcggaggatcgcttccggggggcgggtcagcggaagtgagggcggttgaggctgggcggcccaaggtggaaggaggggccgtgaggtgagagagtccgggagcccgagcttgaggtgagaaaggttctagggaggcgcggaggcgggagcgcgaccttccagcccgttagtagactgggtctacgtgccgggcgctgtgcggagcccgcagctcctgttcccgcgcgagttctcgcgggagccgcagctgtccgtctcacttggcccgggggaaactgagtccccgaagggtagttgctcgtcggagttccccagcaaacagtgaccaagccagacctcaggcttctagtttcggcttcgctgcttgacgggccgggctgccccgccgcgcattctgagacctggccgcggctcggaggcttccgcgcactcgggtccgggtcctgtgggtccaagggccgctgggcaggcggcgagcacttggccgaccttggcccaggtcgggtcgtctgccgcgggggaggggcgactcgccctggcgggtccccgcggggagagggtccgcgcgggtctccggccactgctgcgcgcggcaaagtttcactgagcgcggcggcctccgtgggggcccccgggaccaggggtgctgagcagggccctgcgctggaggagctcccgttctcctgaggggacgcctgtcagcagacagcaactgcagcctccggagggctgcggggcgcagaggtgacaagacccaccggtgctgccggcgaaccgggggaagatcttctagccagtgacacttgggggcgggggtgacagctgagttggtgttccccttcattcgtttagttcagcgcgttgaagcgctcactgtgtcctaggcagacaccgtgctgtgcgcggggatcacagttatctagttcctctcgcgaggactccgagggacaggcagggtgctgcggagcgcacaggaaaggacctgaccctgtcgcagggaaggaaggtgatgcttaagctgagctctgaggaatgatgaagaatgagctcggcgaagggggtgctggtgtttgatgcagggctcagaggtgggcccagtgttgggggttgagggccagtgtggctggagggcaagggggagagcaggagggctggctgcgaagcgtgcaggccttggtgctcagtgaatgtggtctagagacggcagagaaagatgggtttgggactgattgtggattttatcctgtgttggctctagtaagccagttttaaacggatgagcgatgtgattaactgtgtttgggaaggattcctctggctgtgtgtgagggttaggcccggctgggtctttggaggtaaggtcggagaggaagtggcagtaagcaccgttagtgcaatttgtggccgacacggacattcagcacagagcctggcacacagagggactctgataataaaggcttgaactgagccgagaagatggagcccacgcaggaggtggcaggacctggaccaggctttgggtgctttgcactggcatgaccactgagtgaccttagacaagtgccttcccctgtccaacttcctttccccatgtgtatcgtgaagtgaatgacacctcgtctcccaagggtagaagaggggaccctccacaggaggtctccagaaagagctgctttgtcagtctagtctatctcccattcagagcctgtccagggctccccagtgacccggacctcatgacttgccccctacttttgtagctttatcatgctctgctcctctttccatgtccttcaccttcttg

SEQ ID NO: 813 - DNA, 2300 bp, Homo sapien
agcccaagaggctgccctcacccaacacttagctctaagtccagactcttaaaggttctgttaaagatctgcggccaggcgcagtggctcacatctgtaatcccagcactttgggaggccgaggtgggcggatcacgaggtcaggagagcgagaccatcctggctaacacagtgaagccctgtctctactaaaaatacaaaaaattagccaggtgtggtggcgggcacctgtagtaccagctacttgggaggctgaggcaggagaatggcgtgaacccaggaggcagagcttgcagtgagccgagatcacgccactgcactccaacctgggtgacagagcgagactccgtctcaaaaaaaaaaaaaaaaaaaaaagatttgcctagtgagcttggccaacccaagagccttcctgggctctcaggtttcttgaggcaaaacttctaaagatgcaaatagaatccttggtagctacaaagctcatctagccaaattataagtactatccaagcccaggattcattcttgaagatgagatgtaaaagcactgctgggcccttgcaaagggagagatcagagaaaataggagaacgaacaccagctcatgccaatctcagtctcatgagctacagagaaaaagagccaaaaaagtttatcctggctcagccaccttctggctttgtagctacaggcaagttatttaacttttctgaatgttggtttttccatctggaaaaaggagacaggaaaagctgccactggaggctaccttaagggtcaatgagtgaaatggggttgagtgcttaatgaactgttaaaacatgacacagatgggtgaggtgacatctgactgctcttcacagcagtccttgcatggtgagcagatgcaatcagtgtgctcgttcattcacttgttcatcaaacaccaacagtacccacttgtgccaggccttgtgctgggcaccgtaggggctatggaaggagtaagacacagtcatgctctcaaggaactcgctgtccagcagagtgataggacatgaatacatacttctagcaaaggctgagtagcattaggcaggtggccagatgaggtcagagctctggccctagtgccctgtagtaagttgcgagggagtaggaaatgaagacaaaacagcaagagcacaggtccagcacaagaaggtgaaggacatggaaagaggagcagagcatgataaagctacaaaagtagggggcaagtcatgaggtccgggtcactggggagccctggacaggctctgaatgggagatagactagactgacaaagcagctctttctggagacctcctgtggagggtcccctcttctacccttgggagacgaggtgtcattcacttcacgatacacatggggaaaggaagttggacaggggaaggcacttgtctaaggtcactcagtggtcatgccagtgcaaagcacccaaagcctggtccaggtcctgccacctcctgcgtgggctccatcttctcggctcagttcaagcctttattatcagagtccctctgtgtgccaggctctgtgctgaatgtccgtgtcggccacaaattgcactaacggtgcttactgccacttcctctccgaccttacctccaaagacccagccgggcctaaccctcacacacagccagaggaatccttcccaaacacagttaatcacatcgctcatccgtttaaaactggcttactagagccaacacaggataaaatccacaatcagtcccaaacccatctttctctgccgtctctagaccacattcactgagcaccaaggcctgcacgcttcgcagccagccctcctgctctcccccttgccctccagccacactggccctcaacccccaacactgggcccacctctgagccctgcatcaaacaccagcacccccttcgccgagctcattcttcatcattcctcagagctcagcttaagcatcaccttccttccctgcgacagggtcaggtcctttcctgtgcgctccgcagcaccctgcctgtccctcggagtcctcgcgagaggaactagataactgtgatccccgcgcacagcacggtgtctgcctaggacacagtgagcgcttcaacgcgctgaactaaacgaatgaaggggaacaccaactcagctgtcacccccgcccccaagtgtcactggctagaagatcttcccccggttcgccggcagcaccggtgggtcttgtcacctctgcgccccgcagccctccggaggctgcagttgctgtctgctgacaggcgtcccctcagg

SEQ ID NO: 814 - DNA, 2300 bp, Homo sapien
cctgtccctaggtttgtggaattcagtctccacaaacctagagaggagaggacaaggacagtagttggattcattctctggggttgtagctgtctccgtctctttgctccagaccatcccaatctggcaaaacaagccacatggggctgctcgaagtgtagtaagaagaattgggaccaacctacccttgaagccgtgtgcccgggcgtcctttgaggtgagtatgttggaagggcaggagagtagaggctcagacagtgctgcttctgtgccccaaaccccttggtactgcccaagtaggttgtttcctggtcacttttcattctgttatgaaatatttgttaaatgcttataagatatcctggtcactgtgtcctcctgagtgcatacaaacctgtgaccacaaggaacctgacaggtcccccacatgggacactgactattgtgatttttgagttgaactctgcttttcttcaccagccctaagaattgaccatgtagccagtatttttattttattattttttgagatgaggtctccctatgttgcccaggctaggtcttaaactcctgggctcaagcagtcctcctgcctcagcctcctatgtagctgggattacaggcacaagccaccatgcccagctccactatttttagtgtttctctgaggccataattcctcagccttctctttttggccaatctgggcatcctttactggggtgctttggtcttacctctgtgtctagggatcctttagcacccactcagcagcagagattcctacctggcccaggtctcttgagaccccttctgtggtagaaagctaagtagcatttattagtcccagctgcctccctctaggaactaaatggttaagcaccagccccaaactatatggttcagatgtgtgcatttggagagctgggatacaaaagaaatacttgtgctttctacccacacagaggagatagaaatatgtgcatgaaaggatgtgggcccaggtagaaacagaaatgaaggagccaaatctgtataaaagatgctaagaagcagagtctgtaggaactggatctggaattagaagaggtgtcagggttggtattagggtcaggaatggagttggaagtgtcgcaggggtagggggcaggaaaagctgtcccagtattcagattgccagctatccagaattgtctaaagatcctgggcaggaactggtcctaacttgcctcagaagcatcagaaaaaaaaaagggagacagctagggagtgtggctcactgcatagaggccgtccccacacttggctataccctcttcagttctttggccagatgctgggcagagacaatcaagggcacaggctctcacagagcaggaatgtatgtgagcagtattggtaatactagataacatttactgagcacatactatgtgtcaggcactgtgctgtactttatatttgtttactcatttaattgccaagagcaaaggagcattcagggctaatcaggaaaacaaatggaggcttcccccaaatgccctattttagcactagttcctgggtcactggaagttcttctctgtgtgaccttggagtatcacttaactcctgtgagtcccaggtttcctatctaaatgcaggagcgatcaatcctggatccatctaccataccaaataatttgtagcagaaacagttgaatcttacttgtgtgtaaatatgcatttattattattattaaattaccttaaatattatttaagggactcttaccaatttattttgaaaatttaagcatatgaaaatattaaaattatgaaaagtaaaaggaaaataaattacctataattacatagtaataatacaataactattaatgtcttagtgtagtcctctttttctagatggatgttttttactttgttgtaatcacagtcaacatgactgaatcctaatttttcactttactcaacatctctaggttgaggagctattttaagaaatcctattatggttccttttgtataatcatttatttttatttaaatctaaatatattcaaattttcaggtttgtttaaaacagcattgctgtaacaatgtagatctcaattagctatacaggattataaaaagctagtcaggaaaaatttcctattgctgtaacaggttgtggatgaccttgtacttgtattttcaccagagggcacagtggttttagacagttgccatctctactaaaaggtgactcaggccttttccactgaagacacagaactgtttgtaatcccatagactct

SEQ ID NO: 815 - DNA, 2300 bp, Homo sapien
gatgcaataaagtactgtgacagtagccacctctttgttttttgtctcctgtttccgggaggggcccctgctcacattactggaggttttccggaggaagctggggcccctgggagtggacacagggtgcagggagcagttcttgttttatctttgctgggggatggggttggggccttatataccatatctatatatacaaaatttgtttggcaagggagtgggcggcagttttattactaaagttttataagtagttaaaataatgtgtttaaaatatgataatcccactttatgatctgacaaagactttttttgtttggtttttccttcaattaaggagggtttttttgttttgtttttagtggagggggcaggggcgtgcacactccaccacacatattgagcctcgtcgcatgcgcaccgaagaagtatgttaacttttataatattgctttttccatagtacacagcaatatatatacaatgaaggaaaattgggaagataagaaaacccaaattaattagaaatatcacttcactgctgaaatatcatgggggaccttatgaaatacacacacacacacacacacacacacacacacacacacacataaaatatgtgtatataaataaatattttgatataggccaggcatggtgactcacgcttgtaatcccagcactttgggaggctgaggcaggcatatcacctgagggcaggaagttgagaccagtctggccaacatggcgaaaacccatctctactaaaaatacaaaaattagccaggcgtggtggcacacacctgtagtcccagctacttgggaggctgaggtggcaggatcgcttgagcccaagaggttgaggctgcagtgagctgagactgtgccactgtacccgagcctgggtgacaaagcgagatggctctgtccaccatgaagacaggctctggctgcagagatggttgaggttcctggctgacctgctgcagactgggcaagaggtggctgagcttctatcctccctccaccaaaaaaaaaaaattacaaaatttttggccgggcgcggtggctcatgcctgtaatcccagcactttgggaggctgaggcaggcgtatcacgaggtcaggagttcgagaccagcctggccaatggtgaaaccccgtctctactaaaaatacaaaaattagctgggtgtggtggcgtgcgcctgtacttccagctactagggaggctgagacagaagaaccgcttgaacccaggaggcggggctgcagtgagccgagatagcgccactgcactccagcctgggcgacagtgagactccgtctcaaaaaaaaattttttttacatatacaatatgtaaacattacgtataatgtacatatattccatctatggagattgtggttagggacggaaggatgggtgggggtgccaacatttttgcatttccaaggggttttctgaattcacaaagtactttcacaacctcatttgatcctctttaaaatccaaggcacagtaaacggtgaaagcaggactgaaatctagttcctgaccccaaattttaacctcttcaaaatcctctcccatgtggcttcgtagttacgcttacattaaaaaaaaaaaattaccaaagttgttcgcacactcgagtgtctggtaaccacttaggtcgaggacccctggtctggagtcgacgggcctgatctcggctcagccacttccttctgggggtgatcgcgaagattcagcgatgacacgaacaaattcctaagcccgggaaatactgtaagaaattttcaatacagcaaaaagaaaatgtacatttctgaggctgtcgagaaccgttcacacagcagcttccgaatccgctcttgaaagagcggatcagaaagaacacgcactcctccgcgcagggaaatatgccgcacgcactcaagggaccggccgcgaaagttagtgcgtgggcggggcacagcgaagggggccagggccttgccggggcggggctggcgcccggggcggtcgcgacgtagccccgcccccagcgttggcgcgagatccgaacgtcggcggccgcggttctggcgttccctgaggcgccgggagcctgcgccggcgtcctgccggcttcgtctcctcagcggccatgaggcggacaggccccgaggaggaggcctgcggcgtgtggctggacgcggcggcgctgaagaggcggaaagtgcaggtgggacgctgggggatgagagggcgttgggaaccaggtagggcctggaggcgtaagacgggaggag

SEQ ID NO: 816 - DNA, 2300 bp, Homo sapien
tggtcaccactgggtgcctgggagttacccacggtggacaaagggcaagagcgctggttttggagtcagatagatgtgctctgccctcccgcctccagggctgggctcccaggttggctgtggatccagagagttgtgagggagaggtaaaatgtgtgtgaaagttcttggtaaacacccagccactatatattatgagtggtagcacctaatctccttaatgatatttcaggtgccatattgggtcatcctcactaaagacccttcaagagggttttcctccaatagccccagtattaacattggtctggccttattatttgtatctaatggggttagactttcccttccatgctgagaaaaagttgtctttaagagaatgtgctgaacaatcagggcccagaaaggcaacaacgaatattttgcatgccaagaaggaggcaaaagaggaagtggaattgtacccaaataatgcttataataggtgttatttagctgagctgtaagctccaggagggcagggtattaatatattgaggtgttggctgagcactgtggctcactcctataatctcaacactttgggaggccaaggtgggaggatgacttgagaccaggagttcgagaccagcctgggcaacatagcaagacctcgtctctacacataatttaaaaaaataggcatggtagcgtgcgcctgtgattcccaactactcaagaggctgaagaaggatcaccggagactgggaggtcaaggctgcagtgagctgtgtttgcaccactgcactccagcctgggggacagagcatgaccctgtctcaaaaaaaaaaaaaaaaaaaaaaaatcctgtggtgttaccattggtatgaattccctgggctgttagttctgcgagggcagtggtttaaatggctctgtcactgaggaagctgcagcgcctggcacataggaggcctaaagtaaatattcttggactgtcccagggcctaagggcccttggaagtcactggtgaatttactctctcctttgacatttggagaaacagggccaagaggggaggggacttgtccaaggtcacacagggattgagtggctgagtcaggacgagaatcccacagaaacggcagagccagcactgtgccagagccaacacctggcatccatggctttgttttgcttccacaagagcccaagaggcagctattttaatcctctgattccaaaaggaaacaagctcagagaggttgagggactgttgcagagtcacacagcaggtgaattccagacccgaaatttcatcctcacataaaaatgaggcctgtggcgtctcttgaaacagcctgccggagagcctgcagagattagtggaggatgtccaccaccagggcagcagtcttctccagttctccaggctcactacctggctggcttccctccaggctggatcttcctaggccctgtgggcatttgtgtgggtgagcccgttggggcagggagcctgtctgcttcattttctgtgtgccccagcacacagaatgcctgggtagcgttgaggctggcatatagtataagcactgagtgaaatctgtgagatgggggtaacccagggctctccctctccataagcccattttccaccacctccctgcagcctggtctgttttgccccacgggtgttatgggaacctttgacagtgtgtatccttggagagcaggctggggcttgcaagccttcgttaaggagagaggtgaggagggctgaccttgagttgaggaatatgaattgggaggggtgaggaagtggaggggaggggaagggaggaaggagcggctcaggctgacagaggcactcccactggagccctggagatcgcacttcagaggttcagccaacccagaagactcccaaaccttctgcaagacatgtccaggccagaccatatgccatttggatcacctgctaatttggttcaccctcttgtgccctcgtgctctccagggcttctgagctgctggagttgaggccccttcccctgggactgtcactgcttagccacatctcttgggcctgtgggtaagcaccaatttacagggctctgtgaattcaaaacagttactctgaatggtctttgctaagaacaatttaatgattaagtaaggtcagtgtccttggaagtccaaactctagccagatttccctggtctacacccctagggataaggtaaatgtttaagcacacagtgaacttcctgaggcccccaaatctaatggaactagctattgagggctaaaagagga

SEQ ID NO: 817 - DNA, 2300 bp, Homo sapien
ggagccccagtgtctagaatttttttcagacagggtctctctctttgtcacccaggccggagtgcagtggtgcaaacacagctcactgcagcctcaacatccttggctcaagcaatcctccaacctcaatttccagagtagcttggactataggtgcatgccacaatggccggctaattttcgtattttttgtagagacaagatttcaccatgttgcccaggccggtctcgaactcctgagctcaagcaatccaccagcctcaacttcccagagtgctgcgattacaggcatgggccatcgtgtctggcctagatttttttttttaagccagcgtttctgttgctcacctaggcagagacccctcaggatgcaacatctaaacaccattgccatctctccagtccccaacagcctggtggagatgggcctgcagctgcacccatcacagcccctgctcacagtgtgcagactgtaccctgcacaggagatcccactgaggagatgtggggcctgaaatccagtcataccctacaaccaaggcacacagtacattccctcatcttcccaggaacaggcaccacttcctaatttaccatgttacccattcaatacaaatacagggagacctgtgctctcctctgctgtgggacacagataggggctcctcaggatgcaggcccaggatgaattcctgtaggagataatgcttgggtcaagtttggtttagggaatagaagcaaagaagtcacctctctactttttacctccccaatccaggctaccccaccccatgactccctgtggttatcagggacatcaccattctcctggccactgacagggacactttaataacagtacacattggccaggcgcagtggctcacacctgtcatcccagcactttgggaggccaaggtgggcggatcacctgaggtcaggagtttgagaccggcttggccaacatggtgaaaccccgtctctgctaaaaatacaaaaattagccaggcgtgatggcgggtgcctgtaatcccagctgcttgggaggctgaggcaagagaatggcttgaacctaggaggcggaggttgcagtgagccgagttcacaccatcgcagtccagcctggtcaacaagaacaagactgtgtctcaaaaaaataaataaaaaccactgtacatcaacaaggcccttggggacagctggggcataagtaggtgtcagccatacatcagagcagtgtgcctgccctgagctgcttggggttgaccagcctggtgtccagaaatgcctgctggagggagtcgtggtacaggaaccttgtgctcttagaaggtctcctgagaggccctgtaaagccagagtccctcttagcagctcagatcagtgctatcaaagtatagctcggggattgctgccagcatacaaacttttactggtctgcagcgagataagtacagaaattgaaagtaagcatttagaaacttttataacaattttacaaggtcttgtcaaatgttattaaaacaaagctgaggctggaatttcacctttttcatttcgtttttttcaatttaaacaaattgtagtaaaatatagataatataaatgtaccattttagccatttttgagcgtacaatttagtagcagtaagtgctttcacaatattgtgtaaccactagtattatatagtatatatttttaaaattttacagaagtattaagttagcagcagattaaacatttttttcttaaattgagcttgagaagcgctggcctaaatggtaacctgtggggaagccttgatggtttggaggctcctaattgagtccattgcttggcttttttccccaaatcacggagtggagttaggtcccagagaatggtgttggctgaggcccaggctcccacccgggctagaaaactgggcagatgggcaccacccttgaagggaggccagccaggcactgcaaagcctggggtagtgctgtcccgtgtgcccgggccaggaaggctagatgagaggcccgggggcgtttggtttagaggcccagcaggctttccttctgactcagtgtagggaggcggttgtttagaatctcaagaatctcagctccagctgggaggggaccctcagcggctcagcggctcagccgtggtggcatctaccctccctgtttaaagaaggaatctgaggtaagagagaaagaactggttcaagcttgcaaccagttagtgatgtagtagtgatggtctcaaatacaggccttttaattcctaggcagaggcagggcagagattt

SEQ ID NO: 818 - DNA, 2300 bp, Homo sapien
tgacacttgcctcctccctttttgcccaggtgaaacgaaggtccaaaatgtccctgtggctgaggcctctgccagcagaagctggtattctgtacttaagggcgtaggaaagggtttctgacttgtttcgtacatgcacttagatttttaaaacttagttgtagggtttgatgagctccaaaatgcagcagcttcatggaagggctctggttcatagttagaaaggcctggcctgcttccatcgtggccaagagcagagcagtacctgcccagtccttgggcaccatatcctactgagacaagtaggctgctgaaattggatccataggaagaaaaaacagacaggaaatgagccagctacctcatagcagccatctcagcagaaaaggactgagcctctcctgggcctggagcttccaatccctgtggcctcctgctcccctcactggcagaaagccccagtattcactgggatggggaagtccccatgctaagcctagcctcccctcttccctgctctcacagctctctatttaatagcagcaactaataattatttgcattgtctcagtgaatccccagaacagccctatgaggttatcatggccattccataggcgagaagtaaggcaactggacctagattaggggatttacctaaaatgacaactagcaagcagtagagtcaggactcaaacccagacttttaacccccatgctgtactgcaactcctcatgtatcacaagtgttactcattaattcaagtgtctccccagctagaacacagggtccctgaaaacagggactcctcctgtcacattcaccactggatctcctggctcgtggtgggaggttaatgtgctggattaaataatgatgagtgggtgggtgactcccacggtctacctcagggcactggctttgtcctcatcctttgcggaccccatgtggagtaaacccgattttctagaagcaaatgaagggtctgcaccagctttgcagatggctctgaggtgcacaatccttaatggaatcctcctggatccgaacgcacaaactggtggcctgcagccaatgttgaaccataggcatgttgcattcagcccatgctgtgttttaaattgttgaattagctgacaattccatgtgaaaatctgatttcaagcttatcttgaaaaaagctgacagatctggcaaccctgggcttgcagtcccacccagcggccgtcagcggactctgggcagttgctgcccccttgaggcgggacttgtgttctgcagctctccatccccttgggcccacccacttctgtctttcgctggatccgccctgcccctgctggaggcccagcatttgcagtccctgacacagagactagtaactccatcactccaagtcagccaaactgttttttagatcaaaagtccagtcagtataaaaggacgtgtaatagcctgtaatcccagcactttgggagaccgaggcgggcagatcacgaggtcaggaaattgagaccatcctggctaacacggtgaaaccccgtctctactaaaaatacaaaaacaagattagccgggcgtggtggcgggtgcctgtagtcccagctactcgggaggctgaggcaggagaatggtatgaacccgggaggtagaggttgcagtgagcatagatcacgccaccgcactccagtctgggcaacagagcgatactgtgtctcaaaaaaaaaaaaaaaaaaaaagacgtataataaaagtgaatctccctccctcccaggtcacctagctgtctcccgtgtctccttccagagatgtactgtacctctaagcccagtcaccaaacacttgctggcacctctatgggccagacaccagctgggtatcaggatcacatggtactttttcaaaatatgagactcaggaccctcagacctttggaggtagaatttctaaaattggagccagcctgttgctgggtgtggtggtacacacctgtaatcccagcactttgggaggccgaggagggaggatcacttgaggccaggagttagagaccagccttatttatttagagacatagcaagattctgtctctaaataattaaaaaatgaaagtaaataaaaaaataaaattggagccccagtgtctagaatttttttcagacagggtctctctctttgtcacccaggccggagtgcagtggtgcaaacacagctcactgcagcctcaacatccttggctcaagcaatcctccaacctcaatttccagagtagcttggactataggtgcatgccacaatg

SEQ ID NO: 819 - DNA, 2300 bp, Homo sapien
ttatccaccacgtcagacacagacaaagcaggggtgggtatttcatttgcacaatgagttgtaggcagtattaagatggctccgggggcactgttgagttgaatctggaatatcttcttacagtttcggtgaaatgttaaagagtttatgggggaaaaattcttcacccttgtgactttgtctgattttaaaaatccaagagttttatgaccgagaaagctcagttaacttgattttctggaaccaatatcatattcaggtcatatttcccaatgtttatttagtagattttgataatttttttcgtggttaatttagacgtctttattccacgtatttttctgacgatgtatgtagatgtgatgtgagatttttttgggttgatgacatatagaaaggcaaagaaagtgattgcatgtttttgaaaatcattttcaggactttccttatcccagttgattgtgcagaatacactgcctgtcgcttgtcttctattcaccatggcttcttctggtaggtaatctatttggaaaatctgaaattgtaatgggcttatgattttagattgagatggctcaggtcttcgcctttgatttggcacttatgttttggtcttaccaaaacctattttatgaataggagaagaatttaaaaatgattatcacttgaatgtgccgagagctcgtaattgtttattggacagtttggcttagtctgaagcaaaattgtggagtttgcacaagtcttttgtttatgaaagcgattgtcagatactgatgtctcaaaacagtatttattaatccaaaaatgttgagctttgtttttctgggagatggtttttattttttttgagacagggtctcaccttgttgcccaggctggagtgcagtggcttaattatagctcattgcagccttgacttctggagctcaagtgggctcaagcgattctcccacctcagcctccatagcatctgggactatcgacatgggccaccacacccacctaatcaaaaaaaattttttttgtagagatgggctttccctttgttgcccaggctggtctcaaacttcagggctcaagggatcttcccatgttggcctcccacggtgctgggattataggcatgagccatggtacctggccttgggaaatggtatttagataataatatcttgcctgcaaatacatcttcccctagtgtcagtagactgataggaataaaaaggggaaaaaaaacacaactttcctcatcagccctagtttaatacattaaattgatttgggttttagaaaattatagtacagtttattagaacaggagaatcctggttttctgaattataaatataatcaattctagatatccaggtgaaagaactggagaagcgtgcctcaggccaggcttttgagctgattctcagccctcggtcaaaagaatctgttccagaattccccctttcccctccaaagaagaaggatctttccctggaggaaattcagaagaaattagaagctgcagaagaaagacgcaaggtaaacgaagcaattcacagaaagcaggatattaatttatgtaatgggcagatcaattttatttctataacaggaagaaaacagaattgtagctacactgtgattattacatatgccagtgactggaaggaaataccagtcctcatttattgaactcctgttacatgcccgctcctttgtttatatttttctcctttaatacatggtgttgcctcaaataatggaaattagaaacagtttcaggaatgttaagtcgtttttctgcagtcatacaactagtaagtgttggggtcagaattcaagccctggtctatcttaaaccaaagctcatgcttctctcatgcttcctctttgaaaagatttgttgccagatgattctttggcactttggttttgttttttgagagctgtacaataacattttaaattgctagtgtgattgtgttgctcagctggtatcatggtagcttttctcttatctaaacaattctattataaagtaactatctttaaaagctaatcagaagaatcaataaatattaatatgctagttgtagaaaatttgggaaatacagaaatttataaatggaaattaaaagtattcattatcccgcttccgagaagcaaccagtgttaacattttggtgtgtttctttccattcaatgttactcattaacaactgtacataacttttcatttaactccctttctcaacaaccctgataggattgattttaaagctggggcaagtgaggcacaaaag

SEQ ID NO: 820 - DNA, 2300 bp, Homo sapien
tagtcaggaatgtgagacttttgtgtggcaatttattgtacttaaaaaaatgcattaaatgagtgggaccttcctctgtgaacctccagatcaaatacaaagacttcaagataaaaagcctgttcagtgggtaaggacctcttgggcttgggttccttgctcatttgtgttgcctgcctatctgtcgctttcctgaggggtctcatgcccatccttctccaacttttctaatgatgtctgagattctgttcagaaaaatgacagacggaagcacctagccattttgaagctaagtttggtctgagaagaagcctttcaaggctcagtatctgaattattcctggtcctgctcacaggctaagtgaaaaccacttcgattggcttgggggggaggccgaccccacacaagggcgattgttggaaaaaatgccgcaacaagcatatttcaggcaacagcgcattgctaattgtttgctttgtgtagtgtgctgctgcttgtatgatccagtttttattgtcttgggcaccccttagttgtattttatctctggcacatccctggtgactaactaggcatgagagtctttctaaattaggactgttgtttcaggaaggttggtcacatttgtttcttgatttggggagatgcagctcattaataaaataaagatatctcttctgcttagtcaagatctcaaagcaggtgtcttggtgtattgaccaccaaccgaggacacggtcttggtcagagaatgggaggaggcggggaccatgttcatttcatttatttttttcccctttttgtgagagaaagggccagttattctaaggcacggtcagaccaatttcctttgtgcctttgctgaggttctgagctatccaggtcagggagaacagtgaccttgtggctcctttttcgatttttaaaaagaacccagtgctgctctggggagcacgtgctctgagaacaaaagcaacacttaactgcaatctgtgtagtctagaacggctattgctcttcctcccctatcatccgcagaaggcttggaagaacagatggagtctgcatttaagctgagtggctttgttagaccaaaggcgatcaaattccagagccccacgctttcccgcacaggtccctggtcaccggctcgggaacctgaggatgctggcaagaacgcacacagtgagggaagggccacgcccgcgacctgtgggctgagtggattagaaattacgatgatgtcacaatatgggtgacacgccggtgtcggtgtagggtgccgggggcagggggccctgcaggggcgtggagtggcattgtgctgtcacaggggctcgggcgtcttaggcacccatgtgggtggcgcactagaaggggcactgctctgtccgagtgctgcccttggggcgaggcgggcatgtggctctacaaggtggagtccaggcggccaaagtttggaaaggtagggaaggacccccccgccctccgcctgctccgccctgcccttgttctcgagaatggggagctggttcggacctagtccggggtccactgccacgccctcttccacggcgagaccacccccctagtcccaggcccacacctggggatgctccccaggcgccctgcaacccccggcattgtcctcctgccctccgggacaggactacacttcccgaggtgcttcggggtcccggggggcggcgctccacgcgggttgtggggggcgggggcggcacgtgccgccgctctcggccaatgcggagccccgcgcggaggtcacgtgcctctgtttggcgcttttgtgcgcgcccgggtctgttggtgctcagagtgtggtcaggcggctcggactgagcaggtgggtgcggggctcggaggaggcggcggctggctgaggccagcaagagggacgcggtcggcgggaggggctgggccgtggcagcgaccccctgctgcagggcggcgggcggggctgcgggcctcggaggggttggtgggcgggggtcgctccgctttgtgtgtggctcgggcggagcctcgcctttgtccccgctctccgggggcgcggctgttcgtgggcagggggctgggcgatcaccgggcgtccgctccggggtgccgtcgaggagacaatagggggcgtgggccctcgtttacctccctccctccctcccttccctgcgggccccgccgggttccccattgtctgaagggacggggcggtgccccagggaccagcggctttaggaccaaactgcgggcagccagggccgcgaccctccctgcgaccgtc

SEQ ID NO: 821 - DNA, 2300 bp, Homo sapien
aataataaaaggacaggaatcccacctcaaaagcacctttttattcaaaggctcattctaggggaaactttaacccagccctctcagtcctcaagcagctgtgaggagcttggaacattgtcacagactggcagaaccaggcatctcccaacaaacccagaagccaagtggcattgctaaaaaagattaaaaatgaacatgagttctaacatctacgttccttgctatggtttccatggaaatagacatctgctctagggagaaagaaaatgtggggggaagcagtgtaagtgctttcaaattatcagtgttttgaaagatttatttcttttttctgtcacaacattaatagtcaggaatgtgagacttttgtgtggcaatttattgtacttaaaaaaatgcattaaatgagtgggaccttcctctgtgaacctccagatcaaatacaaagacttcaagataaaaagcctgttcagtgggtaaggacctcttgggcttgggttccttgctcatttgtgttgcctgcctatctgtcgctttcctgaggggtctcatgcccatccttctccaacttttctaatgatgtctgagattctgttcagaaaaatgacagacggaagcacctagccattttgaagctaagtttggtctgagaagaagcctttcaaggctcagtatctgaattattcctggtcctgctcacaggctaagtgaaaaccacttcgattggcttgggggggaggccgaccccacacaagggcgattgttggaaaaaatgccgcaacaagcatatttcaggcaacagcgcattgctaattgtttgctttgtgtagtgtgctgctgcttgtatgatccagtttttattgtcttgggcaccccttagttgtattttatctctggcacatccctggtgactaactaggcatgagagtctttctaaattaggactgttgtttcaggaaggttggtcacatttgtttcttgatttggggagatgcagctcattaataaaataaagatatctcttctgcttagtcaagatctcaaagcaggtgtcttggtgtattgaccaccaaccgaggacacggtcttggtcagagaatgggaggaggcggggaccatgttcatttcatttatttttttcccctttttgtgagagaaagggccagttattctaaggcacggtcagaccaatttcctttgtgcctttgctgaggttctgagctatccaggtcagggagaacagtgaccttgtggctcctttttcgatttttaaaaagaacccagtgctgctctggggagcacgtgctctgagaacaaaagcaacacttaactgcaatctgtgtagtctagaacggctattgctcttcctcccctatcatccgcagaaggcttggaagaacagatggagtctgcatttaagctgagtggctttgttagaccaaaggcgatcaaattccagagccccacgctttcccgcacaggtccctggtcaccggctcgggaacctgaggatgctggcaagaacgcacacagtgagggaagggccacgcccgcgacctgtgggctgagtggattagaaattacgatgatgtcacaatatgggtgacacgccggtgtcggtgtagggtgccgggggcagggggccctgcaggggcgtggagtggcattgtgctgtcacaggggctcgggcgtcttaggcacccatgtgggtggcgcactagaaggggcactgctctgtccgagtgctgcccttggggcgaggcgggcatgtggctctacaaggtggagtccaggcggccaaagtttggaaaggtagggaaggacccccccgccctccgcctgctccgccctgcccttgttctcgagaatggggagctggttcggacctagtccggggtccactgccacgccctcttccacggcgagaccacccccctagtcccaggcccacacctggggatgctccccaggcgccctgcaacccccggcattgtcctcctgccctccgggacaggactacacttcccgaggtgcttcggggtcccggggggcggcgctccacgcgggttgtggggggcgggggcggcacgtgccgccgctctcggccaatgcggagccccgcgcggaggtcacgtgcctctgtttggcgcttttgtgcgcgcccgggtctgttggtgctcagagtgtggtcaggcggctcggactgagcaggtgggtgcggggctcggaggaggcggcggctggctgaggccagcaagagggacgcggtcggcgggaggggctgggccgtggcagcg

SEQ ID NO: 822 - DNA, 2300 bp, Homo sapien
gatcttgaagttcgttttaggaagctttcgagaagggcgattctgcccctctccaaggtgaagtggcaaaactgttgtctctccttacagttgaaagcccttcctattccaaggcttatataggacacccacaaaagctgacaataatgagctgtgatctggctcttgggaaggcagccccaccctaaagaacaaggatcagactgggtgtggtggctcatgcctgtaatcccagcactttgggaggctgagacaagaggattgcttgaacccaggagttcgaggccaacctgggcaacatagtgagaccctgtctcaattttttttaagtcaaataataataataataataataataataataataataataataataataaaaggacaggaatcccacctcaaaagcacctttttattcaaaggctcattctaggggaaactttaacccagccctctcagtcctcaagcagctgtgaggagcttggaacattgtcacagactggcagaaccaggcatctcccaacaaacccagaagccaagtggcattgctaaaaaagattaaaaatgaacatgagttctaacatctacgttccttgctatggtttccatggaaatagacatctgctctagggagaaagaaaatgtggggggaagcagtgtaagtgctttcaaattatcagtgttttgaaagatttatttcttttttctgtcacaacattaatagtcaggaatgtgagacttttgtgtggcaatttattgtacttaaaaaaatgcattaaatgagtgggaccttcctctgtgaacctccagatcaaatacaaagacttcaagataaaaagcctgttcagtgggtaaggacctcttgggcttgggttccttgctcatttgtgttgcctgcctatctgtcgctttcctgaggggtctcatgcccatccttctccaacttttctaatgatgtctgagattctgttcagaaaaatgacagacggaagcacctagccattttgaagctaagtttggtctgagaagaagcctttcaaggctcagtatctgaattattcctggtcctgctcacaggctaagtgaaaaccacttcgattggcttgggggggaggccgaccccacacaagggcgattgttggaaaaaatgccgcaacaagcatatttcaggcaacagcgcattgctaattgtttgctttgtgtagtgtgctgctgcttgtatgatccagtttttattgtcttgggcaccccttagttgtattttatctctggcacatccctggtgactaactaggcatgagagtctttctaaattaggactgttgtttcaggaaggttggtcacatttgtttcttgatttggggagatgcagctcattaataaaataaagatatctcttctgcttagtcaagatctcaaagcaggtgtcttggtgtattgaccaccaaccgaggacacggtcttggtcagagaatgggaggaggcggggaccatgttcatttcatttatttttttcccctttttgtgagagaaagggccagttattctaaggcacggtcagaccaatttcctttgtgcctttgctgaggttctgagctatccaggtcagggagaacagtgaccttgtggctcctttttcgatttttaaaaagaacccagtgctgctctggggagcacgtgctctgagaacaaaagcaacacttaactgcaatctgtgtagtctagaacggctattgctcttcctcccctatcatccgcagaaggcttggaagaacagatggagtctgcatttaagctgagtggctttgttagaccaaaggcgatcaaattccagagccccacgctttcccgcacaggtccctggtcaccggctcgggaacctgaggatgctggcaagaacgcacacagtgagggaagggccacgcccgcgacctgtgggctgagtggattagaaattacgatgatgtcacaatatgggtgacacgccggtgtcggtgtagggtgccgggggcagggggccctgcaggggcgtggagtggcattgtgctgtcacaggggctcgggcgtcttaggcacccatgtgggtggcgcactagaaggggcactgctctgtccgagtgctgcccttggggcgaggcgggcatgtggctctacaaggtggagtccaggcggccaaagtttggaaaggtagggaaggacccccccgccctccgcctgctccgccctgcccttgttctcgagaatggggagctggttcggacctagtccggggtccactgccacgccctcttccacgg

SEQ ID NO: 823 - DNA, 2300 bp, Homo sapien
gcctgtaatcccagctactatggaggctgagatgggagaactgcttgaacccaggaggcggaggctgcggtgagctgagatcccgccactgggccacagagcgagactctgtcccccccgcccccctaaaaaaaaggaaatccaaagctggtcacccaaataccaacttgaagcaatttagcaacaaagtaaaggccagagttgggatggtagctgatagatttgaagggaactttgggctactggaggatgagatctatgatgaaaatgctggaaaatcaaccatttgcttaaaaaggtaaaggcatttgggttgtttatcctagaaaagaccggattggaaggaagtatagttaaactcaactgttttattttgcaacagggaagaatctgattgtgcccaaggaagagcttcctaactgtgacaaaggaggtaaaggaggtggtgacatgcccatccctgggaaattttaaactcagctggccagcaaatggctccagcatggcctggtctgggagtaggagactgaaagaaatgacctccagctgtccctctcatgaccaaggacctctggcttgtcgtgagtgttctggccagctgcacagcacggattaatgggccaaagggagccgctctctgatctgcgctaagcttttcaggttctgtggccaccgccatcagccacagatttaatgagatccgaggcttaattaccacagtgcagggctgccagcactctctcctgatgactttatcttggctcctggaaggatgggggtgacaacagtgtgtcggcaggagaggagagcctaaagcagggactctggaccctggtgtttcggggggatgtgggctgcaagagtagggtggagggggcgactgcaggactcagtacctgacctcaaagagctcacaatgtgtcaagagttaagacctctaatacaggagatacccaaggcagtgtgagtcgactcacatgtgcgaggcacacacagatgtcggcggaaactttggaggcatgaacaaagctcccagaggaggggcgctgaagggtggggggtggggcgtgggggagtgcaggttggagaagaccttgaatgtcaggctaagcagttgggacttcacttcataggtagtagagggccgttgaacgtttttgagctgcctgaacgatccaaatttcctatagaagtttacagaactcctgaggatgggctctgcctaacgcccactcccccgagaatactctccttccatccctcacacttagctgcagccagcactgaacttaatgccatactctgaaacgtccttcacagtctctgtactcctggctacgttctttccttatatcgggtctcaatgttaacaaacatcactccctctaaaaagccttgcggacaccgcccttttcccccaagcctggccagaggccccttttcaaggctcccacgcttgctgtgtctccccatgagatcacggctctgtgctgtcattattcatttgtctgaattctctgctagactgtgattctgttgaggctaggagcggtatcttgtccatcagtgtcgctaagaaccagcattagacagtaatgtgggatggatgcggcccagcagattactcgggttcctcccctttctctgccagggagtcttttgaggacaatggaaaatcacaggtgtcaacagatgcaggctggtagggaatgtccccttaatttgaatgatcagtctattattcttacaggaagcaaagtgtgcagaagacacaaaacaaactccaacctcctcccacctccttgagaataaagcgaagcggggaccatttctaggcacgcctgaggactatttgaggagggtgaggcggagggttacgcacgggactaaggcaaaaccctccgctcgagagcagaaatcgcggcggcacctcttcaggccaccagggggaggaatcacaccgcatcccaggccttgggcggtttcgcacgaccacgcggggctggacggtcgcgtagaactctgggaggtgtagttttagagttgtaatgcgcaatctcgcgcactgtacatcgggaattgtagttctagattgaggaacgagaagtgcttccaagcgtccattttgagccttggaaactacgacgaccaaagggccacgggttcatgggtcgtttctcatttccgtcgagttaaacgtctggggctgcttctgaggaatcagcttgactgggtaagtttgattggagaaaacacctatatctcaattgagcttcctgcagacttttgtattctggccc

SEQ ID NO: 824 - DNA, 2300 bp, Homo sapien
attttgtttcttgcctatttcccctccctggagggtaagttccaggagggcaagattttttctgctttgctcactgcccttaagacctgcctggccccacaataggggttcagtaaatagctgttgaatgaatgagagacttgtggggtgacagaccagtcaaaaagctgtccctgcctccagtcctgccatttcctgtctgatcccacacagacagccacagcgatttttctaaaaaccacattgctgtctttcaggtcttagggtaggtatcacttcctcggaagccttctctggccccctgggctaggcagcccctctgtgtactctcagggtcccctcccctcattctgtaattgcctgcaattgcctagttctataattgtcttctccaggacagcgagctctggagggtggggacgcgtctgtctccctccctgttgggagctggaatggtgcagcggatataggagcacactacctgggtccaagtcctggctaagccgtgagaattcaggcaaattacttaagctccctcggcctcagttttcccaactgtaaaatgtggatcatcacagtttctccctcctagggttggggaaaggatgaaacaagctgatacaaaagagggatgcttggcacgctgtaagtgcaatacgagtgtcagctatgattactcttactcagggttgtgttcctggcctagctcagaacctggcccatattcaacactcataagtgtttgttagatgaatggatgactgtgtatggggatagagggatgaaggaatgacatgaggacctagacgggggctctaacccagcctgcggagcattggagaagcttcttgtggggagggagctttcagctgactcctgcaggatgaggagttggctgggcacagtgaaagggggggcgtgcgaagcagccagtggcctttgtggatgcctctcagtgtgggaggactgagttatgcaggaactgcagttcatcaccgagtggctgagccattagtgccaagaggcaagtgtcccctttgtgggccatttttaggactctcacactggctgctcactgagggcaaaacatcccacggtggctccctggtctgatcagcagccctccaagatcaaggggaggcacgcaggggaaaggaggccaccacttgttgagggacctcaggggacaggcctgcgtcaacctggcaacccattcctggctgacattatgcccatcccagagataaggggacagaggcccaacacccccgaggcagtcaggggaagaggcagaacccactcaagtctgtccactccctgtgccttccctcatcagcccagaactcctcatggccagagtgtgtctcccccgtcaccccagagattcctcagtggctgacatcacccactcctgactcccctcacagggcactgaccggggaaatccctccatggggcctggactatggaagagtcaagtgcaggaagaactttccataaggactggagcaaaaggctgggaattggaggagattgggggtggggctgctgaaggaggagagaccaatcctggggacagttgggggcaccttacccaattcctccacccccgccccttaactcctcacttgtctcacctgttgaccttctcatgtgccgattcagagattcctcacactcaggctctgacctccactgactctgatggcccacagcaggtgcagggtctagtttttctccagccacagggcccacagctggggtgaccaacgaccaggagctcaggattgaaatccccaccctgccacttcttagctgggtcaccttaggaagagttcatcccctctctgagctttcctcatctgtaagaaatgacaggtaaatctctgccttggagggtggctggaggactgagagacagaggctgtgataactcatggccagctgtgagttgcagtacttgctggttggattagcaattgaggaaactggtttggaaggggttaaatggagaccctgcctcccagccaggagcgaatcagggctgggaggggaggagccaggctgctgctaaggaaagagatcaggatgggccagttgccgactggagagggatgggaggagataccatagggtttggggggcttggcacagcggccctggcctctgcactgtgatagctccaagccagatggtgcaaggcagctgctgggctgcggggaagaggggctgcacttcctgagctggtgcagcggcagagtggataaggatcaggaccccgagccctcctggccctccaa

SEQ ID NO: 825 - DNA, 2300 bp, Homo sapien
catcgtcaccttcctctttgtgggagatggcccagcctgtcttccccagaagcctcagtttactagctgaacaaaaggcacatactttaataagtcagcttctttacatgtacaaccaaaaaggtggactcagatgatgacttattagttccttctagctcttacattcctagatatatgaggggtggggtaaggggcagccataccggccataccttcagcagagcccagtgggacccaggccctgactttgtgtgggaggtgggtggggaggatcctgaaggaagggggaagactccttagctccaggcccatgccaaggtgggtgttggggttgggttcttcctcagagatcttgggagccctggtctctgtactgtccatctgggtcgtgacgggggtactggtgtacctggctgtggagcggctgatctctggggactatgaaattgacggggggaccatgctgatcacgtcgggctgcgctgtggctgtgaacatcatgtgagtggggccccagtttccctcgtctcccctcctcctcccgcctctcacacccacacctatgtctgctttgcggaaagagactgtgccactttccagcatacgctacagggacagaacttccctaatggtctgagctctggcacctggaacacctgggtcctaccttaggcctaggccaagaacactgggagctgtaaatcggagtcttcatccactctacccactccctgatacatgtcagggactagccttggtggcttcatacctgaagtggggcgggaagaggccagttgttgcaggagtagctgtccctaggggcagaacccaagtctgaaattggtctcagttagagacaatgggtgtctctttcggggtctttgttcagaggcctcagtttccccatctgtgacatgatggagtgaactgacagtgacctccctaatgccctcctgctctgagatttgacactgtggcattgttgtgcccaggctcagcctggcattggcgctgggccctatctctcatggctgtctgaaccaaggccacgtgggttggacttctcacatggccaaagagatcacaaggtttaggggcttgagatttttgccctacaagttggctagtcctaataggtgacctccatctgcgacctcagtgagcccttggctttgtctccacttccatagaatggggttgacccttcaccagtctggccatgggcacagccacggcaccaccaaccagcaggaggagaaccccagcgtccgagctgccttcatccatgtgatcggcgactttatgcagagcatgggtgtcctagtggcagcctatattttatacttcaaggtcagagctgggacacagggtggtgggggtggcaggggagtgtagaccacctgagtatactctctaccggggtttcttttcagattctagctccctcccagttctagggaaaagggtggggagaggaaaggaacatttatccaatacctaccaagtgtcagcacttctgatcctcacaacaacctgaagggtaggtggtagtgttttctgtagctcagaaaggttcagtgacttgcacagtgtcacacagccggtaaagcatagagccagattcaagcctacgactgtgtgttgtcaaaccctgggcaatgcccatcacatagaggcagggagctgtagtggaaagaggcaggcatttgctctgaagcttggctctcctccttgctagccatgtgacattggatgagtttgcttgctctaatggagcctcaatttccccatctgtcaaatggggacggatggcggatcagatggtatctaagatgcctttttgctctgtccatgtctcagctccttgagaaggaggggtgggaagggactgccttattctgaactgtggtctgtcctttctgctcttgcagatgtgaaataaagagcagaaaactgggaggcagggccagggcgaggctcatgcccacccagcagagagagcacctctccccagcagtgctgggtgggaggggagaagggaagctgaggtgttagatggtgaactccaggtctgccttcctgtcttcctgcagccagaatacaagtatgtagaccccatctgcaccttcgtcttctccatcctggtcctggggacaaccttgaccatcctgagagatgtgatcctggtgttgatggaaggtaacctgggctttgtggctccctttttgctcttggctctcaagcgctaatcagctcaaatagggtatgtgtgtgtctggggcatcctagcacatggg

SEQ ID NO: 826 - DNA, 2300 bp, Homo sapien
tgcctcagaattctgagtagctgggattacaggcgcctgccaccatgcctggctaattttcttatttttagtagagacgaggttttgccatgttgaccaggctggtctcgaactcttgacctcaggtgatccgcctgcctcagcctcccaaagtgctgggattataggcgtgagccgccgcacccagccaacattttttaaatactgaaaagtagagggaatagttatagtgtaccccatttacccatcactcagtttcaacagctggtgacatatttatttcttctataccagtaccgtactctccccactgggattattttaaggcaaaacccagatgacattttatccctaaatactttagataaaggtgttctttgaaaaaaatcataacctcaggaccagcctggccaacatggtgaaaccctgtctgtactaaaaatacaaaaattagcttggcatggtcgtgggcacctgtaatcccagctactcaggaagctgaggcaggagaatcacttgaatccgggaagcagagattgcagtgagctgagattgcagtcgagcctgggcgacagagacagaaatgaaactctgtctcaaaaacaaacaaacaaaaaaaccactatacataaaaatgaacaatgatgccacaatagcaccagagaattttataaatacagattcccaggccctgccccagacctactgaatcctggaaatattcaggctccacacccagagattctggttcggttggtctgatgcagggacctgtaacctgcgttgtaacaccttctccaggtaatgctgagcctgctggtgctcagagtagacagacctggagaaaaccagggtgtctgaggttttccagaagaaaaccagagtccagagaagcagagaggcactcagtgaggacccaagcagagcgggtgcacctcacatcctcactcctggcaccccgtctcctacaagatgagagactgaaagagccccttcctgtccccagtggtgtgggcaagaggcctgcacctctgactcttggctctgtgaaaggccatacccaccaagcctatggtcctagcgacaaagggtgctggggagacgaattgaccagacagggaggtctccagcagcttctttctacacagagggcacctgtcagaggccagcgtgggggccacaggctccccaatccccaagaaccgccagggaaggaggctgcttcaagtgggtggggcaccaagctggccaggaaggacagggcttctcccagcggtaccaacacggtggcacctccggcctgcatctcccaggcttgcttgtcaggcttcctggggctcccaggagccgctgcgggggaggggagaaggggtggcagcagtggcagtggtcgtctctgctccgatggtgactgccgatgacactgttctctgtgcgggtggagacaaagccggccactccagattctcctgcgcgcaggagaggaggagctggcgctgcttcagtggcgaggatgggtcgatcagtcccagccggtcctagggagagacactgccccagcctgagggcggcgcagcccaccccaccccaggaccctcctagcaggaggacaggaacgcaagccgacctcggggggtctccggcctgagaggggaacatgatcaagcccagggcagccgccagtcggagggggcagacgcggccccagtagcctctggagaccctcttccgaggcaaggagccacattcctgccgtcgggaccaccaaagcggatttctacaaactaaagtcgagaacttttcggcggcgaggcggcgcaccccgcgcgggagagggggcgcaggcgtcaccccgtcctcactcagcaacacccggcgccgcgccgggcgaaggctggcaaacttctcgcggccggcaggtgggctccgcgggccccatgggcgcaggcacaggtgtgcggggccacagccgggccttttgcagccggcgaccgcccccccttccccgcgggcttttgcacacgacgcgccgacggcagcttcacacgggttggcgagggccggataaagccggcggccgcggggcgcagcggctgacccgagacacgggagcgcttggcacgcggagccagagccggagctgcagccgcagcgggagccgggggagctcaggggccgcaggagccgggccggagtgagcgcacctcgcggggccctcggggcaggtgggtgagcgccacccggagtcccgcgcgcaactttcagggcgcactcggcggggcggctgcgcggctgccggg

SEQ ID NO: 827 - DNA, 2300 bp, Homo sapien
gagttcgagaccagcctggctaacatggtgaaaacctgtctctattaaaaatacaaaaattagtcgggtgtcatgacacatgcctgtagtcccagctactcaggaggctgaggcaggagattcacttcaacctgggaggcggaggttgcagtgagctgagatggcgccactgcactccagcctctgggcaacacagtgaaactacatctcgggaaaaaaaaaaaaaaaaaccagccactggaactgctctaatgacttctacttgccaacgtggaagatgtcctaaaatacatggagaaaagttaaaatgtgtgcagcgagctgagggacgccttctaagtgtccaggcagggctttgtggcaccgcatgaggggtttccctttctttctttcttttttctttttcttttttttttttttttggagacagagtctcactctatcaccgggctggagtgcggtggtgcaatctcgactcaccgcaacctcctcttcctgggttcaaacgattctcctgcctcagcctactgagtagctgggattataggcacctgccatcatacccagctaatttttgtatttttagtagagacagggtttcaccatgttggccaggatggtctccatctcctgacctcgtggtctgcccacctcgacctcctaaagtgctgggtttacaggcgtgagtcactgtgccctctgggtttttcctttctatctcccttcctgggctgtgagtttcttggggcagggaaacagatcactcatccatctgtcacgttgtgatgtatactagttacctgatgtatactagtactcagaaaaatgtctgatgaatgaataaaatttctgtctttgccacttattttctttcttttttgttttgttttgttttgtttggagatggcgtttcactcttgtcacccaggctggagtgcagtggcgcgatctcagctcactgcaacctccacctcctgggttcaagtgattctcctgcttcagcctcctgagtagctgggattacaggcgcgtaccaccacacccagctaagttttgtgtttttagtagagacagggttttaccatgttggccaggctagtctcgaactcctgacctcaagtgatccacctgcctcagccttccaaagtgctgggattacaggtgtgagacaccacgcccggctgccacttactttccaactgactttgaatataatccttttcttctctagtcccatttcaaaatctgtaagatgaggggactggactgtgtttcaaaggaggcttttcagcactaagtgaaataagtggccgagggatggaggatgggctggttggagtgggggtctccatcatctccagcaaaatgctgtgctgaagtctgaggcagagggatgggctcagagagaggggctgcccgacccttccatctaggagctgcccaggactccagaggaggggatggaattgatttaggtcagtgaggggttgcgtggggctgggagggggttgaggttgggaggctgaaggaggagactcccttcaacctgggaggtggaggttgcagtgagcagagatcgtgccactgcacaatcctttctatctcccttcctgggctgtgagtttctcggggcagggaaacagatcactcatccatctgtcacgttgtgatgtatactagttgcctgatgtatatactagtactcagaaaaatgtctgatgaatgaataaaattcattcatcgaacattttcatcatagcattggctattaaccccttgaatccccgtggctcacttgctgggtcccatccctgacccactagcctggtgccggggggagaccaatttctggaggaagctctgggtacccagtcttgccctaagcctgcctctgaacaggctgttcttgtttatgacccccgtcccagcagaatagtgattgctcatccctgcatgtgatttgagagggccagtctttcaggcctggaggaaactcaagccccaccagccgcttggcatcggaatgctcagctggtcccctcctggggctcatgtgaccaagatctagctataaatatcagaggggcctcagaccaagacagaattcgggcaccaggagaaggaagccaacaggatccgacccggtgttttgtgacaaaggcaagacccccaggtctacttagagcaaagttagtagaggaggcagctaggcgtggctctcattccttcccacagaatggattataagtcgagcctgatccaggatgggaatcccatggagaacttggagaagcagctga

SEQ ID NO: 828 - DNA, 2300 bp, Homo sapien
ataggcttaaactgtgtgtgactcatctcctgaggcagtggagagggccatcttcctggagcacaatgctgccaatgcctgaactaaactgaggtcccatgagcaaggaagaagaagtggccttttttcagtcagtgttgacttgacctaaacacagttcaatagagtctacatgaggagcttgggttcctaagtcaagcatatttgggttcatgtcctagagccacctcgtgctatcggtgggacctcatacaagttattttacctgtgtgcctgagtttcctcacttgtggaatggggatattatgggtcttttgttattggctattgagatggtaaaatgaaataatgcatacaaagcatttagcacaatgcatagcacatagtaagtgctcagcaaaacctaagtgctcagcaaaattttggggggacaactctctcctcgaaatcctccagccctttgtttttaaggcctcttcttttttctgtaacttgtccctcttcttctcccatttcctctcttccaaggtttgcttctctgctctatgtcttgtctcattgctcccatcattcctctttcctgaaatccttcatactcctcctgagtattccacagcctcttaggctcatcttgggccctgataccactgctccatatctctgccccatcgccttggaccagatgaccccacagtcctttcattagatgctaccttaaaaacagctactggaggccaggtacagtggctcacgcctgtaatcccagcactttgggaggtcgaggcaggtggattgcctgaggtcaggagttcgagaccagcctggctaacatggtgaaaacctgtctctattaaaaatacaaaaattagtcgggtgtcatgacacatgcctgtagtcccagctactcaggaggctgaggcaggagattcacttcaacctgggaggcggaggttgcagtgagctgagatggcgccactgcactccagcctctgggcaacacagtgaaactacatctcgggaaaaaaaaaaaaaaaaaccagccactggaactgctctaatgacttctacttgccaacgtggaagatgtcctaaaatacatggagaaaagttaaaatgtgtgcagcgagctgagggacgccttctaagtgtccaggcagggctttgtggcaccgcatgaggggtttccctttctttctttcttttttctttttcttttttttttttttttggagacagagtctcactctatcaccgggctggagtgcggtggtgcaatctcgactcaccgcaacctcctcttcctgggttcaaacgattctcctgcctcagcctactgagtagctgggattataggcacctgccatcatacccagctaatttttgtatttttagtagagacagggtttcaccatgttggccaggatggtctccatctcctgacctcgtggtctgcccacctcgacctcctaaagtgctgggtttacaggcgtgagtcactgtgccctctgggtttttcctttctatctcccttcctgggctgtgagtttcttggggcagggaaacagatcactcatccatctgtcacgttgtgatgtatactagttacctgatgtatactagtactcagaaaaatgtctgatgaatgaataaaatttctgtctttgccacttattttctttcttttttgttttgttttgttttgtttggagatggcgtttcactcttgtcacccaggctggagtgcagtggcgcgatctcagctcactgcaacctccacctcctgggttcaagtgattctcctgcttcagcctcctgagtagctgggattacaggcgcgtaccaccacacccagctaagttttgtgtttttagtagagacagggttttaccatgttggccaggctagtctcgaactcctgacctcaagtgatccacctgcctcagccttccaaagtgctgggattacaggtgtgagacaccacgcccggctgccacttactttccaactgactttgaatataatccttttcttctctagtcccatttcaaaatctgtaagatgaggggactggactgtgtttcaaaggaggcttttcagcactaagtgaaataagtggccgagggatggaggatgggctggttggagtgggggtctccatcatctccagcaaaatgctgtgctgaagtctgaggcagagggatgggctcagagagaggggctgcccgacccttccatctaggagctgcccaggactccagaggaggggatggaattgatttaggtcagtgaggggttgcgtg

SEQ ID NO: 829 - DNA, 2300 bp, Homo sapien
gaatgctagccttaggtgtattttgataccatatcagattgaggaggctgcagagatgaatcacagacaaggttcctgcccctaggaattctcagtcctccaggaggcctaaaggctaaaaaaaatgacataataagcaggaggcagatttaccctgaaactaatgaatcttaagcttcagagtcctttacttatagggaccctttccagtgttccagatatgtgttcacagggccattttataacatttttcctcaggaggacaccccaaattatttaagtttcaggtcccacaagatctaaacccccctcacagacttaacagtgagcctaaactgggggcgagagtggatttcaaatctcatctgcagctgacttaagagcaagggttcctatgatatttaatgactgagacaaaatgaaaacgctactttgatcgagagagaggtccctcccctgattgggatcaataacccacacaggtagttagctgtctacgcagagccttctatattttccctctacttttgagggcgggaaataagtcttggctgacaccagtgtttccagcaaacagctgaagacttgacacttggatggcactcaggacaaaaatctgaacagattacagaaccgttgttgttttttttttttaaggggagggtgtgttacaccaggaatgggtattcaaggtagacacatcccaaaacagacacttcagtgagaagaggcagaggtgtttcctcacctgtaaaaacaggataataaaacctactcttgtggggtttggttaggattaagcaagatcatttatataaagacctaacccagtgccagactctcgggagaaggggcataaaggacagaaaataaaatgagttgatctttgagcacagcgacagggattttttgtacatcgtgccttacagagcgagcgctgggaggaggaatcatcaccctgctgagaagtaatgggtgcagaataaatcgagtaagaaggaatggacttttctggcggatgcttactgatctaacaactggatgactgaggaatgcggtcctaagtgaccccgggctggctgtggggccaacagcgtgcgggatctgactaacagcgtgtggcagccgagcgactgcagcagcggcggggaccccattgactgtccagccccgagagcggcaggagcgcggtggatcctggctcggaccaaggcctctcccctgcgccgactgcagaccaaccctccaccaggagcctcgcgggggggcgccgtgggcaccgcagccaggtgcaggcgcctccgcgccctcactccccacgccgaggaggtggccctggctccctgcggccgcagccggggaacaatgaggcgccggcctctttaagggagataccaccgcgccggcggggcaggggacggcatcctcccagatgatcgcacccagccccgcgccgccgccgccgccgccgtctccgcaactgcaccgcccgcaaacatggctcagtgactcggagaaaagctgcagtctccctcccggcggggcggacgccaggcctccttggtcgggccgcacctccccgcaggcccgccaaagagcaccgcgccccgcaggcacccgagacccgcgcggaagatgcaccgggcgttccaccccagcgagccccgcaccccagcccgcagctcggtaggtcggaagggggcgggtagagggaggggaggccgcggccgggcgcgcgcagccccaggcccggacctgccgctgcagacggtccccggggccgcgggccctgagcgcccgctgcggctggagggtggccgagccccggcgtggcgtggcctcgcggttcccgagcccggccacccctgcggggagcagcaccagtggtgcgctccggagcgcgcacacctccgacgactcccggctctgcaaatcctcgagagagggaggaggcgagcggagcgccggccgcgcgcctcgtcggtggcgcggaacgtcccggctcgcgctacggaaagccggaggggggcggggccgtcggcgtaagggggtgtgtccgcgcgcaccacgggggcgcgcgccggctgctgactggaggcggcggcagcggaggcgcgagctgcccgataatggcggcctgcagagcccatgagagggagaagcggcagcgtctaccctgaggtaaatctggcctttcggcgtggcggagaggtcttgctgcagagccgatggccctgcatgtgcctccctccctgggaggcttgtcacagacgtgtcagcggagtcatcctggggaaggc

SEQ ID NO: 830 - DNA, 2300 bp, Homo sapien
cctgccattgacagcatcccagctggccctgcccacctcccatgcttaaccccttcctgaccagatctcagagccaagctggcaccctcagccttcacctagaaagttaggagaatgaaagtgactttttttgtttttcttttttgcagctttgtcacccaggctggagtgcagtggtgtgatcttggctcactgcaacctccgcctcctgggttcaagtgattctcctgccccagcctccctagtagctgagattacaggagcgcaccaccacgcccagctaatttttgtatttttagtagagacagggtttcgccgtgttggccaggctggtctccagctcctggcctcaagtgatcggcccgccttcacctcccaaagtgctgggattacaggtgtgagccacctcgcccggcccgaaagtgccatttcatcgggttgttttgaggattaaatatgttaatccttatgtgaggtacttagaatagcccctaacatatattaatctctcaataaaagttagctattggccgggagaggtggctcacacctgtaatcccagcactttgggaggccgaggccggcagatcgcaaggtcagaagttcaagatcagcctgagcaacatggtaaaaccctgtctctactaaaaacacaaaattagccaggcacttgcctgttatcccagctactcgggaggctgaggcaggataatcgcttgaacccaggaggcggaggttgcagtgagccaagatcacgtcacggcactccagcctgggtgacagagtttggtgagcttggataagtcatttctcctctctgagcctcagtctcttcagccgtaagtgtgaaaaataataaaacctcccccaaagattgtcatggggattatgacaaagcagctaatggcattttgaaaagtgctgtagcaacaaaatatggaactatcaccaacaaaatcccccctttaggtaataaaaaccttttaccgggagatgggccttgggttttcagacccactactgacttgacaggcagaggatgcagttccaaatgtggatttggagctgggctttgggcatctctctcccccctcagctcctgtttccttactcattaagtggggggtcattcctgctggacgcctgtctagggtccttgtttgggggcggtcaaaggagatcagagagcacagacgggaatgtgctttgcaaacatgaaagagggctagaaaggaggaggagggacttggggaaggtggccagccaaggggggaaaggaacctttggcctgagcactggtcttagtctgggctggagagtttagtttgcctgctggggagaggggaggtgtctcctatgaggtagggtttcaccttgagacataaggtgtcagagaagaaactctgatggaagaagctctaagaggctccaagtgtgggcagagaaggaagcgggccaaaggacctgggcttggccctggaatcagcccctcatcactgtcttcccaggcaatcccatctgccatgaaaggaccttggcagaggcagctccagtgggctccagggtcaccttcatgacaagacttgccgccacaggctcacctgcacatctatagcaccaatgcccccacccttaggctgcagattcctggtctcgcccccagggaaagcaggcttgacaccacccagcacccagaccaagacaggtctcagcctgctacagagggaaaaaagcaagttgactagaaccctgttctgccttcccattcagactgtcagagcatctgccacagcccagggagggggctgatcccacatacggagcccccaccccaggcctttggaggaagcctggggatcaggaggccttgtttggagtcctggctctgcccaagctcacagtgcttccacagccaatcacctaaccgggctgggactgtttgaccatctgtaaaataaaaggagctggacttggttcacaggtctccacagcgcaggactgtgatcaggaaagagttaatggaggccaggatctgcctcaggaaggcgagggttaatttggggggcggggggtggaggctttctctgcttttcctgtggagagtgaggtttggctgccaccaaagttacttctagtccttgctgtccactcctgccctcagtctggacctgcccaaggacccctgcaattaggcctcccatgcagaggtgagtgtaccctgagcccagggctggggtaagaaggaacccaggggcctgagggcagggagactggtgccaaactagtgagcctaaaagatg

SEQ ID NO: 831 - DNA, 2300 bp, Homo sapien
tcaccgtgttgcccaggctggtcttgaactcctgagctcaggcaatccacccacctcggcctcccaaagtgctaggattacaggcatgagccaccgtgcccggcccagcctgttttttgttgttgttgtttgtttgcttgttttttgtaatgtcagaacaaagcatggtctaagtatggctttgatctgatgctgctgcagtgacctttctagtacaggcgccactccccctacctctagtaacatggggctcactacatcactcctacttctgctcccattagaaagttgtgtccagctaagtgtgcccgtgtgcctactgcccactggtcctagaagaatctcttccatgtggcagcctcgagatctttggagacagtggccactcctcccatggtccctaagtcttttcttcctcagttttcttgaatgtcctggctttctgatgctgcaccatggtttttaccatccctgaatgtggcatctgcacaaatgtggcccccccacctccaagcctatcctgtgccccacttcatactgctcattcctgctgcccctctgcacatgctccacccaccatgcatggatggcacccacctcctctgccaggtcttcttcagattccccactcagggtctgtagcactttggacttgtaggttttccagaaggcctggttcatggctgcagggggaaggggcctggcacgcaagcacaggaaggtggtggctcagtggataccagtgagtctggctctaggaacttggtgaggccaagagcctgtccgagggatccagtgacttcattaaagatgcaccagcctccccagctggcacagtgcccaggaggtgaacctgatccaaaggagtcggggagtgggggatggaacaagcttctgccaccttagccccttgtcttgacccatattggccaagaataatgaagtcatttgtctctagagaggctttcttcctgggcctaggagtacttgagttgttcatctcttagcatgcctccaggaaaatcttcttccattcacaaaatcctgaggtctgggacccacactggagcccctgtgactgtagtcatactagttgtgtcctcagcagggctccaccctgtgtccctacttagcctcaatgaactggagcaggaaggtccgcaggcccccagtgggcaccttgggcttacatttcactcctttgtctgggctggaaactgattcctctccccagggatacacgtgcctgtctccttgtttcctggcaacagactccaaagagctggagcccctgaattattgctaagctcctctggccccttccagctgagttggctctggccagcctgggaggcaccaggctcctgtgaatggggaaaggccctctagccactctgagcatgcaacacctaggcctttgctgccagcccacctctgggagcccagggcttagagaaaggaggcaaagatggagaggtccttctatgagtacttgtgagaggaactgatccctctggagtctggatgcctgaggactgcactctctggggaggaacacccttcacggatttggttggggtcagagagaggatggagactcaagggaataacgggagcccggagaagtgagggctttttcagggactggagattatctcgggaagccctggtggggctgggattccaaacttattcactctcagtcatttactaatttattcatgacacagacatttatcagtgctttccagagataaagcatcccacccccaccgcggagtccaaggtctgggaaacaggaagggatgacaggagtacaggttggcactgatactggttggaccaggccaggaagagcagggcagcaagacggccccgaaacccccaggcgcacgcaccaccccgcgcctccccagcgagggcccgcggggccatgcccttcagtgggcacacttctgggagcccgtcctgagctcggtcactgacgtcgacggccgcctggcggcgctcgagccgctggccgagagtgacgtcatcagaggcggtccggccgagcctgcctagccccccggcgtggcctgacgtagctgatcggcccggaagtgctcacacgtgtgctccctgccctgctcctggccccttggccggccgggctgtttctggccatgggtcgctcccgccggacaggcgcgcaccgagcgcactctctagcccggcagatgaaggcgaagcggcggcggccggacttggatgagattcaccgcgagctgcggcctcagggatccgcacgaccccagccc

SEQ ID NO: 832 - DNA, 2300 bp, Homo sapien
gcttagtcaccaatagaaatcacatattttcatatcaaattgtagttattgcaagtatctcaaaatatttatgctcaagtgatttcaaaatcacagtggttgttaaaccaccactaaattgttcgtgagcaacttctgtttcagatgctcctgtgatgtagccgccattaattggttacctccaggcttagcagtggttcagtgaccaaagggcgaatctgcctgttctgagtagggcttctccactcttctgcattccctgtctttttttttttttttttgagacgaagtcttgctctgtcgcccaggctagagtgcagtggcgcgaactcggctcactgcaagctctgcctcctgggttcacgccattctcctgcctcagcctcctgagtagctgggactacaggcgcccgccaccatgcctggctaattttttgtatttttagtagagacggggtttcaccatgttagccaggatggtctcgatctcctgacctcataatccgcccgtctcgattataggcgtgagccaccatgcccggcccagcattccctgtttttagttgtttgctgatcaatatgtaagaggaggggcgtcaaagaccaccccacagtttaatgtccttattcaagctggtcgacaacacactgaggtcattaaaaaagaaaaatttaactttcggccagtcttattaatgttagtaaacacataatataaatttctggttttatttttttgagatgggctcctgctatgttgcccagggtggctttgactcctgggcttgagtgatactcccccgctcaacctctcaacctctcgagtagctgggactacagtcgtgtgccagcactccccagctccaaattttttttttgttttttgtgggttttttttttgagacggagtcttgctttgttgccaggctggagtgcagaggcgtgatctcagctcactgcaacctccgcctcccaggttcaagcgattctcctgcctcagcctcctgagtagctgtgactacaggcgtgcaccaccacacccagctaatttttgtatttttagtagagacggggtttcaccatgttgggcaggctggtttccatctcttaacctcatgatccacccgccttggccttccaaagtgctggaattacaggcgtgaaccaccatgcccggccaaatttgtttttaaatatagttttgataattgttctcattgtaatcctaagcattttgttttgtgcatttatttatttatttataatacagagttttgctctgttgcccaggctggagtgcagtggcacgatcttggctcactggaacctccccctcctgggttcaagggattctcctgcctcagcctcctgagtagctgggattacaagcacccactacgcccagctaattttttgtatttttagtagagatggtgtttcaccatattggccaggctggtcttgaactcctgatctcaagtgatccgcccacctcggcctcccaaagtgctgggattacaggcgtgagccaccgcgcccggcctgttttatgcctttataagcagctattctgagaaagcattcacaggcctcaccagatgccagagtccatactgcaaaatccaagggaggctaaacaccccagttctaaatgttttcaagccattcagatactgtgcacagctgccctttgaagtacggtctattatatctcttttacagacccagaaactgaggcgcagaagttagggtcagccccaggtcacacagctaacaagagctggcctaggcacccagggacctggccccctagcctctgtgctttgctactgatttcagcgctcctcttgtggctttttcttgaggagcccaagggtcagggtcccaccccgcgatatgaggccagtggcactgccccctagcaggcgcgagatgccagagccctaggatgtctgaagggccgggcaggaggcggacgggcgtgggccaatggctgtcgcagtgcctcatcttgccgtctgtgtgagcccaggtatgcagtaggctccgcccaggacccagcccggcccctccttaggcctgggctctgggagcggaaattccggcgacagcagggcaaaacaggagctgattcgagctggcagagctgggccatggaaccggtagagacctggacccccggaaaggtggcaacttggctgagaggtgggtggggctggggtagagttgggcttgaaggggactaggtgtggtgtcccaccgggaagcgggaggagaggaaaaggaaaaaaaatctgcgg

SEQ ID NO: 833 - DNA, 2300 bp, Homo sapien
ggaggtggggataaacaacagggcgtggagctcagacagaaaccctctgtgctttccaccctgcctgcagcccagccctgctcaagctgggagtcccctccatggagacacatcacctgcagccacccccacacagcgcagcccacggacctcctttggctctctgacaggtgctgggctggagttgggagctgggctgggggctggggtgggcacatcctcatcctgctcttccctcccacagacagcagtgaagaggcactggaaggaatggtacgggggctgaggcagggtggcgtgtccctcctaggccagccacagcccctgacccaggaacagtggcggagctctttcatgcggcgcaaccgagaccctcagctcaatgagcgagtgcaccgtgtgcgggcgctacagagcacactcaaggtcagctggggggctctgggcacagcaagggactaggctctgggcttcaggctttggtttgcggctgtcacctccaccctgggcaccagactccagactccagactcagctccggaccctgggcttagcagctgacagcgggctcagctgtggactgggccaggctctgggttccgagtggggatttgagtctcacctaggctcctcgtgccacgctggccaggtgctggcttccaggcaccggacctccggagtgaagtctggcctcgggctctgcccacttccctgggtgatcatggtcccttagcccctcctctccacacaggcaaagctgcaggagctgcaggtcctagaagaagtgctgggtgaccctgagctgacaggagagaagttccgccagtggaaggagcagaaccgggagctgtactcagagggcctgggggcctggggagtggcacaggctgaaggcagctcccacatcttgacctctgactccacagaacagtccccccactccctgccctctgaccctgaagagcactcccatctctgccccctgacctcagagagcagcctccgacctcctgacctctgaccctggccagcactctagctcctgacctttgacccgagggccacctcaaccccagcttctgacgtgtccaggacagagcatccctggattctgttcagggtgggaagtagtactgctagtcatggtctcaccccgagctgacccctctgcctgggctttgtgccaccctctcccttgccaaagaagaaactctccccccaaatcctccaacctctggggccacagccctgcccctccagttccttggcagttctcccccaaaccaggtctgtacaggtgttctttattttacatgagggctactttccaaccaaataaagtcaatttttctaagaatgagtctacatgtaactttacttccatattcgaattggaaatctgcccccctgtggggactggggtgagtgctcttggccagagggtgggtggcagacccttcgtgcagcccgttggcctgggctctgtacccgagctccaagcctgccaggatggtgggggatgacccatggctaatgagggctccgactcatgtccacctctccccagctctttgaaggctaatggtgatctcctaccccattcccggggggcacacaatgagaaacttccactttgtagatggggaaatgcactttgcacggaaaggtggtggggacagtcctggagactgggctggtaggacagggcagctggtggggaagggtgcaggttgaggtctgccctgggaaggccctggggaaaacacttctctccttcactcctcattccagcctcacctccacctcctggatccaaggcagggacatgtccctgtgactccattcaggctgcacgggaaatctgacctgctcccatcagcctctgacttccaaccccagcccagcatccccacagcatccccagacttcctctgtgggatgcggaggagggccaatgggaggagcttctctccaggttggaattcctcagtagaatgcagacggctggaggtcacagaggcctctgtgatatcaccacgagggggagtgagaccacttggagtgaagattctttgaggagaaggaagagactgagcaaacatgagggataatgaaaaggcctggtggcagcaatggacctcccatacaggcctcgaggggtggggcgggactcaggaggaccgtatggggtttggaggggcagtagctgcactgaggggccgcccctctcccctgcagagtaccattcacgagtcctacggtcggccagaggagcaagtgctcatcaaccgccaggaaat

SEQ ID NO: 834 - DNA, 2300 bp, Homo sapien
ttaggcagaccaggaagaaggtaagcaggtttgttccgtccgccctttattctctatggttaccagtgctcagtgaccttgcggatgcagaaggtgtgggtgaatgtctctccctctgggatttcatgatgagggtttcactcctgtccctctccagatatagcaccatccatgttctgggcactggggacaccatcatcatcttgggcatcttcacagaccttcagctcttaactctgcttgaaaacagaactgttcctcttggcatgcccttctacgtagtcctcaagacaataagcagtgatttgccctggtggtcagtgaggtctttgccagcaccaacatctccaggacaggtgctgttaaggccacctaccactttgtgaacaagaggcaagggtcagtcaggcctggtaacctcctgtgagtgccagaccagcccctggatttggcttgtgctgtgtgcttttataccctcgagcacagattctgtcactcttcttggtatccctggcatgcaaacactggaagaaagtaagtgctgggtgaatgtttcttgaataatgctctcattcccattttgaagataagtaaattaaggctcagagattaaagcctgcccaagatcttgcagccaacaaataacatgcatttcttttattctttgctcaattactgagggcctacaatgataaaactaaaaaacaaagacacaacatttcagagtgctatatatatgctatatattggacattcattatatttagtagctaataatatctaatactgacatagcattgactctatgccagacacagtttgaatcacttcacatatattaactcatttaagcctcacaacacactctatgagatagttatattttcttttcttcttttttttgagatggagtctcgctctgtcacccaggctggagtgaagtggcacgatctcggctcactgccacctctgcctcccaggttcaagcaattctcctgtctcagcctccggagtagctgggactacaggcaccggccatcacacctggctaatttttgtatttttagtagatatggggtttcaccatattggccaggctggtctcaaacttttgacctcaggtgatccacccgcctcagcctcccaaagtgctgggattacaggcgtgagccaccgcgcccggccgagatagttatattttcattcccactttatagagaaactgaggctcagttcacacaataagttgcagatcttgctaagtgttgggaacacagagacagtaaattcaagttcgtcctcaacgttcttgggaaggagttgggtctcctgacttctaggtcatattttagtaacaaggcttcacagagcacagggaatcatttattaccttatttattcctccaaacaaccctatgaagtattatttcccccactgtacagctgacagaacaagagaagactctgagtttaggggacttcaaccaggacacaccatcagtctccagagtccaggctctgaaacacaccacggccaaacctgtcctcgcctgtcattcctcccttgtcaggaggatatagaacccagtgattaagggtgtgggcgggcgctggggccaggctgctccctgcagaaccttgggcaacgctctttgaacctcagtttgagcctcagtttcctcatctttaaaaaaggggtggtggggggcaaaagtattgtcttcttcacgggttcggtgaggatgaaatgaaacaatccatgtaaagttctcagcatgaaaccagcatctgcacctatacaagcaaacgtaaaaagtgggcaacggtgctcggtgttcatccatcggcaccgcgggcccctgacgctgcctctccccacagctgccccgtcagcaaccggctgctccagggcctgcgggccaacggggcctctctggaggtgaccttggccttcaacctgatccgcttctcgaccagcgatacactgtacctgcacggccgagtgaccctgtgtgacacgcgggcaagacgcccatgccaaccagtgagtgggcagccccgggacctcctgcgcagccgccgcagccttgcctgcaaagcagttcctgccgggcaggctgggtagccggactcccagctgcgccgtcttcacggaagcggtgctgatgcgggacctgggggactgcggtgctggggactggccagtcctaccgggggcggggcttgtggaagactgggcgggattttgaagacctaggtcttgtggatggtgaactcacttggggcggggagggaggtgg

SEQ ID NO: 835 - DNA, 2300 bp, Homo sapien
tagccgggtgtagtggtgggtgcctatagtcccagctactcaggaggctgagacaggagaattgcttgaacctgggaggcagaggttgcagtgagctgagatcgtgccactgcactccagcctgggtgacagagcaagactctgtctcaaaacaaaacaaaaaagaaaattgacagtagataatggaattacttttaaactatagatatctattacaaagaactgtacaaatgtactgtttgctatttgtaaatttaaatctcaacacttccactatgtttccagtcggatttctcttctatcctctgtatcagcaattcacatcttcctaattcttctcagtcctctagatgcccctgttccctccctcctcacatatgcctttcacaaaagaaatggaagcctttcaatgttttctgactcttctttctctttctttctttctttttctttctttccttctttccttccgtctttccttctttccttctttctttcagaacctcgctctgttgcccaggctggagtgcagtgatcttggctcactgcaacctctcctcctgagttcaagtgattctcttgccccagcttccccagtagctgggattacaggtgcccaccaccacacctggctaattttgtatttttagtagggttttatcatgttggccacaggctggtctcaaactcccgacctcaagtgatccacctgcctgggcctcccaaagtgctgggattacaggcgtgagccaccgtgcccggccaggactaacactttctagctttctacccttcagtccataaatttattcatttagacaccctgtcttaacatttttttttttagcctttacgttaacagaggcttctggtcctaatttcatatcatacccaggttcattttcattatccattaaatctgctattttatgtcttctatattcttatcttaaaatactaaaagagaggacaaaggatacaaccttggggcacatccctagggtctttcctctagagtgacttttattcagtaatgaactcactttgtctggctcttaaagctaagaaattatacaactttttttttccatacaacttttttttggagtgcaggggcacgatctcggctcactgcaacctccggctccctggttcaggcgattctgctgcctcagcctcccgagtagctgggattacaggtatgcgccaccacacccagctaatttttgtatttttagtagagacggggtttcaccatattggccaggatggtctcgatctcctgacctcgtgatccgccctcctctgtctcccaaagtgctgggattacaggcatgagccaccgcgcccggcctcctatacaattttttagtatctctccctgccaagtcaggtttctagatacccagaatttcactatctgagattcattcctttggctgatggttctgttctcctttcaaacaattttcctgtctgactcttcaagcgcatattaatgcaaatggacttaacagttccttttcctgtggaccaagtttggggagggaggcaggactgatcctttacccttcaacctgaaccttggtcacaggctgaccactgcgtccaacccagaccaagccttgaccctgactagtcagtgacccaggccacaccctaactcctggtcacaacctgaacccctgcttcaggtgtgagaactgatagaccggcgttggaatggaaggagggtgaggcaagctgagtgggattctcgtgtccccagccccgcccgcgggccgccagcttcccaacctgcacaggcccagcagggcccctccaggtctaggtgagcagagctccacctacaggtaaaacgcggcaaggggcagagaaggagccaagtggcgacgtggtcatgcgcagaaagatccgtccggctctctgagcagagggtagcgtgtgggggcgggataccgacgcggctcggctgccgattggtcagaagaggatagaaaggggcgggaagccggcgcggctcgactcccgattggccagaggcggcagaacggggtggggccaaacgacgcgcgttctgtggcgcgcggcctggcgggcgtgcaacggccgttagaggagctgagggagggaaccaccgctcaccgcagacgtggtggctgcagtcagtcttcccgagtgagggatttcgccgcccgctttcaggcccgtgtaagttttcctccttcgggagcctcagtcctagtggccgaccttgcctctcctcccatagctccggcgaagcctcagacgctcgcgac

SEQ ID NO: 836 - DNA, 2300 bp, Homo sapien
tacttgcctttcagcttcagaatggagccatctgccaccatcctgctgcttttggtccttcactgcccatcttagagccagcacagtggatcagcatcttgaacagtaatgaacaccttctgaaggaaaaagagcttctcattgacaagtaagagggcaaggggtaccacagagccagactactctcccaggccccattgaagacacctaatggagtcttcccaagggcaaagcattcctcctctgtttaggtccatgtcttgcctcatggtggaggtagtttgataagcagcctagtcgtgtatatataactaatataatagaccagttatgtatttctttaggggctctagggagtgcctaagggggtagccagttcattgcttctgatcttttcctcatttccccagttatctttctcatttgttcttcttccttcagaaaatagtgatatccagaatctaagatcttgcttacgtaatagggattgtacttagtaggggctcatattgtgaggggttagcatcaggaccctgacctgattctaccggcttgtgcaggcagaggaaacacatctctcagctggagcagaaagtgcgagagagcgaactgcaagtccacagtgccctcttgggccgccctgccccctttggtgatgtctgcttgctgaggctacaggtaagtattggccatcaggatggcattctgtttgtcataactcggtgtcttccctatgcttgacaccattaggtatccaggagatagaaaagagctcaagtgatgtaagtgtccctgccctcaaagagggcatactaattataaagcaccctttatcatgcccttgtgggagcagaaaaggctaagaaccaggtgaaagtccagatgcctgggtgtgaagacatacttggaagaaaggtagatagtaaggtcctagagttgggtgatgttatgagaagtcttaattttctagccctagccaaaggagagagaggcaaaggtaatgcaggatttagagctattctctctctttttttttttttcccctgctctgtcacccaggctggagtgcagtggcacaatctcggctcactgcaacctccgcctcccgggttcaagcaattctcctgcctcagcctcccaagtagctaggattacaggtgcctgccaccatgcctggctaatttttatatttttagtagagacggggtttcatcatgttggccaggctggtctcgaactcctgacctcgtgatccgcctacctcggcttcccaaagtgctgggattacaggcgggagtcactgcacccgggcattctcatttttatcctccatatctaggagcagctgaagaagataatattctcactgagatcaatggttgtggggctttagagtttgaaaagaagcctgctttgttgaccaagcttctgcaatttgggcatttgaatgttggatatttgacaggttatagcactggctttgctacctaattaaggcagtatcctgtctcatagaatcagaatgttaagagtgggaagtgccttaaataaaactagttaattcttcgaatttactgattaaagaattgaaacctgagaaagaggaagaccttgcctgagatcatatagagaatgagtggagggaagccaggctttgagcccaggtcttctgatgtcttgtcctaggttccttccagtatacaatggcttaggtattgctttaaggcagtggttctcaaatgtgagtgtgcatcagaatccctggagcgcttgttaaaatacagattattgggacccatccctacagtttctggtttggtgggcctaggagttaggcttaagacattgcattgctaacaaattacatcatcaggtaatgctgatgctgttaaccctaagacctagttgagaaccacttcttaaagagattcttggagaaaaatgatatttgaccgtgaagtatgctgggaataagtaaagtacatgagactataagggtagagaacagttacatattgagaatctttctggcaggaattgcagcgagaaaacactttcttacgtgcacagtttgcacagaagacagaagccttgagcagagaaaagattgaccttgaaaagaaactctctgcttctgaagttgaagtccagctcatcagagagtcgctcaaagtggcgttgcagaagcattctgaggaagtgaagaaacaggaagaaagggtgagctgagtagctgatagccctagttcacaaaggagttggcagtcagctgtctactctaaagcctaagctgtttctgg

SEQ ID NO: 837 - DNA, 2300 bp, Homo sapien
ccttcaggtttaataattcccagaattactcacagaacttaggaaagtgctatacttattattacagttttattataagggatacaattcagggctgggtgcagtggctcatgcctgtaatcccagcactttgggaggccgaggcaggtggatcacctgaagtcaggggttcgagaccagcctggccaacatggtgaaatcccatctgtactaaaaatagaaaaattagctgggcatggtggcgggtgcctgtaatcccagctactcgggaaactgaggcaggagactctcttgaacccaggaggcgaaggtcgcagtgagccaagattgcaccattgcattccagcctgggcaacaagagcgaaactgtctcaaaaaaaggggggtgggatacaattcaggaccagccaaatgacatagggtgaggtccaggagcatcctgagagcagagcttccatgccctctccttgtggaataagagcatgtaaacacagcacatttatgtgtttacctaccaggaagctccagtgagctgctgtgtccagagtttttagttggagttttatctatgtaggcatgattgaactcaatcacccgtccctctgccttccccatagtagattaggcttaaagcagttgatttttctggtgatctgcatccattctgagtcatagtattggcataaatttactcatgatgggatctggcccactcctgtccaattcaggaaattccaagggcttagaggttacaggcctcccaggaaccaggtacagagaccagacaaattctgtattttacaacagaaatgctgccagtttttaaaaactgccctagaagactttctccgtccttgatttgaaagttcattaattctttagttttatactcaaatcctaaatggcaaaatttgtttagcttcctaccttcattgcagtagaacaacattcacagcctcaagggttgcttcaaaaaaagttgatgtggctgggtgtggtggcccatgcctgtaatcccagcagtttgggaggccaaggtgggcggatggcttgaggccaggaattggagaccagcctgaaaaacatggcgaaactctgtctctacaaaacatagaaaaattagcctgccgtggtagtgtgtgcctgcagtcccagctactccaggggctgaggtaggaggatcacttgagcctgggaggtggaggctgcagtcagctgagatcacagcactgcactccagcagggtcatagtggagtgaatggtggagacagacttgacatttattttcctaggtcaaaggtcgtgataaacatatcaataatttgaaaaagaaatgccagaaggaatcagagcagaaccgggagaagcagcagcgtattgagaccttggagcgctacctggctgacctgcccacactggaagaccatcagaagcagagccagcaggtagcagcaatgtcttggcatgcctggggtgatcagggagtggccaggcaggggaactttttcatcatctgctgtatgcagttatcctgtgacttgctgaaaggagaatcccaaagcagtcatgtccagattcataattgtcagatttgtaaccagactgcaaattttttgaggtacccagacagagtcttccttatgttaaagtgaaccccaagtttctcttcaaagaatcagtaagttcaggtctcttactctttgattcactattttaaagtttaacttcctggttctcttcgccctcttgcttctagtttcagtaaacaaccttttccaccagttttaatcagtagttcacatctgttcccccggtcacctactccgtcctgactcatcccggtcacctgctttgacctgagtcaccctggtcacctgctctgacctaagtcacctttaattacctgttcctaactgtccttcccaccaaactactcaccccaccactctggctcataaacctgttccctttaaaatagccaatcagaattagcttagactgtgtggttcaaccctagccaataggggaacgacatagcagtagggactacctgcgtcagaaataagaactccttcccctcccctgtccagttgtgttctcaccattgttccatctgcgaggagcaccctttctgcagaaagtaaaaattgccttgctgaggaaattaaatataggtttgagtgctatttctttgtgacaccgaggaacaagcattttgcatttataacacttggcttatttgacctaaacatgggatcctgtctctcagcttaaggattctgagttgaagagcacagag

SEQ ID NO: 838 - DNA, 2300 bp, Homo sapien
ccctccacatgaaaatgtctcataactaacattctcttgaaatgctcttctccccagcagcacagcacccagagactcagctagatttgcagaagccagatgtgatcaagaggaaactagaagaggttcaacagctgcgtcgtgacattgaggacttaaggaccaccatgtcagacagatatgcccaggacatgggagaaaactgtgtcacacagtgaggaattctgggggattcccccagggaggagctgggctgctgagagcctagtccagcaggtttctgccctgacattctcttgtctgctattcccagagaggtctcagaggggaggggagagcctgcatctgggggccaagggctgattagggaactgtgtcctacccacactggcatgttggattacgtttgtcctgttaattcactctagacggtgagttactaattaacttttggcaggtacaacagataagtcctcacaaactgttcccagccctaggctgacatgagagacgaacaggctgtccacctttcttctccatccaatgggatggatccatgttcattcccacttcacaccttggtcctgctgattagagagctcatcagaggggcctggaaaggctgagcaagtaccagtgacaatggccatttaagaattctcaggccccatgtgccagccttcttgggaactgagctggctttctgggttttctcatgcctggtcttactgcttcttcctcagggctcttgttctcccagaagcctcagggtaatgtgttggttagcacgtaactactaggattggggccctagggattatagccaggactctaatctgcctaccatgccatttaacaagagatcccactctccagctgccttgtgtccctagggtcctggccatgtgtttagtgtgctaaactttctcctttgttctcaggccttccaggtagtccccttcctggacttaagagtgcaaactcttctctgtggttctagccttgggcagaattatatcccagagaccacagagcaactgtcaagctgcttaccccctcacccagggctacagcctgtgcccagccctctaatttgtgcctctcttgtgttgggggtggtgggggttattcctttccctttcctgctctggcctccttgaaagttcagagtacccagtacaagtcagctttaaagtacagcttttagtgtttcctgggttgtttctctggggctttagtgagggacctttgccctctggtttttcttgcctcctggtttagggagcatctcacacttgttagtatctggttgttgggccagccgtgcctcctctagatctggagccaggccaggcaggggccacgtgtgggccagtcagccactacaagatttttgctaagctttgggctgttggcagcatcttggacctcatgcctgggcctgaatgaggctctttcttaagtgtttttacaagtttgtgttttatttatggagtgacttatcccttccattcagagcagccccacccagccagcccttcagcctctgggctcctgctgcttaaaggcagagccgcctggttggtctccaccctgtgcattgggagcccagccaccatgctgacgggtatttttcctcataaagtttataaccagttatttatatgaatctttgttatgtccatttgtttgtattgcgtattttgattataaaataaagtatcttaacagactcctcagttttccatacccttccatcaccaccaccacgctattctacccctcactttggcttgttagagccaaacacctgggtgttcagccaggtcccccaggcagcagcgtggaggaacctttggcaggtccagccagcctcatgtccctatctatctctgccacctctgctcctctgtcgttctatagaaccagatctcttcccactcactttctcttgggcaaaccttccctgagtcataacagaagtttgtcactggaaagtttcagcagtcctctcaggaagttggcagcctctgggttgctgtgaggaagtggctttaccagagcaagggttgtctttctgggctgttaacctgcctgagccctggaccagggggacatctgagaagcatgatgttgagtgccagacagctaggtctccaaagttgggctcgttgctggagtctgccccctcaaccgctgaattcttgctgggagtagtagcagtttgggaatgccatctgcagcatggagctggggttgagcttggaccaccccaagacctggggtggatcttaagggtc

SEQ ID NO: 839 - DNA, 2300 bp, Homo sapien
gttggttagcacgtaactactaggattggggccctagggattatagccaggactctaatctgcctaccatgccatttaacaagagatcccactctccagctgccttgtgtccctagggtcctggccatgtgtttagtgtgctaaactttctcctttgttctcaggccttccaggtagtccccttcctggacttaagagtgcaaactcttctctgtggttctagccttgggcagaattatatcccagagaccacagagcaactgtcaagctgcttaccccctcacccagggctacagcctgtgcccagccctctaatttgtgcctctcttgtgttgggggtggtgggggttattcctttccctttcctgctctggcctccttgaaagttcagagtacccagtacaagtcagctttaaagtacagcttttagtgtttcctgggttgtttctctggggctttagtgagggacctttgccctctggtttttcttgcctcctggtttagggagcatctcacacttgttagtatctggttgttgggccagccgtgcctcctctagatctggagccaggccaggcaggggccacgtgtgggccagtcagccactacaagatttttgctaagctttgggctgttggcagcatcttggacctcatgcctgggcctgaatgaggctctttcttaagtgtttttacaagtttgtgttttatttatggagtgacttatcccttccattcagagcagccccacccagccagcccttcagcctctgggctcctgctgcttaaaggcagagccgcctggttggtctccaccctgtgcattgggagcccagccaccatgctgacgggtatttttcctcataaagtttataaccagttatttatatgaatctttgttatgtccatttgtttgtattgcgtattttgattataaaataaagtatcttaacagactcctcagttttccatacccttccatcaccaccaccacgctattctacccctcactttggcttgttagagccaaacacctgggtgttcagccaggtcccccaggcagcagcgtggaggaacctttggcaggtccagccagcctcatgtccctatctatctctgccacctctgctcctctgtcgttctatagaaccagatctcttcccactcactttctcttgggcaaaccttccctgagtcataacagaagtttgtcactggaaagtttcagcagtcctctcaggaagttggcagcctctgggttgctgtgaggaagtggctttaccagagcaagggttgtctttctgggctgttaacctgcctgagccctggaccagggggacatctgagaagcatgatgttgagtgccagacagctaggtctccaaagttgggctcgttgctggagtctgccccctcaaccgctgaattcttgctgggagtagtagcagtttgggaatgccatctgcagcatggagctggggttgagcttggaccaccccaagacctggggtggatcttaagggtcagcttgagcctaggctctcgagtcctgacatcatcctctaccgccacgctttccagctgtcagccttggtctccatctggttccttgagggtgtggcctctgcgtcctgctatcacccttccttgtctaaaccttcccacctgagtggagaggaacttgggggaaaatctctaagcatgggctcttcctgctgtcctatgcttcctatcccctagggttagtggtgcgtgttgggtggtggagcgagggatcccttggagcaaggttcttagagaactttgggtctgaaagcagctcaaaccttccaaagccccaagcttccctgtgctattagagcacctcctcctggagagagcggctctcgtggctggggagttggatgcaccaaacctgtgtgcggctggagagggaggcttctgccagaccctctcccgggcctgtcctgccacccaggcccctccccagtctcacactgagctccagatcagggaagggccgaaaaggacgatcagggcagccgcagaaggggcgccctgcgtgggacgggtccgttgcgcgcctggtaaccgagggggaagggaaggggcctctggcgtgcggggcggtgtcgcgcaggtcccaccccgcctgcccgcgccgcccattggtcccgagcgcgatgacttggcgggcggagcaggaaggaaaccgctcccgagcacggcggcggcgtcgtctcccggcagtgcagctgccgctaccgccgccctctgcccgccggcccgtctgtctaccccc

SEQ ID NO: 840 - DNA, 2300 bp, Homo sapien
ccggaggagggaattgaggtggaaaaagagacaggaagagcctggcctaaggttctgcggccatttcaccacaaagccaagatctcctataccctggctggggtcaactttcttttttattttattttttttgagacagggttttgctctgtcatccaggctggagtgcagtggtgcgatcatggctcactgcaacctcagcctcccaggcacaatcagtcctcctgcctcagcctcccaaagtgctgggattacaggcatgagccaccatacccagccaggtcactttcagtagtaaccatggcaaccaggttctctctttgaaagagctccaggtgtcctctccctgctttcccctgtcatcccctcctctcccactcccagccaatatctgtccctaccaaggtaacagatgaggacttgcctatcttattttacttctctgccagcagtgtcctatactgtccactgctccttccttctcaggacctccaccaagctcttaggcaccaagctgctgccctcccattaccctctgcttctaggctctgtctcttagctgtcatcaccacctccttttttctctcaggttttttttttgttttttttttttttggagactgccttgctctgttgcccagcctggagtgcagcggtgcaaatcactacttactgcagcctcgacctgtcaggctcaagcagtcctcccacttcagcctctcaagtagctgggactacagacacacaccaccatgcctggctaatttttgtatttttagtagagacagggtttctctatgttgctcaggctggtctcgaactcctggtctcaagtgatctgcccgcctcggcctcccaaagtgctgggattacaggtgcgagccactgcacccaggccctcagcttttcaatgtgatgttcctctggcctggattctcctctgtgtccactgtgccccagtgagctcacctgcactccatgtgtagacagttcccaaatgtttgtcaattaagatgcatttaactataagtcaaagaaaacccttcctcagccaacaagaacattaaggaagttttgttatcccacatgcaaagaaatcctaaagaggcagctccaggggtgttaattcagtgactccaagacatcatcaggggctcaggtttctccatctttccactgaacctgccttgacatgtcagcctcatgtggttgtaggatgatggccgcggttcctgcttcatacatagaaaggacactgtctaggggaagaaaaggaaaaggcctgcttcttcctgtaggtttctcttcttttccattttcatacttttttttttttttttttttttctgagacagagtccctcactctgttacccaggctggagtgcagtggtgcgatcttggctcactgcaacctccgcctcctgggttcaagcgattctcgagtagctgggattacaggcacctgccaccacgcccggctgatttttgtatttttagtagaggcagggtttcaccatgttggccaggctggttttggactcctggcctcaagtgatccacctgccttggcctcccaaagtgctgggattacaggcatgagccaccgcatgcccggccctggctactgttttctacagcaccccgcattctggctttgtctggcagtttgcccgtggggtatttgcctcactcctctatctgctgttttgcgtaccaactggacactagatttggaggtttgattagatcgagggtgaaattcttggcaatgcttcagggtgatgtcacccatatgttacaccacttccttgtatatgttggacaaattacttgatccctttgtgtctcagtttcctaaaacagttcatttacctcctgggtgtgtttcaaggattacagggggttgatctacatgaagtgtttagaacagttcctatgatgccagtgggagctgctctcagtaccttcatttccattcctgggacccctatcctcctccctcccccccacaactcagcctcggctctaggtctgggctctaaagactttgtgtgcttggcagtccctgcatcccatgactcggagctgatggccttcatgacgaggaagttgtgggacctggagcagcaggtgaaggcccagactgatgagatactgtccaaggtggggctccaggtgggagagggccaggggccggtctgagaggtggagggactgggctggggaggccaggagttggactagggtgggtgattctagaaccgtctaccacactgacctgcccagttcgaggaccag

SEQ ID NO: 841 - DNA, 2300 bp, Homo sapien
ccacagcagggctcatgagaccagagctcctgcttcccacgcttgcttatctccatgagcaaggtgacagtatgaagttgctactcaccctgaccatgggtccaacctcaaaaaacacttggccccgacatgatctcagtctttctcatcttcatatacctaaaacctcagaaaactttctgggagcagctcagcaacaagagagctcttcctatgtccactctccagtcacactttccgcccagactcctcccttggcagtaggtctgtaccaccttcttccttggcttatctatgcctgccttgtttaccagagtgaaagtttctaggaagagcgtggactcttgaggctgaccgttctgggtttgaatccacttctgcttcctgcctttataatcttatgcaagccgctgtactaccctgagcttgttttctcatctgtttttttcttttttcttttcttttcttttttttttttttgacagagtttcactcttgttgcccaggctggagtgcaatggtgcgatctcagctcaccgcaacctccgcctcccaggttcaagcgattctcctgcctcagccttcctgagtagctgggattacaggcatgcgccatcatgcccggctgattttgtatttttagtagagacggggtttctccatgttggtcaggctggtctcgaactcccgacttcagatgatccgcctgcctcagcctcccaaaatgctgggattacaggcgtgaaccaccacgcccggccctcatctgtaaatttcatgttaccatctggtacttggcactcagtagtagtagctctctttagcttccaatttgcatataaagaatgctgtccactttgggaggcagagatgggcggatggcttgagctcaggagtttgagaccaggctgggcaacatggcaagaccccgtctctacaagaaaatacaaaaactagctgggcgttgttgtgcacacctgtagtcccagctacactggtggctgtgatgggaggatagcttgagcctgggaggcggatgttgcagtgagcagagcctacccttccctgaatgtggtaggctagaaagtcaaacggaaaattaaaaaaaaaaaaaaaaaaaagcaacagaaaaacactcttgggttgtgcagagaaagggcttttgaacctgggcacaaagaagtgagtgcctgagatcagaaatcataaactcccagaccatcacagctgaaagggtgaagagatgatgatgatgattaacagcaggaaacgtttttgaaaaagtgctctctacaggtgtttctgtttcggctttcccctttaaaatcgtgtactttgcattaccttatttaatcctcacggcaacccagtgggggtaggtattatcactgttttacagatataaaaactaaggtgtataaagtgcccaagaacacacagtaaggagccaggactcctaattccaaagttcgtggtcttaactgcctttagctgttttggtgactgagtctaatccaacacaattttacagatgaggctctgggaggggaaattgtcttacccaactcttaacacaagggaactagaatttgggccgcccttccgggcgccaatctggtcaaggatttgtcacagaaactcagatttaggaaacatttattaagtacttgcatcattgcaatccatcctcaaagcagcctccgtgaagtattacagtacttcgtgttacaatactgatcatatggggaaataagctaagagggataattcctcccaagatcaatttagcaaaatagcggcactgtcgggatcacacattcaggtcctgaatgtgaggctgccagcagtttcattaacctaatcccaggctccttcctcccgcacctgagggtaggaacgaaccaccccccccccccaccccgccccggacctggagccctctcagagcggtgcattctgggattcgcccgcgaagaataccgactctgtgggccaatagaatccgagcacaggcgactgtatccaccttcgctgtctgcaggttgctcaggcctccctcaaactagccaatgagaagtgcacgggtcctggtcgcctaggaaaccgcgtgacaacaagatggcggcgctgcgggacggctagcggccctgcgtggtgagtctggcttaagacctttctgcccctggagtccccacgcaggctggagcccgagccccgagggcctgcgagctccgcggctcccacaggagaggttcaagaccctgcttaccatgactacgcgtggaggcggaaggaggcga

SEQ ID NO: 842 - DNA, 2300 bp, Homo sapien
tcaccatgttggccaggctggtctagaactcctgacctcaggtgatccacccacctcggcctcccaaaatgctgggattacaggcgtgagccactgtttcctggcctttttttttttttttttgagacagggtcttgctctgtcaccctggctggagtgcagtgccacaatcatggctcattgcagcctgggcctcccaggtgcaagcaatcctcctgcgtcagcccccaagtagctgagactataggtttgtgccactatgcccggctaattttttttttttttttttttttttttgagagatggggccttcctatgttgcccgggtggtctcaaactcctgtgctcaagttatctgcccgcctcagcctcccaaactgctaggattacaggcgtagcccctatgcccagcctctgtttttttctttggactcagcctcagccagatctcccctgggcttgcaacacaaggcccaaaacaatagaagagaagtgaggggagttttccctttactacctagcatgtaaatgaggcctaaagtagactaaggaagggagagtgtgaagggagagtgggccagagctggggttgtggtgaccaactcctggggcctggggggagtttgtgtaggggagggggagggagtggcagggaatcaagacttaatggatgaattctagggcagccccagaggttacatacatggctgtggcttcagacagacctggattcaaggtcaaatgagactggctccaccatttacgaccttagcaagtcacttaacatctaagcctcagttttttcaccagtcaaatggggataaacataacacctgctgcagggcaccacagagggtatcaagtgagggaatgcataaagcatggagcactatccaggcagctgtgggattcctctcatccccccacccctccctgggccctcacagccactctctcaccccagtccccttccactgtagcttagtcacccacttgtcccttccctcgctcccctcccattcatcctcagctaatacaaacaacccatctgcttgctactttctctaccaaaatcacaaaattctaggtcttggctgggcgcggtggctcatgcctgtaatcccagcactttgggaggccgaggcaggcggatcacttgagatcaggcattcgagactagcctagccaacatggtgaaacccagtctccgctaaaaaaaaaaaaaaaatacaaaaaattagccaggcatggtggcacacacctgtagtcccagctatgcgggaggccaaggcaggataattgcttgaacccaggaggtggaggttgcagtaagccgagatcatgccagtgcacagagcaaaactctgtttaaaaaaaaaaacaaaaaaaccaacaacaacaaaacaaaacactaggttttaacaaacttcagaaataatctatttcagtcttcccagttccttgaaatgaggaactgaggcctagagagggaaagcccaactgaaaccaggcttcccgattcctcacctccagcaccttcacagaaatccaccaacccttccacaatctaaacatttcccaagctttcattcagaacctgcagcccatctacaaccttcccttgaaacataaatctatcccagcccttctccttcagctcctataccctgccccaatcttctttaaacaacaaactcatttacggaatatctgctatgttctggctctttttaaattggttattattacatgtaatccggcagttcttttgttaaagggtcagagaggtagagtttctggcccagggtctcagagctggtcagtgattaaaccaggattcagcctgcaggatgcatgattccaggccttgggccctacttactcccaccgttgcctctggattgacctctctcctatcttgtacgatctagcctgctcccccagccagggccttagaacctagagcctggtattatccacccccagatctgcagaaaggaagccacacccctcctccaccttgtaagccctccttcctctccctacctcaccccgcctcctctgcctcctggttcaaaagcagctaaaccaaaagaagcctccagacagccctgagatcacctaaaaagctgctaccaagacagccacgaagatcctaccaaaatgaagcgcttcctcttcctcctactcaccatcagcctcctggttatggtacaggtaagagcaacgcctggcaccactgccaggactccccaaagttgcttggcatggagggagggcatacaggatgtgagctccca

SEQ ID NO: 843 - DNA, 2300 bp, Homo sapien
tacccccctattttggctgttgcccccatggcactgcctgtcaacttctacaacctggtgatgtctggcatcaacccctcccaaagatggaggggattctcttgcgagtgatggtggcagctgtttcagggggcacagggctaaggctgagacgtgtcacctcaactgaagcagaagaggtggattatggcattggccacgaagaaaaggaaaatgcctccgcttatgttgctggatgctgaggggctgctggtttggctggtgtcgttttgtcctgagagtccagtttgtatctgtaggaggagaagtgggataagatcaggggacttttttttttttttttagaggtggagtctcactctgtcacccaggctggactgcagtgatgcgatctcggctcactgcatcctccacctcccgggttcaagtgattctcctgcctcagcctcctgagtagctgggactataggcacgtgccaccacgcccggctaatttttctatttttagtagagacggggtttcaccatgttggtcaggctggtctcgaactcctgacctggtgatccacccgcctcggcctcccaaagtactgggattacaggtgtgagccatcgtacccagccctcaggggacttttgaatagcgtgtttgttatttaaagatgcagtcccctttctaccctccccgccctccatccgcccacctccataaaacagtcctcagttctgccccatgtgaccactacttcttccacaaggtcctgtcaggatgtttgactgcttcctgctttgacacaggcagggacagaggtgatcactgcccctgtccaccccctttcacagaaactttctgtttttttgagatagagtttcgctcttttgcccaggctggagtgaagtggcatgatctcgggtcactgcaacctccacccctcaacctcccgagtagctgggattataggcagccgctatcacgcccagctaattttttttttttttccgagacagagtcttgctctgtcgcccgcccaggctggagtgcagtggcgtgatctcggctcactgcaagcttcacccccaggttcacgccattctcctgcctcagcctcccgagtagctgggactacaggcgcccgccaccacgccacgcccggctaatttctttttgtatttatggtagagacgaggtttcaatgtgttagccaggatggtctcgatctcctgacctcatgatccacccgcctcagcctcccaaagtgctgggattacagacgcgagccagcgcgcccggctcgcccagctaatttttgtatttttagtagagacgggattttgtcatgttggccaggctggtcttgaactcctgacctcaggtgatccgcctgcctcggcctcccaaagtgctgggattataggcgtgagccaccgtgcccggtcacagaacctttcttttcacctttccccagcgaccagcccttctggcatagagggagacaggggagccctggcccttgaccttcctagcctggcaaagggcttagcttccctgagcctcagtttcatcttctgagtggggagaagttcatcacagttgtgaaggtcacatgagccagggctgagtgagaaagcacttggcaaagcgtgggtggctggatgtggggtggggaagtggccagatggtgatcgagctgtccttaatgcttgatggagctgcaactagaactgttcttgatggagattaagctggttttgatggtgatcaagctgttcttgatcaagaacttgatggctccggtctgctgtactgactcccctctgggcacctgggatgctaccaaagctgcctcctggaatagcagtcgcttttgagactccagttgtttctgaaatgggagagtcctgtcttctttgcattcctgaacatccaggcttctctctggcaggggagtgggggttagagtgtcccctgtcacctccataaccacagcaggctccacttggacatctcctggcctctccccaaaggaccatctccccagactccctgtgggccgatgccttcctcactcagggttgtcttcccaagtctcttagttctctattattccacaacaccccttgggtgccccaacgcgcctagcaccctgtaagtgctccccagctgtggatacaggtttctctcagggcagcccgcaagcagtgcagccccagccagaagagctggaaggctgggcggccaggcccgctgtgtccccagttttcctgttggagtccatctgctgtgctctcaggagagaagg

SEQ ID NO: 844 - DNA, 2300 bp, Homo sapien
aagtgctaagtaacctcgtgcctgctgggcacagcccccctgccagtcacctgcccaggcccacggctggcgggccaaggagcacaggtctgggcagcacagtgggggcagccttgaggcagctgcctgagaccgggacagcagagcttaaagacagctctgccctggcctctacaggcatcccagccagtgctcacctgcctaagaatcaggatgcccctgcagcctgtccggacagagaccagggcagagccccggatgccagggcctgtgagctctggcaggtgctgggagcccccagttccactgagctccctctccagacttctcagggtcaagcatcagtcccctcctctcccagactcgagacccatgtcccctctcctggcctaactcaccctgcaaagcagcctgtggtgcccactcaccccggggcccggctcactccccttgttctgccccctaaaaaaaaggacgggcccgtggacccccctgctgccaccgtcctgcccatggtgaggagcgagcatgtgacagtccctggacaacctcctgctccatccactacaagaaggaaggatgtccccagcccaggaggtctttctgctccatcgtccccaaggaataagtttgttcagaactctgaaaatgtccctgtcctcccctttacccagagggaggtcgtgaagggccccggtgctcctgctgcctcatctcccacccggaaggaggtggtgcaggggtccagtgcttctgctgcctcgtcccccacctggaaagaggtcgtgaagggccctggtgctcctgctgcctcatctcccacccagaaggaggtggtgcaggggtccagtgctcctgctgccttgttccccacctggaaagaggtcgtgaagggccccggtgctcctgatgcctcatttcccacctggaaagaggttgtgaagggccctggtgctcctgctgcctcatcccccacccagaaggaggtggtgcaggggtctggtgctcctgctgccttgtccaccaccccaaaagaggttgtgaagggccctggtgctcctgctgcctcatcgcccacccagaaagaggttgtgaagggcccctgtgctcctgctgcctcatctcccacccagaaggaggtggtgcaggggtctggtgctcctgctgccttgtcccccaagtcaactgaggttgtccagggcccaaaaggcagcagtagcatccaaaaagaggctgtccagggtattgcaggcagccttgccccgcccctcaccaaggaagagactgttcaaggcccaattgctcctgccacctcactccccaaacaggataagggggtccaggactctgaagggagccccatctcatctctcacccagaaagaggttgtgcaggaccctgatgctctccctgccccatcttcctcagtggacagggtgtcccccagcccaggaggcacccctgccccagtgccaacaggagcagaggccagcacggagtcccagcttgtctctgatcccaccgagggcaagacgtgcacagagacatcaagggaggaggatgaggtggccctggccgctgacctggagatattcctggatacgctgcggagcatggagccccctgagatcctccgcactcaccggctgccacgagcccctcgctcctcctacctgtccatgtacgccacgctgcctgccattgaggaggaccagctggggccatgggtgctgggccccggaccccaggaggtgccttcactggaagagaaagaggaggaggaggaggaggaaccagagaacccctatctgagtgacgatgagaagctccagcgcaggcaggagaaagctgggcccagcccctccagggacctccaccctgccagacccacccaggtctcctgctctcctctggagatgatgaagaagcatgtagcaggaaccaagggcccccactcagagctgggattggaactgcagggaggcagcaggcccacttcccgtcttggaggcagccttctgttcggcagtctggtgcctaccgccaaggaggcctccaccccggaaccgctgggcacaaaactatctgctctgctgccccatggggcaccggggctcaggaaggtgccaggacagttgcccctgctttgcagtgaaagatcatccccaacggagaagcttgcctgttccctgcccctggaggggtgggtaagtgaggcctcgggtgggcaagggaggtgcctggcctcacctgggtcaaggcttgagtggtgtgaagagagtggtgctgggagtcagagt

SEQ ID NO: 845 - DNA, 2300 bp, Homo sapien
gtaatggatatgggacatcccgcatggttggggcccggactttcaggaaatgtgacttcctaaagctgggatcttctggggagggatgtaggggcagaggggcctcgcttctctccattctcttctttggcctgaccgccttccatctttggtccctcttccccacttcctggcatggcccctcaggggtgaggctgggctagtggcttaacctcctgccccagtttcctcatctgcagtaaggacctgagccctgaattgaacagtgaaaaagtgttcttcccttggaggagtgagggcagcctcctctggaggtggctcaagcagccatgtgtctctcttgggtcttgaataccatgagtaattgccagtgtttaattgcctacttgtcatgtgttgggccctctgcatggactatcttgtaccatctgtaccacactctcaggaggcaggtactgttattatcacacccattttccacatgaggaaactgaaatacaaacggtactgcagctattataggaagcagcagggcggagattcaagcccaggttgcctcgatccaagcctccaggttcatcactgtactcttgtctcttgaggtggtcagcccctggggaatgagaggctgcatctgtttcatagatgagtaaattaaggcatttggcagcaaggatccctgctaggcggaattttgacctcctctgttgccaaggaaacagcccatcttttaaaacgggtcgttttgggggcagtgtccatctgggtctggggtgctgagccctctcctcttatccccacagccaggctggaccccaggggaagacagcagaagaggtcaggtgttgtcccatttcaggggaaccctcttctctggctcccttatatcccaggtacatcctcccaggtgttctgtctcaagctgggagggtacaagagaggtggccgcagtctctctgttagcttggaatgggcagaggccatgggcacttgaggcaggccttcccacccagccctcagccccagggcggggaagcacctcaggactgcaaggaagctgagatctccagcctttggggggcatggccggccaggccctgggtgccttgtcacctgggagggagtgcggcacctgagcgttgggagccctcgctggcttgctgtgtgatctcagtcatgtcgccgtcttctttgggccccactttcctcttacgtagaatgggaaggggtgagttaaatgctgaagggccttcccagagctctgtccctttgtccagctctggtggccttagcagcctctccctagggcagcttaccttggtgtcagagccctgttcagcttccttgtgacagggaagataccaggtaccaggggtgcctggagggcagggggagctgtcactatgcccctgcctctctcagtgtctatctctgttttcacccaggcccaaggccagagctgctcagaatgggacatccatgtaggggaccatgatgatttctggatttggaagcaacaaggaatctcggggggtcctgctcagtccctggggcgcctacagaggccagcggtgggcagcgccttcgacctggccagccatgcctccctggggcctgagagcctggccctggaagtggcctcaggagagtctgctcgtaccaggctcccccaatacccagggcctgctcctggacatggggagcagggatcctcaggctgcacctgtcagcagtctccacccacagcttcagaggtccctctgaggcctgagccacccagcaacctggaagacgcacccctgctgctccaccctgcatccttccccagggcagaggggacaaagggcaagcccgccaccccagggactgccttgccagagcctgcccagaccctacacacgcgtccctcttccaggaggacccgctactacatcactgtcaccctgctggggcacaggcaagcaccaggggaggagggtgaagaaccggcccaaccagctccacacctctgcggccctgaggaatctgagggctggtgggagcctccccaggggccacgccccatcacagggtgccggacggccccgcctcaggaaccccagctgagagcccaatcgcatcaggggagcacggcccagcagcaggagctccaggctggctggacacctgggtccccacgcagactgtgagtagaggtcggtctgtgtgtggagatgggaggggagactggcctggctgccctgtcttgagactttgcctattccctgggcctctccagctctaggcccattcattcagga

SEQ ID NO: 846 - DNA, 2300 bp, Homo sapien
gaagaaagtgtgcagtgagcaccgggagcccaaggacccagcccctccagctcttgtcccctaatgtggaggcacctcctcttcagaggcctcccgaatgtgccccttgcacctggagtcagctccctactccccctctgtccgcacttcccaaacccactctggtgatcatgggctttccttggcttgggtctctggtctgggtcaaggcatctgctcaggttcctcagttagaagaccatggtcctccctctgtgctacctccccagggcatgtgggacaaagtgacatcacatttaggcctgtgacatcacagggcatggatgacacaagacagatgatctgggagatgacagcaaggaagggcttggcaggcagaggcttctccacgtgggaacctgagggagtctgtcctcagcccacctcctggggcatttcctagccaagccagggagctttcaggattggagacctggaaatctccaaggccatttccttttttatttttttctaacagagaggttgtgcaaagtgttctgagagctgggagcagagtgtgatgccaggagggagcacagctggcagatggaagccaaaggtgtgtggggaagtgccttggaggggaggaaacttcactcggtgcccctcacttccctgtgattcccagcaagacagcaggggaggcgggcttgtggcctgggggtctgagagggctcttccttttagggagtagagttttggtgaactaagcccctccattacgctgaaggatactgagggggccactgaggagttgggggaaggactgggaacagcatgtgggaagagagagcaagaaagaaagaaatgagggggtggctgtcgtagtgggggaagctgacatggccaagagatggcagagtctgaggtttaccactaaagagctcttggctacttgttgtgtgactctggatgagctgctaataataaaatccaccacacaggcttattgtgaagactaaatgagataaagtttatgaagcccctagcacagtgccagacacagcaagaaagctgtttgtaaaggtggctatttactctgttccttggacaattccagctggaaccctgttactttatcttctattctgggcatgtataatgcagaattatcagttgtaagctacaaaaaccatttcaggaggagttaagcagaaggaatttgtttaaaagatgttagaaaagctcgcaggaggtctgagaaggctggagagcaaggcttggagaataggatggatcaagggaggctggaagtagacaggaccatggccaaatatcacaccccaggaccagccctgcacagattctgcagcctcccctgaacccccttctttccttcactgccctggaagccggatgtggtaccacagcctttgttgtagagaggagtttccacagacctgccacctcaggaccagtggctttttttattgtattttattttattttgagatggagcctcactctgttgcccagcctggagtgtagcagagccatctcagctcactgcaacctccgcctcccgggttcaagcaattctcctgcctcagtctcccaagtagctggaaatacaggcacgtgccaccacacttggctaatttttgtatttttgtagagatggggtcccaccatgttggccaggctggtcttgaactcctgacctcaagtgatctgcccgcctcggcctcccaaagtcctgggattacaggcgtgagccactgcgctcagccagtggcactagcttctgatctgctagtctactgggctgcagtggagattaatggctgcttggggcttttgtaccctgggccagactcacgcacaccagaatttgtgtgaggccacaggggttatgcctcttctcatgctcacaagactcggcttggcaaggaaatgtcccaggaggtgggctaagacagactccctcaggttcccacatggagcagcctctgcctgccaagcccttccttgctctcgtctcccagatcatctgtcttgtcagcctccatgccctgtgatgtcacaggcctaaatgtgatgtcactttgtcccacatgccctggggaggtagcacaaagggaggaccatggtcttctaactgaggaacctgagcagatgccttgacccagaccagagacccaagccaaggaaagcccatgatcaccagagtaggttgggaagtgcggatagaggggaagtagtttttatttttttctaacagagaagttgtgcaaggtgttctgagagttgggagcagagtg

SEQ ID NO: 847 - DNA, 2300 bp, Homo sapien
tcaagacagcgtgactcaattcagcaccgtggacagagctgctggagccctcaggaccctggacagagaagcaggccgcgcattcccggggaaccgaattcgcatcacttgagaacccacctagagaagccagagcgttcaactcccctttccctcccttttcttcagccagacctcagccacttgctcctgagtcttaggaacagaggtacacggagcgaatatattttaagggcgccactaacagcgggagataagacttttgggagaggagaattatgtaaataaaaatggctttggctgatgtactaggagaactcttgataattctaaattagagtcctcagatgggagtggggcactgctaataatatttgttaacgatatgtattttttaggcggagcagcaaagggccactcttgtcctttttaccccacgaagtcccacctcccattccttacgctcaagttttcatttcttggagagcaccccgtacgagagaaagggaaataacttctgcagtctcttgctttcctccccatcttccccttccctacccccactcatccggtctctctgaaatacacatgtgcccacatccgcacgtgcacacacacacacacacaaacacacacacagagccacagcgtgagaattccaaaaggttctgcacactcggtggagaagattgaattcagagcaagcggatgcccccgaaagcaggctctgtccctttaaatgggttgtagtggtgggggaggggaactggccggagctggcattgtccagtttgaactgaacaccggaagtgaaggggcagggccagggccgtgcactgagccccgggccattgtccatctccgaccagggcagtagccacccccactagccagccgtctttatctcctagaaggggaggttacctcttcaaatgaggaggccccccagtcctgttcctccaccagccccactacggaatgggagcgcattttagggtggttactctgaaacaaggagggcctaggaatctaagagtgtgaagagtagagaggaagtacctctacccaccagcccacccagtccctctctcagcagtggatggggatggggtgggggtaggacgagaaggcagctggtggagaaacagcttcaagactctttgggttcctcctgctctccagggagcttacctggggctaactttagacacacaggtttggagggaggaaagaaggaagaattctttacaacgaatcaattaagagcactttctcttttctaactgggggaggcccagaaaaactctgagtcagaaactctgggaggcagacattcagatgtagtcagaggcagacagactttggaaggcagcgctttggtcaggacagatcagccctgtgtgtccccagcctctcccctgctcccccatcccgggcttcccagtgtccagaactccaggtctatctaagcacacgggggtggggggtgagagcgggtcagctccaagcagccgggtcagctcagaggcctgagggggaagagagggggaggggagctcaagggctgggggagggggagggcccattcatttctcccttgacaggtggtttgtgtttctgattggccagcgccgccaggctcacacctccctcccccaactctctggaatgtataattatctgcccggggggtgggggtggtgtgtgtgtgtgtgtgtgtgtgtgtgtgtgtgtgtgtgcagtcacgtggttttaaaactaccccccccaccaggtcccccacctgtatctgctttggggacccctactgagtccaaagtgcaggatctcaaattccggggtactcaagtcttctagggcagacagacccatctccagttgtgcgtgtggggagggggtgtcaaacctcaaggttctgagaagggacaccccagaggtgtcagagaccggagttgtgggggagggccggagctggagccggagggaaagggaggggaaaggagagggaggggaggggagggggctgcccgcggggggttgggtcattgtcttttagaatttgggagcctttgaaaagccgtgggccctcccaccgctattgtgcgggggaagatgtagcagcttcttctccgaaccaaccctttgccttcggacttctccggggccagcagccgcccgaccaggggcccggggccacgggctcagccgacgaccatgggctccgtgtccaaccagcagtttgcaggttcgagctcgggacttagcggggacactttaggattcaggggcggccaggagcc

SEQ ID NO: 848 - DNA, 2300 bp, Homo sapien
ctttttaatgaacatcgagtttttttatatacatcacaagtcatcaagcaagaacactgaattttaaacatctattcccactaagggaaggaggattttaaaaaggaaaaaaaaaaaacttgattggaggcaaaccaagtatattaacaccgtgcaaggaaacagggaaactggtttaaatcctcaagcctgacattataagagtaagggtaagaagtttcataatctactccagggactttgtggctccttaattgtaccaaaagtcaaagctgacagtagaacctcatgaagcagcaaactactagtggacttcattaaattgtcttgctgcaaaatgaagtaacttggactgaaatttactccccaggctgcaaagcaggaaggatggaaaagctcaacactattcatttctactcatctctagggctttctttcatcatgttgctgtgttaaaataacccctttcattagaaagagtggaagacataatcaattagaaagtgccaataaaacatctcttccttgcctcatttctttaataatattgtaaaatgaaatgcgacaaaaaggttctttgacaattgtgaatttttattccactcaaaacataatactacataaagttgtattatgctttgcaagaaatactggttgtggccgggcgcggtggctcacgcctgtaattccagcactttggaaggtctaggcaggcagataacgaggtcaagagatcaaaaccatcctggccaaaatggtgaaaccctgtctctactaaaaatacaaaaattagccaggcttggtggcacgcgcctgtagtcccagctactcaggaggatgaagcaggagaaacgcttgaacccgggaggcggaggctgcagtgagccgagatcgcgccactgcactccagcctgggcgacatagccagactccgtctctaaataaataaataaataaataaataaataaaaataatactggttgtataagaatctgtaaagaattttttcctcctctttcaattttgagaaaattgaactacaaatttgttttgtgagcctagaattcttgcaaccctttttttcgtaaaggttcagtagagctaatgcccttaacttttctaccagggttaatttctgttattttcatttatgtactgccaaagcgagcacctttctgttattttagaagtcatgctttttttttttttcttttttcagacagagtttcgctcctgttgcccaggctggagtgcagtggcctgatcttggctcaccgcaacctccgcctcccgggttcaagcgattctcttgcctcaccctcccgagtaactgggataacaggcgcccgccaccacgcccggctcattttctgtatttttagtacagacggggtttcacgatgttggtcaggctggtctcaaactcctgacctcaggtgatccgttcgcctcggcctcccaaagtgctgggattacaggcgtgagccaccgcgcctggcctagaagtcattcttatggcagaaatctttctggccttaccccttctcttgagttcgttgggataggtcttgggaatccacaaatcctaaaatatgcgtgccttaagtcggcacaaaatagattaatattctgcgcgtctgtaagattggctgcggctagaaactccttcccagacgattaaatccactaaataaaatacgaaacggtaacgagataatttttaagagtatgcaccagtgctctaatgaagcccggttctgcggcattccaaggtaaggacgctgccttacccagtctctcagcagtcctaagctgccttcgacggccgagaagcgcctcgattcttgcccctggctcatttccctggcgcgttttccagacgcctccgctcccaacgctgggctcaaccctgtcttccccagctggtctcccagcacgtggcctggagcccagcctcccgccccgctcggtcacgtgagcctggctctcacccgcgccggcttccacaccccgcgggactgagaaccgccctcccactagctcgcaggcgcaggcgcagggcagggtcccctcagtttgggtgacggaaggggcgtgtcgcagcgcccaaagatgacgtgttctgccagcgccacgtcatgaggaagtgccggcccactgaagccgtggggacgcgcccagcggagctaatcaggtgccactgaactgaaggggtgaactagaggagaagagggtgactgggcggggagcagctgcgggagaagcaaagggacgactgagggaataatcaggagaccac

SEQ ID NO: 849 - DNA, 2300 bp, Homo sapien
cataatactacataaagttgtattatgctttgcaagaaatactggttgtggccgggcgcggtggctcacgcctgtaattccagcactttggaaggtctaggcaggcagataacgaggtcaagagatcaaaaccatcctggccaaaatggtgaaaccctgtctctactaaaaatacaaaaattagccaggcttggtggcacgcgcctgtagtcccagctactcaggaggatgaagcaggagaaacgcttgaacccgggaggcggaggctgcagtgagccgagatcgcgccactgcactccagcctgggcgacatagccagactccgtctctaaataaataaataaataaataaataaataaaaataatactggttgtataagaatctgtaaagaattttttcctcctctttcaattttgagaaaattgaactacaaatttgttttgtgagcctagaattcttgcaaccctttttttcgtaaaggttcagtagagctaatgcccttaacttttctaccagggttaatttctgttattttcatttatgtactgccaaagcgagcacctttctgttattttagaagtcatgctttttttttttttcttttttcagacagagtttcgctcctgttgcccaggctggagtgcagtggcctgatcttggctcaccgcaacctccgcctcccgggttcaagcgattctcttgcctcaccctcccgagtaactgggataacaggcgcccgccaccacgcccggctcattttctgtatttttagtacagacggggtttcacgatgttggtcaggctggtctcaaactcctgacctcaggtgatccgttcgcctcggcctcccaaagtgctgggattacaggcgtgagccaccgcgcctggcctagaagtcattcttatggcagaaatctttctggccttaccccttctcttgagttcgttgggataggtcttgggaatccacaaatcctaaaatatgcgtgccttaagtcggcacaaaatagattaatattctgcgcgtctgtaagattggctgcggctagaaactccttcccagacgattaaatccactaaataaaatacgaaacggtaacgagataatttttaagagtatgcaccagtgctctaatgaagcccggttctgcggcattccaaggtaaggacgctgccttacccagtctctcagcagtcctaagctgccttcgacggccgagaagcgcctcgattcttgcccctggctcatttccctggcgcgttttccagacgcctccgctcccaacgctgggctcaaccctgtcttccccagctggtctcccagcacgtggcctggagcccagcctcccgccccgctcggtcacgtgagcctggctctcacccgcgccggcttccacaccccgcgggactgagaaccgccctcccactagctcgcaggcgcaggcgcagggcagggtcccctcagtttgggtgacggaaggggcgtgtcgcagcgcccaaagatgacgtgttctgccagcgccacgtcatgaggaagtgccggcccactgaagccgtggggacgcgcccagcggagctaatcaggtgccactgaactgaaggggtgaactagaggagaagagggtgactgggcggggagcagctgcgggagaagcaaagggacgactgagggaataatcaggagaccactgaggcgtgaagtactaggcgtgcgataactgaaggagttagtaactgggagcacagagttggaaacagcttaggggaagatggagaaggaagaaacggggaatgatcaagatgtgggcaccatgatgtggcaggaaaccgacttagatgttcagaagaagtcagtgcagatacggaggaaatgggaatgggaagaagtctgcaaagccaggagaaccgaggaaaggcttttgcctccagaggtcacattgcgttataaaactctgggtggtaaaagattataggcttagaccagtgtctttggattctaatgctggctgctctccatagtccatctgattccccagaagtcagttatagctcttcgcaaaccttggtgacttcttattttctttcttgtttatccaagattacctggctggtgtttgcttgttctggagtgatcttctgactggaaaagaactatgtcatggatcaaggaaggagagctgtcactttgggagcggttctgtgccaacatcataaaggtgagcaatggcccagagcaccggttggccttctggtcagttggataatcttatataaaaacctgttattaaagttgatgat

SEQ ID NO: 850 - DNA, 2300 bp, Homo sapien
gacacacaactagtaagtgtagagtctggttttgaacactcagcccagatctttctgctttcctgaccatgcgtccagaaacatgttcccaccaagaaatttttgtcttctggaccctttccaagatgtaactctaactacctggacattctgaattctgcttctgggtagttggtaggacaggtaaacagcattcttggagccaacagacaccagccatgcaaataccctctttctgtggacaggatagttttacttaagataaatgcttccactcaccagttttcttcaattctatctcctttctgaccatctctgtgcttgggaaagtagctcttatcaaacacaggagaactgatcatattgctgtttatttaaaatccggtgtaatgtggaatttttgcaatgtttcaggatccatatgacttaaataagattttaaaaataaattagctgagcatggtgttgcacacctgtggtcctagctacttgggaagctgaggtaggaggattgcttgagcatggaaggtggaggttgcagtgagctgagatcacaccactgcactccagtctgggcaacagagggagaccctgtctggaaaaaaaataaaatatgttttctgtttttttttgttttgagacagagcctcgctctgtcactcaggctggagttcagtggcataatctgggcttactgtaacctccacctcctgggttcaagcgattctcctgcttcagcctcccaagtagctgggactacaggcatgcggcaccacacccagctaatttttgtacttttggtagagatggggtttcaccttgttggccaggctggtctcaaactcctgatcgcaggtgatctgcctgcctcagcctcccaaagtactgggattacaggcatgagtcaccacgcctggccaaaaaaagttatttacataaattcaaacaataacagaagtacataaagtaaaaagaaatagtcttttcttccttacttcttatccaatccactgttaatagtatgatgtatctttttagactttgttctttatgtatacttatatgcacgtgtgaatgtttgaatgtgtgtgtatgttttatactatatattctctgaaacttgccttttacatttaacattagattttggacatctttccaaatcagtgcatttagatttatctttatttttagaatgcagttgcatagtatttcatcaaatactgggccataggatgtatgtatgtattttaaaaaacaagatgtttttagcaaaagacaacagatatttttgtgggtgcatctggttttaggcctgaggctaaatgactttcagcaaattattcatctttgagcctcagtttccttatctataaaatgaggatagaaataccttatgtatctgctgagcatggtggctcatgcctgtaatcccagcactttcagaggccgaggggggggcggatcacgaggtcaggagatcgagtccatcctggctaacatggtgaaaccctgtctctactaaaaatacaaaaaaaaaaaaaaacaaattagcagggtgtggtggcgggcacctgtagtcccagctactcgggaggctgaggcagaatggcatgaacctgggaggcagagtttgcagtgagccgagatcgtgccactgcactccagcctggggaacagtgtgagactctatctcaaataaataaataaataaataaataccttatgtatcagaacatgtcaaaaaaggcaaaaaataaaaaagagaaaagaattttacattgtattctctaaaaaaaaaaaaaaaaaagaaataccttatgtagttgtgaagatttaaattcattcattaatttagcaaacattttttgagggccttctgtgtagtattggctagtgtatttgatggtattgtataaactgagaagcctatatatggaagttcaccatgagaacactacagaaagagaatactacaggatgtgtgcctctctttgtctcttcttgctcatcttagtgatatctctgagtctctgcttgataagtgcctctataccaaccgctctcctcatcctgacatcttgatacggacttctggagaagtgcggctgagtgacttcttgctatggcaggtaggtcatttccaagtactattatgtttgtgtcatggggaaaccaactgtatccacagaatggatcagagtggtccatccccactcccaaacaggctggggccagagtacttctggggaaagctaaaatctggagaagcatctctaggctgtgtctcataatatttg

SEQ ID NO: 851 - DNA, 2300 bp, Homo sapien
ggcaaattttctgtctctcccaccccttttttccttacccaaataactgcctgcctattagttatttactagcagatccaaggtagagccaaatcttttgtggaagctgggtggaaggctaaaatggaagggtaaagagctagggttttggggagaactcttccctgaaattctgtgtgttgaaggatgtgctggtggaaaaagaaagtgcatctaagagacaggcagctgatgagttgtggccctttgctctccaaaccctattggtgaccagacctaggtttagtgtactcgtgggagactttcaccctcaatcctcctcaggagcctgtcccaggcagcccaaaggtatctatggccagcaaacctggcctggggggctccccagccaagcaaagggaacaccattcattatcaggaaaggaggtgcctttcaccaagaaaaggaaggggagtggagccctggaggcagagggcagggcaaagtggcaggtggccagcctcattcaggctgatgcagtgcccagacgggccagccagtcagctcgcttgagttccaaggcctgcaggaagccttggactcgctcttcccgtctggccgagagtttgtgcaagcgtgtccttcggagctgggcgtccccactggcttggagcccctctcgcagcagctgctctgtcactgtagcctggtccctctccagctgctgcctcttccgctcctctgcatacatgtctcgggccttctgctagagaaaagtggggattggggtggggagatcatttttaggagtgggtgaaactgggatggaggaggtagggggtggggcacagggtgggccaagtgaagtggaacagtggaaagtaggtaccagatttgaaaaggcttgggagtaggtatgcagtgggtggtgctcatgttgtacaggcagggcagtggcaattctgggtccatcttggtttgttttgtgtggaagcgtctgtacttcttaaagtttttctcatgctcttggaaccaaacaaatgtgggtctgacttctgattcccccatcaactggctttgtgtctttgggcaaatcctgtcctaacctcatttcttcatctgtaaagtgggggttgtgcctaccttgaagagtggttttaaggattagagataacatatgcaaaatcctctctaggatattagcaggctcttagacagaaacagcaattttacaagttgttattgtctattctccgctgcaagaaaggtcctattcttgtcggggacatgtcccttgggtcacttcctttgatctccccaggttttcctctgagggtaccatcctccccactccctaggctatttttcagagctccagacttgcctcctgtatgaagaccagcctgatccttccagcaaatgacccccctatgaacattctgagaagcaggttcaactctcttaagccacttattgcattctgcatagtagaataagtgttagtgttcacaatccactctttctgttagaaaataagcccttggaagtttgagagccttcaagcctcttgcaaccagctctgacaccaggtggtgatcatactccctggcagcagttatcatcccaagtactagagggcagagactgggcttcttcctctccagcacttggggtgccctgtacatgtgaaacactcaactgactgaccacgtgatcccaggagagcagtgaggatgctcctgatacagaagagcggaaaatccctttggagcagaaccaaggctttcctgtgcctcactgatcctctctgttcctgccagtctaactgacctgcaaagcctttgcactagagctcctcctgccaaacctattccatgtgtgagaaactctattttcctatggtatcctataccctgatgacccttcccacattctaccttgtattacgataaacttgtatacatgtttttgtcctaatcagcctgtaagcaccttgactgctctgtcttcatggtttaaagaatatcttacatgtgcacaaccacttcatctgttgcctcacttgaccctcacaatggagctgtgagggaggtactttctgctggagacagacatggagcagggaactgatttgctgtctctcagcaataaaggtttactgcatgaataaggatgacaaatgagaattctggactgtcccccccggctcctgaataatcccaggcattcaagaatacttctcttctgctattacaatgaattacatgtggagctatgaggacttcgggcttgaacagttgccgtagagctctccgtcttg

SEQ ID NO: 852 - DNA, 2300 bp, Homo sapien
ttttttttttggagacagcatctcaccctgtcctggctggtctcgaactcctgacctcaggtgatccgccggcctcaccctcccaaagtgctgggattacaggcatgagccaccatgccagacttcccattttactttctgcaagctgtttccctagcagctccctctaggggagaggtgaaatcttgcaagttgtagcaagagcacacaggaaacccctaactttcctataccccacccgcctcttcccctttctgtcccgggatacctggcggcaagagacttcttggctattgtccatgctcccagaatcaagcataaatgccagacacggcgattgagaagccaatcagtgaaccctttggcaaagcccccatccacacctggcactcccctctaccaatccctggcacagggttcctggagagcaggtgctgtacattttacagctttacaatggggctgttgacagccataattagggaggcatgaattatgcggctataatgcagagccctacaattaaggcgggaatgaggggctggaggcagcaaacggaatctgccctatgagcgtggctgttgagtcctgtctcctgggtctgactttccgtaatatgattggggtacagtagaggtgattaatggggctggcatctctctttggcctgaggttctgtattctgggaaaggtacacagggtggagtagggagaagctgccccaggaggcgatgtagtggtggaaagaagaggcagagaggtcgtcgtcgtcgcccagcagcaagggctgcaaaatagtagaactcgtggttgctttggacaggtgtgatttgtgcaagccaggttcaacccttgcctcaagaaatcagatgggaccaatttagtgtccttccacctgtgagccaagcccccatttgaggacatctatcgtattcttgtgtgctgggtctcaaatagaatttttaaagattcttagatgtaaaacttgtttgctaactgcaacggaagaacaccttcttttgctgctgcaattgcctaccctccctcaggtgcacttggctagctccaagaccctggctttggactagggggcaccggaagagcccttttgccatcacaccacctgttcctctacttgtttcctaatccccgggcgctttcctccaccctcctttcctcgcgcaagtgaaaggcagccagcttgacagtgtggaaggagggatttcgccagctgcggctgcagtgcccaggcttggtggccgcgtcgggttgggcagctgggcaaaatgtctccgagaggggtagagtgtagggggaagtgagtgctggtagacctcgacggccgctctccaccatactgtggcggggtctggaggtttgggaatacagggaccttaagggagccacccgagaggagttgggggtgggggcttcgatagcatttggggaggcggctgcgcaacgggtgctgaaaggacagctcctacctgacccacggcacccaaaaggcacctctgcatggaaagtctccccctgaaacccctagcccacctcgagtgggaccgtctttcaggtgaggtgcacgaaaggcttctccgaagtggcagctcggaaggatgcacgtccggctgcgccaagctggtttccccgcctttttcccactttggcgtcagcctgggctctgggaactgcagcctgtgcctccagccgcgcgcttcctcctgcttccagaggagcagggcagtgcagccaggcctcgcaaacccctcttctggggcccccagcgggagcaggaaggaaagccgctgagatgcgccgtgagtgtcgcacggcttggagaagtgggttgctgggttgcataaggtggaaggaacttgctagtttgcaaaagacagctcttggcgggagccggaacccggagcccgccgactcgcgcacccctcctcatttactgccttcgacgcgcgccaccccgactgcgcccccaccccctcggcgcgccgccgtctccgcgcactaccccccccacacacccccctcctcactccctccagaggaggtgagtttaaaccccgcccacgtgaccccagctgggccaatgaacggcggcgggaggtgaaatccggttctaaccggtccggggctcccagcgctataaaaactttataaaccccccggagcccgagcagtgtgaagaagaggcgagaacgacccccggaccgaccaaagcccgcgcgccgctgcatcccgcgtccagcacctacgtcccgctgccgtcgccgccgccaccatgcccaaga

SEQ ID NO: 853 - DNA, 2300 bp, Homo sapien
tctgggaactgcagcctgtgcctccagccgcgcgcttcctcctgcttccagaggagcagggcagtgcagccaggcctcgcaaacccctcttctggggcccccagcgggagcaggaaggaaagccgctgagatgcgccgtgagtgtcgcacggcttggagaagtgggttgctgggttgcataaggtggaaggaacttgctagtttgcaaaagacagctcttggcgggagccggaacccggagcccgccgactcgcgcacccctcctcatttactgccttcgacgcgcgccaccccgactgcgcccccaccccctcggcgcgccgccgtctccgcgcactaccccccccacacacccccctcctcactccctccagaggaggtgagtttaaaccccgcccacgtgaccccagctgggccaatgaacggcggcgggaggtgaaatccggttctaaccggtccggggctcccagcgctataaaaactttataaaccccccggagcccgagcagtgtgaagaagaggcgagaacgacccccggaccgaccaaagcccgcgcgccgctgcatcccgcgtccagcacctacgtcccgctgccgtcgccgccgccaccatgcccaagagaaaggtacgtggcgcgagggccccaggcgccgggccaccactgccgccaccgccgccgccgcctccctggtgcagggagcgagaatcggcgccgagcaggagccagcgcagcctccccgcgcgggggctggagacggtgtcgggcagctcggggctaaccctgagcggctcggctgcccgcgggcgccagaggccatattggaggagcggcggccgcggcgggaggagccatgttggcggctgtttatcccgctctcctcgggctcgccgcccccgccccgtgccccctcccccatcgcgagggccccttccctcccctccctgcgggcgggcaattcaaacccgaaagggcgggaaggcggcgctcggggttggcgggcgggggaaagcgctgccgccaaaaaaccgccgccgtgaggggcggggcttgtgcggtatggccccgccccctcgcccacgttccccgcgcacgagacgcgcgctgtcgccgcccacgagttccccgggctgcgcgcgcctccctctcccgccctcgacggctgccatagcaacggcgctgggctccgcctccggagggggtttgtttgcgccatctgcagctgttgctcctgcctgtcgcggtggtgcgggctccgctgccctccccggctgcgctccggtccagccctcgcttctcggggtcggcgagccggagctcctgcgcgcgcttcgttcttatacgaacgtcgggctcactcatttatgtcctagaaaagttgtgtggacgactgctttaattttcatttttagcactctaaagtttgggaagtaattaagaaccacctcaaaatctgcagttttttgttcttgtttcttataggctgaaggggatgctaagggagataaagcaaaggtgaaggacgaagtaagtcattctctcttcaagggtcaaagccttggactagcagaggccactggactcggtgattaaccgtaacctgtgtcctgaatttacactcctataatctagagcaaattgataccaaactttcaaagcgacttacctgtcctatttctaactttctcgttgtctttaatagccacagagaagatccgcgaggttgtctgctgtaagtgtatgcttttgaattttcgtgcttgtccctgaaactaaaaaacatcaaaaaacaattccctttgcttccatgaattatggttagtgcctggttttgaatcattgcctctacttgggactcttgcccctttgggttttgctggttctgaaattctgatgcctgtagccaaagtgggacatttgagtgggcttctggaaatccaacattctagaagaaagccaaccacaaaaacttttgaggaggaggagaaacttctctacccttggtacttttggttggttgtgggtggttttcttcagtccattgtactgatgttcactttttcctctcttcctgccaaaaaaagaaacctgctcctccaaagccagagcccaagcctaaaaaggcccctgcaaaggtaagtgctaacattggaactgatcattttcacagaatgaggactgtccttagtgccttaacttaattagcataatggtgcctccattaatggaggttataaactgtgtggatagcttacctcgtccgtgtcattcataacgttggtttcctgatcaagaattctgt

SEQ ID NO: 854 - DNA, 2300 bp, Homo sapien
cactccagcctgttgacagagcaagactctgtctcaaaagaaaagaaaaaaaattagctgggcatggtggcacacacctgaagtgccagctacttgtgggaggtgggaggatcgcctgagcccagaagttcaaggctgcagtgaactacgattttaccactgcactgcagcctaggcaacagagcgagactccgtctctaaaaaacaaataaaaaatatatagctgtaaatttattgaattaaaatgaatcttgtcctatatacctgaaagattgagattataattcccattttacagatggagaaattgaggtttagaggcataaaatgagtttccctgtgttaagaaggtagcagagctggaattcaaacccagaattgttgggttccaaagtcctttcactcaaaattcagttcaacagctgaggtcctaccctgggaaagccatggaaaagggggagcacgtggattctggagaaatccttatccactttgatttttttttttttgagatggagtctctgtcgcccaggctggagtgcagtgggggctatctccgcttactgcaagctccgcctcccgggttcacaccattctcctgcctaagcctcccgagtagctgggactacaggtgcctgccaccacgccctactaattttttgtatttttagtagagacagggtttcatcatgttagccaggatggtttcaatctcctgacctcgtgatccgcccgcctcggcctcccagtgctgggattacaggtgtgacactttgatttttttaagccctagtctgttctcaacctcttgtgtgaccttgggtaagtcacttcatctttccgagcttgtttcaggatttgtaaactaggtggtggtaatcattcaaggaaatcacatggctcgcaggaagcttttgataaacattccttcccattcccctgccttagaacagctttgcaaataactgaccagtcttcctgcgaaaccagcaagcttgtccctccagcaagctcactcctcacatgtgaatacatctcagcacacccggacccctaaggctctttaggtggaggctgaatctctctggggcaaccagtctccctggcctttcactccaagtcccaccaagcctcggttcatcctgggagcctggtccctcctcagagagtcgcaaacccaaactagtccagagctggggctgcaggtgactccagggagacctgacctgaaaggacccccttcaagtgatagggcagagcacagattgcaaaaacgcatattaagaaatcactcttggccgggcgcggtggctcatgcctgtaatcccagcactttgggaggccgaggcaggaggatcacttgagccggggagtcagagaccagcctaggtaacaaagcgaaacttcgtgtctctctctctctcactatatacacacatacatacatatatgtgcatatatataatatttatttatacatatttatttatatatgtaatatttatatacattatgtaaaatcaatcgatcaatcaatcactctgtggtggcactatgggtcctgatggtggtaacaactgctgatgcccatcttggcctggggcactgagatcgcccggagatcacagtgttagcttcagggcggggtagaaattagaggataggggatctctagggcctggtgagttgagggcctaaggggagtgggtctcaggctccttccaagcctcagcctagatcaggcccaggaacccagtgtgaatgtgtgtgctggggtcggggataaggtgcttctctcccgttggaaggagaaggaacatctgggctgggattccaaaagagctgagcgggggagaacggtggccctggtgtggtgtgtccaggggtacaccactggaagggaaggagccagcagggcctctccggcggagccgagcgcgggccgggggctcgcggcaggggcggggccggccctcggggcgcggcgggggcgggggtccgcgctgggaatgccgcgccgcgggggctggggcggggcttctccggctccgcccccgcgcaggtagccaatgggcgcggcggcgccgggtgacggagggagccgaagtgctagtgccgcggcggcggcggcggacggcccagccggagcgcgaggggctcgggggggcgcggcggttcgggtcgcagagccagggaccccaggacccgggaggcggcgcagccggggccgccggaggagcgcgggtgacctggcggcggcgagatgccgctcgcccagctcaaggagccctggccgctca

SEQ ID NO: 855 - DNA, 2300 bp, Homo sapien
ggccaggcagtaagcagggaggcgcctgggtccaagctacctctgccactgtttgctttgagccttggtgagtcactgtcttctgggcctcagtttcctattcctggaatgaggataacagtttttaggatatgatcagagtcaaagacatcagattgcactcaggagatagtcctctcagctactgtctgggtccccctcaggtcttggcataggaggaaaatcctagggaaatgggagatctcagaggtgggtctgcaagaaatacgagagtcctctcctgagtggtgggagtttgcagattgtctcccctcatctctttccccaccccaggtacagcagcaagaacccacagctctgcccttaaccccttcctggggatccctgccctgctgcctgcccgtgtgtctgccaggtgtcagacctatctgccctaggtattgtcagtctgcttggggctcgctgactctcccgctgtctctctttgctgcctacctctgtctgtggttgggttccaatctctgtctccacttgataagtgcctgacttcaccttttgggtacatgtcacatgttaggtgcctgttgttcatgtccccttctgtctctgcctgttgggtttatgtcttcatctgtctctgcctgttggatacctgtccccttctgtctttgcctgttgggtttgtgtcaccatctgtctctgccttttggatacatgtccccttctgtcattgcctgttggttttttttttgaaacggagtctcactttgtcgcccaggctggagtgcggtggtgcgatcttggctcactgcagcctccccctcccaggttcaagccattctcctgcctcagcttcccaagtatctgggattacaggtgcccaccaccacgcccagctaattttttgtatttttagtagagacggggtttcaccgtgttagccaggatggtctcgatctcctaacctcgtgatccacctgcctcggcctcccaaagtgctgggattacaggcgtgagccaccacgcccagcctgcctgttgggtttatgtccccttctgtcattgcctgttgggttggtattctcttctgtctctgcctattggagatgtgttcctcctgcctttgcctgttgggtacatgtccccatctgtctttacctattgggtatatgtccccatctgtctctggctgttgggcttgtgtccctatctgcctacacacattggggatgagtctctgtccacctctgtctgttagatatgagtcccctcctgcttccccttgtcaggtacgtgtctccatctgttttctattggatatgaattcctcctgcctctgcctgttgggtgcgtgtccttatcctccatccctgcctgttgggtatgtgttctctcctgcccctgcctgttggatgccattctttctttttctttttctttttttttgagatggagtcttgctctgccacccaggctggagtgcagtggcgctatctcggctcactgcaagctccgccttccaggttcatgccattctcctgcctcagctcccgaatagctgggactacaggagctgaccaccacgcctggccaattttttttttttttgtatttttagtagagacagggtttcatcatgttaaccaggatcgtctcgatctcctgacctcatgatccgcccgcctcagcctcccaaagtgctgggattacaggcatgatggatgccattcttacctgtttccacctgttgggtgcctgcttctgcctgttgggtgtctctcttcgtctgcctccacatatcaggcacctgtctttgtctgttgggtacctgtttgctattgggtacctctctgctgttgggtaccagtctgctcagcagctgcattggcaggggactttccctttgtaggcccacagggaggatgggggaacggccagagggcagccctcaggctctgaggagagggggagagagaggaagggaacgtggtgagggtgtaggcctggtgctgggaaaccacaggccctgagtgattggctgccctgggccaggcccagcccccgcccttaccctgcacatccgccttggtcccggccaccactgcggcagccccggactctgcctgctcctgccatggtgccgtggccctgctgggcggatggagcaggatcccaagccgccccgtctgcggctctgggccctgatcccctggcttcccaggaagcagcggcccaggatcagccagacctctctgcctgtccctggccctggctctggcccccagcgggactcggtgagt

SEQ ID NO: 856 - DNA, 2300 bp, Homo sapien
gttgatagttagaggattgactatgaatggaactgtacaggccaggcacagttactcacacctttaatcccagcactttgagaggcccaggcaggaggatcacttgagcccaggggttcaagagcagcctgggcaacatagcgagaccctgtctctgcaaaaaatgttttaaaaattagctgggtatggtggcacatgcctctagtcccagctgcttgcgaggtcgaggtgggaggatcacttgagctcagagattgaggctgcagtgagccatgaatcatgctgctgtactccagcctgggcaacacagaccctgtctcaaaacaaaacaaaacaaaaaagccttacagagtgtggggaggagaagaatgaaatgtggggtggttcagccccctcaagttacagatgagcaaacagggcccagaggaaagccgtttgcttatggcctcagcagtaagtgtcattcatccattcattcaacagatatttattgaatacctgccatgtactaggagctagtttaagtgctgggatacagcagtgagcaaaacactcagggagcttacatgccggtgggcagactcagaaaacaaattaaatattatgttaagtagtgggaagtgctacagataaaagtaaagcagtgtattctttgattttaaagataaggaaaatagggccaggcgtggtggctcacgcctgtaatcccagcactttgggaggccgaggcaggcagatcacttgaggtcaggagtttgagaccagcctgaccaacatggtgaaaccccatctctactaaaaatacaaaaatcagccagccatggcggcgggtgcctgtaatcccagctacttgggagctgaggcaggagaattgcttgaacccgggaggcggaggctgcagtgatctgaggtcgtgccactgcactccagcctgggtgacagaggaagactccatctcaaaaaaaaaagacttttaagattttgacctaagtaacaggaaggatggagttgccacaaggtaagattatgtgatgagtaggttttaggggagaattgagagttcagttttgacaggttaacttagagctacctgtagacacctacacagagtcagtagcagcagcaataagaccatcatttcagccccttccccttctctcggatgccaagtccatgcacccgtccctctgcaccctgtctgtgtagctttctaatctctggccgctgacctgggccactagccacctccccacactgagaactgaccccagccccctgcccctaggttgtgcacagggacctgaagcccagcaacatcctgtatgtggacgagtccgggaatcccgagtgcctgcgcatctgtgactttggttttgccaaacagctgcgggctgagaatgggctcctcatgacaccttgctacacagccaactttgtggcgcctgaggtgagtggcccagcctcctcagctgtaagagtgagggggaattggaggccttgtgccccctcccagaggccccacattagccgggactccagtctctgtgaccttggcccagctggcaagggaagatctagcctgtgcctgggacccttgtcctgcccttgaggggagtagcaggaaacatctgtggcgactttctactgcccccccagactgaccacctcccctgccctgttgccaggtgctgaagcgccagggctacgatgaaggctgcgacatctggagcctgggcattctgctgtacaccatgctggcagggtgagtgcccctggcctggacccttccccactcctgcagccctagcacttgggctgagtggtgcttgtctgataggaatggctcagccagccccgccccaggatggtctggaaatagggacatgctcctgcctccaggagctctaccttgggagtaccccatctgagggggagacacagtctcccaccgcagccccagccccagtatggaggccagagtctgtacccagaccgtgcgggcttttctgcagatatactccatttgccaacggtcccagtgacacaccagaggaaatcctaacccggatcggcagtgggaagtttaccctcagtgggggaaattggaacacagtttcagagacagccaaggtgagtctgtacggcctgcgtgggcttatttggaggagggaggcagggtcccatcctagggcttttcagcagttcatgaacagcctcatttctccaagcggatgttccacaaatccctgttgctgtatttctccaagcggaagattcccaggcagaccaccaccacctcc

SEQ ID NO: 857 - DNA, 2300 bp, Homo sapien
atttatgaggcagcctataatttggtttctaggacctaatgcaccggggagagttgttgcccctgaggactgtgagtgaaaagagggcactggcccataccagtcagtcggatcttcttggtaggctggtttggttcttggcttgaggccgggggaggggagaagaataaaactgtgggattttttttttttttaaatctcatcactcttagattaacaggaaggttttgcctttctggtgtaggatgcagtaagttttcttggggagagaaatgagttcaggctttggaattattcatagtgaccagggacattgccagcactcccgggtcctgcataatctaagataatgctcctgtggccatgaagtctccctttacaaaatctgagggggaaaagagatcctggtgtctaggaacactggcctgggcctttcccaaggcagccttgggtctggtgaggagctggaatcccctctggcttttgtagcctgtcatatcagaacattccaagtcagcctgaggaagaaaaggctgctgctgggatttggtggggcctgtagatcaggagaacactggagctttctgtgtatgtcgatcttttcagataaacctggccttctacccaactccagctcaatcggggtctcttagaatgtaatggtaaactttaaacaatctttacgctacaggatagaaaacaaatctgacaagcatccattttctaagtgacttgttggactgtgccttttcttcaaggagaaaatggtttccattttctgcatctctcttctgtaatggtttgaacactcaggttcctgcagtccctggagcctcttctgtgggttttcagtattagaaggtactgtctttggagactggggctacttgtcatggtaggctaagttttcttaagagggagtgagaaacggtgtttaggttttcctgctgggtaactgttctatgctcctaaagcaacttcagtggcctccattttaagttagtggtgagatgatcagttttgacttcaaatccattttgatattctgatcccattgttgaatgtgctcacaacttgatttttttttttttaaaggcaagtagaccgaaggcagctttggtgactccacttctttttaaagtcaccctcctctgccctctgactttaagtgacaggcagttccctcccctctctttcaattctgtaaaatggggataatccggacctcatgcccccagagccttgtaaggaccggctaatgagggcaggcgagtgggaaacgaatcgtctgaacaatgatcagtcattctttcgggcttgcaaagagggtaaaaaaggttgggtctttagcggggtccgtagaaggctttgaagacgaaaagtgctgtagaggtgctaagcagcagccaacggaccgggcccgctgccagggggtcagggctgggccgaggcggccgcggtctcaggctctggccaattttgcagccgcgggtaaagttcacgctgcccgctcccctcggtacggccgggaggggacagacctggatagggacgccgggagggaggcggcgcaggctccagagatgcgcgggctccgggccgggttttctccgaagccttcggcggcggcgctgcctagcgaaagcggctgagggcctgccgccgccgcggcttgttctctcccctcctcctttgtgaagggaagggagcgagtccgttccacggcctgcgcccgctccgctctccactccgggtttgccaggcggccgcgacggcgctgggtaaaatggcagtgctgagcctcgtgtcggagtgagggggactcggaggagagtggggcgctctagccgctcagtccggccgaccgcttgctcgcccgcccgctgccgcgcagcagcctcgacccaagccgcagctggcgaggggaggcagggcgccgggctcggcccgcgctctgactctggctcccggcgccccggctgctgccgcgcgccctccagcccgcccgtcccgggtccccctccccccgctccctccctccctccccgccccctccccctcgcctccctccctccctccctcctcctttctccggcagcagaaagcggagagtcacagcggggccaggccctggggagcggagcctccaccgcccccctcattcccaggcaagggcttggggggaatgagccgggagagccgggtcccgagcctacagagccgggagcagctgagccgccggcgcctcggccgccgccgccgcctcctcctcctccgccgccgccagcccggagcctgag

SEQ ID NO: 858 - DNA, 2300 bp, Homo sapien
caatgtaagaagtcatatggcagaatcttttttgaaaaacctgtgagtatcaggctgggcgcggtggctcacgcctgtaatcccagtacttggggagactgaggtgggcggatcatgaggtcaggagtttgagaccagccttatcaacatggtgaaaccccatctctactaaaaataacaaaaattagccaggagtggtggtgcatgcccgtaatcccagctactcaggaggctgaggcaggagaatcacttgaacccgggaggcagaggttgcagtgagccaagatcgcgccactgcactccaacctgggtaacagcgagattccgtctcaaaaaaaaaaaaaaaaagaaaaagaaaaaaacctgtgagtatctgccacatgctagttgcttacattaatgcaaaaacacttactgagcttctacagtgaatcagatagtatgttatgaacataggattcataattcctgcctccatggagtactttctagtggggaaaaatatgtaagcagataagcacaaataactgtagttacagttgtaataaatgcattggagaacaacacaactgtttttttaaatttttatttatgcttaccttgtctgatgggtggctttgtagtcttgagatcttaggatgggtgctggtcagttctgagtccctttccctctagggtcaagttttataggaagttatccattgaggcatgctgggctagagttcattgttcctcagcaaggctcttctgttttgtttttgtttttgttttacggggagatggagtcttactctgtcactcagggtgaggtgcagtggtctcagctcactgcagccactgcctcccaggttcaaaccattctcctgcctcagcctcccgagtagctgagattacaggcatgcaccaccacacccaactaatttttgtatttttagtagagacagggttttcccatgttggccaggctggtcttgaactcctgatctcaggtgatctgcctgcctcgccctcccaaagtgctgagattacagggtgagccaactgtgcctggccaggaaggctcttctttttgtggtgctatattgcaggacattggcatcttgctccccgggtaataaatgccagtagcactatagagttgctgtgacaaccaaaaaaggcgctttcatacatttatttccaaacacttctcagtggttggtattgccccggttgaatactactggctgtactgtcaggattcttggaaggagctttgaacaaaatcctctgggagaacagactgaaagtaggtggtgcttgagacttggactggccaacccttttggtgtctgacttgtgtgttcatgttttttaagtaggtattttgaaactgctctcaaccccattttgccatttctcctattgagggtgcagagagagaagtattgtgtgtgtgctttatgaactggcactgtaacaagcatttcacatacttaccatttgaactgttttgtatctttgttaaacagtttttaatccctgtttacagatggttctggtgctaagagataaagtgacttgctcaaagtggtgtgaaactatacttttttttctttctcaaaaagtacagcctaaatttatttgattgtcagttaacctctagttgatgactttggacttctggtcttaagtgtatgggacagacattaattgttctacaaatttccaagctctactgccagaaacttagcacttgtgtaggatgatgatagctgccattctggatgctagaggatacagcagtgaattaaacatacacaggacatatagattgaacaagataaataagtgaatcatatatatagtatgctagtgatacatgcttgggagaaaaagttaatcaggaaccaagtataggagtgtgcagggttaaaatcttagaggagttcaccagggaaggccacactgaagtgatatttgacatgaaagtgagctatactaatatctgggtgaagaaagtattccaggtagaaggatctatgaatacaaaggctctgaggctagaggatgcccagctgatttgaggaacagtttttttgtttgtttttgttgttatttatttttgttgttgttgtttctgagatgaagtttgctctgttgctcaggctggagtgcaaaggtgcaatcttggctcaacgcaacctccgcttcccaggttcaagcagttctcctgcctcagcctcctgagtagctgggattacaggcatgcaccaccacgcccagctaatttttgtatttttagtagagacgcggtttct

SEQ ID NO: 859 - DNA, 2300 bp, Homo sapien
cattctccctgatactcagatctcatagtcaagccttccctgtctatagggaaagggagcattgggttaggtttcgctcacttctgattgggtgggcttcagggttcactgaacctaggatgaggtacagagagaattctaatgcctgagcctgtcttccagattggaaaaggatgcaaacctttaaaatgccgtgattgtaactgaacttttataaaggcagtgataattcaggggcaaaagagtgctatttataagttagtttgtgaaggctccaagaaagcaaagctgaatcttgagcttatctaaaggattagtagggtttaggtggaagagtggccaatccagtagactggcctagatgccacggagatgggagagagtctagatatttcccaccaaggccatctccaaccatgaagacttagctcaggtgttacccactctaagaagtattcctagtcacctctgcccctctaggttgtccccctctgtgcctctttaaactcttctttctagtatcataggtatcatatcagcagacattacaacctattgaacttcctttgtgtatagggacttgaaaacccttgttcccaggccttgggggaacaggcttaccatatggtagatgaataagcataagaatacatgaagaaggagacctgtccagctagagcagaaagactaattgtagggagcatctggggaatgggcttggtcagtgtgccctgaagctgagggaaggaggcagaactgtaggttggctgctcgggaggtacaaaagtcataataaggccccgggccaggcgcagtggctcacacctgtaatcccagcactttgggaggccgagacgggcggatcatctgaggtcaggagtttgagaccagcctggccaacatggccaaaccttgtctctactaaaaatataaaaatcagtggggtgtggtgacaggcacctgtggtcccactacttgggaggctaaggcaggagaatcacttgaacacgggaggcggaggttgcagtgagccgaaatggcgtcactacactcgagcctgggtgacagagtgagactctgtctctaaataaataagaccctgaacacccggaccatcaggacagtgactggtaagggaaagggacctgtggttatttgtcaatgagatatgtaggggagcagtggcacaagaatgtcaaatttgcagggagccaccaccccaagaaaaaaatatgagtaaatcccaagtttgacaaagcaagtcaagcagggtggtcactgatattatcatgagtctccattttataaaatgttagtttttattagtgcatctaaaataggatttagggccaggcgcggtggctcacgcctgtaatcccaacactttgggaggctgaggcgggtagatgacttgacgccaggagtttgagaccagcctgatcaacatggtgaaaccccgtctctactaaaaatacaaaaattagccaggcgtggtggtgcacacctgtaatcccagctactcgggaggctgagataagagaatcgcttgagcccgggaggcagaggttacagcgagccaagatcacgccactgcactccagcctaggcgacagagcgagatttattttttctgtctcaaaaataaataaataaaataggatttagatatccagatgatttgtacaccactttttagcagcgtactaaaaaaccggactctgaattctgttccagtagtaatgtgaaatttgccctgttgtgaataagcacagtctgatagttgcagtggaacatcctgagggtaaaatgaagccagctgcagatttaacacttcttgtggactatccaccaagcaagattaactttttcaattacctaagaactgtggttctacaaagatgaataccttacagcctgatggggcttggggcttatgggcaggaaaaccaggcgggagatatacctcgactcctttggtttggttatacaggtcaacaagaacaaaaaatggcgggaacttgcaaccaacctcaatgtgggcacatcaagcagtgctgccagctccttgaaaaagcagtatatccagtgtctctatgcctttgaatgcaagattgaacggggagaagaccctcccccagacatctttgcagctgctgattccaagaagtcccagcccaagatccagcctccctctcctggtaaggatggggtcagcggccccaccaaggctgagagggcctgttgccctggcctcttattcaggatatgaataagaggcttatccaacaggatatgccaag

SEQ ID NO: 860 - DNA, 2300 bp, Homo sapien
agtaatgtgaaatttgccctgttgtgaataagcacagtctgatagttgcagtggaacatcctgagggtaaaatgaagccagctgcagatttaacacttcttgtggactatccaccaagcaagattaactttttcaattacctaagaactgtggttctacaaagatgaataccttacagcctgatggggcttggggcttatgggcaggaaaaccaggcgggagatatacctcgactcctttggtttggttatacaggtcaacaagaacaaaaaatggcgggaacttgcaaccaacctcaatgtgggcacatcaagcagtgctgccagctccttgaaaaagcagtatatccagtgtctctatgcctttgaatgcaagattgaacggggagaagaccctcccccagacatctttgcagctgctgattccaagaagtcccagcccaagatccagcctccctctcctggtaaggatggggtcagcggccccaccaaggctgagagggcctgttgccctggcctcttattcaggatatgaataagaggcttatccaacaggatatgccaaggatctgtgctctgccttgccctaccacagggcttaacaggttggctgactagagagtgggcagtggaaactcccttgggaggtactctacggcagctcttaagttttaatttttgttgtgcagctgacaacttgccaaatgtttgtaaactggtgaatgggaggggcacaagaggagtcggtggaacttataaatggcagcaaggcagggccatctgggagctttggcctattgatgtcagcaccttagaatgcagctcagactagagccctgaattccccagggagctgagatggtaatgaatgggaaggagggagtggggaagggttatgaatggaactccctgatgggagtggctctgctcaccctcctttctgagaggaggctgaggcctagggtgagcctagagagggaagaaggccagggtgcctggaaggtgggtgtaaacacatgtgccctggtgttgacctctgagggtgtaatgagtgcctgagatgactcatcagctggggaggcctcagcagtgggatatctactgctgggaatggtaactattggaaacattaattactagtagttttgtactcatcagcttagaagaacatttgaagttgaggagtgacaccatgctggatgctttagaacaggagctcctagactcctaaaatgcatcccagatttgggacccccttcccacccaggacttgggaggctctgactggagctcatgcaccagcattacagggtttagtaggttagacaaggtcctttggcggagtgaagagaaatagccagggaagctggcaatgactcagggaatcaccagcatggtgatgtcatggccacatcactcctcttttctacacgtaaaacaaaaacaaagagctacaaaaccctcagattcccgtctttatgacctggccttgtagatcctctgctaagaagggtgatcaggctttaaaggccttaggaagaactttcccaaagagattctgggtcgttcgtgtgtttgtgtgagagttaaacactgtcatgccaagcaaactactcaacttgtatctctgtccacagcgggatcaggatctatgcaggggccccagactccccagtcaaccagcagttccatggcagaaggaggagacttaaagccaccaactccagcatccacaccacacagtcagatccccccattgccaggcatgaggtaaggccaagagcaggggcagatggttgggaggatggctgaagataagtgcatgggaactccttgcagcccaaggtggtccttgcctctgccttcccagccagtgactcctgcgtgtcctttgttatattggaggaattggtttatttgtggtttacttggttttcctcactctggagcaggagcaattcagttgggatccaggatgcctttaatgatggaagtgactccacattccagaagcggaattccatgactccaaaccctgggtatcagcccagtatgaatacctctgacatgatggggcgcatgtcctatgagccaaataaggatccttatggcagcatgaggaaaggtgactgatctgattgctatttgaacttgtgctcgtaaagacagggccagtgaaatggggggaaatcttgagaatggctcagggttcttgtggagccatcctctgagataatgcatttcctgccctaactacccctcttcatccttacctcctttcttgtcttctccttggcttca

SEQ ID NO: 861 - DNA, 2300 bp, Homo sapien
ttgcagcccaaggtggtccttgcctctgccttcccagccagtgactcctgcgtgtcctttgttatattggaggaattggtttatttgtggtttacttggttttcctcactctggagcaggagcaattcagttgggatccaggatgcctttaatgatggaagtgactccacattccagaagcggaattccatgactccaaaccctgggtatcagcccagtatgaatacctctgacatgatggggcgcatgtcctatgagccaaataaggatccttatggcagcatgaggaaaggtgactgatctgattgctatttgaacttgtgctcgtaaagacagggccagtgaaatggggggaaatcttgagaatggctcagggttcttgtggagccatcctctgagataatgcatttcctgccctaactacccctcttcatccttacctcctttcttgtcttctccttggcttcaccttgtcatcccttaataagtacatgcttttcgctggttggggcctctttagatctctgttttgaacttgtctggaaaacaatgagatcaaacctgaactctgaagagggcctgggtcaaagggtagattaccaggcttgtcaacttaccagtttgttcaccgcttgcctttctacgctcagctccagggagtgatcccttcatgtcctcagggcagggccccaacggcgggatgggtgacccctacagtcgtgctgccggccctgggctaggaaatgtggcgatgggaccacgacagcactatccctatggaggtccttatgacagagtgaggtaagcatgaccccagctcctgtccactcccccagcaccctgaagctatagtgggctcaatctgcctctccaattttgtttaggacggagcctggaatagggcctgagggaaacatgagcactggggccccacagccgaatctcatgccttccaacccagactcggggatgtattctcctagccgctaccccccgcagcagcagcagcagcagcagcaacggtgagtaaagcctggtctcggtgctgctatggatcaggcttcgccactgcccaccctaatcctgtgtttctttgcctcctatagacatgattcctatggcaatcagttctccacccaaggcaccccttctggcagccccttccccagccagcagactacaatgtatcaacagcaacagcaggtgaggagggtagctgggaatggactggcatgcaggttcgccttgaaaactagttagtaaactaatctaacgtgttgaagtctaagaagctcactttagatattttggcattcttctctcacctgactggccagtcctgcctgaagagccacgtcctcaatctcttctctatttggagttggaaggggctagaaatagaccttattttgatttttaggttttgtatatttttctacttaagcaagggaagggaagaaagagtggtggttgcttttggaaacaacttcaaaagacaatttgttaaggtgattcccatgttttcttggagtctgtgtccaccaagcatctggttgtagccatcttggcatctgtgggctttatgtccctgagtgcagagtattaacttcccctctgcttgtctctgccttagaattacaagcggccaatggatggcacatatggccctcctgccaagcggcacgaaggggagatgtacagcgtgccatacagcactgggcaggggcagcctcagcagcagcagttgcccccagcccagccccagcctgccagccagcaacaagctgcccagccttcccctcagcaagatgtatacaaccagtatggcaatgcctatcctgccactgccacagctgctactgagcgccgaccagcaggcggcccccagaaccaatttccattccagtttggccgagaccgtgtctctgcaccccctggcaccaatgcccagcaaaacatgccaccacaaatgatgggcggccccatacaggcatcagctgaggttgctcagcaaggcaccatgtggcaggggcgtaatgacatgacctataattatgccaacaggcagagcacgggctctgccccccagggccccgcctatcatggcgtgaaccgaacagatgaaatgctgcacacagatcagagggccaaccacgaaggctcgtggccttcccatggcacacgccagcccccatatggtccctctgcccctgtgccccccatgacaaggccccctccatctaactaccagcccccaccaagcatgcagaatcacattcctcaggtatccagccctgctc

SEQ ID NO: 862 - DNA, 2300 bp, Homo sapien
gggtggtctggaagtagagtgcttcaagcagggaaaatagcaagagcagagccaggcaagttcaaagaacagaaatgatgtaaccctcttaaatcctaagcttctagaatagtaatgcattgcttgcattgttctggttagggatttgtatgtgatattgtttcttggtgatgtgggatatgtgcttcttaatggaaatggctgggaagtgtggagtctttctggagcctgggatatggctctttctcacttgctttccacagttctggtagctcagctggctccctgggtagatgcaggctccatcttagctgcagactctacaagaacactgagaggctgcctccgtcactactcaaagccttggagtcccagaatcccctcctatcccacctagccttcttccaatctgaaaccagggagtcagggctttgagagcacaagattcagcttccttgttttcctgtcagagcagaagtcagaaaatgaaacaggaaacagagcggaagaggagggggttgggtagcagagaaggaaaagagaaattgcaggaaagtacagctgaaaatctggataaagttctacctctacagggtgacagctgagcttttaaaaaacattctgacttgtcttgagagacccctggcctttttacaaatagatttttgagagaatttgatgtggacagagggaaccctgagaatgcatgtcttttttccccttgtgaatttacagagcaaggacagttcatttctcagttttgtctttgcagagagagtgctgcttggagcctcatggtggacttctagagattcaagtcacagccttaggccccagtcacaagtgtgtccccaggctttgccacgttactcacaggcctctggagctgagaacaagtgcgtggcactgaaaaacctgggggaagggccatgaaactccattttttcccccttctccaacacacaacgactaaatatgatttgccttttctccaccttgcacacaacagatatctgaaggcaatttaggtctcagggcctgaaatgagttacagagtcaagagatacagtcccaggcccccacagactgatgtgggctggtcttcgcctggagaggtagcaaccatctctttgttcccacccacatgagtagccgttgcagaagataaacccctccctgagccaggctgtggccagaggctaacccggcccctggcttcgtttggagggcagataactgaaaccacataaggctttggaatcctgagaaacaagaaatccaccaacggagaaggatttatcatctgtttcctttaaggagggtgcaaagttgttctaacagtttccgttacaagggtacaaactggccgctccccccaatagacggttttgttgagttcgcctctttttttttcttctttttttggccccacttcctatgagagaaactgcttgggtgagggaggtgaaaggagccctggagggtgttctctgaggttttcttcaccatcctcattagccacctgaggtggggctgaggactaaagtaggacagaaggtctctggtagatagaggaggggaaaatcagggggatcccccactttcttcacacccaggacgcagggtgccgctgccggccacagaaaccccaagaatgtttttctttggctattcagaggacatctattgtgtgtcaggccctgtgctgagctgttgttgcctgacagcaggaagagcgcggctctggtttctgtgaagaggctgcgggtcagcctccgactacaagagcctcggcccacaccgggaactcagtgaacgtcagcgggagctggggcaagagcactgactctgagacagcagcctccgctcactatttgaaggcggggtggcggggggccttgaaggagagcgaagtgcgagagaactcttcaggtgtcaccaaggtgggaaggtgctacgaggcgaggcgccgagcggcgacccccatcccgctcgcccggagtcaacatggccgccgcgcagggaggcggggctgctccaagtccgggcaggagcggggcggggacgccgtcggcggagccagcgcgcaggcgcgggccgcgtgggccccggatggaggagctgaggttcggtccccgccggggaggtcgggacgggcaggggctgaggaccccgcgccagcttgggagccctggagttctggcgggagggaagctgtcaaatggaagccggtagaaatgagacagacgcccggagaagcggggagccccgcccctccgccatagcagcctcgggcgccg

SEQ ID NO: 863 - DNA, 2300 bp, Homo sapien
tccagcctgggtgacaagagcgaaactccatctcaaaaaaataaaaaataaaataaaataaggatatgagtggagggttggccatggacagaaggaggcccacatcttctaaaaaagaagaaaggacagatgcaaataaagagaaattatgagatagagaggaggtaaactgaaaatccagtaggattgctttggtttctgtaaagtgacgagaaaaaagaaaaggtttcaggttgcaagaggacccagttaaggtgggacaacaggaatctgtactggaaccagtatgtctagttttgtgactttgttccacagccaaggagcaaaaagggaggaagctcaccatgtggtttgctcaagatggggctcatcatattgagagcctttggcaccaaaggcacggctgagcagcctttggcatatatatcaattattgatccttaaggtcactgttgtcggcttcctactcctccccattgtatatttttacttccttttttactttctcctagtctccagttctttttttccttgcacttttccttaggttttacagtaaccacagtgtgacagacataccctaagctgacccccaatgattcctgcctcctggtatttacgccttgtgtgattcccttttcttgagtgcagatggctcctgtgctttgcttttaaccataggagatggcaatgatgatgggatgccactctgtcacatatatagtaagttatataaaactctatcatcatagtctggagctagagaccctcattgtcagtttcaagaaactaagtggctatgtaggagaaacctgcatggcaaggaaatgtgataatctctaggaactgcaggtggcttttggatcctgagagaggcctccagcagacacccagcaaaaatcccaggccctcctcagttatacagtcacccagcaaaaatcccaggccctcttcagttaaacagtcgcaaggaagttaattctgccaataacccaaatgggcttgcaagtggattcttccctggctgagtctccagatgagaatgcagcctgattgcagccttgtgagactaagcagaggacccagctaagctgttctctggctcctgacctggaacctgttagataacgtttgttttttgttttttttgagacggagtcttgctctgtcaccaggccgggtgcaatggcacaatctcggctcactgcaacctccacctcctgggttcaagcaattctcctgcctcagcctcccgagtagctgggactatagatgccgtgccaccatgcccagctaattttttatttttagtagagacggggtttcaccatattggccaggatggtctctctcgaccttgtgatccacccacctcggcctcccaaagtgctgggattacaggcgtgagacaccgcgcccggccgataatgtttgttttaagccttaaatttgtggtaacttgttacacagcagtagaaaatgaatactcccagaattcctgaaaaaacactggggccctcaggcatgacccctctacattatgtgctacctaggaaaatctgggcctgggcccaggacacagaacttggtgaacgaggccagagggtgtgccacacacctccagtgggcactctggacttcaaggtagaagaggtcctggctttcaaagcaaatcgtgtgccccacctccccgcgcctgcctgcctctgcaaatgcctgtcagttcgaccctcagagatgggcgaagcctggggaattacagactgccagaagtagatcacgaagtccaccacctgaatctcggcgtttggcaccgtgcctggtacacagtggacgcccaacaaacggcttgcttgcagaacagaaagagccctcgagtgcgcgtctgctggccccctctttgtgcagaagggaaaagggagactgggagggccggggacctgcggggccccgccgcgggtcagagctgggcctccggccaagcgccatcccgggcccaggcggagggggcgctgcggcgggaggccgcggcgggcggtggcggcgggccgggggcggagcgatggcggggccgccccagtgagtgagcgagcgagcgccgcgcgcgccgccgctgccacctccgctgctcggcccggtcccggagtggcccggccggcccgcggggcgcggagccgaggcccgcggctggctgcatgaaggactgcgagtaccagcagatcagccccggggccgccccgctgcccgcctccccgggggcgcgccgtcccggccccgccgcgtccccgactccgggcccc

SEQ ID NO: 864 - DNA, 2300 bp, Homo sapien
gctgaggcaggaggatcacctgaggccaaggaggttgagactgcagtgagctgtgatcataccactgtacttcagcctggacatcagagtaagaccctatctctaaaaaggaaattgagaagaaagaaaatcaaagggaagcaaaatcactcactctcactacctcaagataccctctagaagttggtattttagtgtggttcctattgttttctgtgtcagttctctgatttgagcaaaatctttgggacgtcaaacttaaaatcccctttacttccttggaaaccctgtagcattagcccagacatgtccctactcctccttgtggcaaagagaaggatctcgtctttggtccccagagttctggcctaagcctccctccaggagggaagatgagtgttcagacactcagagtagctgggggagacacaggcctgtgaaattatcctggctcaactattaggtcggcagaatcccagtgaagggagccctacctctgagccccatctaagctttggctatgggtggggcagataagcaggaatccatccctataggctcaatgccaacacccttaggtgaaactcttgatgaaacttgaggccagggctccggcaagcagggaaagaacgttggcaacagaggtctccatctctgaggactctgccaggggtcagagatggggcaatggtcaaaaggaaggaacaggccaggcacagtggctcatgcccataatcccagcactttgggaggctgaggcaggaggatcgcttgagcccaggagtttgagacctgcctgggcaatgtagtgagatctgctctctatttaaaaaaaaaaaaaaggaaagaacaagtaaacttctgagaaacaggctgggggaggcatcacgtagctggaattgctgccccataaaacagaatggtatgtgtcactgccacctccctttctcagtcctctctctccccaggttgctagcgtcccccctgggggatcaaactggactgcttcccagcctcagacagagagcagtctgagtcaggcaggaaagtgggacagccggggagctggaccccaccctctgtgagccccgctggtacctgatggcatgtggcttggagagggcaggtgacctggcgtggagggccagagggtaaatcctcaaacaagtggcaacaggccaccaacttgaaagggaaaattgtgtagtgatgggaaatgtgtccaacaaacctactgggtgactaattacaaaggctgggctggagcttcagaggctgcttgttaaacacttcattaagcggcactctgaaagctgccacctgcgcattctgggagctcagaggggaccctgagggggaatgaggcctggaggatggaaccatcttcaggtagactgagaaggagcctggatctcacttccaaacacagtctggagctcataggtcagaggcctcaatgggagaaaagctaaaggaagagggtgcagaaaggagtttcagggaattggtggctatgtgactttgagcaaatctcacccctctctgagacttagtgttcccatctctatggtcctgtgtgtgtcacagagacatggtggggattaaattcgatcgtgaatatgaaagtgcttgggaaactccatggccctacctaaacatgagttatcctcacctgaaccaaggggggaagttacctggcaggattaggaaccccatcctcctgaacctttatgggctctgtcgaggctgaagcagccaggggctaaagccgtccttagcccctggaagggcactgtgaaagtggatctgatttgagaagccgtttcctgatgtgggcagccatgtgatgccagccccgaacaagagggggcagcctggagcctggaaaggtgccagtgcaggtggggcccacgcccagatttctcctgctgactgttctgatgattcacccccacatcccagcctttttacctttactgcagagccggaaagggtgtggggaagagaggagagggaggcaggtcttgggccctggtcccgccccctgctcctccccacccttctctgggcctggccacccagccaaaaggcaggccaagagcaggagagacacagagtccggcattggtcccaggcagcagttagcccgccgcccgcctgtgtgtccccagagccatggagagagccagtctgatccagaaggccaagctggcagagcaggccgaacgctatgaggacatggcagccttcatgaaaggcgccgtggagaagggcgaggagctctcctgcgaagagcgaaa

SEQ ID NO: 865 - DNA, 2300 bp, Homo sapien
agggacttccctgggggcccaagcctttcagctatgccctggtttccctcttcccactggttttggcatggctgctgggtactcgtgcgggatgaaattcaaaacagttaagaggaaaaagtggatctgggccaggcacggtggctcaagcctgtaatcctagcgctttgggaggctgaagtggtaggattccttgagcccagtttgaaaccagccgggcaacatatgagactgtctctgttagaaaaataaaaagtccgggcgtggtagctcacgcctgtaatcccaacactttgggaggcccaggtgggcagatcatttgaggtcaggagttagagaccagcctggccaacatggtgaaatccccgtctctactaaaaatacaaaaattagccgggcgcagtggctcatgcctgtaatcctagcactttgggaggctgaggcgggtggatcacgaggtcaggagtttcagaccagcctgatcaagatggtgaaaccctgtgtctactaaaaatacaaaaaattagctgggcacggtagtgggtgcctgtaatcccagctactcaggaggctgaggcaggaaaatcgcttgaacccaggaggcagaggttgcagtgagccaagatggcgccactgcactctagcctgggtgacagagcaagactctgtcacaaaaaaaaaaaattagctgggcatggtggcatgcgcctgtagtcccagctactctggaggctgaggcaggagaatcgcttgaacccaggaggtggaggttgcagtgagccgagatcacgccattacaatccagcctgggtgacatagtgagaccccatctcagaaataaataaataaataaagtaaatctgactttttttttttttttaaagagtaagccctaaggcttaacaagatcattcataccctttgttggaggagtttggacttgatggttactattaggaagtctgtagtgacagaatgaaaattttatatgaggccccttcttgctggcactgtcaatggatagataagagggctggagaacaaagacccagatttaaagcctctgtctttggacaaaccagatatgtagtaactacttccccgtcctctcccaacccctttaactggagtttgagagcagccttctcactgagagcccgtttttatccaggtaccatggagagaagctacagccatttgggcaactgaagaggccccgtagaaatggcttggggctcatctccaccatctatgatgagcctctaccccaagaccagacggagtcactgctccgccgccagccacccaccagcatgaagtttcggacagacatggcctttgtgaggggttccagttgtgcttcagacagcccctcattgcctgactgaccgggttgggggcttcctttcatagctacatgatgaaaaccctctgccctggcctcatctaccactgaagcagaaaggagtctgggagcagcagtcttcgtggctggttcagggtgttttgttccgagcctgcctgcctgccggttctatacctcaggggcatttttacaaaaagccccctcccgtcccctccccttggatattaggggtaacgaccgcttgtctttggtctctaaccctaatctctgggcttgccctttgcctcctgcagaactttgaaaagctgggttgagtgaggctatcagcacagccttccttggggactctgaaggtgtccccacgaaggccagaaagggggaaagggacctgggcgaggagaggatttgtggtgcttggaagagccggccttgggtgggccctccaccgcctctaccctcactgggtgggactgccagcggagagtccgcgggaggtggcttgggtgtgcgacgtcacggaagaataaagacgtttactactggagctcccttacttttctaattcgagtctgaaggttagagaaattccgagagcgattttcccgcaaagaccccacattcgacccactacccgcgagagaaatgcggctgcgccgcccgcccctcggcgtctagcttcgtccccgccgtgagggcgggacttcctctcgttggctcgccgtttccgacgctgtccggaagtcgagttagtctagttagtatcggcctgttatctccttttgcgcgacacggtctcagctgttccgcctgaggcgagtgacgctggccgccaacgaggtatacgtactgggaccctcgccctcagtctcgtctccggcgcggctacctgccccgttttccctgtgagttgacctgctccgggccgcgggccgcc

SEQ ID NO: 866 - DNA, 2300 bp, Homo sapien
agggaagaaaggaactattgcaatagaaggaggaagaatattgcagcagggaggaccctctgaccataatatctgcaagtgactcaagggttaggcaaaaagggttcttctctcatacagaggagtaaacagggcagaactgggtgggaggaagtgggatgatcaggagtggcatgatgggacagtagatcagataatgctttaccttgaagccagcctattctcaggagaggctgttaaggaggagatgtgcgctggctcaagctgagggtaagccaaagttcgggaagctgggggaaggagagaagttttaaccaaagtttgttccaactgatcagtggggacaagaagttcctcaaagctttcatgaggagatttggaatatggagtctgtgtctggctttgtcattggtgaaccagaggggcatacaccagtcttacctaactcacttggggaaggatgtttttttgcaatatgctgtgttccagaacacaaaacagtgggaaggcatttcttaagccttagttttccaggatcacagggcttgggtaaaagtcaacattatcaataagtcttctgataaacatgtgcagtcattttttttattgtttagacaagggtcttgccaacttggccaggctggtctcaaacttctaagctcaagggatcctcctacaccagcttgccaaagtgctgggattacaggcgtgaaccactgagcttggccctttattttttgcttttgtttgaggtctctcaatctacaggttcctcctatcacccagtataatgtgtagactttgtctgaattatgaatcaatgaatcaatagtaatcaaataacccaattaaaaaacgtacaaagagggccgggtgcggtggcttacatctgtaatctcagcactttgggaggccaaggcgggtggatcacctgaggtcaggagttcgagaccagcctgaccaatatggtgaaaccccgtctctactaaaaatacaaaaattagccgggcgtggtggcacgcacctgtagtcccagctactcgggaggctgagacaggagaattgcttgaacccgggaggcggaggttgcagtgagccgagatcgcaccattgcactccagcctggatgacagagcgaggctccatctcaaaaaaaaaaaaaaaaaaaaaaaaagacaaaaaggcggggaccgtggctcacacctgtaatcctaacactttgggaggctgaggccagtggatcacttgagccctggagttcaataccagcctgggcaatgcagtgagaccccatctctacaaatagtttaaaaaattagccaggcatagtgggttgcatctgtggtcccagcactccagcctgggcgacagagcgagaccccaactcaaaaataaataaaatattacctacaagtgctgagtcaaatgatgtgtagctttgcttttactagataacgccaattgtttcccaaagtggttgtatcaacttacatttccaccaacagtgtatgagagcttcagttccaccatgttgtcatcgactctaaggttttaaagtttgccaacatagtggatgcaaagtgggtctcgctgcatttcttttattattgagttgtgcatcttttctttaacgtaagcctctagtaactcatagcactttcattgtaaattggacctgcgtgtttcctcttttgcgaagtatcttcggcccatttttctaccgggttatctttttcttaccgatttgtgggagttcatcaacacattttggaaaaataaatggaagaacgactaaaggttcagaactgaggaaggttgagattaggtgtgcaatatccacaactaaatacctcaaaaatgacccctcccgcaggcttcttatttggtcctcatgagagctttatgaaagaactctatgaccccattttccaggtgagtttttccatcatcgccggcttccctctgtgggaaaggaacacagaagacttcggatcttccagctccaggttccacaaccccaatcccaaaggactagttagaattttcacaatctcgcaacgcaggggctggaacgttgctcgcggtgttctcgcgagacttggttctagctgatcatgtgacaatccaagatggcggtgcccggcgaggcggaggaggaggcgacagtttacctggtagtgagcggtatcccctccgtgttgcgctcggcccatttacggagctattttagccagttccgagaagagcgcggcggtggcttcctctgtttccactaccggcatcggcctgagcgggcccct

SEQ ID NO: 867 - DNA, 2300 bp, Homo sapien
taaccttcaggccccataaaaccaatatccacctccagaaattcttgtcactgttttaaaaatgaggaaactgaggcacagaaagagaaagtgatttgcccaaggtcactcagctaagtgaagcaggatttgaacccagccagtctgactccagagtctgcttcaaggggacactgtgagaattcagtgagatttaaaaacatgaaaggaactttataaatttaaggattaagactaataatcaaatgaaagaggtgtgcctgtttgtccactggtgctcagctccacagaggaaaggggcagaaaaatcctcctaccgtatgccagaaaccacttggaatttaacaaccaggacctcattttgtccccatggcagccctacagccaggcattattgtcccagggaggcttatcgaggttcaaggatcaacccaagtcacataaccaaaaagtgatggattctggagcagatgccagggctagtgatgccagagcctctctctccccatccagggcaccaggctgcccaacagcatgcagcagaaggcttgccacactggactggccaaggtccaggaacatgacacaaccaagggcctctccaccttctctcatcccctgtgctccaccatctgagaaagatgcccgggacagaggagccacgtggcagcagagcaacacttctgcccagatcacaagtgggcaacgtctgcaaagcaggcagcagcaaggtgggggcagctagccacaagctctgagaatctcaggctctggctgtgcaattgggccagtgggtccagggaaacaaacaaggactttggagtcaggcaagatctgggctttgtcttcctggtgggatgaccttgggcaagtcactttagcttttttagtctcataaagtaagaatctagccttaggaagaggctgccaatattagagtgggaagtgcctgacacataataagtgcttagagaatggcaaccatatatatacatatatatatatatatatgtatgtatgtatgtgtatatatatatacacatatacatataaatatacatatacatatacatatacatatacatatacatatatatttttttgagacaggatcttgctctgttgcccaggctggagagcagtggcatgatctcagctcactgtaacctctgcctcccagtttcgagtgattcttttgccttagcctctagagtagctgggactacaggcacatgccaccatgcccggctaatttttgtatttttagtagagacgggattttgccatgttggccaggctggtcttgaactcctgacctcaaatgatcccccttcctcagcctcccaaagtgctgggattacaggcatgagccaccgtgcccggctggcaactatcttttattataattctgtgagttcttctcagcagacctggcctttcaggagtggtaggaatcaggctggggataaggattctgaaggaccttattcctgcagggggcccagaactggaatcagaggaggaggcctcctagattggacagtgggcaaagtcctcccagcccccagggtcctggctcccttccctgtagcctgcttctggctgacaacagaagcagggccccaaggttaggcaaacaagctagtgataaggcacttccaggttgggccttgcattcaaggcccacccagctctggggctggcttcctggcttagcaaaagccctagtcttttgtgcacacaagagcgggcaccaatggggacacctgctgattgtgcacctggggccttggtgccctggtacagcctgagttaatgaccttgtttatccacttgagtcatctgataaggggcagctgagtgagcggcaggtggccctgtgccctgcaccggccacttcattgactgaggtgatatcagtgccacgtggggttcccaatgccccctcccccaccacttccccaccattcctgccaggggcaatgtctgtgtgtttttttcaatgaacatgacttctggagtcaaggttgttgggccattccccccgttccactcactgggaatataaatagcacccacagcgcagaacacagagccagagagctggaagtgagagcagatccctaaccatgagcaccagccaaccaggggcctgcccatgccagggagctgcaagccgccccgccattctctacgcacttctgagctccagcctcaaggctgtcccccgaccccgtagccgctgcctatgtaggcagcaccggcccgtccagctatgtgcacctcatcgcacctgccgg

SEQ ID NO: 868 - DNA, 2300 bp, Homo sapien
agctcacaatgacttaactatacacaaaagtgactgccagccacccagctatatcccaccaaatcaatccaaactgagtgtatttccaactcaacttcaccttagctggatcaccaaatcctcatggcatctctgatatcacctgattcaagggaaagtgagatagagtgggaagaaatagtagtcttaaccaattgcaattttagaattttgcttttgcatgttaaaagaaaaaaaaatatgtatttgacgctatgaagacattgctggggttgctcccagtgcctaggatgggcccgtgcaagtgcaaggccctgccctcaagagccctcagtctgagggagaagacacagatcaactccaggaatctctaatctaaagggagaagtctctagtctgaagtggggaacacgcaattccaaccaaaagagaaacctaaaggaaaaaaggaaagaagaaggcgtcaactgtgtcaaatgcacctgagaagttgagtaagataatagtggttcattggctttggcaatatgtagcactgtaaccatatcagagcctttaaaaaatagactagaacaggccgggcgcagtggctcatgcctgtaatcctagcgcgttgcgaggccgaggcaggtggatcacttgaggtcaggagtttgaaacgagcctggccaacatggtgaaaacccctctactaaaaatacaaaaaaaaattagttaggcgtagtggtgcctgtaatcccagctacttgggaggctgagaatcacttaaacctgggaggcagaggttgcagtgagctgagatcgtgtcactgcactccagcctgggcaacagagtgagacttggtctaaaaaaaaaaagaagaatagatagactagaatatactgtagagagatgggaggtgagggagtagaaaaacaagcaaacaagtttgctgcaaatgagagctgaaaattggagaggtagcagcagaagaaagtggggccatggaataataatataaaaacagggctgggcatggtggctcacacctgtaatcccagcactttgagaggctgaggcaggaggagtgcttgagaccagggtttgagacttagcctgggcaacacagactccatctctaccaaaaaacaaaaaacaaaaaacaaaaaaaaaaaaacagcagggcgtggtgatgtgagcctgtagtcccagctactctggaggctgaagtggggaagatggcttgagtccaggagttcaaggctgccgtaagccaagatggtgccactgcactccagcttgggtgacaatgcaagaaccccatctctaaaaacaaacaaaaagatattaaagcgtgtttgtaaattgaagggaagaagaaagatatttgtgatgcataagctaaaaaaagggataattaacagggatagagttcctgaaaagactaagatgatgagattcattgcacaagtggagggattagcttggatggctgggtcctgtccccgcattaacagaagtgaaggtcaatttcagcacctgtcataatttcctgggcccagtgcaaaatgaaaatgtgggtctccttattccaaaattattaagaatttcaagactataacagaaggccatgaaatcaagcgtggagcctttctaagcctgggtgctgtgcgactgcaatttgtactcccatgaagctggccctagtcaagtacgcagtgaggtcgatgaggaggaggctgtcctgtggtaagtcccttctaggattggaagagatgagtaaggctactttcagcttcactgctctacaagctgggggggtcgctagcaagggagaggggcaaaacttgtccctttttaacttccaaccctgccagatttgagtccagggctttctagaagtctccacggcatcgggtgaccatagcaactcatgccaaactctcgggcccacggctccgcctaccgcttcgtggacgcgcttgttgattggctccgaatgtcgaccaatggtcggcgaagcgggttgcttgccgcacggtcaatggccgcaaaccgggaggaaggcgggaagagaggaggtggaggcgggcctgggcagccgcgcgcgtgcgtgtttccggctccgctgcggaaggcggacgactagagtcgttgggcccggcgcgacccgcaggagcgtagagagcgcgggactagagtgcagagctccgggacgtggatcggagccggcgcgatgggcggagagcaggaggaggagcggttcgacggcatgttgctggccatggctcagcagcacgagggcggcgtgcaggaggta

SEQ ID NO: 869 - DNA, 2300 bp, Homo sapien
taaaaatacaaaacttagctgggcgtggtggcacgtgcctgtaatcccagctacttgggaggctgaggcaagagaatcacttgaacccaggaggcagaggttgtagtgagccgagatggtaccactgtactccagcctcagtaacggagtgagactccgtttcaaaaaaaaaaaaaaaaacatatttaagcatcattcccatatttaagcatcattcctgtggcattaaatacattcacattgttgtacaactattgccaccatccatctccagacctttttcatctaccccagctgaaactccctacccattcaacactaactccccagtcccctctgcccccagcaccaggcaactaccattctactttgtgtctctatgaatttgactattctagagatgtcatataagtggaatcttacaatatttgtctttttttttttttttttgagacagggtctggctttgttgcccaggctggagtgcaatggcacgatctcagctcactgcaacctccacctccaaggctcaagtggtcctcccacctcagtcccccaggtaactaggactacaggtgtgcaccaccacgcccagctaatttttgtattttcagtagggatgggctttcaccatgttggccaggctggtcttgaactcctgcgctcaagtgatccacccatcccagcctcccaaattgctgggatcacaggcatgagccaccgcacccgggctatttgtccttttgtgtctggcttatttcacttagcataagttcttcaaggttcatccatgttgcagcatgtataagaatttcctttcctttttaaggctgagtaatattccattgtatgtatataccacattttgtttagtcattcatccattggtagacactgggattgtttccaccttttggctattgtgaataatgctgctgtgaacattgtctaaacatctgagtccctgctctcaattagattgggtatgtacccagaagtggaattgctgggtcgtgtggtaattcgatgtttaatttttggaggaaccaccgtactgttttccatagcagctgcaccattttacattcccaccagaaatgcacaagggttccagtttttccacattattgccaacactcattattttctgggagaagggagattatttttaaatacagattgagagattgagtatccctaatccaaaaatccaaaacactccaaaatctgaaagttgagcaccagcatgatacttaaaggaatgctcattggagcatttcagatttttggatgaggaatgcttaacaggtaagtataatgtatacaatccacaattcagaatccaaaacatttctggacccaagcatttcagataagatgttcaacctttctttttttctttttctttcttttttttttttgagacacagtctcgccctgttgcccaggctggagtgcaatggcgtgatcttggctcactgcaacctctgccacccgggttcaagcgattctcctgcctcagcctcccaagtagctgggattacaggcacccaccactatacctggctaattttttttgtatttttagtagagacggagtttcaccatgttagtcaggttggtctcgaactcctgacctcaggtgatctgcctgcctcggcctcccaaagtgctgggattacaggcgtgagccaccacgcccggccaatgttcaacctttcatagccatcccaataggtctaagtcacagggaattttgaaatctgggttagaccacagagactttctctttgtggagggagggccacaagagataagggtttttgggcatacttgggtccatccacatcccaggcaagggtttttgggcatacttgggtccatccacatcccaggcctctcagaaactagaaatgtgaagctgctcaagtcagcccaggagtttgtccctcacctctgatcctgactccttcctggcctctccccacgcaggtgcctggctgctacaaaccatgcaatgagccatgccccgccctggacacccccgcccagcatctgggcctccacgcttgggaccgtgggagcggccaacagagctatgtctggagacatatgataaaccacctcagcccccaccaagccgccgcacccgtagaccagaccccaaggaccctggccaccatgggccagagagcattaccttcatctctggctctgctgagccggcccttgagtcccccacctgctgcctgctctggcgaccctgggtgtgggagtggtgccgggctgccttctgcttc

SEQ ID NO: 870 - DNA, 2300 bp, Homo sapien
aggcccaggctattgcacccaacgccttgctcttttcttagttttttttcacgtaaaaattaggctgaagcacatgaatctgccattacttttagatcaaaacaggtcaaataacagcaaattcatatggttcaaccaaatattatgcttagatgcagtagttctagttatttttgaatcatatataaaggatgtcattccatatgtagtcttctgagatttgccttttttcaatccaatattatattaccatgatccaaccatgttgctatttttcattcattttctactgctctataattaattcctttgcatgaatatcccacatttctctatctcctgtcagtagcatttccgtgttttcggtttggggctaccacaaacaatgtttctagtaacattcttgtatacattctctcctggtgcattgcacaagagcttactgtggctgtaccataggaatggacttgctaggttttagagtacacagatgttcaactgcacaagatgtgactgtgaagtgaggatgtgactcattctctgagctccaaataagaatacaatgtgcactttcctcaggagggaatgtggacaagatgtggtgggaggcgctgggatggagggtctctggtggaaattgaacacctatgcctaatgcatcccagtgatatcttcctgttgcatccatgatctcttttaatcctcccagttaaagagaggtactactatctccagagattaggtttagagaaggaaagtgccttgccaaaagtcagtttgtgccaactgcctgagcaaacaatgtcccctctctaagcttcagtttcctcttactgtaaaatggatatgataatacctgacccacttcacagattaacggcttcggcatgcatggctcctggagatgctccctaaaagtcacttgtttgtttgtttgttttgtttatttgagacagagtctcgctctgtcgcccaggctggagtgcaatggcgcgatctcggctcactgcaacctctgcctgctgggttcaagccattctcctgcctcagcctcccgagtagctgggattacaggcacttgctaccatgctaggctaattttttgtatttttagtagagactgggtttcactatgttggccaggctggtctcaaactcccacctcgcgatcctcccgcctcggcctcccaaagtgctgggattacaggcatgagccactgcgcccggccaagtcacttgtttattaatgctattgttaagttattgagttgttattaatattaaggggaacagtaacccagaatagtctgagccttgccttattgacattcaatggtgttgcctcttgcagagaccttttttggatgtagtgaccatggcccattttggccaccacttctgatcctggatgtatctttcagagctgcatatccggtccccctcctctaccctactcggggcctcagagctgaggttcctgtctttacctgcagatttctctgaacaaaagaaaaggtaaactgatcagcggcccaggctcccagttctgcctcagggcaaagggagaaattggggcccagggcctcattcagtggaaaatatttgttgaacacctagtatgtgccaggacctgtgctgagcaccaggaacacaggggaacaagaccaaaccctgcaaggtaggaggctaaaggaggagacagaagacaacaaaacgacagtgtgctgagtacagggactgttctaaccaacagaaaaacagacaggatcagggaaagcttcccagaagagagcttccctttgagttggagctttacggccgggcagaagttccacaggtgctcagagactgacaggaccaccagcctgttgaacagaagaggagactgagccccagcgcctctcgacccctccccgccacacctcacctacccggactaggctgaacgggccgagcactcgagcggggacgcgcagctctgcagagccccggggcggggcctcggtccaggtgcgcggtagcgcttcgcggaggcaggaagtgtgtccctagcggcggcccgtgcagcgctcccgcgagacgctcacctgcgccccaggtgagcggcgagggggcgggggaggggctgagccggaggcggctcacctggcgggacaggtaagcccggcgcgggcccaggggggcgcaagccagggcggcgccggtgtcgggagccccccgaagctgagcccggacaggagagggtcccgggcccggttcctcgggggccaccctcctacttccggggtgcgcgggccggg

SEQ ID NO: 871 - DNA, 2300 bp, Homo sapien
ctgagcctggcgcctctcacccacccgccttcctctcccagccgcttctgagctgcctctttggagcccaactgtctcgcccacgagtccccatcactcagtctcactcactctaagacacctgaaagcagttagagaacatgtgttcatggggggaggatgaggctctatcatcatcctgcacatcatgcaagcacgccatctgcctcctcttcaggcttcagcagtcacactggccataccttccgcaggtcctcctgagcccagggtctgctgcagtccttcccaatcgggttcagagctggtttctggacccctggcccttgcccccacccaccacagagacctcccatctctgatgccaccttcaagtagatggaaactgaggcaggcccatggtgtctgagccagtgtttggtatggcagggtcatttctgttgggggaaaagtgggcagggttccattctatcattttgtcagggccagatgagaagtgtcagataaagtcccacataaagaacgtccctccaccaagaggactagacccaggtatctgagcccccagagggcatgaatggctgagctcgtgcatttctgtccagattcaaaaatctggattcagccaccagtcgtcaataagacattgggcaaagcactactgcccttcagggtctcagtttccccttctttattttttatttttatttattttttgagactgagtcttgctctgtcgcccaggctggagtacagtggcacaatctctgctcactgcaacctctgcctcccgaattcaagcgattctcctccctcagcctgctgagtagctggaactacagaggtgcgccaccacacctggctaatttttttgtattttcagtagagacaggggtttcaccatgttggccaggctggtctagaactcctgaccttaggtgatccacccacctcgggctcgcaaagtggtggcggagccaccgcgccccgccagtcagttccccgcccccgcacaccccccttcccccttcccgcccccggcttttttttttttttttttttgagacggagtcttgctctgtcgcccaggctggagttcaatggcgcgatcttggctcactgtagcctccgcctcccaggttcaagcgattctcctgcctcagcctaccgagtagttgggattacaggcgcctaccacgacgaccggctaatttttttctatttttagtaaagatggggtttcgccatgttgctcaggctggtcttgaactcctggcctcaggtgatccgaccgccttgacctcccaaagtgctgggattacaggcgtgagccaccgcgcccggccagtttccccctctttaaaatgtgtaggaacaccggctgggaggagtaaacacgagccggggcagggaaagaactttgcacaccgtggggtccggggctcctctgtgatgccaccaaggtttgcaggctcagcggcagcgctgaggtatttgttctgcgaataaagcgctctacctatcgtggaatcagtccagctagatccccgtcccaccaggacggcagtcgcccctctgcgttaacccttccactgccctagtgaggtgggaaagggggtccttgagagccctatggcccaggagagaccgggcagaactgattcggccaagggcagcatgaggtgtgggaggagcacggcacaaggagtcaagcctcctgcgttctagcccaggctctcttcgcacagaggccttaggcaagaccctcccccggatggagaccggattccgtgaatttctaaacaccagctaccagagcttatgactctgaggggccaaaccagggaagatgaggctccctttgcacccaaaatttggggagaggcgaaaggggaccggatgccctagcggagcagaatccggcgaagggcaggacctgaagggtttggggaatgccctgaatgtgcagagcgcggggggggggggggggggcggggcggattcagggcgtgcctgtctctgattggctgtgccgcccgtcgctccgccccgtgttctataagatgcgcggacggcgggcgcgcctctggggtgggggctgtggccgtgtctagctgttcgggtgtgctgtggtcatcctccctgcgcacctacagccgcagaccgccggtggggggcgggggatgccgggctgccgcatcagcgcctgcggcccgggggcccaggaggggacggcagagcagaggtcgccgccgccgccctgggatcccatgccgtcctctcagcccccgcccccaactccg

SEQ ID NO: 872 - DNA, 2300 bp, Homo sapien
ggttcaagcgattctcctgcctcagcctcccgagtagttgggaatacaggtgctacaggtgcctaccaccacgcccagctaattttttgtatttttagtagaaatggggtttcaccatgttagccaggctggtctcaaactcttgacctcaggtgatctgcctgcctcagcctcccaaagtgctgggattacaggcgtgagccaccgtgcctggtcaggagaacaatatttaagaaaaaaaattgcagcaatgaatcagatagactcaatttctgaatttttgctacagcacatgtttaaaatcagaaaaaaaaattaaaagcaacaggtgaggttggggaaaaataaaagtaataacaggccaggcacagtagttgacacctgtaatccctgcacttcaggaggctgaagtgggcagatcacttgagcccaggagttcaagaccagcctgggcaacatggccagacccttatctctacaaaaaaaaaaaaaaaaacagaaaaattagctgggtgctgtggcgtgtgcctgtagtcctagctactcaggaggctgggattgggaggattgcttgagccagggtggttgaggctgtggtgagccatgatcatgacagtcaactccagtccaggcaacagagtgagaccctctctcaaaaaataaataaatagataaaaataaaaaataaaagtaacgacaatcataagcctcatcccctaggtcctgtaaagtgtgagagcaaaacatgtaaacatattttttttaaattatgttttgtctagacctgcagaaaaacatgtaaacacattattcgttctctagctccagaaaggagctgggtctgcataggtacagtggaaaaaacatgcaccacagattctatagccctggttgaggaccagggccttactagtttgctgtgtgacagtcgggtaatcacaaagcctctctgagcagatctctccttccctaaattggctatgctgtacatcaacgctcatcatgctgtggtttgcgaggccaatcaacagtgtcttagaaagcctttactttagggccgggcacagtggctcacgcctgtaatcccagcactttgggggtcgaggtgggtggatcacaaggtcaggagttcaagaccagcctggccaatatggtgaaacccccgtgtctactaaaaacacaaaaaaattagccgggcttggtggcgcatgcctgtaatcccagctaatcgggaggctgaggcaggagaattgcttgaacccgggaggcggagcttgcggtaagccaagatcgcgccactacactccagcctgggtgacaaagcgagactctgtctcgagaaaaaaaaaaaaaaaaaaaaaaaaaaaggcctttaccttggtatgcagagtttattattattattaatttttttttttttgaggcggagtctcgctctgtcgcccaggctggggtgcagtggcgcaatctcggctcactgcaagctccgcctcccgggttcacgccattctcctgcctcagcctcccgagtagctgggactacaggcgcccgccacacacccggctaattttttgtatttttagtaaagacggggtttcaccgtgttagccaggatggtctcgatctcctgaccttgtcatccgcccacctcggcctcccaaagtgctgggattacaggcgtgagccaccgcgccgggcccagagttgtttattatacctttcctaggctctggaaaactgccagagcatgagcagtgctgtgcagagttgatcacgtggctcaatctctttgggcttctgaaaatagcaggacaaggctaggtgacttctcaatttcttccagcgctaaaaaaaaaaaacagaaacctggaatttctcagtggtctgactctgctacaaactccgcaggtcacttccctccctcctgaccctggcggggcggggtgggcgctgtccctttaagtccaggcccgggccaatcacagtgaacagaagttctttaaggaccaaaggagggaattcagcctgagaaggagggcggggcaggggcgtgccctctagccaatcggaatctccctagagaacagtgactcacgtgcaaagctctacagaccagtgtccggagcgttcagaggcggggcggctctcgctgttggcagcggcccggaccaatgggcacgtcgcccgcggcctataagagtccgctgggccgcgggctgcaggcgctagggtcggttagtcgtcgccgtctgaggtgttccctggctttgtctcgccgtcgttgccgccccgtccctgc

SEQ ID NO: 873 - DNA, 2300 bp, Homo sapien
acctgaccctcatcaccccctgccttcccctgcaggggtgctgggcctgacctggttcatcaacaagttccgtatcgtgaagctgacccccaaggaccagttcatcatcgcctatgggggcctgcgaggggccatcgccttctctctgggctacctcctggacaagaagcacttccccatgtgtgacctgttcctcactgccatcatcactgtcatcttcttcaccgtctttgtgcaggtgctgggccagggcagggcaggcccttgccttggggaccctcacaggctgttcccgtggaaagagaggaaagcgtgtgatttgaaatgcgattctagtcccagctccaccactaacttgctgtgtgaccttgggcgagccactccccctttctgggcctcagtttcttcaatcgtaaagtgagaattgtgatgagtcattgcagagtgactgatcagaatgtaaaggaaccagaatgctgcccaacttaatttggaactcatagagcattaagagaagtgggtactggccgggcacggtgactcaacgcctgtaatcccagcactttgggaggctgagggggtggatcacctgaggtcaggagtttgagaccagcctgactaacatggtgaaaccccgtctctactaaaaatacaaaattagtgggcatggtgatgcatacctgtaattccagctacttgggaggctgaggcaggagaatcacttgaacccaggaggtggaggttgcagtgagctgagattgcgccattgcactccagcctgggtaacaagagtgaaattccatctcaaaaaaaaagaaaaagagagagaagtgggtacagtcaacaggcccaagatctctctttgctactaactcattgtagggctttaggcaagagatttcatatcttagggtctcagtttctgcatctgtaaaatgggaataatatcacagcatggggaactggaaagggctatgagccaggcagcaggaggcctggagtcagccctagctctgtgttggtgtccctctgaccctaagaaagacccccactcttctctgggtctcagttcccatctgtaaagtgagggaaccaggcgagatgattcccaagaatccttccagcctgctgctcagtgatttctgtacatttaaacggctcaggcttagctgacagccactctcctgcctaaggtccccaaggaagcccagcctgtgatggtgcaaattgctctgccttacctgactttgcctgaccttgggcaaataagaaacactctgtctgagcctccatttctttaccatcctttctgtcttttctgggcactgatactcaaaaagccctagatgggatacatctttgcattctcttgagaaaaaaaaataggggaaacctggggctgggcttattttctgtcctttaaagggagaggggaccctggtgcagtggctcacgcctatgatcccaggactttgggaggccgaggcaggaggatcccttgagcccagtagttcaagagcagcctaggcaacatggcaaccttgtctctacaaaaaataaaaaaaaaattagtgggtatggtggtacacacctgtaagtcccaggtacttgagaagctgaggtgggaggatagcttgagcccaggagattgaggcagctgtgagctgtgattgagcctgtgtgactcctccagcctgtgtgacagagtgagactctctctcgagttaagaaaaaggagagaggctgggcgcggtggctcatgcctgtaatcccagcactttgggaggccgaggcaggcggatcgcctgaggtcaggagttccagaccagcctggccaacatggtgaaaccctgtttctactaaaaatacaaaaattagctgggcgtggtggcagccgcctgtaatcccagctacttgggaggctgaggcaggagaatcacttgaacccgggaggtggaggttgcagtgagctgaaatcgcaccactgcactccagcctgggtgacagagcaagactccatctcaaaaaaaaaaaaaaaaaaaaaaagaggaggaggctgccacttttgtcctcttgccctgcttccatcttcaaaaaattttttttaccttgattttgcagttgtatgtgctaatgattttccaagcccattttcattgaaggcaacattggggagggggcctccctccagagccagcctgcctgggtttaaatcatggctttactgcttctctgggatcttagaaagctgcttatcctctctgagcctcagtttctgcatctgttaaatagagacaatg

SEQ ID NO: 874 - DNA, 2300 bp, Homo sapien
ccaagcacagctaattttatcagacaatggtatttatttttatttatttatttttttttgagacagagtctcgctctgttgcccaggctggagtacagtggtgcaatcttgacttactgcaacctccgcctcctgggttcaagtgattctcttgcctcagcctcctgactagctgggattacaggcatgtgccaccacgcccggctaattttttttttttttttttttttttgagacggagtctcgttctgtcgcccaggcgggagtgctgtggcgcgatctccgctcactgcaagctccgccttccgggttcacgccattctcctgcctcagcctcccgagtagctgggactacaggcgcccgccactgcgcccggctaattttttgtatttttagtagagaccgggtttcaccgtggtctcgatctcctgacctcgtgatccgcccgcctcggcctcccaaagtgctgggattacaggcgtcagccactacgcccggcctagacaatggtattttaaaaaagctttccagtgattccattgtacagccatgatcccttgaacctcaccaatttcaaccaaactataggttcaaatttaagttccactacttaaagcatgccactgttgtgggttgaattgtgtcccggcaaaagaagttgaagtcctaatgcccagtgcctatgaagatggactaattaggatgcagtctttgaagatgttcaggttaagatgaggtaattacgttggatttctaatccaatgactggtgtccttataaaaaggggaaatctggctgggggttgtggcttacccctgtaatcccagcactttgggaggccgaggcgggtggatcacctgaggtcaggagttcgagaccagcctgaccaacatggtgaaaccccatctctactaaaaatacaaaaattagctggacgtggtggtgggtgccagtaatcccagctactctggaggctgaggcaggagaatcgcttgaatccaggaggcagaggttgcattgagctgagatggcgccaccgcactccagcctgggcaacaagagccagactctatctcaaaaaaaataaaaataaaaataaagtgtgggcggggaatctggacgcagagacagagacaccaggagaactccatggaataccagatagtcctaacaaaccactggaaggtaggagaaaggcatgggacagattctccctcatagctctcagctgaaaccaaccctgccaacacctagatccgacctccagcctccagaactgtgagacaatcaatttctgttgttgcagccacccagtttggggtgatactttgttacggcagccctagtaagcaatacaactacttgcatagtagccaggggactctcttcacctgtttcctcatctgtaaaagtggaattgtaataatgtgccagggtgcattccaaatagtttacacggattgtctcagtcattacatcatccctctgacatagtcactattactgtctctacttaacagatgagaaagttgtgaaacaggttaagtaacttgctcaaggtcacacggtaactaaatacataaactaataatacattcttcacaggattattcgaaagcccttatgagactgcagatgtggacgtgaaatcgttttgtaagtagtcggcattttactcgcgttagtgaggttctctgtatattcaggacttttttttttttttttttttgtcatctctgactctccttcctcttcctacgcgatacttctttccctcggcgacaggggccgctgcgctgggcgggtgccgacggtctctctagcccgccgcaccggctgctcgctggtgcctataagtgacagcgccgggctcagctaggcttcagtctgctgccgccggggccggggctagggttagttctggagctggaccaggaggagctgcagctgggccggggcggagcgccgcgtcgcgccagggccgcgaggaggggcgtgttgctgctggcccaccgcgagccgcccccagcccgcgccgaggcgccttcccgccaggccgcctgccttccgcctctttccatttccccggaatctcagcccggcgcgcctggacccctgcccctctctgggtggagaagctcccggccgcttcccggtttcactccttctcagcctgggctcccagccccctctctccttttcctggactggctctcacccccttcggtccccttcctttagctcaggctccctaccccttcctttagcccacagcccagagtcccagctcctcagtcac

SEQ ID NO: 875 - DNA, 2300 bp, Homo sapien
ccttggcctcccaaagtgctggtattacaggcgtgagccaccgcgcccggccgggagtgtttctttttcttttacttttttttttttttttttttttgagacggagtctcgctctgtcgcccaggctggagtgcagtgacgcgatctcggctcactgcaagctgcgcctcccgggttcacgccattctcctgcctcagcctcccgagtagctggttctacaggcgcccaccatcacgcccggctaatttttttgtatttttagtagagatggggtttcaccgtgttagccaggtggtctctatctcctgatctcgtgatccgcccgcctctgcctcccaaagtgctgggattacaggcgtgagccaccgcgcccagcccgggagtatttcttaattcactagtagcacttatctcccatggtaagtattcaataaatgttagatattattcagtttaattaacccaatgaccctaaccaaggttgcagcctgaacctggggagctgcagatagatgatctcaaagctttcttctagtcccaaagtctatgattttttatattcagtagaacagctgtggtggagagttcagggggaatgacccacaatatttttaggagaaaggcataaaaggctttgtgagcggtttcacaaggataggttcttactcctctaaatggggagaaatctcccttgcggagaaatcaccagcaattagaatactacctttgtctctgggagtattcaggtattcacagacaaattcgtactcatgatgtgagcagaattggaaaaaaaaaaaaaaaaaaaaaaaaaaaacaagcgacacatggagtgataaacactataaatgccaaatacatatattcagtccttactgagagcgggtgctgtctggttttcacaggaaagacaggcagtgttaaaaggctcagactctggtgtcaggcagatctgggtctaattcccaatttgccaacttatcaggaccccgggggcaagttgcttttagcctttctgcttcagctttccttttctgcaaaacacagacagcaatagtacctagctaagagactgtacccaatccagtgcgaataaaagtgaattattgttagtatctgacaaatggcaccctatgggtgacaagtttcctttgtcagaaggtgacacgtcttccctttctgacttgaggtttcacgggtggggcctggtctctgccttaagaagataggcttagtgccacccttgtcaccttgggaacttccttaataaagaggagggtctctcctccatcagacccgggactccacaaggctggaactgcgtctcttcctcagaggtgggagcagcagtgactccgctagggtcagatggacctagtcgctcccatcaccccgagggcacccagagtgtgtgtggctgactcctctccaggctactcagcgtaggcccgattctctttcattctcttccttaaggcccaggagacgtcagtgaggactgtgccacttcagcagccccccagagcaggaaggagtgggctgaggagccccccggggccctagcctgagaggtcccagaattcgggggctgagaggaagtcttaggagctcttaaggggctgtgaggggacctggggttcagtgggcgagcgtgtgggcgggtgtcccagaagcggtgtgaggagcgttttacccggtggtggggtgggaggtgcgtccgggtaactaatggcaaccgggcggggtgagcccgctctgcaggaactcctcgacggcgaaaaactacgactcccagggtgccccagggcttagcccagctttcccgcccgcccactggctgccggtcccgcaagcggcgaagcccattggccacggcggtgcggggctcccccactagcaggttagtgggcgccgccggcagcagacgttgaccgggcgcgggggggtaagtgggggggcccggctagccattctggaagcggccgggcgcagtcttcgtagcgtacccgccggctgcgaggcgcagggcggaggcggagactgcgtggcgcaggcgcgttgctgggcttctcctgggtccccagacagctggaggagataaacagaggaggaggagggaggggagtgcgtgtgtgagagcgcgcgagggagtgtgagtgtgtgtgagcgcgggtgtgaggcggtgcgcaggggcgggcggaggcgctgtccggccccggccaggcgccgggcggggagcatgggaaggggctagaactgctcgagccccccagccccctccccgggatccgcgcccccc

SEQ ID NO: 876 - DNA, 2300 bp, Homo sapien
aaagactaaacttctgtgtggcttcagaggtggaaccaggactaaaaggtgaaaatgccaggaggcagaactttccttgaaagtctagtatttttaaatctgattacaaattagtgtgcttttatagaataattttgaaaatattaaaaagtagaaaaagtcagtcatatcattaaccaaagagagctattgttttctttttattattttacttatttttaatttgtttagaaacagggtcttgttctgtcacccaggcaggagtgcagtggtgtcatcatagctcactgcagcctcaaactcccgggctcaagtgatcttccgacctcagcctcctgagtagctgggactacaggcgcatgccaccatgcccaacttttttttttttttttttttttttggtatagataaggtctcactttgctgcccaggctggtctctaacacctggtttcaagtagtcctcccacctcaacctcccaaagtactgggattacaggcatgagccactctgcccagccatattttgagttttgttatgataaaattgttttccttctttagaggcagagtctcgctatgttgcccaaggagggcttgaactcctgggctcaagtgattctcctgtctcagcctcctgagtagttgggactacaggtgcacagcactgcaccaccacacctgacttttctttttcttatggcaaatcctcagaaatagaattgcttattatttttaacaatcagagttgtataacacaggaacaggttgcttcaacaagtggtaaggctaggccaggcgcagtggctcatgcctgtaatcccagcactttgggaagctgaggtaggcagatctcttgagcccaggatttcaataccagcttcagcaagatggcgagactccatctctacaaaaaaaaaaaaaagagagaaaagaaaaaattagctgggagaggtggtgtgcacctgtgatctcagttattcaggaggctgagatgggaggatcacttgagccttggaagttgaggctacagtgagccatgatcatgccactgcactgcagcctgggtgacagagtgagaccctgtctcaggaaaaaaagagtagtgagactaaaagcctacctaccaggattttttttgttttttgtttttgtttttttgttttgttttgtttcgagatggagtctcgctctgtcgcccaggctggagtgcagtggcgcaatctcggctcactgcaagctccgcctcccaggttcacgccattctcctgcctcagcctcccgagtagctgggactacaggcacccgccaccacacccagctaatttttttgtatttttagtagggacggggtttcaccatgttagccaggatggtctcgatctcctgaccttgtgatccgcccacctcggcctcccgaagttctgggattacaggtgtgagccaccgcgcccggccctacgaggatgttaaagaaggatttctttattaggttgggtcttggacacggtcaccattacatttcctttacactgtttaattctgtgaatctactggagacttgagagttctgtctgtgatactgatttggtttcggggagagccaagctgaggatcagagatttgaagcataactaaaagttcagacgagctgccacagatgcctactgagcaagtgaaacttgatgtctttctagctttgccttgttctaactttaaggatatgctaccattatccttcatacttatacacaacctgccattttccgatgaagcataacatatttcttccgtgtttgttccaatgcttgttgggatgtgctactgttctccccacccacttcacccattccagaggtttttcaacactatggagcagggccagcccaccatgccacaaatgacaggcaagggccacttcactgggtgggctgttttaggggtggaattaggtcttgggagtcactttattatccatcctccaaagtttgatgatttttttcccccaggtaattaaatgtgtattttgtggacctgggcttggctggaatgctcaggggtcctgaagatcctattatagcttccttctgttgaaccattaagaaaagatggcgaaagtcaacataactagagacctcatccgtaggcagatcaaggtaagcagcccagacttctgcaccagatcatgagatcttttctttcccacagattgattttacagatgaaaaaactgaaatctatagtctgtgacttgcctaaagtcacgtagctagttagtggcagacccaggactagaatcaa

SEQ ID NO: 877 - DNA, 2300 bp, Homo sapien
agttttaatcccaactctgccattgacaagctatgtcaccttcagcaaattacagaaaagaaactcatcaaggttaagtaaaatggggttataatgactaaatgagataaaatatataaagcaactagcccagtgcatatagtaagggctcaacacttgtagctgcttttatgctaaagttgattggtataatttttgatatgactgacttcacacaatctcatgcccctttgaaagggactgggaccctagtatgactgggctattccctgcaggtcacctgccagtgaagcttcctgactacaacaaccgtttgagagtgctggttgccacctatgtgaccttcagccccaatggcacagagctactagtcaacatggggggggaacaggtatgtacagcataaggtggttctgccccatcaccattccatgcccagcagccaggggcatgtaccttatgttcactgctgaggcagacaagacacaacagccttatggtaaatgatgttacattgaaatgtgggggtgatgtggcatcattggagttcccagagagatgtcctagctcagtctttttatttcattttttcttaatgaactagatagaaatatgatagtatggcattttggttaagaatataggctttggaatggacagacttctgttcaaatgctggcctgctgttcagcagctgtttactgtgactttgagcaagtctctttatttttctgagcctcagtttcctcgtctgctattttcctaggaggaaatccctggggctcagagcatgcagctcagagcaagctgtgggttagtgccagctttgggaagtgttctttgataatggcaggttgctaaaccttctgtttgtgtgctctcaggatatttagtaagccttgcatacatttatttactctaccaacactgagcacttactctgggactcgcattattataaatataatagagacaagtgggaaatatgatccatccccaggctgatgggagacatgacaaacgaaacagttaatgacattacaaggcaaggcccaaatatatacaaatgaagcgggatgcagaataggtgaggataagccagacattcctggacctgtccaaggaatcatgaaaagctcaggagtagtgctagggtaaacatttggctttgtgacctttgaggacttcttcatctttttaaacatgtgacgtgttttttgttttttttttttgagttggagtttcgctcttgttgcccaggctggagggcaatggtgcgatctcggctcactgcaacctccgctctgcctcctggatttaagcaattctcctgcctcagccttccaagtagctgggattacaggcacatgccacgcctggctaattttgtatttttagtagagatggggtttcacgatgttggtcaggctagtctcgaactcctgacctcaggtgatccgcccacctcaccctcccaaatgctgggattacaggcattaaccactgcacctgaccttctattttgtttgtttgtttgtttgttttgaggcagggtctcattctgtcacccaggctggagtgcagtggtacaatctcaggtcactgcagcctcgacatcccaggctcaagtgattcccccacctcagcctcctgagtagctgggaccacaggcacacgccaccacacctggctagtttttgtatttcttgtaaagacggggttttgccatgttgcccaagctggtctcaaactcctgggctcaagcaaccaccctcctgcctcagcctcctaaagtgctaggattacaggctacgccaccatgcccagccaaatgtgattctaattaatgatagtatttcaagcaggactttgggtagatcagatagcccaccctgaatgctagagctaggaagattttccagcctgaggtttgctggaagtacctcttaggatagcttgattgttctatgctcaacactcactgtgttccaagactctagttcttgagaaaccaagacctgcttactggttcaaccacatccttacctcacagcttccatctctttttttgcccccctcaactctaggtctatttgtttgacttgacttacaagcagcggccgtacaccttcctcttgcctagaaaatgccactcctcggggggtaagttctcccttagggtatctctactgcggcggtgtaggggagcttaagtgcatgctacacctgctgagaagcctgccctttactctggaccgtgatcctccaaaaatagcagatctctgaaataaccccaccta

SEQ ID NO: 878 - DNA, 2300 bp, Homo sapien
acgaagtgcaacgggaagccattgaagtttggcagattaaatgtggtacgtgtattagtactaccaaacttgtggcaggccctgagagacttactttggttgtttattcatcaatacctacaataaatgtttaaagggtacccagcaaccctgtgctagaattatgggctgacagtcatggtagggagatgtctaaggcacagaccttcctcacagcctgtggtccagaagagattagataactacagtgattgaatcaagaagtcatgtaatttattctcaacaactgtaaactacacacctaatctattccaaaccctgtgctggatgctggttgttgcccttcaaggatcacacactgcacaggggtcaaggagaggtacaaacgtgctcaaagaatttggagtgggttagaatcattttctaacccactgtaatcattatcatgcctgcgaatctctgaggtctttataaaacatccatttattcaatcacctaataaatcagtaaacatctagtgggcatatgctttgcaccaggaactgtgccagctactgaagtcaaggaccttagagttctatagcagagacagacatcccccacaaaaaaacatgaaaatattaggtgctacaaacaggacagcaagctctccatagatcagcattgagggagggtaattcagtggaagaaggaccttccccaaatgggaagctcctaacttcctgagtgcatttgtccataccttcctttacctgattactctttttattcttttttttttttctttaaggctgatttttagtggcagccttccttctgactttgggctgtccccaacttcccctccccaccccagtagaccccagtagacttcattttctttgtcttgacatcctttaaaaagccaaaagtctccaacatttgagcctggcttctctctaattatggttgtgtgtgatctcaaacaattaacttccctgagcccgttttcccatttgtacaatgaagggattggatcacatctaaggcttatgatttactccagtaagtattcacactcttgcacacactgctctgcacggccttcctttctttgtaccgctgcactcatacttccactcctgtgccacatggcaaacatcaagactcaactcaataatatcctatcttccagcaagtcttccctgtatatacaataaaacacacacacacacacacgtgcgcacacacaactgtgtgtgtcttcctttatgctaccactacctcgtgagagggccacagaatgaaaagggcaagggaggtataagacttgggtttgggccaggcgcggtggctcacgcctgtaatcccagcactttgggaggccaaggcgggcggatcacagggtcaggagtttgagaccatcctggctaacatggtgaaacgccacctctactaaaaatacaaaaattagccgggcgtggtggcacgcgcctgttatcccagctactcgggaggccgaggcaggatcgcctgaacctgggaggtggaggttgcagtgagccgagattgtgccattgccctccagcctgggcaacaagagaaaaaattccgcctcagaaaaaaaaaaaaaaaaaaagacttgggtttgcatcgtggtctctcaccttttgaacctcagtttctcacctgtaacaggagggaatacctaatttggatgtctaattagtttatggggattagaaacaattcatgtcaagtgcttggcacctaagaagtgctcaataaatagcgactgtaccacacctcctaggagccctcagcgtactgaattagagttctctataagtctccggcgctagactgcgaactgcctgagagcatcccttctgcagccgcggggcataagcggcaaagactcggggctggcaggcgcatagggagtggggcggggctggccgggcccagaggaacgcggctcggattcccgggggaaggccaagcggggcggaccccatctccgggaagtgacgccatggggacgagcggcaccagagccggggccagtcggagcggggcgcgcgccgcatggcggaagcggaagggagttctctgctcttgttgccgccgccgccacccccgcccaggatggcggaagtggaggcgccgacggcggccgagacggacatgaagcaatatcaaggctccggcggcgtcgccatggatgtggaacggagtcgcttcccctactgcgtggtgtggacgcccatcccggtgctcacgtgagtctcttccggcatccgcctggggacgaggagggc

SEQ ID NO: 879 - DNA, 2300 bp, Homo sapien
gggctgacagtcatggtagggagatgtctaaggcacagaccttcctcacagcctgtggtccagaagagattagataactacagtgattgaatcaagaagtcatgtaatttattctcaacaactgtaaactacacacctaatctattccaaaccctgtgctggatgctggttgttgcccttcaaggatcacacactgcacaggggtcaaggagaggtacaaacgtgctcaaagaatttggagtgggttagaatcattttctaacccactgtaatcattatcatgcctgcgaatctctgaggtctttataaaacatccatttattcaatcacctaataaatcagtaaacatctagtgggcatatgctttgcaccaggaactgtgccagctactgaagtcaaggaccttagagttctatagcagagacagacatcccccacaaaaaaacatgaaaatattaggtgctacaaacaggacagcaagctctccatagatcagcattgagggagggtaattcagtggaagaaggaccttccccaaatgggaagctcctaacttcctgagtgcatttgtccataccttcctttacctgattactctttttattcttttttttttttctttaaggctgatttttagtggcagccttccttctgactttgggctgtccccaacttcccctccccaccccagtagaccccagtagacttcattttctttgtcttgacatcctttaaaaagccaaaagtctccaacatttgagcctggcttctctctaattatggttgtgtgtgatctcaaacaattaacttccctgagcccgttttcccatttgtacaatgaagggattggatcacatctaaggcttatgatttactccagtaagtattcacactcttgcacacactgctctgcacggccttcctttctttgtaccgctgcactcatacttccactcctgtgccacatggcaaacatcaagactcaactcaataatatcctatcttccagcaagtcttccctgtatatacaataaaacacacacacacacacacgtgcgcacacacaactgtgtgtgtcttcctttatgctaccactacctcgtgagagggccacagaatgaaaagggcaagggaggtataagacttgggtttgggccaggcgcggtggctcacgcctgtaatcccagcactttgggaggccaaggcgggcggatcacagggtcaggagtttgagaccatcctggctaacatggtgaaacgccacctctactaaaaatacaaaaattagccgggcgtggtggcacgcgcctgttatcccagctactcgggaggccgaggcaggatcgcctgaacctgggaggtggaggttgcagtgagccgagattgtgccattgccctccagcctgggcaacaagagaaaaaattccgcctcagaaaaaaaaaaaaaaaaaaagacttgggtttgcatcgtggtctctcaccttttgaacctcagtttctcacctgtaacaggagggaatacctaatttggatgtctaattagtttatggggattagaaacaattcatgtcaagtgcttggcacctaagaagtgctcaataaatagcgactgtaccacacctcctaggagccctcagcgtactgaattagagttctctataagtctccggcgctagactgcgaactgcctgagagcatcccttctgcagccgcggggcataagcggcaaagactcggggctggcaggcgcatagggagtggggcggggctggccgggcccagaggaacgcggctcggattcccgggggaaggccaagcggggcggaccccatctccgggaagtgacgccatggggacgagcggcaccagagccggggccagtcggagcggggcgcgcgccgcatggcggaagcggaagggagttctctgctcttgttgccgccgccgccacccccgcccaggatggcggaagtggaggcgccgacggcggccgagacggacatgaagcaatatcaaggctccggcggcgtcgccatggatgtggaacggagtcgcttcccctactgcgtggtgtggacgcccatcccggtgctcacgtgagtctcttccggcatccgcctggggacgaggagggcccagggagagccggagtcgggccgggctagcctccggccccaacgcgcagcaagccttttcctcgggtctggcccgcacgcctcgcccagtcaccagaaccccgccatccatgtagtgccagtttgtgcacacggctgggacacgctccctgctctcaatacacc

SEQ ID NO: 880 - DNA, 2300 bp, Homo sapien
aattacccaggcgtggtggtgcacacctgtagtcccagctactcaggaggctgaggcaggagaattgcttgaactcgggaggcggaggttgcagtgagccaatattgtgccactgcactccagcctgggcgacagagcgagactccatttgaaaaaaaaaaaaaggtagaaacagtttatccctcccaccagcagtgaatgagagctctggttgtcccttgccctcacctgcattggtgttgctgtcgtttgagttacagccatcctggcgggatgctgaggtatcccattgtgctgtcggtttgcagttacccttgtctgtgcttccccagccttctggaccaccctaatggccacctgtcaatgaaacgtaatattcacatgcttctgtactgtatgaagggtccccagcgtccgtctaactggctgaaagatcccctaagctctgtcccttccccgtccttttcctcacaggtggtttttccccatcatcggccacatgggcatctgcacatccacaggagtcattcgggacttcgcgggcccctactttgtctcagtgagtccccattctgcccacccggggggttccaaggtttaagtggaaggctgtcctgtcttgcctgcaggcaggcttcgtctccccagacccaggagaacgtagataacccgcagtcctggccctggccctctgcccctcaccagtgtttgacccctttcccccttctcttgcctccaggacaggccgggagggcagtgtggccagaaggattcttaagtaactgacccagccctttgcccccacccctggggtaccgagacatgggtagggattagaggcaagagtggagagtcagaccatccaggaaccacatctctggaccttcagaaggtgggagtcaaggtggggggacacgggaggctgattcggttccctgggtgtggccatggagaagagggggtggggctttagaatgaagcagctgtgttctcaggtctgttccctggggctgtgaccaagactggtccagtgggctagcagcagaggagcatgcatcatcctgtctccaggtgtcagaggctggactgaaggggtgtggtggcaccaacctgtttatattaatagttgtcatgatcatcttaacacgacaaaggtctgtcactttgtacttaaaaatactttcacatccattactttatcatatatttttatggtgattaatcattgaccaggtctgtcagcagggtctccctgatctgaacccagagtctgtctctgtgtaagtcctgtaccccaggaataatgtgatgagtctaggacttcactgcagtgtctccctcacaggaagtccctctgggcccagcgcccccgccctgctatgaatgcagtcagactgctgggcgaggagatggtctccatgtgggccaccactgttgagtcaggaggccagaccatgatggaaacctcctgctggtcctcagagatcagagaagactgaccagagaacttggagaaaatgaggcccagagagggcaagagaattcctgggtgccacaccaagggacagtggcagctggagccccagatctttggtctctgatgcagtgctctgtgcacttgtgccacactgccttcttcctgcagaacagctgctagctctttagatgccatgccagccccagggcagggcccaggccccacttctggcccccccacccctgacataccctcttctaagtcactgcacttctgccacctacccaggtttgtcatctggcccaaatgtaagttcctcactgacctctgcttttgtccctcaacaggaggacaacatggcctttggaaagcctgccaagtaagtgatgaacacccatgtgactggctctagaggcaggtcgctcctgccggggcgggccaggccttctggggcacaggaggggccagcaccctgagaatagagtatttggggtcgggggagaggtcagccagggtccaccagagcatggcaaccccatacagagtgtgtaccgcaccagcccctggctagggcctttacctgtagaccatctgggccttgccacagctcttcaggtttgtattttcaactccatggcaagggtgaggaaagggaagggacttggtcaaggtcacacaggaagtggcagagctgggacccacacccagatctgtctccctctagactcactctcctgccctttgggaacaaatgaggcatggaaggtagaagagaggcattgtttggagctctgctggaaagttctggttggagagaataaaa

SEQ ID NO: 881 - DNA, 2300 bp, Homo sapien
gccttaatgaaggaggcagcatcacagtaatggtcccacagcagctgctccatgggtattgcatgtgtgggtgcataaatgcattaatcaagagtactggggtctgggcaaggtggctcacgcctgtagtcctagcactttgggaggctgaggcaggcagatcacatgagaccaggagttcgagcccagcctgtccaacatggtgaaaccccatctctactcaaaatacaaaaattagccaggcgtggtggcgggcgcctgtagtgccagctactcgggaggctgaggcatgagaatcacttgaacccaggaggcggaggctgcagtgagccaagccagcctgggcgacagagcaagactccatctaaaaaaaagaaaaaaaaaagtctgcaaggatctcactgaattttagtgaaaaccctctaaggagagattacccccatttaacagatgagaaaaataagattaatttgcaaaaaataagtagggaagcctccactgtggttctgaggtggaggagggtcctctgtctctcagtggtggtgggagtcggttctgattacaggaaggaagagtgggtgtttagttttcttttcttttcttttctttttttttttgtgacggagtctcgctctgtcgcccaggctggagtgcagtggtgcgatctcggctcactgcaagctccacctcccaggttcatgccattctcctgcctcagctactcgggaaatagctgggactacaggcagccgccaccacgcccagctaattttttttgtatttttagtagagatgggttttcaccgtgttagccaggatggtcttgatctcctgacctcgtgatccacccgtctcggcctcccaaagtgctgggattacaggtgtaagctaccacgcccagccttgtttgcttttctgagacggagtctcgctgtgttgcccaggctggagtgcagtggtgcgatctcggctcactgcaacctccgcctcctgggttcaagcgattctcctgcctcggcctcccgagtaactgggactgcaagcacctgccaccatgcccggttaatttttgtattttgagtagagacggggtttcactatattagccagactggtctcaaactcctgtcctagagtgatccgcccacctcgacctcttaaagtactgggattacaggcatgagtcactgtgcccagactggttttgtttagaatccaccccttgtcctgcctctcccaggggtctatgaggagcccactaatctttaatccatggccctaggttcaggggagggggttgggccagggcaggccatgggaagtgaagtggacttggggggagtcagaaagctttggtgtggcctcttgtgcccaagacaacccaggaggttcatggtcctgaagccaatgtaatctagggcccaaaccttctaatctcagggtgggcagaatctaggtgtagaatggggtgagttcaggggggctccacatagacagagggtgtgggaccctcaccttggcactagaagagttcaggcctcctcaaacagatggggctcaggacagcagaggggacagagagggctgctctgccagcatgtcccagaagtgcatgtggatatagagggcagcagctgctgagatggccgtgggcattaggctatgctggagtggggacacctcaccccgactatgccagctcgcaccgggcactttcacttcccttagtataggctccttgcactctgctacccacagtttgcatcagaagaaatggaagagacctgcttaaggtcacatcacacacccactggcagagcagggactctgcacagggtggtctaactgcaaagtctgccatcctgccattccccttggggctggaaaagaaaggtttctaacttgctttcaaagcgagttcctatcagccccgttgtgggcaaggtggggctgctacccgttctagagggcctgctcagtggagctggggccaagctgggcctctccagtcggctgcgggggcgcacccccgggcgctgggagtccaggcccggttttgcatcaggccctgccgaggtgtttcctcctcctccgtgtggggcagctgctggctgggctgcctgttgagtcagccttcttccctcacggctcttctcccggtccctgaaactcggctgccaggggagctggagccacctgcgaaggtgtcctcccatactggacccctacaggtaacacgtgtcggtgccagggtcccctgccagggtccagagacgcaggcactgccacctggtatcctg

SEQ ID NO: 882 - DNA, 2300 bp, Homo sapien
gcatagcaggcggcggacacaagccaggacctgcccgccaagctgcctccgccggtctcagccccacctggagccgtggcaatggaaggggcggggaagagaggagaggccgcccagtgggctcaggacacagccctgaccaagtcatgggccccttgccacgtctacatgcccctcagcgctgggcaaatgctttctttccggagtcactgtggtacctgagcatgggctgctgcgctagcctaggcctccaccgccgggaccccagcctggtctggggagaactgtgtggccagaacagaggggccctgtggctccaggcaacagggcagggctggcggcgggggcatccctgggttggaggcctccgtgggagtgggtgcggcagttacctcaggagaggaagttgggggtgtgggctgaggaggaggttgcctcagacaggaaggccaagtgggccagggcagggtggaggtggtggcaggaggggacccaggctgtgaggttcctggtgcgggggagtgagcagatgtgtgtgtgtgtacgtgtgtgtgtgtgtgtatctgtctgtctaggtgggtggttgtatgtgtgcattcccatgtgtgtgcaggcatatttctgcatttaattaatcaaacttttaccaaccatctgttgtgtgcaaagtaatggctttgagggtgactccctctccctgcctccaaggagctcacaacccagttagccgggcaatgtatgtgtgccaaagtctgtatgatttttatgtacatctttatcgagggacatatttgtccccagacttgttcttgtctaggtgaacccatccgggtgggcctatccccattggtgtgcatatgctgtgtgcaggtttttttgttagtttttgttttgagacggagtctcactcttgcccaggctggagtgcagtggcgccatctcagctcactgcaacctccttctcttgggttcaagtgattctcctgcctcgcttcccaagtagctggaattacaggcatgtaccaccatgcccagctaattgttctgttcttttcattttttttggaggagtttcactctttttgcccaggctggagtgcaatggtgtgatctcggtttaccataacctctgcctcccagtttcaagcaattctcccacctcagcctcccgagtagctgggattaaaggcatgcaccaccatgcccggctaattttgtatttttagtagagacggggtttctccgtgttggtcaggctggtctcaaactcctgacctcaggtgatctgcccgccttggcatcccaaagtgctgggattacaggggtgagccactgtatctggccataatttttgtatttttagtagagaagggggtttcaccatgttggccaggctggtcttgaactcctgacctcaggtgatcggcccaccttggcctcccaaagtgttgggattacaggcgtgagccaccgcgcctggccactgtgtgcagatttaagaacatgtgtagggccgggcgtggtggctcacgcctgtactcccagcactttgggaggctgaggctggcagatcatgaggtcaggagttcgaggccagcctggccaacatggtcaaaccccgtctctactaaaaatacaaaaattagctgggcgtgatggtgcgtgcctataatcccagctactcaggaggctgaggcaggaggtttgaacccgtcaggcagtggttgcagtgagatgagatcgtgccactgtactccagcctgggcaacaaagcaagactcctcaaaaaaaaaaaaaaaaaaaaaaaaaagaatgtgtgtgcatgtctctcgtgggcatgggtccgggtctgtgtctgcagagggccctttctgggggaacagctgtgcatgcgcctgtctttatgcaggtgtctgtgtgcatgtgcgaccatatctatgcctacatggacccgcgtgtgcacatgtgtctgtgtgttccatcgctgcagtcctgtgtggccctacctcagggtgtgtgcatgtgtgtctcttgcttcttccactgtgtctccaagtgtgttcaagggctagtgtatgcatgtgtgcatgagtgtctctcaccccaccttgagctcagccatcctggggtggcaccctacccatacccggccaagtgtttggggagaaaagggctgttggttctaggatgtgccaagcatttgtgcagggcttgacctgaccctcggtctgcccccaggaagctccgtgtgcccagctggggcacagccccagctgatgccccagaggggccacccatcg

SEQ ID NO: 883 - DNA, 2300 bp, Homo sapien
ggccaaagcctgagactgaaggactgttggacctcagcttcctgacagaggaggagcaggaggccattgctggcgtcctccaacgagatgcccgcctgcgccagctggaggaggggcgggtcaggtaaggcagggcagaccctggccggggagcaccaagaggcttgagtggcccccatcctgctccctaccgacaccactgcctgtcagatgtctgcgtggttcttggttttgcccttcagtctcctctggccttggccagctcacagctcatcacttctccaggggtgactgcaccagctttctcgccagcctccctgcctccaggcttgcctcttgggcccacctcctgcagctggtgctccccagatctgtctgcttttttttttttttcttgagacagagtttcattttttcgcccaggctggagtgaagtggcacaatcttggctcactgcaacctccacccctccgggttcaagcgattctcctgccacagcctcccaaatagctgggattataggcacatgccaccatgcccagctaatttttgtatttttagtagagatgggttttcgccatgttggccaagctggtcttgaacctctgatctcagatgatccacccgcctcagcctcccaaagtgctgggattacagacgcgagccaccgtgcctggccagatccgtccttaatatccccgctgaaaacttcccctggctccccagtatcaagggcaagctcctaggcatggtccactgggcctccctggtcggtccttgccagcccccaccatctcctctttcaccataactccgacccgacacacagacacaaagtgacccctccagccactcaggtgctccccagtccctgaacccactcttcacttctatgcctatgctggtacttcttcctggaagagcacagttgtagaagagcatgggcgttacaagcaatgtttggggacagacacttcctagctacgtagccttggcaactcacctgacctccttgagcaccatgctcgtcgtctgtaaaatggggctaaggagtcctacttcactgatttaagaggaattggccagagatagtggcaacgcctgtaatcctagcactttgagaggctgagacgggaggattgcttgagcccaggaattcaagaccagcctggacaacacagtgagaccccattcctacaaaatataaaaaattagcctggcgtggtggtgtgcgcctgtagtcccagctatttaggcagctgaggtgagaggattgcttgaacccaggaggtcaggctgcaatgagccatgatcatgccactgcactccagcccgggcaacagagcaagaccctgtctcaaaaaaaaataataaaattaaaagtataataattattatccttctctacctggagagttccaatttgtcttttaagaagaaattcaaggctgggcacagtgacttacaacattgtgggaggctgaggcaggtggattgcttgagtccaggagttagagaccagcctgggcaacatggaaaagccccgtctctacaaaaaaatatataaaaaattagctgggcatggtggcacacgcctgtagtcccagctactcaggaggctgaggtgggaggatcacttgagcctggaaggtgaaggttgcagtgagctgagattgcgccacagcactccagcctgggcatagagggagactccatctcaaaataattaagtaaataaataaataaaggcaattcaaatgtcacctcctctgggaagccctcctggattctcacaggcagagctggctcttcttacttctatcacatcatccacctcactacagtgtacttgtctcttctggacttggtctccccagcagcccgagctcctccacagcacagatcaagtctgatttgctgttgggtccctggcccctggtcccaagcctgttaacaatgtaggtggcgggaatgttgcttgggtgagtcatgacagccacaccctcccccttcctccagcaagctccgggcctcagtggcagaccctgggcagctgaagatcctgacaggggactggttccaggaagcacgctcccagcggcaccacaatgcccacttcggctctgaccttgtccgagcgtctatgcgcaggaagaagagcaccaggggtgagaggagatcctcggggcagggcaagccatgtgccgtccagggcgctggctgtatgtggacagggagagaggaccactagggctccagtcctggctgcccccagtactgtgtgtctttcagtgggcaat

SEQ ID NO: 884 - DNA, 2300 bp, Homo sapien
gcttagcatctcgtgccccaccccagatcctggccaaggagaccaacaggtctgtgccgaggaggctgacccggagctggagcccgcgtcggggggagagcaggagccgcggccccagcaagcccaggtaggcgggagtggcccgtggctgctctcaacatccggagcggactccgggcggggagcgctcctgcccagggctgcgagccgcccgcgacccagggcgctcggggcaggggtggggaaagaaggggcgccccgtcacttgccccctctgcagaccaaggccgcgtcccagatcctggagaatggggaggaggccccggggcccgacccctctctcgaccgcatgctcagcagcagctcctcggtgtccagccttaactcctccacggtgaggcgggagggaggggacccgggcggccggggggtggacccgttccgatgcgtagcccctgcctgcccctccctcgccgcgggacccaccgctgcagccccccagcctgccacctatgacccgggtctgaagcctccgcgctgcccgcggccccgacgtgagccctgcgagcggccctgactcccacccactcccgtccgcagctgagcggcagccagatgagcctgtcaggcgacgcggaggcggtgcaggtccgcggctccgtgcacttcgcgctgcactacgagccgggcgccgccgagctgcgcgtgcacgtgatccagtgccagggcctggccgccgcccggcgccgccgctcggacccgtgagtgccccgccggccaagcggggcgcggctgtcacagcccagcccaccattcacagggtctcggcctcctcgtcctcatcttcaaaatgggaacaacagcgttattgggaggcgtgcgattaagcgagacaatccctgtaaagcgcttagcacgaggcctggcacgtgttcgggatggtggctgggggagcccacaggcaggggagaaggctctgggagggcccctcctcacctcgggttctcacctccccagctacgtcaaaagctacctcctcccggataagcagagcaagcgcaagacggcggtgaagaaacggaatctgaatccggttttcaacgagactctccgggtgaggctgtgaccacgatgcggttccccgttaatgaactggacgcccccttcctgcggggctaggtggcaagggcagccagtaacgtcattgcccggaggatcggcggagggggcccattaactcgttatccagtgttgtcagcctcgtggtgggcgtggtgatagtgcaggtccccattaatgcccttaggggctccccagaattccatcatggtaggaacgcggtaggacctgcctcagccaactcgcgcagcatctacgcgggccaccagcagtgctccactaaagctcacctcctgtcctcagtactccgtcccgcaggccgagcttcagggccgcgtgctgagcctgtctgtgtggcaccgcgaaagcctgggtcgcaacatctttctgggcgaagttgaagtgcccctggacacgtgggactggggctctgagcccacctggctccccctgcagccccgggtgaggcagccaggccgcgtggggagacctgcggcccgggtctcctgcatttaccccaccaggctctcccgcagccccctcacaccccgccttcgacagaacctcccctcaacctcttaacctcatggccccaggcgaagcccggccggccacggccccttccccgagggcgctaggacccctaggttctgcccctgcaggccccgccgtctcttctagccgcaccccatccgggtctgcagaccccaccctcctgaggcccctttccattagcccctgctccacgataagcccgcctctcgcaggtcccaccctctcccgacgaccttccgagccgcgggttactcgccctgtccctcaagtacgtccccgccggctccgagggtgagtgacagccggagaggccaagctggacacgccctgaaaagcgggagactccagtccccgggtttgggggcggtggactccatccgtgtgcgggcctgagccgagcctctccgcaggcgcaggactgcccccgagcggggagctgcacttctgggtgaaggaggctcgggacctcctgccgctgcgggcaggatccctggacacttacgtacaatggtgaggagtgctggccctccgggcttcccattcttttgcctgcagtggagtgcccaacctccacaaacccttactaatcaacctttgatcacgcagcctgggctttcaccactgag

SEQ ID NO: 885 - DNA, 2300 bp, Homo sapien
cagggatccgggcgcggctctagggctcgaggttggggcttaggcacccttcagtcggagcggtgcccagccagcggggcaaggatggggaggggctttggaactctggggcggggcggggagcggcgcggggctgtggtgtctcaggggtggggttggagaactcagcctcaccctcaggagaatgtcacgcggatctcttgaggacaattactgggagaggagcttggacttagggaaaggggccgggaggctggagttcaggagtcctagcatactatttccaaggatcgggctaggagaggcaaaaagagaagcgaaggggcccgacgggactggatactgggtgagggagcttaggttaagtggcctcagcggcccagaaagaatgggcggggaaggggcggggaagtgggcgggaaaggatggctcaggggcggggccagaaggaggctattcccccgcgagtcactcctccctccagccagcccggatgctcggcccccatacttacttgcttatgctagagtccagtagctgtgcttcctggatgtccatgaaatcgtagcctaaaatgaaggctgacccgaccactcggacacaaagatacaattatcgacagacacaaatcgcatacatgttgactcatgcaggccctagcagacgctgtcacacacacagatacagtcagacatagtaagctatacatgtcacagatatacacatacatacatttaggcacagcgttgtctatgcacactgatggtagcccctttcaagagcctgtgctgaagaccaaagggaggggacttctatgtttgcgcaactcccacctcctaaatggcccgtaacagactcaactggtccacagcctcccttcccccatgccaggtgctcacaggctctgaaccgtggcctgagggtcccaacccagtgagcccaactcctctcctgcaacactacagagatcagttctgtgaaagtgccaggggaaccctaaaaagggccgactgaagcccaaagcagaaccagaccctactggagtcccacagcaaggcaggtcaagccaggatggaccccggctccttccccatcaagctgggcttcagggatcagcgccaccccctctgtgcctgcagatgtggtggtgctggaggtgagcagctcgctggtacagccctccctgttctaccaccttggtgtgcgtgagagcttcagcatgaccaacaatgtgctcctctgctcccaggccgacctccctgacctgcaggccctgcgggtaggtggcctggggctggtggaggcaggcacagggctggggtaaggcctacacagaacaccagtatctgactgtctgcctcctgcaggaggatgttttccagaagaactcggtgagcagaatccacctctcactcaaaagtgccctttgacttccgctatgacctctgacctccactaatccccctggcctcctcagtcacctaaccccccactgacatcccaagtattcctctgtttcctgttgcctcctctcatgacgggtgcccctttcctgcgattccaattcccactgatgctgacctttgatgctctcactccccttgtctagccctgtgctgacctctgacctcactgattcctgcctccctcccaccaggattgcgttggcagctacacactgatcccctatgtggtgacggccactggtcgggtgctgtgtggtgatgcaggccttctgcggggcctggctgatgggctggtacaggctggagtggggaccgaggccctgctcactcccctggtgggccggcttgcccgcctgctggaggccacacccacagactcttggtaatgaaggcccccagggagggtgctccaggagggggctggtgagggtatggtgggctggggctgaggtacaggccccaccattctctctccctgcctcccctaccctgggcatcagtggctatttccgggagaccattcggcgggacatccggcaggcgcgggagcggttcagtgggccacagctgcggcaggagctggctcgcctgcagcggagactggacagcgtggagctgctgagccccgacatcatcatgaacttgctgctctcctaccgcgatgtgcaggtgcgtggtgttcagagaggcagtagggcagctggcatttgaggtcagacaaacccaagttcagttcctggctgggccacttgctcactggtggctttgggcaaattatccaatgtctctgagtgttggcctccttatttgttagagaggatgagcatgtcgctg

SEQ ID NO: 886 - DNA, 2300 bp, Homo sapien
catatagtggaaggactggaggagattcaagcatccattgacaatttcctgaggctctctgggtcctgcaagtggatggctttgtggcaggaattgcacaattgcacagcttttttgtttgtttgtttgtttgtttgtttttgagacgcagtctcgctctgtcgcccaggctggagtgcagtggcaccatcctggctcactgcaagctctgcctcccaggttcacgccattctcctgcctcagcctcccgagtagctggaactacaggcacccgttaccacgcccggcgaattttttgtatttttagtagagacggggtttcatcatgttagccaggatggtctcaatctcctgacctcatgatctgccctcctcggcctcccaaagtgctgggattacaggtgtgagccactgcgcccggccgctttttttttttttttttttttgagatggagtcttgctctgtcgccctgcccaggctggagtgcaatgagccagaggggcatacagtggaaggattagaggagatccaagcatccattgacaatttcccgaggccctctgggtcctgcaagtggatggctttgtggcaggaattgcacaattgcatagctttttttttttttgagatggagtcttgctctgtcgccccgcccaggctggagtgcaatggcacgatctccactcaccgcaacctccatctcccaggttcaagtgattctcctgcctcagctcccaagtagctgggatcacaggcaggtgccaccacacccagctacttttttttgtatttttagtagagacggggtttcaccatgttggccaggctggtctcgaactcctgacctcgtgatccactcatcttggcctcccaaagtgggattacaggcatgagccaccgccctggctgggaattgcacagctttctcagcctgtcggttgcccatgcctgtcctttgtaagttgtctgttttccactccagcctctgttgcaggccaagttctcaaactctaccacttcctgcctatctcattgggtgtcagttcgaatccaaggtcaaaccaaggaaggtacctttttcttccacaaggcaacagggcaatgaaacagccattgagtagcatttaagcagtttatttgcccaaagccacattctagtaagtggcagaattaaatagttaagagtctgacaggcggtcctgggtttgcaccctgctgtcatgtgctgagtgatcctggacaagttattcaacttaagtccccagttcttggtttcagggtccactgaggcttctaccaggttgctgcctcactcattaattcacacaagaaagttggggactcttggggatttgaagctgagaagctgctgtagtgcaaagggctggggttgactccttcaaggggtggctaaagaaatgtttagagttgtttagagtaggaagtgcttctcaggtcccatggccacgttctgcctagaagtcaaaggtcagcgggggtccacagcaggttgggtcctggggaaagcagccccctagtgacagttaaggctcagatgccaagtcccactccaggactgaaggctttcgggcaagcggcctagggtgtaggtttcccccatcccagtccctccctgcctgcgctcactgggcccgggaggacacccattgttcatcatgctctgcgcaccctgatgtctctagagagccattcattcaacagatacctgcagagcagggcctgcatatcgaaccttttccctagccctggcctcctcacacattttatgtgcacttgctgtgagcagtccacagtctttggcgtgcacaggggcacaggctgttccggaagccgccagtctccaaagttctggcgggagagaagggaggggagaggctgagtctcaagccgctagggagcggctctgccccagggccgagggtggagctttctgggtcggccgggaaagggctgggcttagcctacaagtgaaggcagggcagcgttggcgggcgctcccttgagaagtccaggtggcgggcacctccgagccgattcccaggatcccccaagtggctctgagctgccgatcaccggatgccccagattcctgggacccaatcccggatttcagaacctcaggaccttgcaagtccgagctaggatttctccctggactttagattcctggaacgggacgtcaggccgtattccggatccctagatcccgtgggagattctccgattccgaacggattccagatcccaagattcctgatctgccggcccaggctcctgc

SEQ ID NO: 887 - DNA, 2300 bp, Homo sapien
cgggagactgaggtgggaggactgcttgagcccaggaggtcggggctgcagtgagctatgatcacaccgccacactctagcctaggtgagagagtgagaccctgtctccaaaaaaaaaaaaaaaaaaagagagaacaactccttccctggtcctactctccagaaataaccacagttcacaaggtctgtgtcagacctctttctgtgaatttacaaaatacatatatacacacctctagcattttaaaaatacaaagtgggataatgctgtgcatactgttttgcatttttgcccctctcattttagatcagattcaccctgtgagttgtctgaatggtcctaattcatgtgaatgccatcaatgactggttgggtcatttccacactgatgcttacaaacagcgccatggtaaacaggcttgtctgcagatcttggcatactcgtgggacagtctggggaagacagattcctagaactggaattgcggtctcaggatatccctctcgcggacacatcctgtcaggcaaacactgcctccacttcccctgataccacttgcacctcagccctctccataagcaccagggaggtgcagaggaggccttgagggagggtttcctgaatgagtgaatgaatgagccctgcctctcctcccttatcacctgaggtccctctccagctcaggcctgatccttcacatctggaccctggctgctgcgtcctccctggcttcccggcctccaggccttcctacatgggcttcccgctcaattggcgtacattagcagctgtttcctaagcctcacgggactcaaggttgagcatggagtcactttctttttttttgagacggagtttttgctctttcgcccaggctggagtgcagtggtgcgatctcggctcattgcaacctctgccttcgggtttcaagtgattctcttgcctcagcctcctgagtagctgggattacaggtgcatgccaccaagcccggctaatttttgtatttttagtagagacagggtttcaccgtgttagccaggctggtctcgaacccctgacctcaggtgatctgcctgcctcggactcccaaaatcccgggattacaggcatgagccaccgcagccagccagaatcactttcttaatggtgcttttccctggcgggggcatggggcttgggtaaaactctgttgctctcagcatataagtggccaagagaacagaagtcacgtcccatcactgggcctcagtttctctttccttattcatttaactctttcttactgagcacccattttgtaccaggcccataatgcaataataaggattaatagcaagtccatgtgaggatcggaggtgacgtcagtatgacgctggaatgcagtagatgcccaggaaatggtagcagttgtcactattcatagcattgacaaggatcagggaaggattcccagtggagatggctgtagagctagaccttcatggacagatggggcttcacaggtagagacgactgtgaatgtagaggtctggagagatggctggggagccctggaagccaggatcagaagttggactctttcagtgtgcggtggctcacacctgtaatcctagcactttgggaggccgaggtgggtggatcacctaaggtcaggatttcgagaccagcctggccaacatggtgaaaccccttctatactaaaaaaaaaaatacaaaaaattagctgggcttggtggcgtgcacccataatcccagctacttgggaggctgaggcaggagaatcacttgaacccgggaggcagaggttgcattggttgcattgagctgagagcacgccattgcattccagcctgggcaacaagagtgaaactccgtctcaaaaaaacaaaaaaacaaaaaacaaaaaacaaaaagatgttggactccatcctggttggatagggcagggataatgccctttctctctggggctgaaggaggaaatactcccaccccctgctggctccagtctgggtggggtgtccctgggggacaatgggaggaagtcttgtttcatgtcctcccaccagcctggcccccttataatctggcatccttcccctggtgggcccagcaagatggatctactgtggatcctgccctccctgtggcttctcctgcttggggggcctgcctgcctgaagacccaggaacaccccagctgcccaggtgggcacctagggtgccctcctcaccaacccactcctcattccctcgctgggtgtccccccaccaaggctcatcaacctcaaggagca

SEQ ID NO: 888 - DNA, 2300 bp, Homo sapien
aggcgtacagagggaatacaaggggacagaacctgaaggactttttaaaattaattaattaattttattttttattatttttattttatttttttattagactttaagttctagggtacatgtacacaacgtgcaggtttgatacataggtatacatgcgccatgttggtttgctgcacccatcaactcatcatttacattaggtatttctcctaaagctatccctccccaagccccccaccccccagcaggccctggtgtgtgctgttccccctctgtgtccaagtgatctcattgttcaattcccacttatgagtgagaacatgcagtgtttggttttctgtccttgtgatagtttgctgagaatgatgatttccagcttcatccgtgtccctgcaaaggacatgaactcatccttttttatggctgcatagtattccgtggtgtatatgtgccacattttctttttttatatatataatatatatattttattatactctaagttctagagtatatgtgcacaatgtgcaggtttgttacatatgtatacatgtgccatgttggtgtgctgcacccattaactcatcatttacgttaggtatatctcctaatgctatccctcctccctcccccagaacccgaagggtctcttttcccctgagtgggcagttttgggggcctcagggacactcaggtggagatgccgtggacccatgggaggcacagcagagggagcatggcctccagcatcattcaatcctagctttacatcctggcctgctgcattgaaaccctgtgcccctgagcagcctgcaaatgggaaatgacaaaactcatgcctagagggtagctgtggacattagatgggaagttgcatgtaaaagctctcaaaatgtacattcggctagtaaggggtcaataattgctagctatatattgtcagttacaggtgtggcagttgtgaagtcagaactggcctggagatgattaagagatctgttggctcaaaaaaaaattttttaatgggtgcatagtgggtgtatatatttattgggatacgtgacctgttggcattcattcattcattcatttaaaacagggtttcactctgttgcgcaggctggagtgcaatgccatgatcacagctcactacagcctcaaatccctgggctcaagcaatcctcctgcctcagctgttgggtttcaagtggggactgatggcagtggaatatccaggatgaccccaggagagtgtggaacagggcttgggactaacctgggccaccatcgattaagagagggttaggagaagcagatgggggaaggaggggagaggaggggaggaggaagaggaaggagaggaagtgccccctaaggagcctgaggagaaccaaaagaggctggtgccagggcaggagtggtagccgtggggaaggctgcggagaggcccagttggcctagtaatggcgtcacccctgacctggccagagggtgtggtaggccagaggcagacacagcggatgaggggcagaagggaggcgggtggaggggtgcagtgaatggagagggagcaccgaagctgagcttgggcagccagagggcaggggccagctagggcccggcccagcggtcatggggcctgggtggagggtgtacaaagcggggcctgcaccgagccctgaaggcagggaagtgacctcgtctcgaatccagatttttgccactgcctctctccgtgacctcgaacgagtcactcatcttgtctgagcctcagtttcctcacctgtgaagtaaggatcaaagcagtcggtactttccagaattttcaagaagctgcccttggaggcacatagtaaccacgccagccaccagtcctggaccccacctgctttagtccaagccccgccccagacccccgaactcacctggccgcgcacactagccacgcccctaactggccccgccttcacctggctccgccccgaccgacgagccccgccccacctgccgctcccactggccacgcccccacctggccacgccccggttgcccaggtctcgctccgcacacgctcagccgagcccagtctgggagggacgcgcccggcagctgtccaccgatcccggccaccgcccccggccacccccaccccgcgagcccatggaggctccgggaccccgcgccttgcggactgcgctctgtggcggctgttgctgcctcctcctatgtgcccagctggctgtggctggtaactcgcggcagggtctggctaggggctcgacggggacggatggag

SEQ ID NO: 889 - DNA, 2300 bp, Homo sapien
ggacatagtcagtatcctcttggagcttagattctagtggggctgacatgtagtaaaacaaacaaacatgaattcatttataatttcaagagtgcttcatcctccaaaaatgaataaatcaagagaaggggagggagagtgatggggaggccagtggcgatctgagagttcagagcagcctgtttcagaagtaattcgggagcagagacctggatgaagagaagggttgttgtcagaggggtcaggtgcaagagcccaggaggaggagcccctgaagccactcctcactctctgctcccgcccctgggtgacattatttacccctaaaacatcagttgccacctgcatgcctacacctcccaggtgtccctcattatccagctgtaacattgatggccaatggcaagtagaacccactcaacaaccccatgaggccggtactaatattatccctgtgttttagatgaggaaataggcacagagagctgaagaaactctccaaagtcacccagctaggaaatggagaaactgagattggacacttccaccccctaagccccctaaactcaccacatccaacctgaaatgaatcctcttctccagctccgaccccctcctcttcccatgttccctgccacttgaccttctgctgcctcacactcaaacccaaaacctgcctggtggaggctgaccatgggggctgcagtgatggtgctgtgatgggggtgtccagtggggcctgggatcctcaggcctcttaacctcatcttcccctcccacaggcctgcatgattccagggagcatcaaggcaagagacacagggagaaggagcagccagtccccctgccgcaggactggccacatctgtcacatctggagaagtctgcccagagtggttcccctggactaagggcagatggcgttggggaagagggagctctttctccttgctccacccatcaggatgcctaaaataggaggctgagaggggcctgccctgaggactgagctgccaggctttctgcttccaagttcttcccggctccccatctcctcctgcttcagggaagtgcacccctcaccccctccacgctggctttctagatactggaataaataattcaggttttgaaatcttgccaggcccacccctccggtgctgtgagggcgctattgggctgacatgagtgacgtcacccagctcttatcccagccccggcatcacgggacttgccctggcagcaacttacctgcctggtcactgtcagtccagaccctctaccctgtgcccctcaccctggagcccactcaccacagccacctgctatcttcgttccagggccccacagtcctcatggcttagcattgtcgcttcagtaccccagccattctgacagggtaatggtgacctgaagtcacctggacactccatgttcccaggccgctgcctctgccatcccggggtccctgaactcccccctgctgcatagtcaccctgacactgccatggttgccctgagggcttcccctctaccgttagcgtcccacggccatcaccccccaccccaagattctgtcaccatgctaatgtcgtcactgccacccacctccccgctccctcgtgctccctgtcatcgtcacctcagggccccatcatcttggaaaccctgtcattctcaccagggaagcccaaccagccccatcacaagctcttccttcgtcacctggatctcgtcagcctctctgccacccaagggtcccatcaccccacagcctagccgggccccctttccactcttccaccacgttccctgcagcctctctgagacttcaaggctctcgcaccggcgcctctgaaacccccggcccgcagagggcgccgcgtcaaggacagcgcgggcagactcgggagggggcggggccgcagccacggtcgctttttatgaatgggggagcgggcggtgcgaggccttattactatgccgcgcaacgcgcgctgcgccccagcgcgccgcgcccattggctgatcggaccgctgacgtcaccgaaccggtggccgggggcggggcggggtgactcacgccgcttctcccgcggccgcgggggcttctcggggtccacgcacgccctgcgccgccaggacccgagcggagcctccccgcggcccggccgcgcctggtcctgagcggtgagtagcgggccccgccgcgggcaccaggggtcctgaagggcacgcaggatgctggggcactgggccggcggaaggctcctagtggccggccggggttcgagttcgag

SEQ ID NO: 890 - DNA, 2300 bp, Homo sapien
gaattgcctttccagttctttttagttcagaataatgttaagataaatgttcactcctaagcacatcctttctggatagtgagaggaccttatccatgccaaaatgcaagattccaactaggaccattgaatctggcagatagcccttatatggacactaagtagtttactctgtcccactggcacagccattaattagaagctggtgattaaaccttgtggtcttacaacagctggccatcttttctcactggagccctcttgtggttggggtgtatgtggatgctgagctgttctagaagggagcaagaaggtggagtgctgtggttggttttctgtgtgtgcagagaaataacagctgtaaaccacacacttttcacgtatatatgtgtacatatgcatacacatgaactcccacatgtgcacacaggtttccggtgggtgggaagctactgatgctttctagagagtccttggggaactggtgggaaaagaggaaccagtggtagaaatcccctctgatgtaccaggaaatccgaatatcctcagggagatctctgtggccatgcagatcatcagaagtaatcaggatccctgctgctatcacctgtacttgccctgacaatgcacattcatctaccaggaattgaaagtaaggctaaggttcttaaaaagtctgataagtagagaggtgccattcgggggcattgaaatgctggtatgggagaggaggtatgcaatcgattcaaatgacttcttgattccttggtgtaaaaactgctaactggtaggtgtttggaatattggatttggttgggagctcatctgtctactgacagctacttgtcttcatttctatcccagggacgatggaaaagaggcactcaaattctacacagacccttcatacttctttgatctttggaaggagaagatgctgcaggacaccaaggatatcatgaaagagaagagaaagcatagggtgaggggaaaggggcctctgttctccacatcagtaggcacgattgtggagggggataaaaaggaagccagtgttatgtgaagtaatcatttcaagtggctgcttgcttggatgccaggtgaaactcttaaaaaaatgtgtccacaccaagcacaaccaagatgaaagtacaaatcataccaaaaatgtgtttgttccccccagtgctattaacaattgagtatattcaggctgagttttagaaattgacttttctattcaccatttatttctcttgcaatttgcacctgactctgctggacactcaagctaggctagtcccttctccactagttttgcagctcatttctcagagatcagcacaaggttctgcagtgtttgatttgcaacaggagcagtttaatgccttcgctacgggctgggcggggctagggtggggggatatatgtaggttttgaagattctccctccccatagactcttcctggtatgtatgtgacctaccagttgcaacctcagtcccattagcatggctgccaggaggcccaagagagtgccaggggcaagagcagctgcacaggcggaaaaattcttcattgatttttgttttgttttgttttgtttaaactatttccttatatgtgccccagataactgcaggtctcattacatctcatctctcttgactgacctttggggctgagcaaataataaatagctgtttactaacatctagcaattagagcttttcaaaaatgtgaatgagttatccaaagaggaagtggggttcccgttgctggaggcatttgagtgtgggattgagcaaatgtttcacccggggatggtttggattagatggcctctgggtcacttcaaacccagtaattctgtaagttctgtagttattgtatgttgtctaggcagattatctcttagatacgcatccatgaagatgggtagaattttaatgaagaacttggaaaatgttctacaaagaccttcctgttccttttcattatagaaagaaaagaaagataatccaaatcgagggaatgtaaacccacgtaaaatcaagacacgtaaggaagagtgggagaaaatgaagatggggcaagaatttgtggagtccaaagaaaagctggggacttctgggtaggtaatgcctttgtactgttggtagcattctttgaaggggctggggacaacagtctgacagctctggtgtgacacctttcacaccccctgaagtctgtctctgtggcttagatcaataccactgttaatcagctactttaaagtgcatccatctggtgatgaa

SEQ ID NO: 891 - DNA, 2300 bp, Homo sapien
gtcctcgtttgagattctgtgtaggttctcaacccatctgtcacccccttttcacgtcctgactcctaggaccccagaaacagcctgggcacacccctagtgtcacttttcctcaggaaccctggtggttaacaatagctggggggtggtctgtgcccaagtctacattgatcagagagatgagggactgacctggcacccttaagacctttcctggaatgctaaggggatgggtgagggaagagtggaggggaggggagggaagtcattctcatatgataccaggcctgaaagggagaaatacaggaatggaaaccaaaagaaacaggtttgagttccggggctgtttcaaagtccctgaaggaccctgggtaagtcatgcaacttcagaaagactcagttttctcttctgcaaaaatgagggtaatacctgccatacagggttgccctagagaattaagtgaggtatctttgctaacatgttaatttgtcacatttctatctagctgtggcatttttttttttctttttgagactcgctctgtctcccaggctggagtgcagtggcatgatcttggctcactgcaacatccaccaaccaggttcaagcgattctcctgcctcccaagtagctgggattacaggcgcgcaccaccacgcccagctaatttttgtgtttttaatagaggcggggtttcttttttcttttttggagacagagttttgcccttgttgcccaggctagagtgcaatggcgcgatctcggctcaccgcaacctctgcctccgaggttgaagcgattctcttgcttcagcctctggagtagctgggattacaggcatgtgccaccatgcccggctaattttttgtatttttagtagagatggggtttcaccatgttggccaggctggtttcaaacacctgacctcaggtgatccgcctagaagcggggtttcacttggccagactggtcttcaactcctgacctcaagtaatccgcccgcctcgccttggcctcccaaagtgttgggattacaggcgtgagccaccgcgcctgggcgttttttttgttttttttttttttttgaggtggggtttcgttcttgttgcccaagctggagtgcaatggcgtgacctcggctcactgcaacctccgcctcccgggttcaagcgattgtccgcctcagcctcctgagtagctgggattacaggcatgcgccaccacggctggctaattttgtatttttagtagagatgggggtttctccaagttggtcaggctggtctcgaactcctgacctcaggtgatccgcccgcctcaacctcccaaagtgctgggattacaggcatgagccaccgcgcccggacagctgcagccttttataatcaacaagacgagcatattccccactcatgcatgagtcctcaacaaccactcccgcatgtgaggcacagacgactgctcctattttgcagaaggacaaactgagacccagataaattctggaagttgtctgaggtcgcagagtgaagtggctgaaccagggttccgctcacttgaccatggcttttcagtactatcccccattcccaggacccgggccttgccccggatggactgtgcaggacgggatagagcttgtgactcactctccccaccctactttctgccctggctgagaccggagtgaagggacaacactatgcgcaacttgaggggtgtccacagaaagtttacgggcttggccccttcctttcactaaatctagcggttctttcaaggctaacaagaagaattcttctttcaacacactttgtacgagtttttacactttcttaggtgagctttccctactttgaacttaggagtcggtttaccttaatctccgccccccacttcacttggtttgcaccccgctgtttactccgattgcggaagtcgcccgggtggagctctggggagggtacccgtgagtacgtcttttgcgtagttatttaactggcgttttactcaggccaatggaatgccccgaagccccgggtgggtggggcagtgagccaatcagggccattggcggggtgtggctgccgcccagggcggggaatcgcgtaatggcggacacaggcagggcgagcgcggctgggggcgtagcgcgctgagggggtccggccgtttggcagcccgcgaggcggtccgcgggagcacactctgtgcggagactgggcggccggccgacccttcctgtcgctgacggcgactgcgggaggccaggtgagcaacaagtccccttgggtagac

SEQ ID NO: 892 - DNA, 2300 bp, Homo sapien
ccctggccgaacccccaccaccaccgcctcctccaccccctgccctgccaggcccaggcccggtctcagtcccagagttgaagccggaatcttcccagaccccagtggtctctacccgcaaaggcaagtgccggggcgtgcggcgcatggtggtgaagatggccaagatccccgtatcgctggggcggcggaacaagaccacatacaaagtgtcttccttgagcagcagcctgagcgtggagggcaaggagctgggcctgcgcgtgtcggctgagcccaccccgctgctgaagatgaagaacaatgggcggaacgtggtagtggtcttcccacccggtgagatgcccattattctcaaacgtaagcgcggccgccctcctaagaacctgctgctgggtcccggcaagcccaaggagccagctgtggtggcggccgaggcagccactgtggcagcggccaccatggccatgccagaggtaaaaaaacgacggcggcggaagcagaagctggcatctccccagccatcctatgcagcagacgccaacgacagcaaggccgagtactcagacgtcctggccaagctggccttcctgaaccgccagagccagtgcgctggacggtgctcaccgccccgctgctggacacccagtgagccggagtcggtgcaccaggcccccgacacccagagcatctcccacttcctgcatcgtgtgcagggcttccggcggcgtgggggcaaagcaggcggttttggtggccggggtgggggccatgcggccaagtcagcccgatgctccttcagtgacttctttgagggcatcggcaagaaaaagaaggtggtggccgtggcagccgctggggtcgggggcccgggccttactgagttggggcacccacgcaaacggggccggggggaggtagacgctgtgactgggaagccaaagcgcaagagacggtcccggaagaatgggactctgttcccagagcaggtgcccagtggcccaggctttggggaggcaggtgctgagtgggccggggataagggtggtggctgggcccctcaccatgggcacccaggcggacaagctggccgaaactgtgggtttcaggggaccgaggcccgggcctttgcctccactgggctggagagtggagcctcaggccgtggcagctactacagcacgggtgcaccctcaggccagaccgagctcagccaggagcgccaaaacctcttcaccggctactttcgctcgctgctcgattcggatgactcctccgatctcttggactttgccctctcagcctctcgcccagagtcccggaaggcatcgggcacctatgcagggccacccaccagtgccctgcctgcccagcggggcctggccaccttccctagccggggagccaaggccagcccagtggcagtgggtagcagcggggctggggcggacccctcctttcagcctgtcctgtccgcgcgccagaccttcccaccaggacgagcagcaagctatgggctaactccagccgcttcagactgccgggcagccgagaccttccccaagctggtgcccccgccctcagccatggcccgctcacctaccacccacccgcctgccaacacctacctgccccagtacggcggctatggggccggacaaagcgtattcgccccaactaagccctttacaggccaggactgcgctaacagcaaggactgcagcttcgcctatggcagtggcaacagcctccctgcctcacccagcagcgcccacagcgccggctatgccccaccgcctaccgggggcccctgcctgccaccaagcaaggcctccttcttcagcagctctgagggggcccccttctctggttcagcccccacgcccctgcgctgtgacagccgggccagcacagtctcgcccggtggctacatggtacccaagggcaccacagcctctgccacctctgcagcctctgccgcctcctcctcctcctcctccttccagccctcgcccgagaactgtcggcagtttgcgggggcttctcagtggcctttccggcagggctatggaggcctggactgggcctcagaggcctttagtcagctctacaatcccagttttgactgccacgtcagcgagcccaacgtgatcctggacatctccaactacacaccgcagaaggtgaagcagcagacggctgtgtcggagaccttctctgagtcatcctccgacagcacccagttcaatcagccggttggtggcggggggtttcggcgtgccaacagcgaggcctcaagt

SEQ ID NO: 893 - DNA, 2300 bp, Homo sapien
ctgcgaccagtggtgcagctgattgacatcatgaaggacctgacacgcctctcccaggacctgcagcacagtggtgtacacctggactgtggtgggctccgactgagccgcccgcctgcaccgccacccggcgacctacagtacagcttcttctcctcacccagtttggccaacagcatccgtagccctgaggagcgggccaccccacacgccaagtcggagcggcccagccatcccctctacgagcctgagcctgagcctagggacagtccccagcctggccaaggccatagtcccggagccacggctgcggccacgggtctgcccccagagcctgagccagacagcactgattactcagaacttgctgacgccgacatccttagtgagctggcctccctcacttgcccagaggcccagctgctagaggcccaggccctcgagccaccatcgcccgagccggagcctcagctcctggacccccagccccgcttcctggacccgcaggcactagagccgctcggggaagctctggagctgccacccctgcaacctcttgctgatcctctggggctgccgggcctggctctccaggccctggacaccctgcctgactccttggagtcgcagctgcttgacccccaggcactcgaccccctgcccaagctgcttgacgtcccaggtcgccgtctggagccccagcagcccctggggcactgcccactggccgagcccttgcgcctggacttgtgctcaccgcacggcccccccgggcctgagggtcaccccaagtacgccttgcggcgcactgataggccaaagatcctgtgtcgccggcggaaagccggacggggacgcaaggcagacgccggacccgagggccgcctactgcccctgcctatgcccacggggctggtggctgccctggccgaacccccaccaccaccgcctcctccaccccctgccctgccaggcccaggcccggtctcagtcccagagttgaagccggaatcttcccagaccccagtggtctctacccgcaaaggcaagtgccggggcgtgcggcgcatggtggtgaagatggccaagatccccgtatcgctggggcggcggaacaagaccacatacaaagtgtcttccttgagcagcagcctgagcgtggagggcaaggagctgggcctgcgcgtgtcggctgagcccaccccgctgctgaagatgaagaacaatgggcggaacgtggtagtggtcttcccacccggtgagatgcccattattctcaaacgtaagcgcggccgccctcctaagaacctgctgctgggtcccggcaagcccaaggagccagctgtggtggcggccgaggcagccactgtggcagcggccaccatggccatgccagaggtaaaaaaacgacggcggcggaagcagaagctggcatctccccagccatcctatgcagcagacgccaacgacagcaaggccgagtactcagacgtcctggccaagctggccttcctgaaccgccagagccagtgcgctggacggtgctcaccgccccgctgctggacacccagtgagccggagtcggtgcaccaggcccccgacacccagagcatctcccacttcctgcatcgtgtgcagggcttccggcggcgtgggggcaaagcaggcggttttggtggccggggtgggggccatgcggccaagtcagcccgatgctccttcagtgacttctttgagggcatcggcaagaaaaagaaggtggtggccgtggcagccgctggggtcgggggcccgggccttactgagttggggcacccacgcaaacggggccggggggaggtagacgctgtgactgggaagccaaagcgcaagagacggtcccggaagaatgggactctgttcccagagcaggtgcccagtggcccaggctttggggaggcaggtgctgagtgggccggggataagggtggtggctgggcccctcaccatgggcacccaggcggacaagctggccgaaactgtgggtttcaggggaccgaggcccgggcctttgcctccactgggctggagagtggagcctcaggccgtggcagctactacagcacgggtgcaccctcaggccagaccgagctcagccaggagcgccaaaacctcttcaccggctactttcgctcgctgctcgattcggatgactcctccgatctcttggactttgccctctcagcctctcgcccagagtcccggaaggcatcgggcacctatgcagggccacccaccagtgccctgcctgcccagcgggg

SEQ ID NO: 894 - DNA, 2300 bp, Homo sapien
atcacttcaggcccaggctttggagctgcagaatctctaatgactttagccactacttttatgagcatctgaccttatatttcccattcaatgaataaatctttgaacccaagtcctaacttgtctgcaaggagaagctgctccaagatgagggcctctccagtcggtcatggcagccccatgatgccaaatcaatagtgtcccgtttagagccctagacctctcctattactgctgcacacaccctctgccaagggccaatagagagtgttccccagatcccctctcttgtcctctgggggtactggactgccatagagaaggagcttggaaggagtgaaggtgtggggaagatagtgaccagggagttgcggttggcaaaatgtcaccagctgcctttgtcacacactggccaacaccctgcaaggccaaaggaagagtcagaaacaggtaggccagagacaaaggcactgctctaggaacttcagacctggagcaagatagacaaggccagcagacacagggtgtggaacatcagacacacagatgaggtggtccagtgaggtgggaccgccgcagggccagtcagggccggcgttggtagacacctaggacacaggacacgacagccactatgcattattcatctccgtgtcccttgcaagccctgcatacctcagttaacatttgttgaagtgccaagaaaggacacacagacacagggagagaaggtcagttacagaaatggagggagtcacaactccttgtcatagcccaggggttaagcttgtggggtttggagttagtcagaccctggttcaaatccagctgggttcagccacttgctaactggagaacctggacctcagtgcccccatctctaaaatggaaataacagcactattttaccgcagcagttcagccatctccgggggcggtaacaaggcccccaagcagcgcacattcccatctgtgggataggctaggcaggggctggagaacacatgtgacctgaagaggaggtaggtgaaagtgctgagcccagcccccggccgcggcaggaggtcagcaccgttcaatctgaatcctgcttcctgacacaacgcaaatgctcagcagaattcggaaaagggtgtgtgtgttctatctgcggattatccaggacttttgagccctcgccgcccttggacatataggaaagctgggagttgcaagggcgaaaccgaggtcggagtttgagaggaggggtcactgagtgaggaagcagcgctggctgggtctcccccgctcccccgccccagcagccctcccgccatatatacttgagctttactcaataagaaaccttttcagaaaaggataacgtccccagattgagagagccggtcctctcctctgccctctccccctcccatttaattgggacgccccagaaagtcgcagcccctttggctaatcccctggttccctattccactcccattccactctcagaccccgccccttcactcccacccgcaacctccgctcgatccagagccccccggtggagacaaggaacacagggaccattcttaacccttggggaggatcttcgcccgttggtaaacgaggacgcgctccagccagacgagccccaggcgcggggtccccggggctcctggccgcgccgtcggagcagccggcgcggccccgccctccccgcgcgcggagcggccggggcggggactacaagtcccggcgtgccgcgcgcgcgctcccccctggggttccggatggtgagcggcgaaggtaaggcgagctcgcagaggcagcggcggcggcggcggagacggagagaggcaggcaggcagggcgagggcgagagacggagggagggagcgagcgaggcggaccagacagacagacaggcgggcgggcgggcagagcgagccacccgccaggctgcgctcagccccgctcgcagcggagagagcagaaggcaggaggagggaggggaggagggggagggagggagagagggaatccagctaccaccacccaaagccagcgtctgctttctgtcctcatttccttttcccacccagcttggagagcagagaaaggcagagagagcgagaaatagagacagtctgagagacagacagacagccagagagagcgggagggaggagggcggaggaggaggagcaggaggactacgcggggcgcgttccctcccaggtttgctattggggggggtgggggcgggggtgtccagggctgggagagtgtgtgcgcggcgggagggcgaggggggc

SEQ ID NO: 895 - DNA, 2300 bp, Homo sapien
aggataccgctgccagaaaagggttggctcattgtggggcttcccaaggtactctggtagccccagcttctgacctggtcctttctctggtatggggataggaggagagctccggaggtaggtatccactctcactcagccaccacatggaaccctagggtggctgggagcacagcagggttcagaggaaggactgttttttgtttgtttgtttgtttgtttttgagatggagtcttgctctgtcacccgggctggagtgcagtggtgcgatctcggctcactgcaagctccacctcccaggttcaagtgattctgctgcctcggcctcccaagtagctgggactacaggcgcccacctccacgtctggctaatttttgtatttttagtagagacggggtttcaccatattggccaggctggtctcgaactcctgaccttgtgatccactcacctcggtctcccaaagtgctgggattataggcgtgagccactgcgcctggccggaagaactggtttttaggagatggtgactggggactgtgagggagctgagcatggcttgatagaaatcctgttagagagatgattataatgttcaaaatcatgtgtgtctgagtgtgttcgtctgttaacctggcaggcaccccatgtatatgtgcatgtgtatgtgtgtgtgctattgtgagcttgggcttgttagagcctgtattggcgtgtgatggggttggcacgcacactcatgcaaatatatgctgtgagtgttattgtgtgactgtgctggtgggtcaggtgagtatgagtgtgaaagagagctggtgtgggtggtttgccctatgtgacgggggttgtgtaagtgtgccaggggtgataggaaggaaagtgaaggcagaagtcatgctggggcagagcccaggccttctggcttcctgaagagggcaggagctgggcagctgctgacagaaacattggcagagacttcatcttccttgtccttctgtctcaccctcaggtctctgacccctcccaaggatcatgccgcagccccactgacccaggagtaggggcctaaggggtgagtggggtagactgagggctttcagggtcaggaaacagggtgggggtggccttcctgaaccccacaactcctcacagcctcctcctcctacaaggaccctgttgctaggtaacggatgggggagccagaatgaggcagcttgagaggctgaaggctggacccacgacaggaaatggccttgatccccctctgcagtgactctccaggtgcagacacacagcctcacacacactcacacacaaacatgcgcagatatatagacatacatgcagagatacacacatccagagacaggcacactgctcccacacagagataggtgcacattcatagacacacagacacagagacacccactcacacagacaggcacacacatactcacacagaaacacatgcacacaaacacggtcttacagacatatacacatgcagccaaacacatacacagagacttttatacactctcgtatacacacaaacctgcacacacagacagacatccacaaagagctgcacacacatgcatacccacacaggcaaactcacccatacttagagacacacaaagacgcacatgtacaagcacactgaaagagtcacagaaacacaacatatcaaagcaataggacccaacctgagcaatatagcaagaccttgtctctactaaaaatcaaacaaattagccaggggtactggcacgcacctgtatagtcccagttcttgggaggctgagaccagaggatcacttgagcccaggagatcaaggctgcagcaagctatgattgtgccactgcactccagcctgggcaacagagtgagatcttgtctcaaaacaaaacaaaaaaagcaaagcaataggaggcaaaaatatgcaaataagcatagcaatatcccaatgtagaaagccagccccagagatatagacatgagccaatgggaagagaagcactgaggggggacatactgtgaggcagactgaacggtacagtaggtggcccagttccgcctttatcccttacagggaggaccccaatctaggcccaagagggaaagccacgtgcctgtatgagcgtatgagcatgtgcatgcgcgtgtgtgcacagggtggtgcacctggcaggggtccttgagtgaggcatgccccattctgtagcagggaacctggaatgggctgtgtgttctgcaagaaattggagccggtggccacggccaaggaggat

SEQ ID NO: 896 - DNA, 2300 bp, Homo sapien
ttttttttttgagacagagcttcactgtcactcaggctggagtgcagtgacaggcgtaagccaccgtgcctggccaatttttgtattttttgtagagatgggatttgccatattgcccaggttggtctcgaattcctggacccaagcaatcctcttgccttggcttcccaaagttctgggattacagatatgagccactgtgactggccaaccctgggcaggtttccaaacctctctgtgcttcagttgcctcatcagtaataataatacttaggccaggtgcagtggctcacccctgtaatcccaacactttgggaggccaaggcaggtggatcacttgaggtcaggaattcaagaccagcctggccaacatagtgaaaacccatcgctactaaaaatacagaaattagcctggcatggtgttgggtgcctgtaatcccagctactcaggaggctgaggcaagagaatggcttgaacccaggaggcggaggttgcagtgagctgagatcatgccattgcactccagcctgggtgacaagagtgaaactccctctcaaaataaataaattaataataataatactacttaaatcatagggttgtgtggataaaatgagataatataggtaaagtgcttaatgcagtggccagcgcatatagtaagcgctataaattttgtatttgctattcttttatagaggatgtgtgtgtgtgtgtgtgtgtgtgtgtgtgttcatgtgcatgcacatctatgtgcagacggatgagggctggaggtgtgtgtatatggggtgtgtgtacactagaagatgtttgtgctaggaatctgtgcagaggagcctggagcctgtgcatgaggcagctgaggtaatgtgccaactgagaaggggtctgaagggctgtgtggatctgggtatcagcatggtgcgccatttgaggtgtgtatgtgtgtcttcctgtgagaaggctttattctcacccttggtttttctgttttctttttaaaatagagacagggtcttactctgtctcccaggctggagtgcagcggtgcaatcacagctcctgcagcctcgaactcccaggcttaagcaatcctcccacctcagcctcccgagtagctgggactacaggtgggtgccatcaggactggctaattaaaaaaagatttttttttatagagacggggtgtccctatgttgctcaggctggtctcaagctcctgggctcaagcaatcatcctgcctcggcctaccaaagtcctgggatagcaggtgtgaaccactgtgcccggcctcacccttgtttttgtatcagccccatctctcttttcaccagttcctgaaatccctcccgctgggccctggatggcttccagtcctccacctctattttctgccctggctctaactagccctgtagcatcctggggcgttttagacacagtggtttcatcccagggaggggtcccggggcaaaggtctcaggcagggcccagtgaacaggggctattttagggcaggcttctcaccacagcccgccccacagttcaccacatgggtgtgatgcccccacccccacccaatacacacatgagagatcacttagagcaaagggtgagaggggcaggtggggctagggtggagaccaaagcactgatgtgacggaaccatcagccaggcaactggacctggtggatccaggaagactttctggaagaggtgagtggtgctaggtagaaaggataggacccagagagaagaggaagagaatatctgtaaggatgactggactggggatcgagagagagaagctgggggccctttcttctaggaccttggggcccctctggggcaaatcagggttcacaaggttggccccaccctaaactctccattctcacatcttaggaaaccaagccctctcaccagtcggttcctctctgagtgttgcaatggcaatgtttctggcagggtgtgggggacccttgctcaatgacctcctgccctgttgctcagaggataccgctgccagaaaagggttggctcattgtggggcttcccaaggtactctggtagccccagcttctgacctggtcctttctctggtatggggataggaggagagctccggaggtaggtatccactctcactcagccaccacatggaaccctagggtggctgggagcacagcagggttcagaggaaggactgttttttgtttgtttgtttgtttgtttttgagatggagtcttgctctgtcacccgggctggagtgcagtggtgcgatctcggctca

SEQ ID NO: 897 - DNA, 2300 bp, Homo sapien
agagattgtataagtctatgttctcctatagaggagagctctatgtgggtccatgtcaccggagagggctgtgtatatctgtgtgtgtgtgtgtgtgtgtgtgtgtgtgtgtgtgtgtgtatccctacatggggggtggggggacagtgtgggggcatccgcatttgtgcatgctagcaggaatggctgcatctgtctgtatctgtgataggcaatggagagaaatgcttgaaagctcagattctggagccaaacaccaggatacatcatgtctgtggccttcttttttgagacagagtttcactatgctgcccaggctggagtacagtggcatgatcatagctcactgcagcctctatctcctggtcttgagtggtcctcctgcctcagcctctcgaggcacgtgccaccatgccaagctaatttttggagtttttttggtttttttttgttttttttttttttgagacagagcttcactgtcactcaggctggagtgcagtgacaggcgtaagccaccgtgcctggccaatttttgtattttttgtagagatgggatttgccatattgcccaggttggtctcgaattcctggacccaagcaatcctcttgccttggcttcccaaagttctgggattacagatatgagccactgtgactggccaaccctgggcaggtttccaaacctctctgtgcttcagttgcctcatcagtaataataatacttaggccaggtgcagtggctcacccctgtaatcccaacactttgggaggccaaggcaggtggatcacttgaggtcaggaattcaagaccagcctggccaacatagtgaaaacccatcgctactaaaaatacagaaattagcctggcatggtgttgggtgcctgtaatcccagctactcaggaggctgaggcaagagaatggcttgaacccaggaggcggaggttgcagtgagctgagatcatgccattgcactccagcctgggtgacaagagtgaaactccctctcaaaataaataaattaataataataatactacttaaatcatagggttgtgtggataaaatgagataatataggtaaagtgcttaatgcagtggccagcgcatatagtaagcgctataaattttgtatttgctattcttttatagaggatgtgtgtgtgtgtgtgtgtgtgtgtgtgtgttcatgtgcatgcacatctatgtgcagacggatgagggctggaggtgtgtgtatatggggtgtgtgtacactagaagatgtttgtgctaggaatctgtgcagaggagcctggagcctgtgcatgaggcagctgaggtaatgtgccaactgagaaggggtctgaagggctgtgtggatctgggtatcagcatggtgcgccatttgaggtgtgtatgtgtgtcttcctgtgagaaggctttattctcacccttggtttttctgttttctttttaaaatagagacagggtcttactctgtctcccaggctggagtgcagcggtgcaatcacagctcctgcagcctcgaactcccaggcttaagcaatcctcccacctcagcctcccgagtagctgggactacaggtgggtgccatcaggactggctaattaaaaaaagatttttttttatagagacggggtgtccctatgttgctcaggctggtctcaagctcctgggctcaagcaatcatcctgcctcggcctaccaaagtcctgggatagcaggtgtgaaccactgtgcccggcctcacccttgtttttgtatcagccccatctctcttttcaccagttcctgaaatccctcccgctgggccctggatggcttccagtcctccacctctattttctgccctggctctaactagccctgtagcatcctggggcgttttagacacagtggtttcatcccagggaggggtcccggggcaaaggtctcaggcagggcccagtgaacaggggctattttagggcaggcttctcaccacagcccgccccacagttcaccacatgggtgtgatgcccccacccccacccaatacacacatgagagatcacttagagcaaagggtgagaggggcaggtggggctagggtggagaccaaagcactgatgtgacggaaccatcagccaggcaactggacctggtggatccaggaagactttctggaagaggtgagtggtgctaggtagaaaggataggacccagagagaagaggaagagaatatctgtaaggatgactggactggggatcgagagagagaagctgggggccctttcttctaggaccttggggc

SEQ ID NO: 898 - DNA, 2300 bp, Homo sapien
agtgggtagaggcagcaatcagggaaggcctctagagcagatgcttgtgagtcagaccttgaaggatgacagagcgagcatgatagattggggggatcccccaagagcagggaccagtctctcatctctgtgttccctaaggctggcacctaagacacaattataaacgtttgcttgtttgctaattgaacatgtgggccgatggccaggcagggagcatttgatggcggaggtgatgctgcccggctagggtgaagccactcttccagagaccctgcactgccactggctcctctgtcttcctcctcatccctcctcccatttcctaagagaaaagcattcttatctccatcccaccactctgttaccccaggcacattgggccacacttgagcatgtgtacgcatgcacacacacatccccacatgcccctgcccatacaaagaaacacacttgcctgcacaccatggcctagttgttgattccaaaagcaaagtcatcatgtcattgctttctctctctctctctctctcacacacacacacacacacacacacttctgtgtttacgcacactctccctgcctctcaccacatcccaacagacacatccttctccaccaaacagccctccccaccacacctcttcctctcctggacaggagggatattccgggttcttgctttaaggctgaagtaacagtggtgggagtggggactgaaccccagattgaggaggggtcagggatccctatcagacagagagactggaactgatagaggatgctaccgtttctctttttgtttttaaaaatctttttccacatgttctaagatactcagtttttcttcctttttttttttttttttttttttcttgagacggagtctcgctctgtcgcccaggctggagtgcagtggcgccatctcggctcactgcaagctccgcctcccgggttcacaccattctcctgcctcagcctcctgagtagctgagactacaggcgcccgccaccacgcccggctaattttttgatttttagtagagatgggctttcactgtgttagccaggacggtcttgatctcctaacatcgtgatccacccgcctcggcctcccaaagtgctgggattacaggcgtgagccgctgcacccggccttttctttcttttttttaaaaaaagtcattttctgcaacaaaacccacattctttttttgtgttttttttttttaaggcagggtcttgctctgtcacccaaggtagagtgcagtagctcaatcacagctcactgcagcctcgacctgcctgactcgagggatccttccacctctgcctctgcagtagctgggaccacaggtgcacaccaccacaccgagctaacttaagaaaaattttttttggtagagatggtgtctccctatgctgcctaggctggtctggaattcctgggctcaagcaatcctcccacccaacctcccaaagtgctgggattacaggctgagccactgcccccagccagttactcagtttttctaaaacttgggtgcctgggggaggctgacacccttcccactcctctgaaaggcagtttcctaagggaagggtcttctgctgctcaccacccttaacagccctgtgtccccagtgctcagcccctgaggaagggaaggcgtgctgacagggtccatgtgatccatgtccagtggctctggtgacagcagtctgaagtcaactggctgtgagaactcgagtaaggccagtcccgatctggtcctcagtgatggagaaaagcccctcttaacctccaattcaatgatcctaaaagagcaggtgcttcgggggtgctgaaactgcgcttttggagggggcttttgggaaggccgggctggggactcaggtctggagggtgacagagccgacctcccgtaaaccagggaggaggaaggtgggggcgggtgggcctaggatctgggggcgcctcctcgctgcggggagctggcttggggctagggcgtgactgtctccctgccaccatcaccgcccgccggccgtgactgcaataagagaagtccgaggcggcttcctcctccctgcccagcaggggcggcggtcagaggcgggcagcaccccagttctccccgcacgccggcactcgcggctgctggagccccggctggctcaccccggggccgggcagaattgggctccaggtaagcgacagcgtcgggtggggactgggcaggtcaagcagtgccctccccctcgaggctctggagagaggactgggggtacacgggaa

SEQ ID NO: 899 - DNA, 2300 bp, Homo sapien
ctatagtcccagatacttgggagggtgagttgggaggatttcttgagcctaggaagtcaaggctgcggtaagctatgattgtaccactgcactccagccccggcaacagagtgagaccctgtctctaacaaaccaaccaaccaaccgacaaaacaacaaagaggccaggcacagcagctcacacctgtaatctcagcactttgggaggtagaggtgggtggatcacctgaggtcaggagttcaagaccagcctggccaacatggcaaaaccccatctctactaaaaatacaaaaaacattagccgggcatggtggcgcgcacctgtaatcccagctacttgggaggctgaggcaggagaatcgcttgaacccaggaggcagaggttgcagtaaaccaagatcacaccactgcactccagcctggggaacagtgcaagactgtctcaaaaacaaaaacaaaaacaacaaaaaacaaagaacaaaacaaaacaaaaaatatatgatggaaatggtatattcaaggctgagcaaaggggtctaaaaggcttgagtaaattaaataaacagggagctcagagtcctgtggcgcccaactctgtttctctgggttttctctttgacccatatatatggcctcatggagtgttcccagcaaccaacagataatggaggaaaggagtcaaactcaattcacagataagtcagtataatattttggtatcagctggaaacggaccactctattacagccccatttgggggtggcactgaataatagtgaatcctcccagggggcagaactaggagcagtataccgtgttgttccctctgtatgcagagagagagagagagagatggactgaagtacagacatacaccaattcctaataagaggcaaatggcttggctggttggtcaaaggcatggatggaacaagattggaagattgggaataagcaggtgtgggttaggggcataagaatgaactctgaatgggcataaagcacctggatctctatgtctcatgttaatgctgaccagagatcatctgctgcagaggaggctctacagcccaatggccaggatgtcccatcctgtggatgtcagccagcctctaaacttagcctcactattgccttgcaatagacctatgagtgtccaaggtggtaaggatgggggttagaaatgagtccaacaacttgggctccctctcaccaaaactgatctggcaattgccaaaatatagccaatctgccagcagcaggtagcaatatggcaaaatttctcaatgagaatagccagccatctggtggcaggtcaattatttcagaccccttccacttgggagaaggcaatgattcatccttactggaatttctatgttctccaaatagaggttgcatttctgacccatagcacttcaagcatcaccatccaaaggctttaaagaatgctcagttcattacctagggccaggggacccatcttgaaactcaagatctatcatgatggccacatgaacacaggcttcactggtcttaccatatgcccatgacccagaagcagccagcctgagagaacaatggaacaaagtgacttaatttccaaagttctgggggtttataaacagcatatggtatgtcacatgactactgtgggattggaaaaagatcatgtaaatagagcactttgcacagaccctggcatgcagcaagtgctcaataaatgataggtgttgtttactaattggactgaatggtgaaaggcctgtgtgccccagggggagctggtgatcaggcttcactaagcccagtatggccgtggctctcatcatagtgtgacatgctttgaatacccttagcggctccaaaagtcctcagcttgaagtgcatttttctgccagcaggcagcacacaaatgttcccgctgggcggagctgggagagaggggaaaatgaaactctgcagagtgcaggagctgggagagaggggaaaatgaaactgcagagtgcagaaatagaaactccgacagggattggctgcctagggtgagacgtgggaggatccacaagtgatgataaaaagccagccttcagccggagaaccgtttactcgctgctgtgcccatctatcagcaggctccgggctgaagattgcttctcttctctcctccaaggtaaactcaggagctatgaagtgtgggcatcaagctgccaccctctgccaggctgcctgtctgcctgtaaatctcatgttctgagagccaggaggccccttctcctgggaggcagcactcctggg

SEQ ID NO: 900 - DNA, 2300 bp, Homo sapien
aaaaaaaagtatattcaccatgttgaacaaccgttacctctatctagttccaaaacattttcatcactccaaaagccccttacccattaaacaatttccccacattttcctccacgtactgtttttatttgtatttgcatatatattttgagacagggtctcactctgtcacctaggctggagtgcagtggcataatcatggctcagggcagcctcgactgtccaggctcaagggatcctcccgcctcagccgcctgagtagctggaaccacaggctcgtgccaccacacccggctaatttttaaaaaagtttttttgtagaaatggggtcccactgtgttgcacaggctggtctttttttttttttttttgagacggagtcttgccccgtagtccaggctggaattcagtggcatgatcttggctcactgcaacctctgcctcccaggttcaagcaattctcttgtctcagcctcccgagtagctgggactacaggcgcctgccaccacgcccgggtaatttttgtattttagtagagacagggtttgaccttgttggtcaggctggtctggaactcctgacctcaggtgatcctcgggtgattcacccgcctcggcctcccaaagtgctgggattacaggcgtgagccaccgcgtccggccgacccaggctggtcttaaatcccaaggctcaagtgatcctctggcctcagcctcccaaagtgctgggattacagttgtgagccatcccgccccgactcatgtactggttttgattctcacaatgacctcattgtacaattgagaaaaacgaggccgtgagaagttcagtgatagatccaaggtcatgtagttagttgtggaacagtgatttggaaactttgctttctgatcctaatgattaatgcacatctttgggggatcctacaaggaagcagccagatttgggttcagagagagtaaattttttttgttgaggcagggaaatagaagccattaagtcagtttttaattgtaaaaagcgcacgttgaggtaaaactgcaattagtcctgtacgggtggttggcagagccaagagtaacctatgcccaagagcagctacaaggcaggacttggataggtcagcagtgcaggaagctttgccaacacctcaagaacaagaagtctgtcattccttgggcagctcctatacatgccaagctggagccaaagagaggcaggggagcccggagggcgtggcttgccttccggaagtcaggcctcgtcaggaatcaccaggtggttgcttgcgagagaagctgggggtgaaaccggagaaaacaaagtaggaagcaggtctgggccaattgcagcccactctgatgggggcctgcaggccaccggacgcctgaatatctgtccaatccctcctggaaggactgccatctctttagtccctcttccgcagcataggggtgctctctctggggctctccttttctctcctaaggcccacagccccacagttccctatttaggtgtcttaaattgaggacacacttctaaattgtccctcagagtctcgtctcctcctttgagcgaggctgggcgggctcctcctgctccgattatgaggaacttctttcccaagctccccaccttctttgggcttggacggctgcagagttccagttaactgtgcgccgccttcgttccaattgtacccctcgtgctcccagagggcagctccatggaaaccaaaacatcacaaatccccgaaggtatcgcgagaagcgcagatgcgcctgaggccgtggagaggcggagcgagggcgggaacgctgagcaagtagggcggagcctaagctcttccgaggtcccggccgggagcctgtcccctccaggtggcgcccccgcgtgactgcgctttacataatcgcggcctggagcgtcacagtggcgtactccaggccagaccgaatcagagtgggcgaaagctccgtgttccgccccttcccacttgatcgacgtcaaagcccaccagtgagcgggcgtctagagtcgccgtgcccgccccagcccgcccgggtccgccccgacccgcctgcgcccgcccgcctgccgcagccagcagcctgcagccgccgccgggttgtgcctcagactgtcagataaatcggcgggccgggccggcgggtcggtgagcgcggcccgggccggacatggcggcgctctacgcctgcaccaagtgccaccagcgcttccccttcgaggcgctgtctcaggggcagcagctgtgcaaggtgcgcgggctggggcg

SEQ ID NO: 901 - DNA, 2300 bp, Homo sapien
gatcagcctgcctcagcctcccaaagtgctggaattccagttgtgagccaccgcgcccagcctaaaaaccacttttattttacatggagaaagaaaacaatatttttaattcctaaaagaaaaatatctttactgaacttcactttaaatagtgtcaaatgtaaatgaaaaaaatcatcagtactattatataggtaaaaaagtgcaatttacatgacttgcttaagatttgacataaaactacagattctaagaaacggtaaggttttataataataaccaaaacaggctgggtgcggtggctcacgcctgtaatcccaacactttgggaagccgaggcgggtggatcacctgaggtcaggagttcgagaccagcctggccaacatggtcaaaccccatctctactaaaaatacaaaaagtacccgggcgtggtggtacacgcctgtaatcccagctactcgggaggctgaggcaggagaatcgcttgaacccaggaggcggaggttgcattgagccgagattgcgccattgcactccagcctgggcaacagagcaagattctgtctcaaaaataaaataaaataaaataaccaaaataagagtccccaaatgtcatccgtctctttctagagacagggaaaaaaaatgctctcataaattctccaacgaaaaatagagatagtcacccttaaaaaatcctaaggctggtgggtggattgcttgagcccaggagtttgagaccagcctggacaacatggccaaaccccaacactacaaaaaatataaaaattagctgggcgtggtggcgcacgcctgtaatcctagctactcagaggttaggtggtaggacctcctgagcccaggagaaggaggatgcagtgagcagagatcgcgccactgcactccaacctgcgtgacagagcgggaccctgtctcaaaaaaaataaaataaagaaaaaatcctaaggccatatacaggctcattcactttgggtctcctttcatccaggcaagcagctttctgtctttgcattttccaaagactacaaagcaggctggggtggggtggggtggggtgtagaacacaggaaacgcagccagttccccttcacttctcactatcttgatctcctcccaaaccaaaatcctatgtctttccttttaacataggcttacaaaaatgcagttttctgtgggaacattgaggtcatgcattccaaattacttaagggaacgatttttaaattttaggaatctagttctccaagatatcccggcttgggatatagatgaacgagctatttgggagagatttagacgagaatgaattttagagaagtagcgaggtgaggagagagtcagcttagcgtttgggttttgcagtcaaatttcagcaaggcgaactaacctcgctggtcttaattttctcatcggtaagagggaaaataataatgcttactttgatgaattactttacttcaacatttaaaaaaccgactctccgttatctattctaatgataaaaatatagatagagcatcgtcccctgctgtgaaaaatcttatgaacaagtgaattgcggtgaggattcacatagtatgtgctcaataaacattattttattgtttagattagaagaggggtggagggagaaatgaaagtggtttggaaaccccaaacactaccaaagccctggggatggaagtagagaggaatttcgggttacgatttggttccgggtctgagtttcaacgttgaattctcccatatttgggcctgaattctcagaacagaataggatgtaagggctgagatcatctggtacagttttatgcaaatcgaaaattcttgcctcttgtcactgtgccctggcgagaaacaacacctccacccaagctcatccaatctcagccccaactaggtgacgtcatctccccgccctgcatccccaagcctcggggagtcctgtctctaagctacagtcccagctccagtcccagctccagtcccagcggcgcctgcgcactttggaccggggcggggaggacgcgtgcgcgccgcgtgagggcggggctagtgcgcacgcagccttagctccttccccgcccttgctcttcccagtttctccgtcagcctgcgggtcccggctggcggctgcttccggtaggagagcggtgtagagcgagcaggtctcagctcctcgtcatgtcatacggtcccttagacatgtaccggaacccggggccctcggggccccagctccgggacttcagcagcatcatccagacgtgcagcggc

SEQ ID NO: 902 - DNA, 2300 bp, Homo sapien
tagcatggaagcaagaaaagaactactttcatcatagattcctcaacttgctgagcagtgcctctttctggatgaacaggaacttagcaattgatttatttaaaaaaggaaaaactggtcagataatcctcccaacgcgtctacaaaagtgaaaaagaggggcatcagttgcatgctaataataaatataattataccaacatcaaagtgtaagagagaatagtgactcatgagcatggccttcggcatcatataggtttaggtttttgatcccactccacttgttctagggtgaagctgggtaactcaatctctctaagcctctcctctggaattataataatacctaactcaagagtattgtcaggattaagtgagatgatccatataaaatacatacttgcccaggtaactgctgaacagacaatgccattaaaaccagaggccctcccgtccaggagggaggtggggggggggtcagcccccgcccggccagccgccccatccaggaggtgaggggcgcctctgcccggccgcccctactgggaagtgaggagcccctctgcccggccaccaccccatctgggaggtgtacccaacagctcattgagaacgggccatgatgacaatggcggttttgtggaatagaaaagggggaaaggtggggaaaagattgagaaatcggatggttgctgtgtctgtgtacaaagaagtagacatgggagacttttcattttgttctgtactaagaaaaattcttctgccttgggatcctgttgatctatgaccttacccccaaccctgtgctctctccactcagggttaaatggataaagggcagtgcaagatgtgctttgttaaacagatgcttgaaggcagcatgctcattaagagtcatcaccactccctaatctcaagtacccagggacacaaacactgcggaaggccacagggtcctctgcctaggaaaaccagagacctttgttcacttgtttatctgctgaccttccctccactattgtcctatgaccctgccaaatccccctctgcgagaaacacccaagaatgatcaataaaaaaataaaaaataaaaaaccagaggccctgctaatggtctcttaaaaccagctggtgatctagggcaagcgagcaatccttatgcttccttgccctataaccaaaagcaaaaaatcctttttaaaaaaattaaccatttgagccaagcacagtgatgatttggacccctgctttctgactggacctgctcctggctcctgcttgtccagagttttcataaacagactaggtgacccctaatgcagattccctgacaatctacaggcctaaacgtgaattagaaaaaagtgagtagggtgccactttttggagaagggctgaagagaaacaataatcactccaatctccgagttttgccctttagcttctccgctttgagggcaaaaggctgacggtcttaacctaaactctggaggaggatgtagtccccagattttttctttctttactttttttttttttttttttgagacggagtctcgctctgttgcccaggctggagtgcaatggcgcgatctcggctcactgcaacctctgcctcccgagtgcaagcgattctcctgccttagcctcccaagtagctgggattacaggcatgtgccactacactcgactaatttttgtatttttagtagagacggggtttcaccatgttggtcaggctggtctcaaactcccgacctcaagtgatccgcccgcctcagcctccgaaagtgctgggattacagacgtgagccatcgcgcacggcttagtcccaagattttagagccaagaagcgtttgcaggaggacgtagggaaagactgactcccctccctacaaagccccttttcctttgacacctcctggccaaggaaaaccctaaccactggagacttccagagacggccaactcgcacaaacgctgaaaaaaaaaaaatcccaaaagctcctctgtccccactagaagcaccgccccccgtacgggcgtgcgtgagcgtgcgtacgcacaggctgctgggatgccgcttttcccttctcggtcttccagtttcccggcgtgcttagggcgcgccaaatgggagggggagacgcaagatggcggcagccgcgaactccggctctagcctcccgctgttcgactgcccaacctggtgagtggcggggcggccagggctagagtggcccggccggagctagcctgggctggaagggcggctctttttttacttttctgctgcgag

SEQ ID NO: 903 - DNA, 2300 bp, Homo sapien
acaaacgctgaaaaaaaaaaaatcccaaaagctcctctgtccccactagaagcaccgccccccgtacgggcgtgcgtgagcgtgcgtacgcacaggctgctgggatgccgcttttcccttctcggtcttccagtttcccggcgtgcttagggcgcgccaaatgggagggggagacgcaagatggcggcagccgcgaactccggctctagcctcccgctgttcgactgcccaacctggtgagtggcggggcggccagggctagagtggcccggccggagctagcctgggctggaagggcggctctttttttacttttctgctgcgagccgaacggctcagaaaccccggaatggttgaggaaaaactgtttgctgcaccgggccgggcgacgtgttgaagaaccgagagcctggagcccaggcccaggaactgaagaaacccggggttgggggctcaaaggcgctcacttaggcagcccctttgagcgattagccagtcgccggagcgcttcgaggccttggcccgaacttacgcccaactcttgactgagtgcctggtgctctcgtggagcatcgcatctggccccttcctgtacgtcccgagcgcgctcgagccagccccggccccaaccctacctccaagccccgcatccctctgtggttgctgcatccctcgtgcggcacttgtctgtctgccacagagaatacgagggtaggttagcgccatccctgccctcagggagctcccagtctgtggcactagtaggcattagtaatggttggcatgaaccctttttatcccttcgaaagttcttgggaataatgaaataatttaatttggtctttgagtagggtacaagttgaataaatatgaattaccttacaaggaaacgcttctgaattaagagtttttttctgctgtagctcatcgcagtgtattgtttgttgcttgtctctgtctcccgttgtattgccatcctcaagggcaaagactgcatctttgtattcccagctcctaggcctgagtcaggcacatagtaggaattcagaaagtatgttttggatgtaacattcctcctttttcctggacaaaatggccttttgtccggtgcattgtcctttccatagaggaggggttggggcaggattgtgagatgactgtgttgaatcttcagttagctagacaaggatacgttttttcatgtgcaaatctaaaggttctagtgaggtggttcttttttctaacttcaaattagcaaacccaaaaagcaagcaaatgtgtggctattttctggatcgctttgcacttttgtagtagttgcttcagtctacaaattctgtatccattttgatccctcgctgtattgatttcaaatttgggccgagatagcaaacatagttagaaagcactgtttttgagatcacctaccctttccttaggatctggtaggtaccaggcaccgttaggtgctttgacatatgagtctcccttgaatggtatggctgtaggatatagaggaaacgtcccctaatcatgctgttgtagaaagacctgtttcaagggtaacatattcatttggtacctggtttcatggggcatgattttgaattgccctagttccctaattatgcacctctgatttggtttcagagctcaggacagtactctttgcttactctgtgatgagactaatcttgatgagccccaaacagcaactaatttattcggtctttatatgatattggagtaggggtggatttcagattcaaactccaggtgactagaccaccccagctatcgtacttgcactctctatgcagttctttctctgaggtgaagatccagtgttaaaatataggtttcttggtgctgctctaaatacagatctactaaaatctgttgcagagcaattgaatcactagggaagtaagtgtcaaacgtagaatggagctgtaataacagtgaagtggatgacatttctgcttgaacatgaactaattataggctggtaggagagctgcaatgttgaatgggacaatggttgtaaatagcatttataaacccatcctgaaaatgcttttttctatttttatttttcagggcaggtaagccccctcccggtttacatctggatgtagtcaaaggagacaaactaattgaggtatggaaatacatgtcttacttttttggctgccacactaaagatttttgccagtgactcacttttccaccccctctcctgtgctttgttttccagcaatgctactttctttcatcctgattttttttttctgttaaaa

SEQ ID NO: 904 - DNA, 2300 bp, Homo sapien
tatttttagtagagacggggtttcactgtgttagccaggatggttttgatctcctgaccttgtgatccgcctgcctcggcctcccaaagtgctgggattacaggtttgagccaccgcacccggccagcaagttttttataaagctaaatttagctcaggtctagcacggtggctaacaccggtaatcccagcactttgggaggttgaggctggccattcacctgaggtgaggagttcgagaccagcctgggcaacatggtgaaacttgtttgttttgagactgtctcaaaaacaaacaaaaatactttgggactatggcagcatgattagaatagaaataggtgtttacacttcattcctttcccaaatatacatttgaatgtttattttctgagaagcaatcttattacaatttttttcggtttcactaggctaaaagcaatcttgttaccttatagacatgcattgtgcttcttgtttcctaattgatctaaaattaagatccaacagaaccttttttcagaagacagccactcttcatacaattgttgatctcaggccaggcacggtggctcacccctgtaatcccagcactttgggagtctgaggcgggtggatcatgaggtcaggagatcaagaccatcctggctaacacggtgaaaccctgtctcttctaaaaatacaaaaaattagctgggcgtggtggcacacgcctgtagtcccagctactcgggaggctgaggcaggagaatggtgtgaacccgggaggcagagcttgtagtgagccgagatcacgccactgcactccagcctgggtgacagagactcgtctcaaaaaaaaaaaagagttgttactgtcttgagggcaggccacttatatctaatagaattaagaaaagttgggccgggcgcagcggttggctcatgcttgtaatcccagcactttgggaggctgaggagggcagatcacgaggtcaggagaacgaaaccatcctggctaacacggtgaaacccctactaaaaatacaaaaaattagctgggcgtggtggcgggcgcctgtaatcccagctatttgggaggctgagacaggagaatctcttgaacccgggaggcggaggttgcagtgagccgagatcgcaccactgcactccagactgggcgacagagcgagacttagtctcaaaaaaaaaaaaaagaagttggccagccatggtggctcacacctgtaatcccagcactttaggaggctgaggtgggcagatcatgaggtcaggagttcaagaccaacctggccagtatgatgaaaccctgtctttactaaaaaatacaaaaagtaggccaggctcggtggctcacgcctgtaatcccagcactttgggaggccgagatgggcggatcataaggtcgggagttcgagaccagcctggccaacatggtaaaaccccgtctctactaaagatacaaaaaattagccgggcatggtggcgcgtgcctgtaatcccagctacttgggaggctgaggcaggagaattgcttgaacgcaggagttggaggttgcagtgagccaagattgcaccattgcactccaacctgggtgacagggtgggactccatctcaaaaaaaaaaaaaaaaaaaattagctgaacgtggtggtgcacgcctgtagtcccagctccttgggaggctgaggcaggagaattgtttgaacccaggaggcagaggttacagtgagccaagatcatgcaactgtactccagcctgggcaacagagtgagactccatctcagaaacaaaaaagagaaagaaaagttattttcataccaacactagacaaacactacattgaggagatgaattaccatccattctccaaaaaatgttattttagtaaattattctgagtactttatgttgaagaataatgggagatatttttttctccttggaaaggatttatttttctttttttgatgcaaggagatggagtttttactcaatctaatggaaaggaattttatctactcaagattctctatttgggagagtttttggtaaatgctgttgaaacaagatttaagtaatatttaatttaatatttatttagaaactgattattgatgagaagaagtattacttatttgggagaaaccctgatttgtgtgactttaccattgaccaccagtcttgctctcgggtccatgctgcacttgtctaccacaagcatctgaagagagttttcctgatagatctcaacagtagtaagtaactccctcccaattcacatgttacctttaggca

SEQ ID NO: 905 - DNA, 2300 bp, Homo sapien
tacttttatagtgacaaaaaaactaaatatggcattttgcacaatacctatatcatcttattcaatcctcacaatctgctgagatataattctttctcctattttattatttttttatttttttagagacaggttctcactctgttgcctaggctggggctggagtgcagtggcatgatcatagctcactgcagtctcgacctcccaggctcaagccaccctcctgcctcagtctcctgagtagctgagagtgcaggtgcatgccaccatgcctggatattttatttatttacttatttatttatttatttttgagatggagtcttgctctgttacccaggctggagtaaagtggcgtgatctcggctcactgcaacctctgcccccccgggttcaagcgattctcctgcctcagcctcccgagtagctgggattacaggcacgcaccaccacacccagctaatttttttttttttttgagacagagttttgctcttgttacccaagctggagtgtaatgatgcaatttcggctcactgcaaactccacatcccgggttcaagcgattctcctgcctcagcctcctgagtagataggattacaggcacgtgccaccacgcccagctacttttgtatttttagtagagccggggtttctccctgttggtcaggctggtctcgaactcctgacctcaggtgatctgtccaacttggcctcccaaagtactgggattacaggcgtgagtcattgtgcccagtaatttttttgtatttttagtagagacagggttttgccatattggccaggctggtcttgaactcctgacttcaggagatctgcccgcctcaccctcccaaagtgctaggattataggcgtgagccaccgcgcctggccttattttattttattcttttttttaagagacagggtcttgctagtttgcccagggtggtctaggactcctggtctcaagtgatcctcctgcctcagtctcccaaagtgctgggattacaggccacacccagcctcttctccctgtttttttgtttttgtttttgttttttgagacggagttttgctcttgttgcccaagctggagtgcaatggtacaatctcggctcactgcaacctctgcctcccaggttcaagcgattctcctgcctcagcctcccgagtagctgggattagaggtgtgtgccaccacgtctggctaggtttttttgtatttttagtagaaacgggttttcaccatgttagtctggtctcaaactcctgacctcaggtgatccacccgcctcggcctcccaaagtgctgggattataggcgtgagccattgcgcccggccctcttctccctgttttagagagtaagaaactgaggttcacacaatcaaagtgatttgcctaacgtcatacaacgagcaagaggagacctgggatttgaacctatgttggtctgactcctgagggacagggaaatggaaaaggcttatcccgagcctgtggggtcaggataagtggttggtccggcttctaagcagatttctctttagccttaggaagaatttttaactagaattggtgaggcccggcgtggtggctcacaggtggatcacacctgtgatcccagcactttgggaggccgaggtgggaggatcacttgagtccaggagttcgaggccaacgtagacaataattatcgaaagagtatgggagttctggagaggtaatgagatccccttcaccaggaggtttccgatagaggaccatggagtgtcctggagggacattcgggagccctgacactacatctccctcctcaaacccaaagggcagaggcatgtccctcctatgagacgcagaacaagtcgggccgcgtcccctttttctaactgggagcactgctgagggggcgtctgggacttcttcatcttcatcatcgccccttccccatagggtactgcagggggcggggggcggggcttcggcggggcggggctgcagggctcccgcgggctggcggggcggcttcggcgtgcggggcggggcatcggcggggcggggctgcagggctcccggggaccgcccgcccgcccctcagtctgagcccagagagccgcggggaccatggagccggtgccgctgcaggacttcgtgcgcgccttggaccccgcctccctcccgcgcgtgctgcgggtctgctcgggggtctacttcgagggtgagcgggggctggaacccctccgagcactcccttggtgtggggcgggggcagagacccggagaagacgttagcaa

SEQ ID NO: 906 - DNA, 2300 bp, Homo sapien
aaaattagccgggtgtggtggcgggcacctgtagtcccagctacttgggaggctgaggcaggagaatggcgtgaacccaggggctagagcttgcagtgagccaagatcgcaccactgcactccagcctgagcgacaagagcgagactccatctcaaaaaaaaaaagaaggttgaagggaaagcatgtgtgggaatgtggcgtagtgtaaattggaagattctgattggaaagaaaagatggcagcgggggccgggcgtggtggctcatgcctgtaatcccagcactttgggaggccaaggtgggaggatcacctgaggacaggagttcgagaccagcctggccaacatggtgaaaccccatctctactaaaactacaaaaattagctgggcatggtggcgggcgcctgtaatcccagctactcgggaggctgaggtggaagaactgcttgaatctgggaggtggaggttgcagtgagccgagactgtgccattgcattccagcctgtgcgacaagggcactccatctcgagtgaaactccatctcaaaaaaaaaaaaagaaagaaaagacagcagcgggagggaggccagccggcccagccaatgctctatgcctggggtgggggccactcctggggtggcatgcagtgccactgagctgcccctctccacagtgcgcaggaccattgtcaagatcccttctaccctggaggtcgacgtggaggacgtcaccgcctcctcccggcacgtccactttatcaaaccgctgctgctgagcgaggtcctggcctgggaaggccctttccccctgtccatggagatcctggaggttcctgagggccgccccatcttcctcagcccgtgggtgggctccttgcaaaaaggccagaggctttgcgtctatggcctagcctcaccaccctggcgggtcctggcctcaagcaagggccgcaaggtgcccaggcacttcctggtgtcagggggctaccaaggcaagctgcggcggcggccaagggagttccccacggcctatgacctcctaggtgctttccagccaggccggccactccgggtggtggccacaaaggactgtgagggcgagagggaggagaatcccgagttcacgtccctggctgtgggtgaccggctggaggtgctggggcctggccaggcccatggggcccagggcagtgacgtggatgtcttggtttgtcagcggctgagtgaccaggctggggaggatgaggaggaagagtgcaaagaggaggcagagagcccagagcgggtcctgctgcccttccacttccctggcagtttcgtggaggagatgagtgacagccggcgctacagcctggcagatctgactgcccagttttcactgccttgtgaggtcaaggtggtggccaaggacaccagccaccccactgaccctctgacctccttcctgggcctgcggctggaggagaagatcacagagccattcttggtggtgagcctagactctgagcctgggatgtgctttgagatccctccccggtggctggacctgactgttgtgaaggccaaggggcagccagacttgccagaggggtctctccccatagccacagtggaggagctgacagacaccttctattatcgtcttcggaagttaccagcctgtgagatccaagcccccccacccaggccccctaaaaatcagggcctcagcaagcagaggagacacagcagtgagggaggcgtcaaggtactagtataatcccagagggcacggaggggtcacctattgggatcactgcttctttgtcatgtctgcctgtcatgtttctcttgcaactgtgtaaacttgtagtttataaacttgcacactttgcacccattattctcattccacctcacaattaatcctgaggttggcatgattatcagtatcttatgattgagaaaacaaggacttggagaccctaagacttgcccagggtccctgttaataagtgggaggactgaacttggccatggacagtctaactccaagttcatggtgctttcctctctccactactgctgccttcactccctagttcgagcctcatcatttttctcctaaactacttcagcaggctcttacaaaagctgtcagaaaggcctcctaactcctttcttagtcattgatggacctcagctccatcttctggaaccttctgtggctgcccatcatcatgggatgatgcaaaccccttaacatggcatccagggtcctttataagctgacttgtcgcacctccccgacccatcttcctc

SEQ ID NO: 907 - DNA, 2300 bp, Homo sapien
gaggaggaaagaggaggaggaggagagaggaggaggagggtggaggaggaaagaggaggaggaagggggagagaggaggaggaggagagaggtggagaaaaaaagaaggaagggggagggagctgggcctgtaatcccagagatcgcgccattgcactccagcctgggcgacagagtgaaaccctgttttacacacacacacacacacacacacacacacacacacacaaagccaggcctgtggctcacgcctgtaatcccagcactttgggaggccgagatggcagatcacctaaggtcgggagttcaagaccagcctgaccaacatggagaaaccccgtctctactaaaaatacaaaaaagaaattagccgggcatggtggcgtatccctgtaatcccagctacttgggaggctgaggcaggagaatcgcttgaacccgggaggcggaggttgcagtgagccgagatcgggcaattgcactccagcctgggcaacaagagcgaaactctgtctcaaaaaaaaaaaaaaaaaaaagaaagaaagaaaaagaaaagaagagaaaaagaaaaaaaaggaagggggaaggagttgggggaggaagggggatgggtgggaggaaaggggagggggcaggagggaggtggagaggaggcaaccagggaaatctgtttaattaaaacacgcgatgcgatttctgcccagtgctctgaatgtcaaagtgaagagtaggaggaagaagaaagaagaaagcagggtgcagtggctgacgcctgtaatcccaacactttgggaggccaaggtgggtggatcacttgaggtcaggagttcgagaccagcctgaccagcatggcgaaacccccgtctctactaaaaatacaaaaattagccgggcgtggttgcacgtacctgtaatcccagctactccggaggctgaggcaggaaaatcgcttgaacccgggaggcggaggttgcagtgaggtgagatcgcaccattgcactccagcctgggcaacaagagcaaaactcagtttccgaaaaaaaaaaaaaaaggaaaaagaagagaagaaaaaaacacacagtcctggagcccaaaggccatgtctatcttacttaaccattgaatcccagtggccagcacagggccaggaacaaagaaggcataaacaattctatttttttttttttttttttgagtcgcagtctctctctgccacctaggctggagtgcagtggcagcatcacagctcactgcagcctggacaccccagggccaggtgatcctcccaccttagccaccccagtagctgggaccccaggcacttgccaccacaccagactaatttttaaaaatattttttgagagagggtctcactatgttgtccaggctggtctcaaacttccagcctcaagcggtcctcctgcctcagaccccatttgctgggtttacaggcatgagccacagcacctgctaatttttcttaaatacataaatgaacataaaattctaacaatgcatgagtattttgaggaaggaactgacaaaatgttccactccctatgggaggcacgttatatgaagaattatgaaaaatggtcgaaatgactggagaggccaagcctggatgagactgggatggggacaggtgcgggacgaggggcaccaccctcacatctttcacaagtctgtcataggcaagagggcgtaggtttctcacagccccactggggagaatcggcaccattggtggcattacacgaagagaatgtgacctcctatgtaaaagaacaagcaactccacgcggtgctgtgaggctagtgctgcgagtccctgaggtgcgcaattcccgcacgaccgtgggtgggaaacaccgaagccaaaactccgctacagccctttagatgaaggcgtcgtctgattggtgatagtttggcgcgaacctgagcacgccgaacaaaggaagtgacggcagaagtcgcgcacttgacgagggtgggatcacacggcgctgcgtcgcggtagtattgttctgattggttgatttcttgcgataccgctctgccagccccttgcttccgctagtgcggagggttttgcccttcgtaaagatggccgcggaggcttttggagccaactgggagcgcagtacgcgttttctggagcatgggcagaggagacaggaacaagcgtagcatccgtgagcaccgattggctgaagcgagcaccccgggagctgactggctccgccattcgcgggaaggcgtttgtggtgccagagaaaagtagccagagcggcgc

SEQ ID NO: 908 - DNA, 2300 bp, Homo sapien
aaatgcaatgtgtggaccttgtttggaccctgatttgaaagaacccgctgtaaaaaaaaaaaaaaaaaaaaagagacatcagggaaatttggtgacatcagggaaactgaccacatatctgcctggtggaagtaaggaattactgtttttctttttctttctttttttttttgaggtggagtctcgctctgtcgcccaggctagagtgcagtggcactatctcggctcactgcaagctccgcctcccgggttcaagtgattctcctgcctcagcctcccaagtagctgggattacaggtgtgagccaccacgcctggtggaattactatttttttttttagatctgataatgtgttagaaaaagagagtcctagccgggtgcagtggctcacgcctgtaatcccagcactttgggaggccaagttgggcagatcacctgaggttgggagtttgagaccagcctgaccaatatggagaaaccccatctctactaaaaatacaaaattagccaggtgtggtggcgcatgcctgtaataccagctactcgggaggcagagacaggataatcacttgaacccgggaggccgattttgcggtgagccgagatcctgccattgcactccagcctgggcaacaagagtgaaactccatctcaaaaaaaaaaaaaaaaagaaagaaagaaaaagagaatccttaccttttagagataaatactgtttacgttcaagatgatatgatcactggaatttaacatcatacagtgagggccaggtatgatagctcacacctgtcagcccagtgctttgggaggctgaggtgggaggatcacttgaagccaggagtttgggaccagcctgagtaatgtagtgagatgctgtttctaaaaaaaaaaaaaaaaaaagccaggtgaggtagcgagtgcctatagttccagctattccagaggttgaagcaggaagataggaagatagcttgagtccaggagctcgaggctgcagtgagctattattatcttgccactgcactctagcctgggtggcagagtgagacaacccccttcttttttttttttttttttttttttgagacagagtcttgctctatcacccaggctggaatgcaatgatgcaatcttggcttactgcaacttctacctcccaggctcaagggatcctcctgcctcagcctcccaagtagctggactatagacatgtattaccatgcccagctaatttttttattttttgtagagatggtgtttcactatgttgctcaggatggcctcaaactcctgggctcaagcgatcctcctgccttagcctaccaaagtgctgggattacagacatgagccactgcacccagcctgagacacttctctaaaaaaatacataaataaataaaagttaaaataataaaaaattttaaaagttgtttaaatagggccgggcgcggtggctcatgcctgtaatcccagcactttgggaggccgagacgggtggatcacaaggtcaggagatcgagaccatcctggctaacacagtgaaaccccgtctctactaaaaatacaaaaaaatagccgggcgtggtggcgggcgcctgtagtcccagctactcgggaggctgaggcaggagaatggtgtgaatccgggaggcagagcttgcagtgagctgagatggtgccactgcactacagcctgggtgacagaatgagactccgtctcaaaaaaaaaaaaaagttgtttaaatacataaaataatcaaaagtgagtatagatgaaataagagtggccataagttcataattactgaagctggaggaaggtacttgggggttcattacaccattctctctcctgtttctgtttgactgtttccataatacaatgttaagaaaggattaaacgtgtcaccccctcctagaagccctctcacattcctcagtctgaattagatccccctttccggggcttgccaatacacctgatgtgctgaccggcaattctgttgtttgcccctccctcttgggggcaggggctgcactggcaggagaggtgtggcttccacttaagggtccggtatgcctgcctcctcgggccagcccagatcataccctgctgggcaaaggaggaagagccagaggatccagacgccttggaggacttggaacacctgtaacaggacaaggagttctgctcaggcacgtggccacagaaaactacttaggaagcctgtggtgagaacaacaacagtgcctgagaatcccacggctctggggaagtgagccccgaggatgaggctg

SEQ ID NO: 909 - DNA, 2300 bp, Homo sapien
caaggctcttggcctgtgcaacggtaggctgtggctgccgattactgagataagtggcagggtgatcaggcttcggagggtcagtcagaggtcttgttttggacctgttacctttgggagggctaaatggcatcaagtgaaagtggacagggaaggggcaagttggagcttgaagaggtgaggatagagatgtgatctgggagtggagagaggacatttaaagccaacgactgcatgagctaacccaggtccttgattctagtaaaggtagattaagaagaggtctgaggggtttaaagagtggcctgttgtccacatgggcactccaagggtctgagcaaggggaatggcaggctgcaccatcaccccctaacaggccctccattctcctcagggagggagtcagccctgagcttgaatcctggctccaccactcataagctttttgatcttttgacctctgtgcctcacttgcttcatctgtaaaatgggagtaacagaacctcgcagggtttgaggaggactacatgaaataatggaatgttcctggcacagagtggccatgcatacgggcagctcctcttaccccgtctgcagtggcctgaagcaggttcataaatgtacctggaacccgctggactgatgaaccctgcagagtctagccgtgaacatgcacctgggtcctaggagtctacagttcataatctctctcatgcttagtgttgctctttttatgttgcttttatctattcattatgtaaatatttactgagcgtcttctatgtgtaccctagcatggtgggacctggggtaaacctggggtccaatcctgctaccactgaatacctgtatgaatacctgtatgaccctggccaagtgaattaacctctttaggcctcagtttcctcatttgtgaaacctaggtaataagcgcagttacctcattcgattcagaggatgtctgccaagcacaatgggtgcacagctaagtgctcaataactactagtggtcatggtcactgctctaaagaacttgggggcaaatgcaaggtgcaggatggggatggaagcagacaactgctcacagccggtctaccccaaaccctttttccaggacatggtgacctacttcatgaacctgagccaggcgaatgctcaggggacgccgcgctgggagctcgagtaccagctgaccgaggcctatggggtgccggacgccagcgcccactccatgcacacagtgctggaccgcatcgctggcgaccagagcacactgcagcgctactacgtctataactcagtcagctactctgctggggtctgcgacgaggcctgcagcatgcagcacgtgtgtgccatgcgccaggtggacattgacgcttacaccacctgtctgtatgcctctggcaccacgcccgtgccccagctcccgctgctgctgatggccctgctgggcctgtgcacgctcgtgctgtgacctgccaggctcaccttcttcctggtaacgggtaacgggggcagcgcccaggatcacccagagctgggccttccaccatttcctccgcgcctgaggagtgaactgaaataggacaaccgaatcaggaagcgaagccccaggagctgcagccatccgtgatcgcgccactgcactccagcctgggtgacaaagccagactctctccaaaaacaaaccagaaacagaaaagaaatgacgacccaagacccccctacaagcatacttcttttgcgtattatgtttaactcacaaaacaaagctcatcatgcgtttgattctgtgttgtgttccttttcttttcttttgagacggagtctcgctctgtcgcccaggccggagtgcagtggcgctatctcggctctctgcaacctctgcctcccgggttcaagcgattctcctgcctcagcctcctagctgggactacaggcgcgcgccaacacgcccgactaatttgtatttttagtagagacggggtttcgccatgtttgccaggctggtctcgaactcctgacctcaggtgatccgcccgcctgggcctcccaaagtgttgggattacaggcgtgagtcaccgcgcccggcctctattcccttccgtatggaaatgaggttaactcatttgcaggaacctaacgcccgccctcccccgactcggatcgctggcgtgaacccagcggccccgtgctctccgggtatccctggatcgaggcgcacgcgttgttgcaaagtctcgcacttagggattagaatgtgcctttgcgtttcgttttgttttgcaacaataca

SEQ ID NO: 910 - DNA, 2300 bp, Homo sapien
aataatggaatgttcctggcacagagtggccatgcatacgggcagctcctcttaccccgtctgcagtggcctgaagcaggttcataaatgtacctggaacccgctggactgatgaaccctgcagagtctagccgtgaacatgcacctgggtcctaggagtctacagttcataatctctctcatgcttagtgttgctctttttatgttgcttttatctattcattatgtaaatatttactgagcgtcttctatgtgtaccctagcatggtgggacctggggtaaacctggggtccaatcctgctaccactgaatacctgtatgaatacctgtatgaccctggccaagtgaattaacctctttaggcctcagtttcctcatttgtgaaacctaggtaataagcgcagttacctcattcgattcagaggatgtctgccaagcacaatgggtgcacagctaagtgctcaataactactagtggtcatggtcactgctctaaagaacttgggggcaaatgcaaggtgcaggatggggatggaagcagacaactgctcacagccggtctaccccaaaccctttttccaggacatggtgacctacttcatgaacctgagccaggcgaatgctcaggggacgccgcgctgggagctcgagtaccagctgaccgaggcctatggggtgccggacgccagcgcccactccatgcacacagtgctggaccgcatcgctggcgaccagagcacactgcagcgctactacgtctataactcagtcagctactctgctggggtctgcgacgaggcctgcagcatgcagcacgtgtgtgccatgcgccaggtggacattgacgcttacaccacctgtctgtatgcctctggcaccacgcccgtgccccagctcccgctgctgctgatggccctgctgggcctgtgcacgctcgtgctgtgacctgccaggctcaccttcttcctggtaacgggtaacgggggcagcgcccaggatcacccagagctgggccttccaccatttcctccgcgcctgaggagtgaactgaaataggacaaccgaatcaggaagcgaagccccaggagctgcagccatccgtgatcgcgccactgcactccagcctgggtgacaaagccagactctctccaaaaacaaaccagaaacagaaaagaaatgacgacccaagacccccctacaagcatacttcttttgcgtattatgtttaactcacaaaacaaagctcatcatgcgtttgattctgtgttgtgttccttttcttttcttttgagacggagtctcgctctgtcgcccaggccggagtgcagtggcgctatctcggctctctgcaacctctgcctcccgggttcaagcgattctcctgcctcagcctcctagctgggactacaggcgcgcgccaacacgcccgactaatttgtatttttagtagagacggggtttcgccatgtttgccaggctggtctcgaactcctgacctcaggtgatccgcccgcctgggcctcccaaagtgttgggattacaggcgtgagtcaccgcgcccggcctctattcccttccgtatggaaatgaggttaactcatttgcaggaacctaacgcccgccctcccccgactcggatcgctggcgtgaacccagcggccccgtgctctccgggtatccctggatcgaggcgcacgcgttgttgcaaagtctcgcacttagggattagaatgtgcctttgcgtttcgttttgttttgcaacaatacaggtgtgagggatcgcagccctggtccaggctctagtctccccgccctctcgctttcttgggcctccgggcgcctcaaaggtaaaactaggccatttgaagcctgcgaagcgaagggcagtcggtcttcaggcctagcgggcttggctgggctgggtcggtggacccctgggctggcggcgggagcagagcatcgagcggcttttagctggggttcgggcggaggacctgggacaaccgcgggcctcgctcctccccggacggggcgggacggggaagtcccgcccaccaggcccaggccccgggccgccccgagggctgcgcccacctccttcctgcctcggcaaccccgggccctgagggcaggccccaaccgcggaggagcaggagagggcggaggccggcgggccatgccctggtcgtcccgcggcgccctccttcgggacctggtcctgggcgtgctgggcaccgccgccttcctgctcgacctgggcaccgacctgtgggccgccgtccagtatgcgctcggcggc

SEQ ID NO: 911 - DNA, 2300 bp, Homo sapien
tgtaatcccagcactttgggaggctgaggcgggtggatcacttgaggccaggagttcaagaccagtctggccaacatggcaaaaccccgtctctactaaaaatataacaattagccgcgcgtgctggcgggcccctgtaatcccagctattcaggaggctgaggcaggagaacccaggaggcagaggttgcactgagccaagatcaggccagtacactccagcctgggtgacagagggaggctctgtctgaaaaaaaaaaaaaaaaaaagattgtgggaaggcaagagtataaatagggcactcacagtcactgactgactggtttataccaacggaggcagtaaatggtcaggttctggacagattttgaaggcaaatcttgcagaacttgctgatggagtacatgtgggatatgagagaggagttaaggatcttagtaaatgatgttgcttagtacattgttgtcatcggaagaggtgatcaaatatacagtcaaaaaatgtagaaaaaatagttttttttctggattttgttattcgtggtatttgtgagctaataaaaatgtttgtaatttttctcattataaaaggttcacttttatatctaatattgtatttgtaattttggattttttttttttttagacagtctcgctctgttgcccaggctggagtgcagtggcataatcataactcaccgcagcctctacctcctgggctcagttaggtgcgtgccaccacacctggctaatttttctgggttttttttgttgttgttttgctttgtttgttttgtagagacagggtctaattttgttgcccaggtgatctccaactccggggctcaagcaaccggtcgacctcggcgtcccaaagtgctaggatttcaggcatgagccactgtgcctggccttgattattttaaagagggcccccaaattgaataaacgtcaagtctccacaaagcctgaattcaaccttgcttctagcccatacttgggttgtaatttaaaattaacgaaacatttaagaattttgcttccgaaaacagtgtgcacgaagtgaattgtaagcctaatataatattaagaataaactaaatttggggataaaaagatcaccttggggctcacgcctgtaatcccagcactttgggaggccaagggatcaaccgagctccagagttggagaccagcctgggcaacatggcgaaaccccgtctctaccgaaaaatacaaaaattagccgggcgtggtggtgcgcgccggtagtcttagctactcgggaggctgaggtgggaggatcacttgaacccaggaggcgggggttgcagtgagccgagatcgcgccactgcactccagcctgggcgacagagcaagactctgtctcaaaaaaagaaaaaaaaaaagggatgggcgcggtggctcacgcctgtaatctcagcactttgggaggcccaggcgggcggatcacctgaggtcgggagttcaagaccagcctgaccaacatggagaaaccccgtctctactaaaactacaaaattagccgggcgtggtggcacatgcctgtaatcccagctactcgaaaggctgaggcaggaggatcgcttgaacccgggaggcggaggttgcagtgagccgagatcgcgccattgcactccagcctgggcaacaagagcgaaactccgtctcaaaaaaaaaaaaaaaaaaagatcaccttgggctagcctcccaaatgtcttccaaaacttcccactcattctccttcccagtttttctaaatctaccaaatgcacccaacacttcttacgttccttttagccaggtagggattacgcgcatttttaaagacctccttaaaagtgaaggctgtagtaccgtcaggactgcctagcgctcacccagaagctgcttgtctccgaggcactaagaggggcgtggccatgggcgtggctcgccgggccggcggagtgggcggagcctaaaagcttccccgcccggtcagactcaacacatgcgcccagaggtttctagtggaacgaggtgtggattgtgaggtgactctggccgcttacttccggttcctagcgatgcgcatccgggtcacgctaacgccgcggtttcctccgctcgattggttctactgtgggtctggactgatctccatgtcctgttgtggggcttttacagcctttgggtgagtctcagctgccaacagggtctgagcgcagccgggcgagcacagcgtgaagggggatgggtctagagttctgcctcggtccttgtgggtgggagtctct

SEQ ID NO: 912 - DNA, 2300 bp, Homo sapien
gtgaggggagactgggcgtgagtgtgcaggtgagtggaggaacacagtgtgagtgggcatcttcgcatgagagtaggcgctgagtgtatgcgagtgtgcaagtgttatgtggtctgagtgtgtctgcctgtgtgtgatggggggctggaggtggaggagggggcagatgcttggctctagttctacatgactgaggcaaatgttaaaagtggtttgttctggccaggcgcggtgggtcatgcctgtaatcctggcactttgggaggctgaggtgggcagatcattggaggtcaggagttcaaaaccagcctggctaacatggtgaaaccccgtctctactaaaaagacaaaaattagccgggcgtggcagtgcttgcctgtaatctcagctactccagaggctgaggcaggagaatcccttgaaagtgggaggcagaggttgcagtgagctgagattgcatcactgcactccagcctgggagacagagtgagactctgtctcaaaaaaaataaaaaataaaaaaataaaaaaagtgttttgtcctttgagagccatttttggctttgataagggacattaggaggaggagcctggcccagatacccagagcggagctgagactggatgctgatgcaggcccccgactctccttatacctgccttgctgtgggaccctggtcctgtcgggacctcagtttccctctctgtgtaggaggttgttgggtcggctgatgtatctgagggacttgcttctttagacagggtccaccccagtgcctggtgcctgggggtgctcagatggtgcttgttggttggttgaaggaatgagtgggtaaatggactggaaactgaggcagatactctggctcacctctcacttatgcacacgggatgcccccaccagctcactttcacacataccctcacacctacactcagagattcatgtgcattcaccatcgattgtccacccctcttcacctgcatgctcccatgaactcatacgctgccaacccacaccagcctgggtgaaaaaaaaaaagaagaaagtatgtccaaatttgaatctaatcaaacctgttttcagaaaatacaggagacagaggaatagattaaaggacctcacaaggaagcaatcaaccaagtccagaatatagaacattctactggacaatggagccagttctctccagaaatcaaccgcatgaacaaaaaaacaaacacagggccaggctcagtggctcatgcctgtaatcccaacactttgggaagctgaggcggaaggatcccttgagcccaggagtttgagaccaacctaggcaaaacagggagaccctatctctacaaaacacggtctcagggagcttccacctccacccccacagatctgttcccatggggtttctgggctcaatgtttcttggtctccagggaggccctgccctgtcatgcccctgaccacagtggctcttccgagctcctctcttctccctccactttatatcccagcgggcattctctttcctccactccccttcttttattttctctctcacccccatccagagacgcacagacccaaatgtgcacaggcacatgctcgctgtctgtgtcttgtcatctcgtcttttgtcttggatcttaccttgtctttgtccctgaatctccttgttcctctcatctctcccggtgtttacatctgtctttttccctgagcctcgctccctccatccattcctccgccctctcattttttttcccgactccctcctgcctcctccctttctcctttgattttcctggtccctcatctctcctccctcctctttctcactctcatgctccctttttcgctctcttgagtacatgcacttgctttctctctcttgcttttcctctttctcaccttagctcctggcctcgggcgctgtctacaccccaccccatccctcgctctttgagaagcctctgtgcagtgcccaggtcctggcggcccagcttggaagttcctgtggtaccccttgagaggccctagggccacagcatttcctcccaggggtgacttggtagtgatacgctctgtttcttcacttctgcaattgccagacagcatagaggctgaggctggggccaggacccagacagagacacacggtcactgcagctgaagccgctgcccctgctacaggtaagggggaatcctggcccctgctgggcaagggggaggcatataaaaatgtcctcaggaggcaaaccaaggtcatgcccccaggctgcacctaagcagatgggtgcttct

SEQ ID NO: 913 - DNA, 2300 bp, Homo sapien
tggagactctgggcaatggaggctggttgatcccggaggtccctcccaggcttgctgtccctcctggagggtggtggctggaggagggctgaggtgaaactgttttggaaccaaggatctgggctggggagcagagttgaggccttgccttttaggtgagcagtttgcatgaaggctaagttcatgtacagaccatgtcctcatatttcagggcactcgaggctcaaaaagcctgtaagggagacaagaagaaatgatcaaactgagcctgtttcttttcttttttttttgttttaaatatgaagatggggtctcactatattgcccaggctggtctcgaactcctgggctcagcaatcctcctgccttggtctcccaaagtgcttggcctgagcctgtttcagtgtccctggcaggacatggggattgggagagtgtgtgcggtgcgtgagtgtggagcagtatggacgcatgaactcgaggaaggagatgagcctggcaggtgtgagtgaggggagactgggcgtgagtgtgcaggtgagtggaggaacacagtgtgagtgggcatcttcgcatgagagtaggcgctgagtgtatgcgagtgtgcaagtgttatgtggtctgagtgtgtctgcctgtgtgtgatggggggctggaggtggaggagggggcagatgcttggctctagttctacatgactgaggcaaatgttaaaagtggtttgttctggccaggcgcggtgggtcatgcctgtaatcctggcactttgggaggctgaggtgggcagatcattggaggtcaggagttcaaaaccagcctggctaacatggtgaaaccccgtctctactaaaaagacaaaaattagccgggcgtggcagtgcttgcctgtaatctcagctactccagaggctgaggcaggagaatcccttgaaagtgggaggcagaggttgcagtgagctgagattgcatcactgcactccagcctgggagacagagtgagactctgtctcaaaaaaaataaaaaataaaaaaataaaaaaagtgttttgtcctttgagagccatttttggctttgataagggacattaggaggaggagcctggcccagatacccagagcggagctgagactggatgctgatgcaggcccccgactctccttatacctgccttgctgtgggaccctggtcctgtcgggacctcagtttccctctctgtgtaggaggttgttgggtcggctgatgtatctgagggacttgcttctttagacagggtccaccccagtgcctggtgcctgggggtgctcagatggtgcttgttggttggttgaaggaatgagtgggtaaatggactggaaactgaggcagatactctggctcacctctcacttatgcacacgggatgcccccaccagctcactttcacacataccctcacacctacactcagagattcatgtgcattcaccatcgattgtccacccctcttcacctgcatgctcccatgaactcatacgctgccaacccacaccagcctgggtgaaaaaaaaaaagaagaaagtatgtccaaatttgaatctaatcaaacctgttttcagaaaatacaggagacagaggaatagattaaaggacctcacaaggaagcaatcaaccaagtccagaatatagaacattctactggacaatggagccagttctctccagaaatcaaccgcatgaacaaaaaaacaaacacagggccaggctcagtggctcatgcctgtaatcccaacactttgggaagctgaggcggaaggatcccttgagcccaggagtttgagaccaacctaggcaaaacagggagaccctatctctacaaaacacggtctcagggagcttccacctccacccccacagatctgttcccatggggtttctgggctcaatgtttcttggtctccagggaggccctgccctgtcatgcccctgaccacagtggctcttccgagctcctctcttctccctccactttatatcccagcgggcattctctttcctccactccccttcttttattttctctctcacccccatccagagacgcacagacccaaatgtgcacaggcacatgctcgctgtctgtgtcttgtcatctcgtcttttgtcttggatcttaccttgtctttgtccctgaatctccttgttcctctcatctctcccggtgtttacatctgtctttttccctgagcctcgctccctccatccattcctccgccctctcattttttttcccgactccctcctgcctcctccctttctcctt

SEQ ID NO: 914 - DNA, 2300 bp, Homo sapien
ttcctctggtgggagataggcaagcatagctagaaacagcctctgaaggattgaaccctcctctccttggcttcctctggagtccttccaagcctgtattgctccatgggctgctaccttggaatcgcctgggtgcttgttaaaattttactcttcctggccccatcaccagcactgctatatcagaatctttttttttttttttttttgaaatggggtcttgctctgtcacccaggctggagtgcagttgcaatcatggctcactgcagcctcaatctcctgggcttgaacgatcctcctacctcagtctcccaaatagctgggactgcaggtgcaaaccaccatacttagctaattttttttttcttggtagagatggggtctggatttgttgcccaggctggtctcgaactcctggtctcaagtgatcctctacggcagcctcccacagtgatgagattacagacatacaccactacgcctggcctaagcctttatttaattaatttattttattttttatttttttgagatggagtctcactcttgtcaaccaggctggggtgcaatggtgcaatctcagctcactgcaacctcgacctcctgggttcaagcgattctcctgcctcagcctcccgagtagctgggattacaggcgcccaccaccatgcctggctaatttttgtatttttagtacagacggggtttcaccatgttgaccaggctggtcttgaactcctgaccttgggtgatccactcacctcagcctcccaaagtgctaggattacaggcgtgagccaccccgcccggctaaacttttatttttaacaagttctccaactgagtctgatgtggggaaaggagttgacccctaagcctgggacactcaacaggagcttgggtaaataaagtgattttcatttactgaattcctggtacgtgccagtcatcatgctaagtgtgaggtagggagtatgtgtggctcttacagactcaggaaataggctcagaaaacattcactgcagggctcaagctgaggaccagaggcggcggttaagccctcatctggcagattcttagagctggcatttgagaatgttcacctatgccatggcccagtttgctttcctctgtggcctgacacctctgctccctgctaagcccaatattttggttgtggtagggggcggtggggagaggtattaatagaaatagagtaactttcagtgcagaacgtgcaaagctggagcactgggtgcagtcctaggcttttgccagaactctgaggtgcaagggtttgtcttctccctcagcctgatggctatggggacagggatggctttgtctccctctcagccggatatggcttcagaaggcagaaacttctctttcccagaggctgggcatttctgaaggcaggtctgtctccccttctgttgagggcacctgtgggcagggctttgtcacacccattgtactggcctcctgtgggcaaactggctgtgtgtcccctcagacagggtgccttctgaaagcagctttgggtctttttcatcaacttggggctcactggatttggggctgtacccattgaattgaagcccgggctcccgaggacagggctgtgtccccatctcccccaggctggggactcctgaggacagggctgtgtccccatctcccccaggcttggggctcctgaggacagggctgtgtccccatctcccccaggctgggggctcctgaggacagggctaaaaccttctctaggtcagggctcatctccccctcagtcaaaggacccagttcctctctcccctgccagcccaagcccagcccttcctcccagaggggcgcagcatcagaggggcccagcccagtattgtgggatgagctggtgtgcctggctggatgtgggtattcccggtgaccttggtgttggggccccgccccaggagctggcttcctggcctcagctgccctgcccacccagcagagcccgggggcaggcctttcctaatccttcatcctgctgctgctcattggagggtagagcagagtgagtcacacacctgtgcctgggcccgtcctctgcctcctgtgcactcattacctgcttcctgagctccccgagaagtcatccaggacctccccgagaagccgtccaggaaacatgctctcaggggacccccatctgcctcagcctctttgtcactgcctggaccattgtccctgctgtttctcaggtaagaggctggtggcctgagggaagggctaagtttcggccgctttgtctag

SEQ ID NO: 915 - DNA, 2300 bp, Homo sapien
gcgcggtggctcacacctgtaatcccagcactttgggaggccgaggcgggcagatcacctgaggttgggaattcgagaccagcttgaccaacatggagaaaccccatctctactaaaaaaaaaatatgaaaaattagctgggcatggtggcgcatatctgtaatcccagctactcgggaggctgaggcaggagaatcgcttgaacctgagaggcagggggtgcagtgagctgagatcacgccattgcactccagcctggtcaacaagagagaaactgtctcaaaaataaataaataaaaataaaaaataaattagctaggcgtggtggcacatgcctgtaatcccagctacttgggaggctgaggcaggagaatgcttgaacccgggaggctgaggttgcggtgagctgagatcacgccattgcactgcggcctgggtaacaagagcgaaactctgtctcaaaaaaaaaaaaaaaaaaaaaaaaaaaggataagtaggagtctagggaaagcttgaccttaacctcccttcatccatctaatgaatgtgaacaagacaacagtagtctttactctcatgaagtttatagctcttctctaactcattttctcttctctgtttcttcttttttagatgagagaattgggccagattatctacctgattgatgattataaaaataccttctttggggctgggcgtggtgtctcacacctgtaatcccagcacttcgggaggccgaggcgcatggatcatgaggtcaggagttcgagatcagcctgactaactccgtctctactaaaaatacaaaaatcagccgggcgtggtgacatgcgcctgtaatctcagctactcaggaggttgaggcaggagaattgcttgaacctgggaggcggcggttgcagtgagccaagatcatgccactgcactccagcctgggcaacagagcaagcctctgcctcaaaaaaacaaaacaaaacaaaaccttctttgttttctatgaaatagtaaaactggctttattgattatattttagttgagaaaatagcagccctacctggtattttgtttaattccatttatgtgaaatacgtattcacatattgtttaactccatttatgtgaaatatccagaataggtaaatccatatagatagaacacagattgcttgttttcagggactggggagagggggcgaatagggagtaactgcttaataggtactaggtctcctcggccaggcgcggtggctcacgcctgtaatccccgcactttgggaggccaaggcgagcggattacgacgtcaggagatcgtagaccatcctggccaacatggtgaacatccggctttactaaaaatataaaaattagcggggcatggtggcgtttgtctgtaatctcagctactcgggaggctaaggcagaatttctggaaccggggaggcgccactgcactccagcctgggtgacagagtgagactccgtctaaaaaaaaaaagtagatactaagtctccttttgaggtgatgaaactattttggaaccaggtagacatggtggttgcagaacattgtgaatgttctgaagacagctgagccggtccggcgcggtggctcatgcctgtaattcctgtactttgggaggcctgggcaacatggcaagaccccgtctccacaaaagtacataaaattagccgggcatggtggcgcgcgcctgcagtcccagctactcgggaggctgaagtgagaggatcgcttgagcttgggaggtcgaggctgcagtgagctgtgattgcaccactcgactccagcctggacgacagagatcctgtctcaaaaataaataaataaataaacccactgaattattcactttttcttttattcttcttattattttttacctaacaataacttaagcacattatttactttaaagtggttaattatatgttatgtgtaattcgtttaaattttaaaaagcccacctacttttaaagtgcctggctgggctgcgagccctttaagaacctctcagacgggaggcggggctagaggagcggacctgtaagaatcacgtgaggcgacgcctgcgcagaagggtcacgtggtggctgggccggggaaatggcggcttcaggagagagcgggacttcaggcggcggaggcagcaccgaggaagcatttatgaccttctacagtgaggtgaacacagagtgaggagtagtggcaccggggcgaccgctcccggatctgctttcccagtggacaaaggcagtggccgcctggcctggaccgtt

SEQ ID NO: 916 - DNA, 2300 bp, Homo sapien
tcacataaatggagttaaacaatatgtgaatacgtatttcacataaatggaattaaacaaaataccaggtagggctgctattttctcaactaaaatataatcaataaagccagttttactatttcatagaaaacaaagaaggttttgttttgttttgtttttttgaggcagaggcttgctctgttgcccaggctggagtgcagtggcatgatcttggctcactgcaaccgccgcctcccaggttcaagcaattctcctgcctcaacctcctgagtagctgagattacaggcgcatgtcaccacgcccggctgatttttgtatttttagtagagacggagttagtcaggctgatctcgaactcctgacctcatgatccatgcgcctcggcctcccgaagtgctgggattacaggtgtgagacaccacgcccagccccaaagaaggtatttttataatcatcaatcaggtagataatctggcccaattctctcatctaaaaaagaagaaacagagaagagaaaatgagttagagaagagctataaacttcatgagagtaaagactactgttgtcttgttcacattcattagatggatgaagggaggttaaggtcaagctttccctagactcctacttatcctttttttttttttttttttttttttttgagacagagtttcgctcttgttacccaggccgcagtgcaatggcgtgatctcagctcaccgcaacctcagcctcccgggttcaagcattctcctgcctcagcctcccaagtagctgggattacaggcatgtgccaccacgcctagctaatttattttttatttttatttatttatttttgagacagtttctctcttgttgaccaggctggagtgcaatggcgtgatctcagctcactgcaccccctgcctctcaggttcaagcgattctcctgcctcagcctcccgagtagctgggattacagatatgcgccaccatgcccagctaatttttcatattttttttttagtagagatggggtttctccatgttggtcaagctggtctcgaattcccaacctcaggtgatctgcccgcctcggcctcccaaagtgctgggattacaggtgtgagccaccgcgcctggcctgctcttttctactgcattgcaccacattgccaaaagtgcagttattaagcccattcaacaatatgttgctaacgaaaaaaacaaactaaaatatttttaaaaggtttattctgagccaagatgagtgaccatagcttggggaaacacagcctcaagaggtcctaggaaactgtgcctgaggtggtcaagttataatttgggttttcttttttttttttttgttttgagacggagtctcgctttgtcaccaggctggagtgcagttgcgcaatctcggctcactgcaacctccgcctcccgggttcaagccaattctcctgtctcagcctcctgagtagctgcgattacagtcgcgtgccaccgcacccggctgatttttgtatttttagtagagacggggtttccccatgttggccaggctggtctcgaactccggacctcaggtgatccacccacttcggcctcccaaagtgttgggattacaggcgtgagccaccgcgcccagccagaacactgacacttctcataacaaatgaacgcgatttatgtatatctaagccagggcacattggacgtcggtatcctggacatcagcatcctggacacagctcccaaaccccgaattcccccattttattgatgctagcaggccagggaagggaaaacttcctttgggctttgaataataacgactttagaattgaaatcgtgggctggaggtggacgccacgcctcattctgatgggtccaagagccgaaatttcggcttctggcactctcctcactcagctctctaaactcctccatcattcctctttccagtcctttggccctaagcccttgctagcggttggctaagaagaaacccgtctcttgctcgggattcgctgtgagctccgggaagcccgcctccgctctcccgtgattcgctactcctgtgttcatccgcccctccgtcgaccagattgggtgcttggccgtccctgccattagcgcgtaacgagagactgcttgctgcggcagagacgccagaggtgcagctccagcagcaatggcagtgacggcgttggcggcgcggacgtggcttggcgtgtggggcgtgaggaccatgcaagcccgaggcttcggctcggatcaggtacgctgcggcagtgtccgctgctccag

SEQ ID NO: 917 - DNA, 2300 bp, Homo sapien
acgcctggccacatagtaaattttttaaatgaaagctgaagctgacacagggtagtttagagaggaagttgatgcaaaggaagattccgtgaccaagggcatatgattgtcaggacattttgctaggtgacatagagcaggagatggatgtcaagatgtagaccctgccagccaggcgcggtggctcatgcctataatgccagcactttgggaggctgaggcgggcagagcacaaggtcaggagttcgagaccagcctgatcaacatggtgaaaccctgtctccactaaaaatacaaaaattagccgggtgtggtggcacttgcctgtaatcccagctactcaggaggctgaggcaggagaattgcttgaacctgggaggcagaggttgcagtgagccaagatcgggccactgcactccagcctgggagacagagtgcgactctgtttaaaaaaaaaaaaaaaaaaaaaaaaaagatgttgaccctgccctcaaggagtttacaattaaaaagatcagataagccagactcagtggtgcacacctgtaaccccagtgattgatttggggggctgaggagggaatatcgcttgagcccaggaatttgaagctgcagcgtgctatgatcatgccactgtactccagtctgggtgacagagctagaccccatctctaaaaaacaatactaataaaaagaaaaaagggtcagataaaacatgtacatagaaaattacaatacaaggcagaatgtggctggacatggtggctcatgcctataatcctagcactttgggaggctgaggtgagagaatcgcttgagctcaggagtttgagaccagcctgggcaacatattgagaccctgtctctatttactaaaaaacaaaaaacaaaaacaaaaaaacagaaaacaaaaaaacaaaaaacaaaaaaaactaggtagaatgtgatacatgtgaaaagagatccagctcaagtgccttgggagctcaggggagggtgagattaatctctttttcccaagaatctggaggcaggaaaccaagtcggtttcatctttggaattgtaagcttagacttagaagtctcagagggggacttgggggtcttatccaccctcacccctggcaggattccctgtctagaataaacaataactttaaaatggaaacaaaaaaaggagctctgaaggaaaactgtgaaggaagaggctccgtttgaaatgaatagaaaatgaatttagcttggaggtgctgaggtgttggtagaggcaactttctggcaagaggcgagttgaaggccaggaagtgaatgagatcagggagagtgtctggagggaagaggggcaaaaacaaactggggaagcacccacgttttaggaagtgggtggtgaaagaggagtcagagaaggccagagggagaggtgagcaaagatccagcagaacaccttgttacaaagtttcgaggagggtgggaggggtggaagccaggacgggtagcagaaggaagaaaacttccagcaatagggattgaggttccacacgaagttaccaatgacatttcaaggaatgaaggcttttcctgaggctccacaaataaggtgaattccctgtgtctcgcatctttggagcttccccgaggccagggggagcagggttgtgccctctgacctctaaatatctggggttcagttctataattagcagcaccggataggacgcgagccaaacctctcttaaccctagccagtccctccaggaactgaaaagatgaagaattcatttaggagatttcacactcggctgtttggcctagcccagtgaagtcccttttcatcacgcaaccctaatgactcttagggctgtcactgccgtctggtgttgccagggatctgactaaaccgtcttgcaaaagtttgcagcattcacccgaggcggactacaactcccagaattccgggcgctccccggtgctgattggcggagcccgtgactccagggggcggagtttcccccgcctccccggggaaacagacctctgattggctggaccgccgggcttttgtgtccccgccctcccccggggaccgcagcgggctgaactgctggtgtcagagcccggcgagcgctggcagttccgcggcggggatgctgaggagcgctgggtccgggagcagccctggcccctgcggacttccgaggccgtgaaaacccctgcgctgcggcccttcccaggcccccgaggccgttcgccgttcccgaagcccgactgggggaagagtccagcaccaaagcggccgttct

SEQ ID NO: 918 - DNA, 2300 bp, Homo sapien
cactgtttactgtgcttttttcaagccaatacttactttcagtacagaaccaaggtcatagtttacaacgtgtttttttgttttgtttttcacttaatacaagaaagacatctttcatctactgagtcagttcattcattcatttacttaacatatctattaaatgattaatctatgtcaggcactgttctggttgcttgggatatagtagtgaacaagacagacaaaaatatttgccattatggagcttacattctagtgtgttgggatagtggagttaccttcaaaacatgcagaaaaatgtaaaactagtttcctcattttatttggccatcagtgaacaaggacaaattttttgttttgccggccgcagtggctcacgcctgtaatcccaacactttgggaggccgaggcgggcggatcacgaggtcaggagatcgagaccatcctggctaacacggtgaagcaccgtctctactaaaaatacaaaaaattagccaggcgtggtggcgggcgcctgtaatcccagctactctggaggctgaggcaggagaatggcatgaacccgggaggcggagcttgcagtgagccgagatcgcgccactgcactccagcttgcgtgacagagtgagactccgtctcaaaaaaaaaaaaaaaaatttgtttcctctctttgcttttcctaaatgtgtagggcgagtggttaaggagctaacaaacatttaccctccttctaaaccccttgttcctctactcctttgtaaatataaggcgaacaaccacttgccgattatttatgtctgtgacccagaattctaagctcaagtattgctcttgtcttttattttttcatttataagtgaccaccttttttttttttgaaacgaagttttgttcttgttgcccaggctggagtgcaatggcacgatcttggctcaccgcaacctctgcctcccaggttcaagcaattctcctgcctcaagcctcccgagtagctgggattacaggcatgagccaccacgcccagctaattttgtattagcagagatggggtttctccatgttggtcaggctggtctcaaactccggaccttaggtgatctgcccatctctgcctcccaatgtgctgggattacagatgtgagccaccgtgcccagcccactcttttataataaagagaagaaacaggcagccaggcacagtagctcatgcctgtaatcccagcactttgggaggccaaggtttggggatcacttgagcccaggagttcgagaccagcctggacaacatagtgggaccccgtctgtattaaaaaaaaaagttaaaaagaaataggctttggagttcatctggatttgaatctgcttctgttatttatcagatctgtgactttgagcaaggaagaaaacttcctggtttcctcatctggcaaagtgggggaaataatagtattcacctcacaggcttattggctagatcccatgaaatcacgcggagaaaactgtaagctcagggatggcatggagacagcactcaggaaatgtgaactattttgcacccgcccccatggttatatgcatttgcagtgttagaatagacactccatgaagggaggagaaactgtacttttactctctgtgcctgatttttcctacctaaaagtggagaaacagaactccagttttatagttgttgtgagagttaaataagttaaaatatgcattcttgaacagtgcttggcacatagcattgtatgtgtaagtactggccattattatataaggtacctaataagtatttattgaatcacttattaaaatatgtgatcctccccattctttctttttggacacggtggtggtttttagtttcttgccattaaaaacccactggaagaatacattggtctctttgatgagtggggcaggagggaaacccatgctctcctcccctttggttggcaggtccttcgggagggggctgagagcctcgagcagcacctggggctggaggcactgatgtcctctgggcgagtagacaacctggcagtggtgatgggcctgcaccctgactactttaccagcttctggcgcctgcactacctgctgctgcacacggatggtcccttggccagctcctggcgccactacattgccatcatggtgagcctctctgggcctgacacttggagaggtggctttgtggtgggttctgtcctttgatctcttttctgggagctttgtgagctgattccatagacaagcagggaaagccctggctttatctaactgtagagttt

SEQ ID NO: 919 - DNA, 2300 bp, Homo sapien
tgtttttattttttctcagaaggaaaattttaggttttgaagaaaggcatcgttagtgcttgtgttaggtacagattggcaaactgaggtgcaaaaaggaatcaggtggcctgcaagctggtggcagagctggggttacttagaacttagatttcctgcctcttggggaacagtgagccctacaacctctcccctgatggggtacccaccctgagccaggcacaaaaggaggagggtgactcaggctgtgtccactacctccgcaggctgccgcccgccatcagtgttcttacctggtaggctcccacatggccgagtttctgcagactggtggtgaccctgagtggctgctgggcctccaccgggcccccgagaagctgcgcaaactcagcgagatcaacaagttgctggcgcatcggccatggctcatcaccaaggaacacatccaggtgcagggggcagagaggcgggtgtctgagggagcacagaggcctggctggtgcctggtgggtaacccagggcaggcactgagcagctctgacctccccccttgtcccttccaggccttgctgaagaccggcgagcacacttggtccctggccgagctcattcaggctctggtcctgctcacccactgccactcgctctcctccttcgtgtttggctgtggcatcctccctgagggggatgcagatggcagccctgccccccaggcacctacaccccctagtgaacagagcagccccccaagcagggacccgttgaacaactctggggtaagtcacgggcctgggtcttgatcggggaggaagcgggcatgacctctggtccttaggtagaagctactgcttcccaatctcgtatctgcactacctgctgctatgagagaccatagaaaagttatttgactttgaagcttagtttcctcatctgtgaaatggggagataaagaccctctactcacactgggctgtgagggttaaatgaaataccatgtgactgacactgtgtatatgccataggctcaaagcctgttggttttagcactttaaaactacaaagtttaccttttactctgtaatgtggccttgtatgtttcaatacaaaaatacagatactttaaaaattcctgctcagggaagatgtgtctattctgtagctttgtaaacgtcactttaggaagcacagaccccatgtgctgtccagcacagtggctggcacagaggatgccctgggcctttgtgagcattaggaaggcctggcctctgggaaggatgagtggagcttcccagaggctgaaggaggaggagtagctggtcaccacggggcctctcctgcagggctttgagtctgcccgcgacgtggaggcgctgatggagcgcatgcagcagctgcaggagagcctgctgcgggatgaggggacgtcccaggaggagatggagagccgctttgagctggagaagtcagagagcctgctggtgaccccctcaggtacagggtcacaggcatccaggctcccgtggctgctccttcttaggctatctctggtgaggaggagccacctcctgcattccagaggcagccacttctcaacctcccgtccaagaggttctgagcatgggccttgggctcagacctggctttgaatcctgggctgctagcctttccggctgtgcgaccactgacgagtcacttcctagctcagggcttcaggattgctgtgtagggttagtggggcagtagaagcaaagatcttagcgcagagcctggcccagggggaaccgctccataaataactgccactattgttgttaccaggggcctcgcttcatgggtccatgggcctgatccaccccctccccaaggcctggctccagctgaaatcttgccccactcactatagcaaggggctttttttggccctctattctgccttcccctcccccttttggtgattaatcaggaatggacccctgcatgccccatgcctcagcctcactgtgacctctttctggtcctcagctgacatcctggagccctctccacacccagacatgctgtgctttgtggaagaccctactttcggatatgaggacttcactcggagaggggctcaggcaccccctaccttccgggcccaggtagggctctctctactagtcttggccattgctccacatttacgaacaagcagtgggtggatagtttgagtagttacagagttaggtacccagctgggcatggtagctcacacctgtaatcccagcactttgggaagccaaggtgggaggattgcttga

SEQ ID NO: 920 - DNA, 2300 bp, Homo sapien
gactttctatgctgcaattagtgtctgtataggaaaagagaggccaaagaagttcacagcctcctctaatcattacagcacttgagagctggtcactctgcccaatcttgtgaatcaccaggttgatcaggaggcacatcctaaaccctagggcatacgcaatccttgtcaatcttcttttcctacttagtacactctttcacgatgatctcattcaatgtcatggcttttagctaccatctatgaggctatggttttgaaatctctatctgtagcccatttctctcccctgaactttgccatttgggtgtcccacagacacctgatgctcagtgggtctacatatgaactcatctttcctgtctcacccacactgctctgtgtttcctagcttagagaaaaaaagtgctacgatagccacccaagacatctgtgactccttcatctctgtctttacctctggttagtcattaaagaattattttccatatatatatagaggacagagtcttgctctgtagcccaggctggagagcagtggtgcaatttcagctcactacaacctctgcctcctgggttcaagcaattttggtctcttgaccacctgagccacctgagtagctgggactacaggcgtgtgccaccacacccggctaatttcctctttttacttttttttttgagccggagtcttgctctgtcgcccaggctaaagtgcagtggtgcgatctcggctcactgccagctctgtctcccaggttcacaccattctcctgactcagcctcccaagtagctgggactacaggcgcccgccactacgcccagctaattttctgtatttttagtagagacagggtttcaccgttagccaggatggtctcgatctcctgacctcgtgatccacccccctcggcctcccaaagtgctgggattacaggcgtgagccaccgcgcctgtcctctttttacatttttaaaatctttttctgacatttgtttctcagctggagttgtaccaaagcgcctaactggtcgtttttctttaatttttttccagacaggatctccctctgttgcacaggctggagtgcagtggcgctatctcagctcactgcaacctctgcctcctggactcaagcaatcctcccacctcagcctcccaagtagctgggactgcaggtgcgagccactacgttcagctaattttttgtattttttgtagacacagggtttcaccatgttgttcaggctggtcttgaattcctgaactcaagccatctgcccgccttggcctcccaaagtgctgggattacaggcctgagccaccgtgtccggcctggtcttttttctctaggctctctcctttcccaaacttttctccatgttgtagccagggttcttttaaagctcacatgtattctttggtatggcactgcagagtactcctggatctggacctactccttttccagactcttttttttttttgagacagagtctctctctgtagcccaggctacaatgcagtggcgcgatctcggttcgctgcaacttccgcctcccgcgttcaagcgattctcccacctcagcctccctagtagctgggattacaggcgcgcgtcaccatgcccggctaatttttgtatttttaatggagacggagttttaccatcttggccaggctggtctcgaactcctgacctcaagtgatccgcctgcctcggcctcccaaagtgctggggttacaggcgtgagccaccgcgcccaacccctcagttcttttttcttttgaaacccactataatctctgtaagtcctatcagttccaagagactttctacacaaatacatctccaggttgtcaaacctaaaaagattttcctagagcatggcctatgacgtcaaggatccaggtagcgcccggaggaaagcgccaaaggaggccgccatctttcatacagcagcccggaattttgcgcatgcgcctctgattgtctgtccgcaatgaagctcttcggccttctcggcacccatacgtttgggaacggcagtttcgaggtttgtgagacgtcggcttccgaccggaagtgagaagaggaggaagttggctggttgcaccgatctgggggcttcccgggctcgggtaaccggagtgctggtatctaatcgtcgctcaaaagctcctaggtgcgcgggtggatataattcccggcttctcgagaagacactacagcctcaaggaggtgtgcttctagtgtttaattggatacgtgttatggatgccggcttagaaggaccta

SEQ ID NO: 921 - DNA, 2300 bp, Homo sapien
taaaatttatttatttatattttagagatggagtctcactgtgttgcccaggctggtcttgaacccatggtctcaaccagccctccagccttggccttccagagtgctggaattacaggcatgagttatcatgtgtagcctattaatttaaaaaaatatattttttaattttatttttgagactgagtttccctcttgtaacccaggctggagtgcaatggtgcgatctcggctccctgaaacctccgcctcctgggttcaagcgcttctcctgcctcaccctcctgagtagctgggattacaggggtgggccatcacgcccaataaatttttgtattttttttttttaagacgggatctcgctctgttgcccaggctggagtgcagtggcgcgatctcagatcactgcaagctctgcctcccgggttcacgccattctcctgcctcagcctcccgagttgctgggactacacgcgccctccaccacgcccggctaattttttgtatttttagtagagacagggtttcattgcgttagccaggatggtctcgatatcctgacctcgtgacccgcccgcctcagcctcccaaagtgctgggattacaagtgtgagccaccgtgcccggccaatttttgtatttttagtagagatgtggtttcaccattttggagaggctggtctcgaactcctgacctcaggtgatctaccagcctcaacctcacaaagtgctgggattacaggcgtgagccaccgtgccaggccaataaatatattttaaatatttttttgagacaaggtctccctctgtcgtccaggctggagtgtagcgacaccatcacagctcattgcagcctggacctccccagctcaaataatcctcctatttcagcctcctgagtacctgggactacaggcacgttccatcatgcccagctaatttttaaaattgtttttgtagagatggggcctcactctgttgcccaggctggcaggctggtctcaaactccagggctcaagggatcctcccgccttagcctcccaaagtgctgggatgagaggtgtgagccactgcacccggccaatttttttttcttcttttttctttttctattgagacagggtcttgctctgctgcccaggctggagtgcactggtgcgatctcgaccccccaggctcaagtgatcatctcacctcagcctcccacgtagctgggactacaggagcttggcactaggccccggataatttgtttgtttgtttgtttgtttgttttgcgacggagtcttgctctgtcgcccaggctggactgcaatggcaagatctcggctcactgcaacctccgcctcctgggttcaagcgattctcctgcctcagcctcctgagtagctgggattacaggcatgcgccaccgcgcctggccaatttttttaattttatggatagtgtatttgaaaagtcacatcgatttttctcctggaatgtcctctagatgtgccgtagcttcaagttttacatgtaggtctaatttaggttgtgtgatacaatgggtttgcatttagaagggtcctctggcagcagcaaggaaggttttcggagggtgatagcctagggcctgaaactactgagacttggagagaagtgatggtggctttcactaggtgatagtagtgaaggatatcgaaatgaattaaaatactggggatgtagaatgactggacttaatggcttgagggaagtgtccagaatgattcctgggtttcttacgcacaacactgagggtagataacttgcttgtacgttttttgcacttcaaattggtcctcaataaatagtttttcctttggggaggttatgattgaaatttggccagtcagggatacagttttctcaaacaacactcttgtatcagttccctttttgggtactgcctggagcccagtattgaaccctgtcctcccaagcccaaagacctttgcctcccatagtaccaggaaaggtgcccaagttcttttacacacaaggtgcgcagagcggccagcgcatgcccagagaggtcgtaaggaggacgaccgcccggagagaaaggacgcacgcttcccgccattttgttcagcttgccgggcaaccggcccctgctggggactacaagtcccgtaagcctccgcggcggcacgtcctaccctacactgtccagccggctccctttttccccctccccgggggccaagggctccggctgctgcctggcggccaacgggccaggtaggatttccgggagaggctgctgtggaggctg

SEQ ID NO: 922 - DNA, 200 bp, Homo sapien
gaattcttggccttgtaaaagcaaggaggagtggaatgaaatacggcaccagattggaaacacactgatccggtaggcctttgcttagatttgcttgattgatttggttatgccagtatttgtgttagatgttgttagatgtgttgtttttttgtgtgtgttttgtttcgttttctgagacagggtcttgctctgtcacc

SEQ ID NO: 923 - DNA, 315 bp, Homo sapien
gaattcttggccttgtaaaagcaaggaggagtggaatgaaatacggcaccagattggaaacacactgatccggtaggcctttgcttagatttgcttgattgatttggttatgccagtatttgtgttagatgttgttagatgtgttgtttttttgtgtgtgttttgtttcgttttctgagacagggtcttgctctgtcacccaggctggagtagtggcgcgatctcggctcactgtaacctccacctcccaggttcgagcaattctcctgcatcagtctcctgagtagctggcgttataggcacctgccaccacgc

SEQ ID NO: 924 - DNA, 2300 bp, Homo sapien
agggctggggcccaaagcaagtcccaaatgcagcagcttttctcttggtttaatcccttaagactttcttacctctgtagttaccaaatgggaccatatatttaatttgctgtctgtgtacataattaatttcctgaaatagcattctaatctagtacatatttcatttgtttttccagaatatagagtgaaatttggccttaaaagtctcctcactgagaaggtttgggcttccttggggctatttgtgagcatgttcagtctgaccaatccatcccctgttctctcagcactacttgggtatacacaacttaataacttagtacattttctagtgtgggagcccttataacgtatcacacaaaactcagtgtgatcaccattgtccattcttagcagttactcttgagcaagaatctgcaggcttttccttaaagcatacatagtaaacattttgggttttgcaggccaaaaagcaaatgaacaactatacgtaataggtccttacaaaaccatttaaaaatgtgaagactattcttagttcatgggcaggaaaaatacaggcaactggcgagatgtggtgccatagtttgctgactcttgcttttaagtatttgtatcgttgacaagaaaattgttttgtttagccatccccaaagttagtattttattctgatttgggcctataagaaatatctgggccgaggcgagtggatcacaaggtcaggagatcgagaccatcctggctaacatggtgaaaccccgtctctactaaaaatacaaaaaaattagccgggcatggtggcgggcgcctgtagtcccagctactcgggaggctgaggcaggagaatggcgtgaacccgggaagcggagcttgcagtgagccgagattgcgccactgcactccagcatgggcgacaaagcaagactccatctcaaaaaaaaaaaagaaaaaaaaagaaatatctgggctgggcacggtggctcacgcctgtaatcccagcactttggaaggccgaggcgggtggatcacctgaggtcaggagtttgagaccagcctgaccaatatgatgaaactctgtctctactaaaaatacaaaaatcagctgtgcatggcatgtgcctgtaatcccagctactcgggaggctgagacaggagaatcgcttgaactcgggaggccgaggttgcagtgagccaagattgtaccattgcactccagcctgggcaacaagagcaaaactccgtctcaaaaaaaaaaaacaaaaaagaaatatctgtaatgtaattactaaaacgtttgatatgcaaattgtcatttgtgagtaatattccttccttctgattgtcaactgtagctaaaaatgaagctgatcgtcaggcagaaaaacgagaaattaaacgtcggctcactagaaaggtactactgcctgtgtgttcagttaactatatgtgttatatttggatggcctatttgattggaaatgaattcacagctgggcacagtggcttgcgcctgtaatcccagcactttggaaggccatggcaggaggattgcttgagcccaggagttcaagaccagcctggggaaaacagtgaaaccttgtgtctacattaaaaaaaaaaaaaagaagaagaaagaaaagaaaaagaaaaaaatgaatttgcagcctgggcaacatggcaagaccccacctctacaaaaaaaaatatatattagccaggcatggtggtatgcgcctgtaatatcagctacttgggaggctgaggtaggaggatcatttgagcttgggaggttgaggctgcagtgagctgtgattgtgccactgcactccagcctgggtgacagggcaagaccctgtctcaaaaaaaaaaacaaaacaaaaaaccacctgataaccataatcactgggggtgggacctccagggatcaatagtgtctaaagctcccccaggtgattccaatgaagattgaagcactgggttagaggcaatttgaatgcatgattgatgcctaattattggcttggtgaactaagaggctccgtttccttcagctcagtcaaaggccaactgtcgctgaactccttgccaggaagattctgaggtttaatgaatatgtagaggtaacagatgctcaagattatgaccggcgagccgacaaaccttggaccaaactgacccctgctgacaaggtacctggaaagcactctcttgctttttttctctttctctttttctctttatttggaggatccaagatactaactagaagggagaaccataaacaaaacttctagtt

SEQ ID NO: 925 - DNA, 2300 bp, Homo sapien
aaaaaaaaaaaaaaatttgtaggccgggcacggtggctcatgcctgtaatcccagcactttgggaggtcaaggcgggcagatcacgtggtcaggagttcaagaccaccctggccaatatggtgaaaccccgtctctactgaaaatacaaaaattggtggggcatggtgacacttgcttgcagtcccagctactcgggaggctgaggcaggagaattgcttgaacccaggaggcagagaatgcagtgagccaagatcgagccactgcactccagcctgggcaacagagcaagactccatctcaaaaaaaaaaaaaaaaagaattgctgcgatagtaaataatgtacgtaataaagcattcagaacaaaatctaatatgtaggaggaacaccataaacgttactactcaagatagcccagctgtgatagctctgtctctctagccaacgtttttccaccttacaccacactaaaaattccatcatatttgcaacatttcttatgtatatatatcgtaagcattctttacttgcctacttcatattcagagggttttgtgtgtggtaaaatatacataaaacttgccatttttaactagtttaaaatgtatagggggccaggtgtggtggctcaggcctgtaatcccagtactttgggaggccaaggcgggcatcacttgaggtgaggagttcgagagcagcctggccaacatggtgaaacccggtctctactaaaaatacaaaaattagccgggcatggtggcatgcctatagtcccagctactcgggaggctgaggcaggagaactggttgaacctgggaggtggaggttgcagtgagccgagatcacaccacttccttccagcctgggcgacagagcgagactccgtctcaaaaaaaaaaaaaaaaaaaaagtccaggtgcgctggctcatgcctgtaatctcagcactttggaggccgaggcgggtggattgcttgaggtcaggagttcgagaccagcctggccaagatggtgaaaccccgtcttgctaaaaatacaaaaattagccaggcacggtggcgggcgcctgtaatcccagctactggggaggccgaggcaggagaatcgcttgaacccgggaggccggggttgcagtgagccgagaccgcgccattccactctagcctgggtgacagagcaaaactccatctcgaaaaaaaaagaaagagtatagggcagtgcttttaattacattcattcacactgttgtgcaatggagttttttattttttatttttatttatttttatccgggccaggcctggagtttttaaacttttatctgattcgtctaggggcactttcatcttatttaccttcacatttatcaaattatttctttcacaggtgacagagcagattcaattccttttgatactccgtatttctctatatgtatttttttcattctgcattcttattattccaacgttttacttatttatttggagagagagtttcgctctgtcgaccaggatggagtgcatcggcgcgatctcggctcactgcaaccaccgcctcccaggttcaaacgattctcatgcttcagcctcccgagtagctgggactggaggtgcgcggcaccatgcctggcttatgttctgtattttttgtagagacggggtttcgccatgatgcccaggccggtctcgaactcctggcctcaagcgatccgcccctcacggccttcagagctgctgtaatcacaggcgtgagccaccgcgttcgactcttccaaaaactttttggccagtttatctaagggcatatcctacagactgagtccagtgattgcacagaagtaaacgtcctctgcagctacatacctacaaacctatttctgtaacgtacattccccagcaaggtcccgcgggaaggatccactaccgcgagaggcctcccagccaggaaggggtggggctcaatctgcagtagattcccagaagcctcagtgagtttctgattctctaactgcgcatgcttctgcgcacgcgcaatagacattccaggacttccgggcacttcgtaaggtttaaaaaggatgcttcgcgttttctctctcctttttggagacagattcgcagtggtcgcttcttctccttggtaagtgtgatccttggtaagtgtgatcagatgcttgccaccggagttgtgggtctaatgctatagatcagtagccgagcttccctaggaagatcatatagtattttatttatttactttttttttttttttgagacggagtcggtttgtcactcagg

SEQ ID NO: 926 - DNA, 2300 bp, Homo sapien
agctgggcatggtggcaggcgcctgtaatcccagctactcaggaggctgaagcaggagaattgcttgaacccaggaggaagaggttgcagtgagctgaaatcgtgccattgcactctagcctgggcgggtcaggagttcgagatcagcctggccaacatggagaaaccccatctctactaaaagtacaaaaattaaggctgggcgcggaggctcacgcctgtaagcccagcactttgggaggatgaggtgggtggctcatgagatcaggaattcaagaccagcctggccaagatggtgaaaccctgtctctactaaaaatacaaaaattagctgggtgtggtggcaggcacctgtaatcccagctacctgggaggctgaggcaggagaattgcttgaacctggctgcagtgagccgagatcgcaccactgcactccagcctgggcaacagagtgagaccccatctcaaaaaaaaaaaaaaaaagagttgaggtctccttccaccacttgtgtgaagaccccagaaaacttgctttacctctttaaacttcagttttcttatcttccaactgccatgaggtttttgtgaggaacaaatgagctgacatggatgtttctgtagttaacaaaataaagggtcttacaaaataggcaataataataataatcacttattattattacatgaagctacatgaatgtgtaagatcttggaggaagacagcagagagagagagagagatcagagatcccagggttaaaagttggagaaatttcacagtacatcatccaaaagaggagtccatgatggaggcagaggtaaacttggagaggtaagaaaccctgaagacaggggagtgctttgtggcaggctctgcatataagaattcagcctggccaacatggcgaaacccagtctctactaaaaatacgaaaattagccaggctttgtggcaggcacctgtaatcccagctatttgggaggctgaggcaggagaatcgcttgaacctgggaggcagaggttgcagtgagccgagatctcaccattgcactccagcccgggtgacaagagcaagactcgatctcaaaaaaaaaaaaagttcagttcagttggtaagaactcatcaaaagtgtccatctagactttgggtgccgtagaatgactcagagtctgaatcaacatgaaatcgagaaaacgtcctttgcaagggtttcagggaacacctgaaatcctgaagaactgtttgtatccatcctgaagaatgggtgttaataagagacagccttttcttggtacctgttttccatctctaacccaaccccaactcacacccttctattttatctggtctctctcattcctcttgctcctccccacttggctcccgttttccccaagtccattctctattttgttctataagatctgatcatattaggatgctcttgtagctcataagaagatgactgggtgttcacacgcatatgagatgtgcctccctcaaaccttgttaagacatgggcacatacccatctgatgttaactcacggggaaaaaaatctgatcatgccattcccgtgcccaaattcccatatatccctactgcctcaggatagaggctggaccccttagacacacaagaccctgtatccatgatctgtcactcccacaggcaccctctactcccatctacttggcagtttcccacaacctccctgggttctcgtggttccctgtcattgcaaacgtcgcttctcctaggatgtcctgcccccctagacttaacttggaaagctgttcttaagccccggactgagtcagatgcccctctgggtatccctgtcatagcgttgtgtggttgttgatagtctgatttttcaaccttctccatgccctcttgagggtagggaagatgagtatcttttttctccgtacagaccctaccgcacaagattttcctaaacagaccgaactcaaggagtctttctggttgttagtccacgtgtcccgatttggggtttccaaaatacacgcccactggaaccgggccaggggagccagcctggccaagggctcccccagcccggccaagggctcccccagcccgggagcgcgccacatgcagatcctgggatggccgccaggggccgccgggctctttgttttcctttctcacccgggtcggggccagaggcctgcagagcgcatgctctggggcagttcgcggcccggcggggagcgccggagttccttgtggccgacgtgcaccaaggtaggtctcgcctgggacgcgcggagg

SEQ ID NO: 927 - DNA, 2300 bp, Homo sapien
cccgcactttgggaggccaaggtgggtggatcatctgaggtcaggagttcaagaccagcgggaccaacatggagaaaccccatctctactaaaaatacaaaataagccgggcgtggtggcacatgcctgtaatcctagctactccagaggctgaggcaggagaatcacttgaacctgggaggtagaggttgtggtgagccgagattgcgccatggcactccagcctgggcaataagaacaaaactctgcttcaaaaaaaaaaaaaaaaaaacatgtaatcggctgtacgcagtggctcacgcctgtaatcccaggacttcgggaggctgaggcaggtggattacttgagattaggagtttgggaccagcctggccaacatggtgaaaccccgtctctactaaaaatacaaaatttgggctgggcacagtggctcacgcctataattccagcactttgggaggccaaggcggggtggatcactgagatcaggagttcgagaccagcctggccaaactggtgaaacctcgtctctactaaaaatacaaaaattagctgggtgtggtggtgggtgcctgtaatcccagctactcgagaggctgaggcaggagaatcacttgaacccaggaggcagaggttgcatgagccgagatcgcaccattgcactctagcctgggtgacagaacgagactccatttcaaaaaaacaaaaacaaaacaaaacttagcagggcatggtgatgcacacctgtaatctcagctactcggaaggctgaggcacaagaattgcttcaacccgggaggtggaggttgcagtgagctgagatcatgcctgtgcgctccagcctggcgacagagtgagactccgtctcaaaaaacagaaaaatacatgtaatgctccttgttaaacatcttagataatataggaagataaaacgaaacaagtaatgattatctataataccattttccgaggttaccattgttaatatgggatatattttcttccccacatttttctcacatattttttgtgtatgcattttttttccaaaaaaaaaaaaaatggatgataggctgtttttcttccttttttttttttttttttttggttggggggtggagtttcactactctttctcccaggctggagtgctgagtgcaatggcatgatcttggctcaccgcaacctccacctcctaggttcaagcaattctcctgcctcagcctcccaagtagctgggattacagtcgcacaccaccatgcctggctaatttttgtatttttttttttttttttggtggcgacggggtttcaccatgttggccaggctggtctcgaactcctgacctcaagtgatccacccaccttggcctccgaaagtgccaaagtactgggattacaggcgtgagccaccgcgcccaggctttttttttttttttttttttgagacagtctggctctgttgcccaggctggagtgcagtggctcgatcttggctcaccacaacctccacctcgcgggttcaagcgattctcctgcctcagcctcctgagtagctgggattacaggtgcccatcactgtgcctggctaatttttgtatttttagtagagacggggttttgccatgttggccaggctggtttggaactcctgatctcaggtaatccgcccgccccggcctcccacagtgttgggattacagatgtgagccaccacacctggccgtctgtttttcattctgcttgttttacttggcaatggggaacatctttctattcaatagattgatctctgaaaacatcacttttgatggcttcatactgttctatcatgaatataccacatatttagttcactactattgaacattcgggttctgtttttgttgtttttaaaatgttatgaaggatacagtagagaatatttgtgtaattaatctgtgggtgcatccattattctgttcttgggatacattttgagaagtggaattgttgggcaattcctcttaacgtatttctagagtgtttgataaatattgtctgattggcccaggaaaatgtttgccatttctcatatgtagtatttgactgactttcaggacaggaagatgtcacccaagcgcatagctaaaagaaggtcccccccagcagatgccatccccaaaagcaagaaggtgaagggtaagttggccttggcctctttgtgggtacaggtggccccttgaaaccctaagaacccgggactgggctcctttcttcctgaggcttgaagctgaagggtgtggatgtgcagagaccc

SEQ ID NO: 928 - DNA, 2300 bp, Homo sapien
gggcgacagagagagaccctctctcagaatgactgaccaactgaataaataaataaataaataaaataaaaataattctaggatctggccttaggagatccaaattatccaaccaaggttgtggaatgtctcatctcaggaagaaatgctgaaaacttcatttacagccttgttgctgacagccaaactaccaggtagcccagtactaaagataatcattggctgggcgcgatgggtggctcacgcctgtaatcccagcactttgggaggccgaggtgggtggatcacctcaggtcaggagttcgagaccagcctgaccaacatggtgaaaccccgtctctactgaaaatacaaaaattagctgtgcctggtggtgggcgcctgtaatcccagctactcaggaggtgaagcaggagaatagctagaacccaggaggctagattctagctattctgagccgagattgtgccattgcactccagcctgggcgacaaaggaagactccgtctcaaaaaaaaaaaaaaagataatcattacaacaggatatgctgaccttcataccccaccctcatgagctttgtcctgcccagcctgtaaaccctacacttgatatcactttccgtgctttgcccaataaaacatctcaaccagctcttttcggagagtcagggaattctcgctctcttgtgctgcctcccttatacccaggcataagctccaatgaagacttgtctgggaaaacttttttggcctcatgttaatttctgttggattgagagcctaagaacccctggtaacaatagggaggtagtggaaccgggttgtccggagggatattttcacttttttggatgcacttgtatctgcagttttttacaacgagcatatattaatgttgtaattatgtgtgtgtttgtgtgtgtgtgtacgtgtgtatgttttttgttttttgttttttttttaatttgagacagagtctcactctgtcgcccaggctggagtgcagtggcgcgatctcggctcactgcagcctctgcctcccgggttcaagtgattatcctgtctcagccacctgagtagctgggactacaagtgcacaccatcatacccggctaatttctgtatttttagtagagacggggtttcaccatgttggccaggatggtctcgatctcctgacctcgtgatctgcccacctcggcctcccaaagtgttgggattacaggcgtgagccaccgcgcccggccttgtttgttttctaaatatgtaaagtcagaaattaacccaagtaacgagcatacatatatatgtgtgtgtgtgtgtgtatatatgtatatatatgtgtatgtgtgtatatatgtgtatatgtgtattatgtgtgtatatgtgtatatatgtgtatatatatgtgtatgtgtgtgtgtgtgtgtatgtatatatatggagtcttgctctgtcaccaggctgcggtgcaatggcgctatctcggctcactgcaacttctgccccctgggtttaagcgattctcctgcctcagtctcccgagtagctgcgactaccagcgctcgccaccacgcccgctaattttcgtacttttagtagagagggggtttccccctgttggcgaggatggtctcgatttcttcacctcgtgatccgcccgcctcggcctcctcaagtgctgggattacaggcgtgagccaccgtgcccagccctaacgagcatatattaatgttgtaattatatgtgtctgtgtgtgtgtggttttgttttctatataaagtcagacgagtgtgtgtgtgtagttttgtttgttttctaaatatataaagtcagaaataaacccaagtaacccagccgcctgggccaggtggtatctggcccgccccattccagcctgaactccgcccaccgcgatccggaagcctagcgcccagtgggttgcaggaaaaacccggagctgaacacactgcccgacccgggccgctgcgctcgggagcctgcgcagaagccgtcggaggcgcatgctctgtagcggtctccgcagccaggattggcgcccgcgcgggccttcgagccccgcccgcagagccccgcccgcaaagccccaccccggtgcgcgggtatggcggccagcctgtggatgggcgacgtgagtgagggcagccgtccggggtctgaagacaaggaagcatctcggtttcgcgagagaggaaggatctgagtgggaggggacttgggatcccagaaaggggagacgtgtgacgggggttctttttggtgacacagaagcgggttc

SEQ ID NO: 929 - DNA, 2300 bp, Homo sapien
cttagctcacttcaacctccgcttcccaggttcaaacgattctcctgcctcagcctcccaagtagctgggattacaggcgcctgccaccacgcccagctaatttttgtatttttagtagaaacgggttttcaccatgttggctaggctggacttgaaatcctgacctcaggttatctgccccctcggactcccaaagtgctggaattacaggtgggagccaccgcgcccagcataattattaagcttttaaagcgtaaacaaacggccgggcgcggtggctcgtgcctgtaatcccagcactttgggaggccgaggcgggtggatcacgaggtcaggaaatcgagaccatcctgcccaacatggggaaaccctgtctctactaaaaatacaaaaaattagccgggcgtggtggcgggcgcctgtaatcccagctacttgggaggctgaggcaggagaatggcgtgaacccgggagcgggagcttgcagtgagctgagatggcgccactgcactccagcctgggcgacagagcagctccgtctcaagaaaaaaaaaaaaaagcataaactacaaaaaaaaaaattgactcttagacttcataaaaattaaaaaacttttagcaggctggctggcgtgtggagaccagactgtcgggagcaacagcaggatctgggagataagagactattgctatcatctgggtcaacgattagggtaacatcagtggaaggggtaagaaacagtcagattattgatacattttaaaggtagagcacacaggagttgctgatggcttggacatgtgatgttagagaaagagaggagtccaggaccacaggcatgcgcccccacgacctgctaaagtagtacttactttttattttattttatttttttgagacagagtctcgttctgttgcccaggctagagtgcagtgacgcgatctcggctctctgcaagctccgcctcccgggttcacgccattctcctgcctcagcctcccgggtagctgggactacaggcgcccgcgaccacgcccggctaatttttttttgtatttttttttagtagagaccgggtttcgccgtgttagccaggatggtctcgatctcctgacctcgtgatccacccgccttggcctcccaaagtgctgggattacaggcgtgagtaaccgcacccggcagtagtacctactttttaaagtgtaagcaaggaaagttggcccgcacctgtagtcccatctacctgggaggctgaggtggaagaattgcttgagcccagttggtcgaggctgcaatgagccttgatcacgccactgcactccagcctgggcaacagaacaagaccctgtctcaaacaaaaaagtgtatgtaagaataaaaattaatagattaggcacaggatgggtgtttaattctcggcaatcaccactaagttttcatactgaggcttattcattccatgggcaaaacattgcgctatgtgtggtgcctggggtgggctccaaattccagtcctctcctcgcttgcgatagctgtgtgatccattcctaagtttccttatttgtccacagagcgtacacagggtttttatgaaaactagatcagataatcagacacagttaaaatagcacgcgctcagtaaaattacatattagtggaagagacaagccttgaataaatcgcctttcggggagtatgaccccctccccgaaacccactcaggcgctgctcgctcgcacgcccactgagctcggagcggagcccgagccctttcccagcacacagggttcatttccagactgaaagacatcccagagacaactccagaggccaaggcgggtcggcttcctgcgtgggcccagcgccgggcactgaaaggtgaaggcgcttcttccgctcggaggaaagcctctggcggttctcgcttcgcgggctcgggatggacacgcgcgtagggctggggaggtgacgcgcggacaacgccggggcgagcaaactacaactcccaggcagctgtgcgccacgcgggcggcctactgtcgggtgtggccgcgaggggcggcctatataagctcttgctcgcggcttcagcgccctttctccccgccgcattcccggtgtcgacttactagctgcaagcctctgcctgccttcctgcgcgccgttccccgctagtcgctgctgctggcgcgcactcgccgggtttttcctcccacggcctcgagatggtggtgaatgtggcacggaggagccgggccttccaacccggtgggcccgagctccgaaaggccccct

SEQ ID NO: 930 - DNA, 2300 bp, Homo sapien
tactcaggaggctgaggcaggagaatcacttgaacctgggaggtacaggttgcagtgagccgagatcgtgccattgcactccagcctggcaacaagagggaaactccgtctcaaaaaaaaaaagttttaaaaaatacatgttacttatttatttacttttattttattattacttttgagatggaatattgatctgttgcccagactggaatgcagtggcacgatctcggttcactgcaacctctgcctcagcctcccgagtagctgggattataggcgcccgccaccatgtctggttaattttttatatttttagtagagacggggtttcaccatcttggccaggctggtcttgaactcctgatctcgtgacccacccgccttggcctcccaaagtgctgggattacaggcatgagttactgtgcctggccttatttatttttaaaggcagggtctcactttgttgcccaggctgacctccagctcctggacagaagtgatcctcctgtttcagcttcccaagtagctggactacaggtgatccactgcatctgccttaatataatatgtatatctatctatctatatatacacacacatagatatagatagatatatatagatatattttttgagagggagtctcgctgtatcacccaggctggagtgcagtggcatgatcttggctcactgcaacctctgcctcccaggttcgagcgattcttatgccttagcctcccaagtagctgggactgtagatgagtgtcaccatgcctgggtaattttttttttttgtatttttagtagagatggggttttgtcatgttggccaggctggtctctagttcctgatgtcaggtaatccacctgccttggcctcccgaattggtgggagctactgcgcctgggagatatacattttttcttaatggttttttgacagctttattgaggcataattgacacagaataaactgcacaagcctgggcgaaaaagcgagacttcatctccaaaaaaaaaaaaaaaagtttaataattttactttttttcttttttttttgagacggagtctcgctcttgtcgcccaggctggagtgtaatggctccatcttagctcacttcaacctccgcttcccaggttcaaacgattctcctgcctcagcctcccaagtagctgggattacaggcgcctgccaccacgcccagctaatttttgtatttttagtagaaacgggttttcaccatgttggctaggctggacttgaaatcctgacctcaggttatctgccccctcggactcccaaagtgctggaattacaggtgggagccaccgcgcccagcataattattaagcttttaaagcgtaaacaaacggccgggcgcggtggctcgtgcctgtaatcccagcactttgggaggccgaggcgggtggatcacgaggtcaggaaatcgagaccatcctgcccaacatggggaaaccctgtctctactaaaaatacaaaaaattagccgggcgtggtggcgggcgcctgtaatcccagctacttgggaggctgaggcaggagaatggcgtgaacccgggagcgggagcttgcagtgagctgagatggcgccactgcactccagcctgggcgacagagcagctccgtctcaagaaaaaaaaaaaaaagcataaactacaaaaaaaaaaattgactcttagacttcataaaaattaaaaaacttttagcaggctggctggcgtgtggagaccagactgtcgggagcaacagcaggatctgggagataagagactattgctatcatctgggtcaacgattagggtaacatcagtggaaggggtaagaaacagtcagattattgatacattttaaaggtagagcacacaggagttgctgatggcttggacatgtgatgttagagaaagagaggagtccaggaccacaggcatgcgcccccacgacctgctaaagtagtacttactttttattttattttatttttttgagacagagtctcgttctgttgcccaggctagagtgcagtgacgcgatctcggctctctgcaagctccgcctcccgggttcacgccattctcctgcctcagcctcccgggtagctgggactacaggcgcccgcgaccacgcccggctaatttttttttgtatttttttttagtagagaccgggtttcgccgtgttagccaggatggtctcgatctcctgacctcgtgatccacccgccttggcctcccaaagtgctgggattacaggcgtgagtaaccgcacccggcagtag

SEQ ID NO: 931 - DNA, 2300 bp, Homo sapien
gattacaggcgtgagccaccgcgcccaacccaacccagatatgttctaatgcaagtgcagataaccttaactgctgtgtcacgcggctcctccagaactaccctgtgagattaggtaccgtgatttgcctgacttagcagaagaggaagcagggatcagggaagggaaataacttaccccaggttacacagtgaatctgtggcagaagtcatggcagaagtcagctgacatctggatttaactgcagtcagaggcagacacatgatcccagcccacagcaggagcatctgggaaagggaggaagttcaagaagccagatgctgacagtgcattgcccacgtgggctgactggaaaggcctcagggagggctggggtcagactgcatttccagctgcttcatgcctctctggattctcctttctccttgaccttcccagatcccacttatccttggagactcagcttcaacatcagctgggatgggcttctctgaccctttggcttcccaagtccagctctatcatggtgtttgacggaatgaatggatgggtgaatgaacagcacttacccactttcattaattcatctagctataaatatttactgagcttctactttgtttattattatttttttttgagacggagtctcgttctgtcacccaggctggagtgcggtggcgcaatcttggctcactgcatcctccacctcccgggttcaagcgattctcctgcctcagcctcccaagtagctgggattataagcacgtgccaccatgcccgactaatttttgtatttttagtaaaaacggggtttcaccatgttggccagctggtctcgaactcctgacctgaagtgatccaccctcagcctccaaatgtgctgggatcacaggtgtgagccactgcgccttgagtttctactttatgccaagcgctgagttaggccctgaggatacaatcatcagcccctgccctcaaggagcctgcagcctgggagagagactgacatcagagatggtcagaagtgcatgtgggccagacgtggtacaggttcacacctgtaatcccagcatcccagcactttgggagatggaggcgggcggatcacttgaggtcaggagtttgagaccaccttggctaacatggtgaaaccccgtctctactaaaaatacaaaaattagctgggcgtggtggtaggtgcctataatcccagctacttgggaggctgagttgggaggatggcttggacccaggaggtggaggttgcagtgagccgagattgtgccactgcactctagcctgggcgacagagtgagactccatctcaaaaataagtaaataaataaaaacgagactagagagactagagttggctggagcaactggaactccagcctcagtgccctgggtttccagaaggccagcctggaaagggtggagtaaaccttggaggctcatgtgctgcctcaccctagcccctcacccaagcaaaactcaaccagtgtcttagtgcttgtgggacctgctttgtccccttttgtggcatcgaaggggtgatgaaggatgagacaaacctggatgtgagtcccaactctgctgtgtgacctgagacaagccgtgcctctgagcctcagtctcctcagctctaagaggggcactcccatggccctgtcaaagggttgctgtccacaaaacatgaactgaccgttggcctcatacatgttagttgtcgaatccacaggccaactgcactccctttagaactgcagttgtctgtgtctgtcctgcctcctcaaccagactgtgcccaagttccttctggggccctggtgtccaactcagacaggcattagaggaagccgtgggggctgttgaacgttgaacctgaacactgaactagaggccccaggccggggctaatgagggctccaggaaagggcttctgggtggagagggagcatctactaaccactcacttccagagtggccttcccgggtccagcagagggttgggcgccaactagggaacccacagaggaggcggggggtggggcgggggagcggtgtggagcgggtaagggggtggggctggagattaagaaatgagtgaggtggatgcttcagcgctgttagtctcctccccatgcccctcctcacttcatctagtttagtccctttatcctgtgaagtaggggtcatcattagcccccttttacagaggagagaattgaggcttcgagagagagaaacttggccaggagtttccactcggtccgacgccctcggtgccccgccgg

SEQ ID NO: 932 - DNA, 2300 bp, Homo sapien
agatgctgacagtgcattgcccacgtgggctgactggaaaggcctcagggagggctggggtcagactgcatttccagctgcttcatgcctctctggattctcctttctccttgaccttcccagatcccacttatccttggagactcagcttcaacatcagctgggatgggcttctctgaccctttggcttcccaagtccagctctatcatggtgtttgacggaatgaatggatgggtgaatgaacagcacttacccactttcattaattcatctagctataaatatttactgagcttctactttgtttattattatttttttttgagacggagtctcgttctgtcacccaggctggagtgcggtggcgcaatcttggctcactgcatcctccacctcccgggttcaagcgattctcctgcctcagcctcccaagtagctgggattataagcacgtgccaccatgcccgactaatttttgtatttttagtaaaaacggggtttcaccatgttggccagctggtctcgaactcctgacctgaagtgatccaccctcagcctccaaatgtgctgggatcacaggtgtgagccactgcgccttgagtttctactttatgccaagcgctgagttaggccctgaggatacaatcatcagcccctgccctcaaggagcctgcagcctgggagagagactgacatcagagatggtcagaagtgcatgtgggccagacgtggtacaggttcacacctgtaatcccagcatcccagcactttgggagatggaggcgggcggatcacttgaggtcaggagtttgagaccaccttggctaacatggtgaaaccccgtctctactaaaaatacaaaaattagctgggcgtggtggtaggtgcctataatcccagctacttgggaggctgagttgggaggatggcttggacccaggaggtggaggttgcagtgagccgagattgtgccactgcactctagcctgggcgacagagtgagactccatctcaaaaataagtaaataaataaaaacgagactagagagactagagttggctggagcaactggaactccagcctcagtgccctgggtttccagaaggccagcctggaaagggtggagtaaaccttggaggctcatgtgctgcctcaccctagcccctcacccaagcaaaactcaaccagtgtcttagtgcttgtgggacctgctttgtccccttttgtggcatcgaaggggtgatgaaggatgagacaaacctggatgtgagtcccaactctgctgtgtgacctgagacaagccgtgcctctgagcctcagtctcctcagctctaagaggggcactcccatggccctgtcaaagggttgctgtccacaaaacatgaactgaccgttggcctcatacatgttagttgtcgaatccacaggccaactgcactccctttagaactgcagttgtctgtgtctgtcctgcctcctcaaccagactgtgcccaagttccttctggggccctggtgtccaactcagacaggcattagaggaagccgtgggggctgttgaacgttgaacctgaacactgaactagaggccccaggccggggctaatgagggctccaggaaagggcttctgggtggagagggagcatctactaaccactcacttccagagtggccttcccgggtccagcagagggttgggcgccaactagggaacccacagaggaggcggggggtggggcgggggagcggtgtggagcgggtaagggggtggggctggagattaagaaatgagtgaggtggatgcttcagcgctgttagtctcctccccatgcccctcctcacttcatctagtttagtccctttatcctgtgaagtaggggtcatcattagcccccttttacagaggagagaattgaggcttcgagagagagaaacttggccaggagtttccactcggtccgacgccctcggtgccccgccgggtacggtggctgggcgcggggagcggggggcggcgccggcggggccccgggcaggggcggggtcggggcgcggacaaaaccgccgcggggcggcggggtggcggacgcggccatggaggccgagggctgccgctaccaatttcgggtcgcgctgctgggggacgcggcggtgggcaagacgtcgctgctgcggagctacgtggcaggcgcgcctggcgccccggagccggagcccgagcccgagcccacggtgggcgccgagtgctaccgccgcgcgctgcagctgcgggccgggccgcgggtcaagctgcaact

SEQ ID NO: 933 - DNA, 2300 bp, Homo sapien
gtcccagctacttgggaggctgaggcaggagaatggcatgaacctgggaggcggaacttgcagtgagccgagatagctccactgcagtccggcctgggtgaaacagcgagactccgtctcaaaaaaaaaaaaaagaaaattcatctacttgggaagctgaggtggaggaggatcgcttgaacacaggagtttgaggctgtagtgaactatgattgtgccactgcactctagccctggtgacagagtgagaccctgtatcatttaacaatcgccataatttcaccgttcttccaacaccttcccattgcatactgaatataatctcaagtccccatcatagtctaggctaaaaggtccagactataacaaacccctgcctacctctccaaactcattgtctttcccggttaccaaagctccagccaccttggccatcttggtccttgagtaagtgttttccttactgaagaccatggctcaggccatcagccagctagataagtctggcttattccagtattctcttctatcacccttttgtgcagttgctaatggtctgtttcccactctaggttgcaaactttctaaggacagagatcatccgtcttagccaccagttatgtactcagcacatagcaaaaggcttgtcacacaatgagactcaaacacttgtcaaatgaacgtatatacattcaacctgggtcttaaaaaagatgtataggcattcaacaacaaaaagtggtatgccggaccctaaaaagaatggagagcagtggcaaggaaataaggctaggaatacagcttagagcccaatgttcatgaggacttgaatctgagaatttggattgggtggcagtgtagagggtggactgggaacgtggtaggatgaggattaggaagatataaagacagggcaggatgccgcaccaatctgggcacctcttcctaatttctatgtggctcactctggcctgtcacagctctttatacaatttttggtgtgtttgtgggttcttctccatcttactgtgaaccttacagatgctggaattgggtcttacttgcatgcctaacattccagcatacagtaaaaaataacagctgttctcttttttttttttttgagacagagtctcgctctgtcgcccaggctggagtgcagtggcgcgatctcggctcactgcaacctccgcccctccaggtttaagcagttctctgcgtcagcctccggagtagctgcgattacaggcgcatgccaccacgcccggctaattttttgtatttttagtagagacggggtttcaccatcttggccagactggtcttgaactcttgacctcgtgatccaccctcctcggcctcccaaagtgctgggattacaggcgtgagccacataacagcagttctcaccaagcatctgacagccgaaaaactgaaagcattagagaatgctacaggacaggctttggcttagtagtgagttctgagttcaagctgaggctctgcacttattagctagaactttgcttaatctctcacaggtctcctctaaatgattaaatggcgtaacggaggtaagcggattagcacaattcccggcaaacagtaagcactcaattgttactactgaattgccagttcacaggcacaaccaaccgatctctctcatctcctggttcctctgttgccaacttcctcgttgaggtccaacaggatacctgtggggtaatgtgtcccagatgatatcccagtcctgacaccaagacaaaggcaccaaccaaaaatggcgacctcaaagccatccgagggcgtcaattacccgtcatgctaccgatagataaataagcagcgtcgggaagaaaagctagtgaaggattcttaacgccgggttggaatacgcagagctcgctcatgctgccactcaaccacaagcagttaaaagcgcaagctgcagggtgtacctacacacagctcaatatcgccaccacgtgtcggagggcagtctgcgcctgcgcaagcgaggcgcgcgcccgccggccggaagagccgcgcgtttccgggttggaggcggggagcggtgccggaagtagtcggggagggccgcgcagtcggaccggctgctgagacgaacgcttcactggggcagtctctgcatatcatggggagatagacgctgctgcctgtgagtcttgggccctggcagttgaggaacaagagcgggaggagggagtcaggacccagacctacagtgggtcagtgttcgaaggaccaggttgtggacgagacggggctgtgaggat

SEQ ID NO: 934 - DNA, 2300 bp, Homo sapien
tcgtgcttgtagtcccagctactcgggaggctgaggcaggagaatcgctttaacctgggaggcagccaagatcgcaccactgcacagaccgagactccgtctccaaatcaatcaatcaataaacaaacaattatggtggctcacacctgtaatcccagcactttgggaggccaaggcaggaggattgcttgagcccaggagttagagaccagagtgggcaacatggtaaaaccccatttctactaaaaatgtaaaaattagccaggcatggtggttcctgcttgtggtcccagctactccgggggctgaggcaggaggactgcttgagcactggaggctggggctgcagtgagccgagatcccgccactgcactcagcctgggagatcaacccagaccggtcccccccaccaaaaaaaagaaaaaaagaaagaaaagaaaagaagggccgggcgcggtggctcacgcctgtaattcaacactttgggaggctgaggcggacggatcacaaggtcaggagatcgagaccatcctagctaagacggtgaaaccctgtctctactaaaaaatacaaaaaaattagccaggcgtagtggcggacgcctgtagtcctagctactgaggagactgaggcaggagaatggtgtgaacccaggaggcggagcttgcagtgagccgagattgcgccactgcactccggcctgggcgacagagcaagactccgtctcaaaaaaaaaaaaaaagagaaacttacttagtagggttgctgtgaggattatacaagacagaagcatcttcaccaagccataggccatagaaaggtctttttgtttgtttgttttttgagatagagtctcactctgttgcccaggctggagtgcaatggcctgatctcggctcactgcaacctccgcctcccgggttcaagtgattctcctggctcagccttctgagtagctgggactagaggcgcgtgccacgacgcccggctaatttctgtatttttagtagagacggggtttcaccatgttgcccaggctggtctcgaactcctggtctcaagtgatctgtccgcctcggcttcccaaagtgtgggattacaggcgtaagccaccacacctggccatagaaaggtcttaatacggccgggcgcggtggctcacgcctgtaatcccagctctttgggaggcccaggcgggtggatcatgaggtcagatattgagaccatcctggccaacatggtgaaatcctgtctttactaaaatacaaaaaaaaaaaaaaattgccgggcgtggtgtcgcgcgcctctagtgccagctcttcgggaggctgaggccggagaatcacttgaacccaggaggctgaagctgcagtgagccgagatcgcgccactgcactccagcctggccaaagagcaagactctgtctaaaaaaataaataaataaataaaaaataaaggtcttaatacttgttaattactattactgaccccaggaactctctgaagcacttttcatgcaggtatcaccttctttagcactcacattatgtcttatcggaaacaggtttagagctgtcaagaaattcctccagagtcgtttacacttccagcaggggagtcaagacttcaacccagaaactcacaagcaggaaaaacttggcaaacaggcacgggtcagacaatgcttagggcttgctcaaggactcgtgaccagttactgatctatgcagatcttctgattgcaaactgatagctggattgtaacttgaagggtccgataagatgtaaacttcataaaacaggatttggggaggtaaatggagtagagtcctccagaggagtcgagaaagctagcttggccctcaattgtggttgaggtgattctttcatttagggcctattttcctcatctatgagtgcgggaaggagagttactggggtctctagcgacctttccaacactgattttcaagggcgaaagaattctgcttaggtaaggcccaaatcccttggctaaggttaatcctcggtgggaccggcaatagggacgcgtcccctttaaggcgccagctctccggcggcggcggccggaagtgttgaagcccggcctggcggcggcggtggcggtagctgccgtggcggcctctgcgcatgctccgtcgcctgcccgccctggccgctcgccgcccgcccgcccgacggagacggtgaggagggggaggggtgggcgcgcgggcgcggggtggggtgggggcgggggggcgggcgcgggggccgcgcggcggccggcgagggcggg

SEQ ID NO: 935 - DNA, 2300 bp, Homo sapien
cctcctgtggtcaagtgattctcctgcctcagcctcccgagtagctgggattccaggggcccaccaccacgctcaagctaatttttgtatttttagtaccgacgtggtttcaccgtgttgggcaggctagtcttgaattcctgacctcgggtgatctgccctcctcggcctcccaaaatactgggattacaggcgtgagccaccgcacccggcttttttttttttttttaaagtttatcttcacgacaaacctgttgggtaggtatcattatccatcatcccctttatcaaatgagggaatctaagaaaggttttagttgtttacccagtattgcacatctgggtggggaaaccattatttagaccctttgtctcccagcatatgacttctcgtctaatgctgtttttacaatgccatgttgcctccaagggtaagtataggcaaccgcttacagtttatacataaatctgggccatggagctaagtggctgattattattatttgttatttatttatttatttattttgagacgagtctcgctctgttgcccaggctggagtgtaatggcgtgatctcggctcactgcaacctctgcctcccgggttcaagcgattctcctgcctcagcctccgattagctgggactacaggtgcatggcaccatgcccagctaatttttgtatttttagtagagtcgagatttcaccatgttggccaggatggtctcgatcttctgacctcatgatccggcccgccttggcctcccaaagtgctgggattacaaacatgagccaccgcgcccgccgtagccgagtatctttaaaaagaagtattactaggtttattctattcccttgatggaatctatgctcccagacttgacattttactgtctccattaaaagtccttcacctttggtgcctgaccttactcattcctaccataaatgtgattatgggcagagaaaaaaagtgctttgagcactttgaccaaattatgatgttaaatccaagatgccatgttatttattttaccgagtccacccaagcctcctatatccagcgtgtggatagtacgaggttgacaattagtgcattagttacctgtttaccacgacgtacttgcaataacaaaagctattagatgggctttcctagtatcaaatattcctgcatgagttggctttgcttctgattgaaaatacttttgcccatcctttgcatctcccctatattctggttccctaatacagagtctcgtaggggtagagagataccattatgttagtgtcagatacacctggctatttaatagttttgtaaacttgggcacattacttaagctttctgtttttccagtcgtaaaaaaccgaaagactgatagcgattttgaagttgtcgaaagactttaatgtgtttgaaaatacctaacaacaaagcctggcccacagctggtatttcaataatgttaatttccttgcttccctcttgaggtccttaagattcataggttctccggactccttgaaagttttgtgtagatgcatgaggtgtatttttcttggaaataaagtccacaatttaacagattatcttggggccagcgatttccccgaaaataaattgtagattctccttcctgcaatgctaaggggtgaatctcttttgcgggagactggattctttcggtgtgtgttttgctctctgggtactctttctgtagtcggctaacagaggatgaccaagcccctcgcgggggcgggggcgggtcactcccggacagggcccccatgaagtttccctggggactgtgtgactccctaggggtcgggttacctcccagatgggggtggggtatcacttgcagctggaaggcaggttcattttaaggtctcgcgggcttcggaggcccctccctcactgagaaaccggcttttgtcgttcttctgaagccagagctagtctttccaggtgttagtcgaaacctcgtggtgcgaccctggtcgtcccaaaccccctaggccttaatcctggggcggtgggggcggggaggccgtgagcacggcttccgctcctccaatccgccagagggcgcagcggccggcctctcccttcccggggttcttcgcgccgggccccttccgcgtgggtgagtgaatgtgagagtcagcgctcgcgccgcgcgcgccgcccgcctccgctgttcggcgctctgctttaggcggtggggggcgggcgcgcgcgtaaaagcatagagacgggcattgagctcttgggctagagcgtcgccgagtcgga

SEQ ID NO: 936 - DNA, 2300 bp, Homo sapien
tggatttgggtctgctaaaatttttaaccttacctttgtgagaaattttaaatgtgaaaagggtatgtgtgaaaagacctcacttttgtttttatgtattatttatttatttatttttgagatagagtctcactctgtcacccaggctgtagtgcagtggtgcgatctcggctcactgcaaccttcacctcctgggttcacaccattctcctgcctcagcctcccgagtagctgggactacaggcgcccgccaccatacctggctaattttttgtatttttgctagagacggggttttaactgtgttagccaggatggtctcgatctcctgacctcgtgatcctcccaccttggcctcccaaattgctgggattacaggtgtgagccaccgcgcccggctatttattttttttgagacggagtcttgctctgttgcccaggctgcagtgcagtggtgcagtccggcttactgcaacctctgtctcctgagttcaagcaattctcccaccttagcctcctgagtagctgggattacaggcaggtgccaccacgcctggctaatttttgtatttttagtagagacgggctttcaccatgttggccgggctggtctccaactcctggcctcaagtgatttgcccgcctcagcctcccaaaatgctggaattacaggcgtgagccactgtgcccggcctgtttttattttatttttttgagacagtctggctctgttgcctgggctagagtgcagtggtgccatctgggctcactgcaacctcggcctcttggattcaagtaattctaccgcctcagcctcctgagtagctgggcctacaagtgtgtgccaccatgcctagctaattttttgtctttttagtagagactgggttttatcatgttggccaggctggtctcgaactgacctcaagtcatccacccctctgtctcccaaagttctgggattacaggcgggagccactgcgcctggccatatttctcattttacatcctccagaaaccactgtgcatttccttttcaggttataactgagtagtgggatctattgatattcccagatagtttgccaagaggctagcactataaactggtagtgaaccttgctttttggtttatgattgaggaacggctgtacagacatttgggctagaacttgaaatttccatttctttttgttattcttgttttattatcacctggtttgtataggaagttgataaaaggattatctcaacactcaggacttaaacagtttgtgaaatgctaagttttctctttacttagttgtagtgctaaagctaaggcccatattcactgtatcagcttaactttaaatgtttaaacatttcagttattacaccaaaatttcttatgatataaaaaatgcccttgtgtttataggaaatcatctgatgtgctgcacactttttttttttttcctggagatggagtttcactcttgttgcccacaggctggagtgcagtggtgcgatctaagctcactgcaacctccgcctcctgggttcaagtgattctcctgcctcaggcctcccaagtagacagggtttcatcgtgttggccaggttggtctcgagctcctgacctcaggtgatccacccgcctccacctcccaaagtgtagggattacaggtgtgagccaccgcgtccggcctgcacactcctttttatagtatatttgaattgcgtgactaggtggggggaggaaatagcctgatgttaattttttgtgttttgatttgcctttttttttcttccacagaataatgcatatactgccatgtcagattcctacttacccagttactacagtccctccattggcttctcctattctttgggtgaagctgcttggtctacggggggtgacacagccatgccctacttaacttcttatggacagctgagcaacggagagccccacttcctaccagatgcaatgtttgggcaaccaggagccctaggtagcactccatttcttggtcagcatggttttaatttctttcccagtgggattgacttctcagcatggggaaataacagttctcagggacagtctactcagagctctggatatagtagcaattatgcttatgcacctagctccttaggtggagccatgattgatggacagtcagcttttgccaatgagaccctcaataaggctcctggcatgaatactatagaccaagggatggcagcactgaagttgggtagcacagaagttgcaagcaatgttccaaaagttgtaggttctgctgtt

SEQ ID NO: 937 - DNA, 2300 bp, Homo sapien
ttttcttgtagatccaagggatccatgtgcagatttgccacctgggtatattttgtgatgctgaggtttggggtatgaattatcctgtcaactaagttactgagcatagtattcaatggttagttttacacaatacttttttgtgtgaaggtgatgcacaaaaaatccaatgattacacaataaatacatgggaaactattaatatgtaaagaagaagtacgtgatgctactgcataataaggagagctgggctagttggaggtggggtggggatcagggaaggtttcacaaaggaagtgatatttaagctgaaatttgaggggtaaataacgcttaggctggggtattggcccagccttccgagtggaaggaatagcatgtacaaatgtcctgaggtaggaaaaaacttggcttggagggttagggaggggaccagaattccaataaagtagccctccttcttcctatcccaatttctctctgctggcactagaaaagtttctgagtaccaggccctttgggaaagggagagagttttggcagcaggtgaccacagcaaaaatctttctgataagtccttaggtggttgagtgggaaagccctggggtggggggcttgctgtagttggtagaagtggctggacagcagctaagtggggtggagaaaatggagaagagggtgagcttgggaattctggctttgcttttttctgggaaagggtaggagccttgcacatatatggatgattcaagctagagggtgagatgagggagagctccttgtccagccacacacagatccaagagcattgccccagagcctagagctcagaacccctaatattgttccactccagttccctttgggatctttattatccaaaaagtatttcttgagcacctgctgtgaccccagccctctcctggatgcaggggtcaatcagacctggtccctttaaggagggagaccagttcggatagaaataattactatatgggataatttagtgctgagcactaaatctgtaacatggggacaataataatagaagctacaccaaagtgttggtgcatggataaagtgcttatcacagtgcctggagcaaagtaatgcttggtagaatgttctggaaaggctaggcaccccaagaagaaggatggctctaatctggaatggttaggtcttggaaggggtgtggcaaggatgacttagccaagtgccccccttctatctgctcgcactgcagccagagtgctccttaaggtggtcttcaagagcctgcccaccacctcatcgccccctcacttcctgccttctcctcttcctggcttcctttcagtccctctgcttcctttatccggaatcctcttcccttgttacttccttaagttagttcttccccaaacttcacacctcacctcaagtgtcgtttccccagggaagctgtcctgacccctgggttttgtagaccctgccactttctcaattcgtacctatatcttaatgtcattttagggttgctcgctctctctcctgcactgggctgtaagccccaggaagcagaggctgcatctggttttgtgtactagagggtccccccaaatacccggctcttctattaggcaccctcagaatttttgttgagcgaatgaatggggtgcaagaaaggcacggataatataggttatttacggagcatgtaactgtccgcagggcactgctctaagctctttgttcgaatcattttattcaatctccccaaccaccctctgagggaggtggtacgattttcctcatctcacagacaaagagaatgaagctgagggaggttaagtgacttacacaaggtcactccgcctgttagtgcaggggcgggaggcgggatccacacccaggtccctctgacaccaaagtggcaagggggtgggaggggagtccaggttgggacggggtcgcactcgagccggcggagcatccctagggagggggcgggaggcctcccctgcccagctccgagccggtggtgcagcgtccgcccccggtcgcgggcgcagactggcggccgcctccgggccacgtggtgcgcgcggcgggcgcgtccgaggagcctgcggctgctcctggctcacagcgctccgggcgaggagagcgggcggacgccgggggctgggccggtgcgggcggcgaggcaggcggacgaggcgcagagacagcggggcggccggggcgcggcagccggcggcgtcggggccgcggcctctgccttgccgctcccctcgcgtcggatccccgcgcccag

SEQ ID NO: 938 - DNA, 2300 bp, Homo sapien
gcaccaagaggggctttgggcacattagggggaagggatgctctcagagggcaaagcacagcccccttctcagggtgaggctcccagcagccccagacccggggatgtgcctcctttgggaaatggctaccccgggtcctggaaagatgtggggccatgcccagcactcacatccagcctgccaagccattgtgacctggggtcccaagccacctagatcactctcactaccttgtgaccacagagacccctgtgtctgagggtgggaggtcgtcagcatggcaggagacacttctcctcatcaggggtcctcctgtgaatgctttgggggtatggcagaaaaagggacaatctaggaactggggaagactcctgaaggaggtgacattggagccaggctgtttactctccctgcaggacctgtgtcccctcccaggataggcctgtttcaaggctgcttgaagcccactcactgccatctcctgtgtctgtaacagatctggctgttttttgccccttctgatatgtaaatctgtcctgaggtcagcagggcccgggtccggaccacgtgtgtttaaggtagtgcaaacttgtattgaaatctacttcatgccaagcatgcactctgggcatcaggactcggaatgagtcagccttggccctgccctcagaaagcctgagccagtgttgggagataaagcatcaacagatgattgcacctcagtgtgatgagtgcggtgacagggagccccagggagggtgtcacagggaagtgccttttctagcttttcactaaaacacatgtttgtcgcagttctgtaagaggtggaaaagggtcggggaccctgaaggatgaataggagttggccaccaaaaagaggaaatagcgtgtgcggaggcatggggatgtttaaatgcttggcaaacccaacaagttgggtgcagctggagcatggggcttaactaagctcttctgtgtgccaggctctctgccaggtgtcttgtgtgcatcagcccacctgatcctcaggacagcctggtgaggaagtagtgttatccccattgaggacaaagagagctgaggctgagagaggtcaggctacttgctcctaagtcacagggcctgttcgtagtggcagaacttgggtccctggaattccagggtccatgtttccagttaattccaggcatcagtgaagtagaaaggccttagaagctggaaccccagaatgaggttttgaagacctaaaaccaaatggaaaaatctaaaggaaacgagcaattttccatgaacttttgttcctcctgaagctctccaaatcttcacgtttcagaatgtactgtgcatggtgcattttaaagctctaaattgacagtgtaattctagatcgtcacagggttctcaaaactgcagagtaggtctgtttcccccaaaatttccatttatctccctccaggaggagggagggaagtttttgcccctgatttcaaaatgtcctactgtttcagatctcttcttcttcatcatcttttttttttttttttcagccagtgtcttgctctgttgcccagtctggagtgcaagtgcagtggtgcagtcatagctcactgcagtctcaaactcctgggctcaagtgatcttcccacctcagcctcctgagaatctgggacgacgggtgtgtgacaccatgcccagcaattttatttttatttttattcatttattttgtttgggtttttttttttctgagacagggtctccctctgtcgcataggctggagtgcagtggcaccatctcggctcattgcaacctccgcctcctgggttcaagtcatcctcccgcctcagcctcctgagtagctgggattacaggtgtgcaccaccataacccagctaatatttttatttttagtagagacggggtttcaccatttggccaaactggtctcgaactcctgacctcaggggatctgcccgcctcagcttcccaaagtgctgggattacaggcgtgagccaccaagcccggccaatttttttttttttcaatagagaccagagtgtctctgtgttgcccagactggtcttgaacttctgtcctcaagcaattctcctgccttggcctcccaaagtactgggtttacaggtgtgagccactgtgcccagctctcatacctcgtcttgatgcagtagaagtagtggttaagcctggaatcagatcttggttttccctctctgagcctcagtttcctcatctgtagagtagacttccttcacgggtggttgtgaggatttaatgta

SEQ ID NO: 939 - DNA, 2300 bp, Homo sapien
tccccacgcacaaattcagaaacgcagagccctccctggccaacacacacacacacacacacacacacacacacacacacacacacacacactcttatcaggctggggcaggcactggcactgctgagtcacccacaggcagctcagcccaacagagctagagccacgtggctgccccagcagggagggggcagggcccacagcagctctttagaatcaccccatccacctgactgctggggttttcctctccctagccctttgattgagtcaggggtggggatggggttgggggaggagccactgtttgcagaggccaaatcaaaaatttcacagcctgcactctcctgggtgcaagagtacacgtgagaggaattaaaaaatactactagattaattactatttgcaaatatattttcacatactcccatttaaccatcacaacagctctatataaagttagcactattattaatctcattttaccccagggtggggggcgggtgccttgccccaaagcccaaaacccagactcacctgcctccaaatccctacctcgtaacccctgggcaatactgtctggtgggcaggtgtgatataggcaagtgaaaggtacatcaatgtgcttgggagcctggttgtctatgtgtgtgtgtgcgcacgtgtgtgtgctcgcgcaccaggcttccccaggggattcacagggatagagactgaaagggtctcaagtgtcctgatttctggtcgaaggatccaacacttctctagtcccttgaagcccacctccctccatcagaaaacatctccccagtcaaagggctcagtctgaccctcctctgctagattatgggctccttgaaggcaggaaccagggccctgaagcctcaaacaggacctgattcagagaagtcctcagtgaatttggagggggggagagtcagtcaatgtatgacttttaattcagttatgtatcaatataacaataacatcaataattataataaatgctaatgcttattgcatgcttaccctgggactggcactgttcttagcacttgacatggattctttcattcaattcttgccacaacccttgaggaaaatactttcattaaccccactttgcagaggaggaaactggcttggagagagttagtagctcacccaaagtaactcaattaggaagtggcagcgttggggattggaacacaggaagtctagttaccccatttagtaggaagatcactacattcagaggaaggctttgtcctcagcgagcctcagtttgccatatttgtccaaagaaagggttagttttccacggtgctctggcctggaatattctatgatcctatgattctgtgacgaagagcttttgaagtgtcagggttagttttaaaatgaaagaggccattctgccgggtggtgagcttcctgacatgggcatatgtaagccagctcaggcctgaaatgggagggaggggatgagacttcggccagtgaccatggaagcgttgatggagtggaccatcaggaggggaaaagtcactgagaagagtggcaaggcgggcacgacaggatccagaactcgcttttacggaacgcctactgtgtaccagacctatgcttgacatttaacttacatcgctaattctcaggaaaacattgtaagatttatggttgacgaaattcagatccagagaagtgacttgttcagggtcacgccggacgaagtggtaggacaggcgatccaggtgagtctcctcagggtcacttccctagatcccctctgaccaacccctctacctagtaaccttaggagcagtaccacgtgtcaaattgcttcacacttttgtcatatgacgtcacaccagtcaatccaggaactccctgcccttccctcccctgacctctggggtctatcaaagcagcccccggctcagtgtccccgccggacgaggctacacctgcagcccccgccccttcccaactgcgactctcgcactcctctgcccgggcctccccctccccgccccgctgatcggcagttgcctgcgccaatcagagggcctagcgggcggggcggggcctcacgatggagttgccctgtcagtgcaggtggaggccccggcggggcaaagtggcaggaacctcttaaagggcgagagcggcgcggagccagaacgcggtcggcccggtccccgccgcacccagcccaggtgagcctggaccacctggggggcgaccctcggtccccgggagggacggggttagggacagaagaacctacccccaaggg

SEQ ID NO: 940 - DNA, 2300 bp, Homo sapien
attatatttgccagttccacacctctcagtccacattttagtctctgaatagtaataataattaacacacatagatcttactatgagctaggcactgctctaagtcctttacatattttaactcatttaattctgttttcctttttcttttttttgagatggagtcttgctcttgtcacccaacctggagttcaatggcatgatctcggctctctgcaacctccacctcctgggttcaagtgattctcctgcctcaacctccgagaataactgagattacaggtgcctgccaccaggcccagctaagttttgtatttttagtagagatggggtttcaccatttggccaggctggtctcgaactcctgacctcaggtgatccgcctgcctcagcctcccaaagttctgggattacaggcatgagccaccatgcctggcctaattcttacagtaactctgtgaggtgggaactattattatccttctccctcccccaaccctcgtttttgtttttagggatggagtcttgctctgttgcccaagctggagtggaatggcatgatcctagctcactgtggccttgaactcctgtgcttgagcaatcctcccacctcagcctcccactataggtgggagtcccagctacttggacatattatccccttttatggtgttgaaaaatgaggcacagccgggcgcggtggctcaagcctgtaatcccagcactttgggaggccgagaagggcggatcacgaggtcaggagatcgagactaacacggtgaaaccccgtctctactaaaaatacaaaaattagctgggcgtggtggtacacgcctgtagtcccagctactcgggaggctgaggcaggagaatcgcttgaacccgggaggcagaggttgcagtgagccgagattccggcaccgcactccagcctggtgacagagcgagactccgtctcaaataaataaataaataaataaaagaaaaatgaaaatcaaaccattagaaaaggctggagactaagaattgaacccaggcaatctgtttccagaggctgtgctgggatcgtgaaggggctgtgattagatatcaggaatgtctagctggcatctacagactctgctgtcagatggcctggcttcttatcctgtcagttttaagtctctctgcttcagtttcctcatctctaaaatagaacaccagatcctatcttaccttctaggtatcatgcttaaaacaaaagccttctttctgcactgtgggtccgaagcctgttcacagaccagcctagcagggagtaggaagggtcaaggggtctctgacacttctggaaggaaataaagacacactaagcaattgtcagagcaaccctcagttcatctggagaccagacctcggaagctaggtctttataatgttgagattgccaggggggaattaggagatccttaaatgcagaagacaggttcaatcttggcgtggtctcaacacttagcttccatttcaggccttacacagctggcacgagaggtaaagtctcatcgaatgtcagggttggaagggcgcctagagacagtcaaactagtggatggggaaactgaggtacagagaagctgagtgacttacccgaggtcactaagcgtttagggggagtcagttggggtagcctggctacaacctctacgcgagttacttccctgaggcttccaaatctcggcctcttacttggaaggaggaaagggcctcaccgtccagggctctagctgcctcatgccccacgtgggtgctgcgggatcccggaacaccccggctccagaccgggttcgacttgcgcgtgcgcacacgcggccagccccttgccttttcctctctctttttcgttcccctctcctctccttaccggcctaggggaggggggaaacaaggggagctagaagttggcctcagccaatgggcggacgggccgcgggcccggccccctccttccctccggcgcggcccaatagaaatttactacaatgttgtggcgaactgagggggaggggcgcgggccggcgggcgggctgcgggccgggctggcctcgcctcgcagagggaaggcgggagggcgcgcgccagggtcgctcgctcgctccctccctccgctggtgcgtttagtcagtcagccagcagcagccggcgggcccgcgagccgcagagggcccgagcctcggacgccggcgcctcctcctgccattgttcgtcgggctgcagcagtggcgggcgcaggagcccggccccggagccaccggtgaggcgag

SEQ ID NO: 941 - DNA, 2300 bp, Homo sapien
ctgacgctacagtgagccatgatcatgccactgcatgccagcctaggtgacagagcaacaccttgtctcaaaaaaaaaaaaaaacctaagttttttaaaaaaatgaattgatttcactgaatatatctgataaatacaaactgcaaaggcattctctaaatttattcaagtaaatttacttcaaatgcatgatactaattgattcattcaacaaattcttatcaggcacctagcacaggactgatgctacgtgctagaaatacaacagtaaacaaaacagtcaaggtctatgtcatcatggagtttacattcttgtttcaactttaaccagtataatgaaagaaaaattcaaaataaattttgtttaaaaccactattgatacagacaaaggggcagagaaattctaggcagaaaaggacgggtctctgacgaaaccctaccctcaaacagaaaagcatgagactgcagcccaaagtgagactttatatccctgttttcccactggaatgttgccttttcctaaaccacccatggccccacctcaccccatcctgtgcctataaaaaccccagactcagctgggagggaggagaaacagctggatgttggagagaagcagcttgacttcagagggatagcttgatggtgtaacttcagagaagaattcggctggagatggctgtacttcagaggaagataatctacccacccccggccccttttcagctccccttcccgctgagagccactttcatcagcaataaaatcccctgtatttaccattcttcaattcattcctgtgacctcatttttcctggacaccggacaagagcacgggagccatgtgtgcagatacaaaaggctgtcacactggccctctgacctcactggcagagggcagcacctcactcaaaaaggcaaagggcccactgagctgctaacacttaagctgttcgtggatggcatgtcgaagctaaaagagcactgtaacatgccctctggggcttggagggatgcagatactgccccctggatactgctgtgaggcccgcgtggccttgagtactgcaagcaccaaggcagtcagctcgttccagcgcttgtgcactccagttcccacctcgttcactcgcacgctccttcccacaaggagttgagagtggcaggctcagtaaacaaggtacgcctgtcacaattcccatgaagaggtcaggcaaatatcctgcttcactataaggggtctgattcaataggtctggaaaggggcctgagattctacaattctaataagatgttgccaatgctgctggcccactgagcacattttgagtaggaagcacagaaaaccaccattacaatcactttgagaacgtactgcaaaatgcctagaaacaaagactataaaaagctgcttttagcaagtggaatatgaagagcaggaaatacttgacacaataagtgctcaacaaataaatccttgttaattaatgaatgaaacaaatgatgcaacacattaaatgtgaaaagtgaaccattaacatttttaaaaactctttttggcacttaatcagactttgtaatctttaaacatagagtatggcaaatccaagtttcctacccagctgtgacaagtgcccagattcagtgttctgggtatctccattgataatatctctgtgccacatttaggaagtaatgattaggacaggagccaatcataatcctgaaagatatagtcctcaatggcataatcctgagtgttgaaatcccaaaagaccaaaatcccaaaaatataattctggaaaaaggaatttaaaaaaaaatttaaagatatgtatttacatttttaagggggatttatttgagaaacataaaaacataacagaacacttcataggctactttacatgataaaataggcaaaaacaacatacatattttgcaagcataaacacttgggtatactaatgacagtcatacaggtataagttatgagcagacaaggtgtattcataaaaaaatagcttatataactgcagtcatctgaaataccacgacaaacaacctaagtcttaagatcaatcaaaaaccatgatgggctttttgctgtaggcccgagtggttgctgccgaaatgggcaagttcatgaaacctgggaaggtggtgcttgtcctggctggacgctactctggatgcaaagccgtcatcgtgaagaacattgatgatagcacctcagattgcccctacagccatgctctggtgtctggaattgaccactacccctgcaaagtgacagctg

SEQ ID NO: 942 - DNA, 2300 bp, Homo sapien
taagtagagagagcagcaagtgtgaagggcctgaagagggaatgagctaaatatagtttgttcattcattcagattgttaacatccagataaagttacttcatttaggcttgtctggtgcagtggtgcttacagctaattgatcacaaccagttatagatgtctttgtttcttctcgactcccactgcttcacctcactagccttaaaaatttttttttttattttaaaatttttttttattatactctaagttttagggtacctgtgcacattgtgcaggttagttacatatgtatacatgtgccatgctggtgcgctgcacccactaacgtgtcatctagcattaggtatatctcccaatgctatccctcccccctcccccgaccccaccacagtccccagagtgtgatattccccttcctgtgtccatgtgatctcattgttcaattcccacctatgagtgagaatatgcggtgtttggttttttgttcttgcgatagtttactgagaatgatggtttccaatttcatccatgtccctacaaaggacatgaactcatcattttttatggctgcatattttttaattactttatttaatacagagaagatgagaagacaatgtaaatgctgctttgtgagtgatgggaagaagtacttttagtgatagcagtgaatcaaagcataaggtcatcaatagtcgacttcattgcccagtgttttcaaagtccccacgtgtgttggttattctttagtaaagtagacgtgacaatgctcgttggctgttattgtgaagcttgacttataatactgggattttgagatcaagaggctagaagccaagatgtttgaaatatgtaaggtcagctgcctgctctttcctcctcccctacgagtgaatcaacacttgctttataagtttttcttctctatctcctttctctattgttagtttcacttcctactcttaaaaattctgagctttcaaaatcatgtttatcaggagaaaaaagagactgaaagagcttaaaatgggatacctctggccgggtgcggtagttcacgcctgtaatcccagctcttagggaggcagaggcgggaggatagcttgagcccaggagttcgagacctgcctgggcaatatagcaagaccccattctccacaaaaaggaaaaaaaaaagggatacctctgaaagaggttgtaatttggaattgtaacatgaaaacctaaggaaattttttgcagtatttcaactgtatatttgtcgttgctgttatccagtcttacaacaaactatcagaattttacttttgcaattttaatagagaagtctctgcatcctaagaaatgtaaagaaaaagaacaataaagactgggggaacttttaaatttcatcgtctcttggtgtgtggagaattttgcagggaataattcctgcaaatcctacaccttcagattgataccctcaaaggacactaaaccacagtccttttttaaggaaggataaaactgtatttactgtatacagttctaggcattggatttaatatgtgatgtatttcactaaggtggcctccgtgggtactattttaagctactctctctgtgtgcatatctttagtgactcaaggcattaatattttattcaggatgtgtagataagatatttttgtaatttaatggaaagtctcatgtttaatgggtttgaattctgtttgttggcaattaaatacctaagtatattaattttttagggtttagggttttgccaacagtaatgtgttttgcttataagagccccccttttctatcttctttttaatagcaacatcatgacaacagagaagagtttagtgactgaggccgaaaattcacagcaccaacagaaggaagagggtgaggaagccataaactcaggccaacaagaacctcagcaggaggaatcttgtcaaacagcagctgaaggagataattggtgtgaacagaagctgaaagcttctaatggagacactcctacacatgaagacttgaccaagaacaaggagcggacatcagaaagcagaggactttcacgactattctcctcgtttctcaaaaggcccaaatctcaggtgtccgaggaagaaggcaaagaagtagagtcagataaagaaaaaggtgaaggaggtcagaaagagatagaatttggaaccagtcttgatgaagagatcattttaaaggccccaattgcagctcctgaaccggaactcaaaacagacccatctttggatcttcattcattaagcagtgcagaaacac

SEQ ID NO: 943 - DNA, 2300 bp, Homo sapien
agtgggttcagtttgcaggtgcacagggaagctgctggtgttgtgagggtgtacaacagagcaggagagcgggtactgacctggtctgggggctgggggaaggcccagggtctgaaggatgtgtagaaggtggcaagggcacgaccagggggtaagtgttcctgccggaaagcaaggaccaaccaagccctgagggagtgtaagaggcccggggccagttcgtggagacaagaagagatttccaactcgatttggggagtcactgatggttttaagcaggtagtggcaggctcagattcagagtggaaacccttgctgcctgtctgcagcgcactaggacacggggaggcaggagaccatgggctccaggaggagcctggacgccggagcaggacagtggccatgggaaagggagaacgtggctggccccagatgaaaagagcagggcccccaaggctctgtgagtgggatgagagggggagaggaaggggccaaggctgaccccgtgcttgggtggacaaagggcccttcacagagctggaggcaggggatgatcgaggggcccagggagtcagactagaagccgggcttattggaggaagagcagtgggctgggagaggcaggcatggagtgggattgagggagcccaggggtgggagggagagctgggaggcggaggtgcgaccgcggtggggtcagtgtgcggggagtggacgaagcggaggattgatgggggcgggggtcccaagcaaagatgctggagggaggcctccgtggagcggaccgagacctcaggagcctccagtcggactggggaggcaagaaggaggccctggcttcgatctcgcacacggcctcgcagggatgaagcccgggagccgaggctcggtcttccccactgtggtccctctggtccgcccgttacctcaccgaccccccgagggggcttttaagagctggaagagggggtcccggggggcactgatgcacccccactctcctccgccgacccagagggtgggagctcaggttcaaggcctggcctggccgtgcggctccgggacccggctccgccccgcgtcggggggtggccccggcccctggcccgccccttcctcgggtcccctccctgtccgcggcgcgcagccgggtctcattagcgcccctccccccggctgcgcgccgggggtctccacggccggggggaggggcgggccttaatcaatcctaggccggaaattcctcccggggggcccggcctgaccgctgagcctggaaatcggtcgccgcctcccccgaacccgccccccgcatcatggaaactgggccgaccgccggccgccctggctcccccgctctgcattcctgcctccaggggcgggagggcgcgaaggccgggccgcccccttcgggctcgccggcggggtcgcagctctcagcaccctccccgttattgggaacaagcccgctcccccactggcgaaggggcgcctgttcttaggagtacccggcggcacatccgcaccccgtccggtcctttcagctacaaggcccgcccctccccgggcgctgctttcgctgagggctttgcggagtcgccccgggctggcccttggcgtctggctcttgcctctcggcatcttgcgaggctgaagccttggtgcccattgcacagatgaagtccgcgaggttcagcgacagcaagggctgcgggaccggggcagagcagggactcgggccgcctcctcctggaagctccccgggcgcctgggatgaggggctctgggaagcggggaaggacgtgcgggtgtcggggctcctgggtcccgggtctcagtttccccatgtaggaaggggtcgcctttgtgggcctttgcgaccgatgtaagctgggggtgggagagtggggatggcagaactcgggccacgggtgcccggagtcaccaggcgcgcacagggcgcctacctgcgatcctttgacctgagctgccgcctttcagcggcggtggggccgggcccggcgcgggtcggacggtcccgggggctggaggcggggccggggcggggctggggccgggccgtggagacccgggcggctctggagcctccgcgcgcggactgggacccggacccgcgcggcgctgcggcgccaggtgagccgagctggggtccaggggtccgcactccacttttcccaacttttcgtttggtccctccctccctccctccctccctcggtcagggcccctgggggcgggagcgcggccctcccgttcccccaggcgggagtgtggacgcg

SEQ ID NO: 944 - DNA, 2300 bp, Homo sapien
tctgtcattcatcgttaccgtattcttaatcatgagagggattatcttcacccaccaccaagtggcagagaagtgctttatcatttttatgataatgctataactaatgagtgacaaaagaaaaagcaaacactttgcctttaggaaccctaccacctatttgttgtttttttgttttttgttttttgttttttttgagatggagtcttgctctgtcgcccaggctggagtgcagtggtacaatctcagctcactgcaacttccgccttttgggttcaagcaattctcctgcctcagcctcccaagtagctgggactacaggcgcgtgccaccacgcccggctaattttttgtatttttagtagagacagggtttcaccgtgttaggcaggatggtcttgatctcctgacctcatgatccacctgcctcggcctcccaaagtgctgggattacaggtgtgagccaccatgcccggccacctttttgtttttaagcccttctgccagcctcagaaatagcatcccatttgcactggcatgtacaaagcattagagtctatgttaagaaaaggaagacatttggttctggattaattttaggattatctaagaagaggttaaaacaagttttgtttaaaagcgtgtttgaataactctctttatgtatagttaaaattaaagacccactcttaattttcaaagtagcacatatttataattggaaatttttttttttttttttttttttttttttgagacagcgtctggctctgtcgcccaggctggagtgcagtggcgcaatctcggctcactgcaagctccgcctcctgggttcacgccattctcctgcctcagcctctcaagtagctgggactacaggagcccgccaccgctcccggctaattttttgtatttttagtagagacggggtttcactgtgttacccaggatggtctcgatctcctgacctcatgatccacccgcctcggcctcccaaagtgctgggattacaggcgtgagccaccacgcccggccggaaattttttttgagatggagtctctgtctgttgcccaggctggaatgcagtggcacaatcgtggctcacctcccaggtacaagcgattctgctgcctcagcctcccaagtagctgggattacaggtgtgcaccaccacccccggctaatttttgtattttttgtagaaacggggtttcaccacgttggccagcctggttttgaactcctgacctcaaagtgatctacctcacaaagtgctgggattacaggcgtgagccaccacacctggcctattataatttttttatatggagaaggaccaaaataatccaaagatgtaactctttgcattttgggttttttagttttactttttttcacatacaggtatgggcatgtgcacgcacgcactctgtctctcttcttttcttttttttttttttaattaaaaaacccaccggccagttgtggtggctcacgcctataatcccaacactttgggaggccaaggctggcagatcacaaggtcaagagattgagaccatcctggccaacatggtgaaaccctgtctctactaaaaatacaaaaattagctgggcatgatggcgcacgcctgtagtcccagctactcaggaggctgaggcaggagaattgcttgaacccaggaagtggaggttgcaatgagcctagatcgggccactgcactccagcctggtgatggagcaagactccatcaaaaaaaaaaaaaaaaaaacctatctcctgcacagtctctcccttttcttatgcctctcctgactccttttttttttccaaacttggaatcatactataagttattttataatttgcttgtttcaccctaacagcctgatccttttcctttgtcattaagtattctcctacaacctggtttctaatggctacatagtactccaacatacatatgttatttaatggacataatcagaaccatgttgcaaggcatttaggttatctttatttttgtactattttatgcatgtataatactgttgaatatcctttatatgaatttttgtatacatttctttttgccttagggcagattcctgcaagtagactttgggagtcaaagcatatacacattttaatgcttttgctagctattccattactcggtaaattaatatttacgtttccacctgcggtgtttaagagctcctatttttttttttcttttttctttttttttttgagatggggtctcaatctgtctcccaggctgcagtgcagtgcagtg

SEQ ID NO: 945 - DNA, 2300 bp, Homo sapien
gaggctgaggaaggagaacgcttgaacccagaaggcgtaggttgcagtgagctgagatcgcaccgctgcactgcagcctgggcgacagtgcgagactcagtctcaaaaaaaaaaaaaaaaagtagaataaataaaaatttaaaaataaaatccagaatcaaagaaaaataaaggatggataaattgatcccataaatatctaatgtttttgcatggctaaaaaacactcttggcaaagtcaaaagtcaacaaatggaaaaaatatttgcaactcatttgacaaagagctgattttcctaatatatagtgagcacctatgaataagaaaaatgggtaaaggatatacacagacagaaataggaaaatatatctcaaacatatgaagaaagactcatatctctgcaaaatatgatatttgcaaattaaaccacttggagataacatttttcacctctcagattggcaaagatcaaaaagtttgataacacggtgttgatgaggatatgaggaaacagccacttaaggggaattgagcaataacttatcaaaactctgacccaaatatcctatttctaggaatagatgatatatatagagagagagagaaagagagagagagaaatgcaaagttactgcagcagtgtaataacaaaaggttggaacttatttcaatgtccttcaccagggcactggctaaataaattactgtgtataaaatggtatgaaccataaaactagtccttttatactcttaaggaatgattttcaaaatatattttgtgtagaaccatatgtatagtatcctactatttgttttataagggtaaattaacctcctaaaggacatttcagaaactgcctctgggaagagaaactaagtggctggtggacagcgaagacttttcactgtgtatcatttgaaccttgagttatcctttcaaaatattcaaaaaacaaaaacaagcaaagaaacaaaaccctttatggttctaggtacatggcgttagtgagaagggaaccaatatttattgagctcttaccatgtttcagacactgttccaagtactttcacatacactaccccatttagtgacctgtgtaatccttgagatgggtatacattattctaattttacaggttagaaaatagactggataggccaggcgcagtggctcacgcctgtaatcccagcactttgggaggccaaggcgggcggatcacctgaggtctggagtttgagacctgcctggccaatatggtgaaacttcctctctcctaaaaatacaaaaattagccgggcgtgggggcgggcgcctgtagtcccagctactctggaggctgaggcaggagaatcgcttgaacccgggaggcggaggttgcagtgagctgaggtcgcgccactgcactccagcctgggcgaccgagcgaaactcgtctcaaaaaaaaaaaaataggttggattgtggtcaagtaatttactcggcgtcatgcctagtctagctccaaagctccagccttctccgcttctcacactgcttctatttaagcagtgtcctcttaaaaataatactggtctcatttattgggcacttgatatgacaaaactactaagtgctttatgtacgtattctcatataattctcaagacaactctggaaggtaggaactactctcccccttttacagaaaagataaaggagggtccgagacatcgcgcgtaacaagcccaaggtcacgggtacacaatcgtttggaagctaggtttgattccaaagctccagctccgaaatccaaaccacacccggttcaaaggacaaaagcacaaacgctcgctcgctgggctctaggaggtgcggacacttccgggggaggggcgaagccagctggctgcggaaggcggtgcaggaacccctttggcgagctcgcgcgaggacgtgccgcagcgccgcctgtcgatcaccttgccccgccgcacgtcggcgcgcccccgggcaagctcctcccccagtcctggccgagcgggaagcgaacgcgcgctctctccggttaccttccgcctcggggaagggcgggggaagtggaagcgcgcgctcgcgagctgcgtgctcgcgtacgtcgccggggttcggctgcgtccgtcccgccgcccgcccgttgccgccgccgccgctgccgccgtgctctcgctttgcccgccgccgcctaaggggggctggggccggggccagccatcactgccgttgccgggatgccgcgggtgtacatcggccgcctgagctaccaggcccgggagcgcgat

SEQ ID NO: 946 - DNA, 2300 bp, Homo sapien
atctgaacctggagtttccgaggcagggaacagcatttcaggcagaaggagtggcctgaataaaggcacaagacacactggggaagacgggtatcagatgcagctggatcacaggctatgcacggtccaacaggagaagatgaagctggaaatgcagtgtgggagtcagagtgcaaagaatcttgaatgcaagtccaggaaattggacttgaacccctcagtcagtagttctcaaactatgcccctgcaagaacccagatggcctagactaaaagtgagggctattgggatgcacaggaggctaaagtccagccccaaggaggaggacttgctggatgattcttcaggcttcctgactgggctccccagaaattcagaggagccaatttggtgaagaagagaatgtcgacatctcaatgtcacctagggagtcttacaacagaaggttacgttgtacttcccagttcaagtaagcctatgtgtcactggggaaaagggtaagcaggactggtcatcgtgtgtgtgctggcacataaatgtggggccaagcctttcccccaccatgggacaccaactttctctaataataaaaacaagtacagacatttagtgagcacatactataagccagaccctagtctgagggttttatgtgtgatatttctcatttaatcacaataacccccgataatatttatcaaatgcttccatgtgccaagcattgtactaaatgcttcaagtggataatatctcacttgaccctcacaacaatcttgaaacagataactagtattccttccattttaagagtaagaaagtgaagacacagagaggcctggtgacttgtccgaaatcaaatggctggaaaatggcagagctaggacataaagccaggtttgtccaaatctagctcacagtactttgctgtgctctcttcctcagaggaaaggcttggagatggcaagcttcaagtcaataaaatccaggaaaggaactcttccttatccttcaaagccctggctcagtatcttaaaacctgtttcctgggacacctgcatcagaatattcttgggagcttgtaaggatgtagattcctggaacccccatccgcaagattctaattcagtaggtctaagatgggacctcggattatttttatgcacacagaagattttgaatcacagggctggctctaacagcacctcctccaagagcccccaccccatcccaccccatcccagagcacttctcttcagactacagcattgcactctggcacgagccacagctcgatctggggttttagtaatgttcatgtcttccctacaccaaaaatcagactagatccttcatagggctacacctttttacaggcatttccagtgttccacttaatccctttctacactgtgagcattttgagagaggacccttctccttgtgattcctgtcttacatctgaacagagttttttacaatgcgttctcccacccacaatagcattcctctattatttcatccaatcctcacaacaatccggaaggaggcatattatccccattgtaccgatgagaaaaattcagagtttcacctgcccaaggtggccaagctaggaagtggcagggctaggatttgaacctaagttttctaactccaagccccatactcctgcctccacagcagctttcgtgtactctcctcagtgtagggaagtaagctttgcctccctatgccgttacatggtagtggtgattaaatgagataataccttaaagagcctggctcggtgagcactcaatatattatgtgaagggtaaactgaggccagggagagtaaatatttcctccaaatcaaacaccaaactgcaggctgtagacacgactttggactagccccagactctccttgttgagacaacagctttggcggcctcgcaagctccgcacccccggatccctccggggcccacacgcagtctagccaggcgccaccacttgggcagcgaaggaaggaaacgcccttcaaagggaccaagggggagtggtcacccggcggggcaggggcggggcgcaggcgcgcggtcgctggaagatgacgtagccggggcgtcaggctctgtgttggttggagcgagcatgtgggtctgcagtaccctgtggcgggtgcgaacccccgcccggcagtggcgggggctgctcccagcttctggctgtcacggacctgccgcctcctcctactccgcatccgccgagcctgcccgggtccgggcgcttgtctatgggcaccacggggatccagc

SEQ ID NO: 947 - DNA, 2300 bp, Homo sapien
ccctacttcagcagtctttatagctggagctgtaaaaaaaaaaaaacaaaaaaaaaaaaacccagagatcagaacttattactccttattactcctctgcttaattactccacttcagtggcctcccattaattactcttagggttgaacctcaagccccttccttgctcatagtttcttgcctgacctacagaccctgctgacttgtctagctgcacctggctcccttctgcccctgactcactccatgccagctgcccggcttccttgcagctgcttgtacccaccagctcctgcctttgcacaggctgtcccctctgactgcaatgttcctctccactgatttgcatgaggttggctccttctcatacttcaggtctcagttcaaatgtcaccatgtcacttctatagcaaagccctcttggaccacttatctaaaggagatgccccttccctatgttctttatcattatactccctcgtttcctttagcttgcatatcttagatggtaatgatatatttatgtacatgtttgctgttgggctctcctaatagaatgtaagattcatgaaggctaggaccatttccctttcattcattccatccagtcagtatttattgagcatcaattacgtgccagaggccgggcgcggtggctcacgcctgtaatccctgcacattgggagactgaggcaggtggatcacctgaggtcaggagttccagaccagcctggccaacatggtgaaaccctgtctctactaaaaatacgaaaattagccgggcgtggtggtgggcacctgtaatcccagttacttgggaggctgagccaggagaattgttggagcctgggaggcagaggttgcaatgagccaagactgcgccattgcactccagcctgggcaacaagagtgaaactccatcttgaaataaaataaaataaaataaaataataaaaacatgccatatactgggcacggaaatacaagatgagtcttttcccaagggagctcatttctagaggtggagacagataatgaactcatcatatagcccgcactctatttgaaattgcaacaattccccttcccttccctgtccccccaccacccccaaatttcctggtgtatgagacagtgataaaggacgtacaccagagggtttgcttttttgtttttgtttttttggttgtttactgttcttgtcttcccactggaatgtaaggtccatgagagtagggaatttttgtctgttttatatctctaccctggcctatagtaattgttgaataaatgaatagaccccaataaatatttgttgaatgaataggtgtccagatgggaggaaggtctcagcccctattcaattcaaaccaaacaactttgattcaaatctcggtgctgtcaaatactgttgcataacagtatttatgcagtataattattgcatacctaatatatgatgattaaatgagtccatgtgggttaaacacatagaaggtacctggtcttacatagtaatgagcaacgagtttgcagatcatagtgcgagggctcgttctgggtagaggcccaaatacatttaacctgtgtagccagaaggtagagtaggaccagtgagggctagtgagggaggtagacttgcacgtcatgaaatgaaaaactttctaaaagccggcgtttccaaagccccaacaaccgctcttggccaggtgatgagcgccctgttcctggaggtatgtagaacacgcatttgaaggcgccaaggtacaagggattcaggcatcggatgggacagaggccgggtgtccctgggtcaccgtccctgagagcgctgtacgggagctaggcgtgggccatgagcgtgctcgcctggcagtgttggtgcccggtccgtggagacgtccgtgggcgtccagacccagccgcggggcctcatggcggggaggatgcgggagcgggggaggggcgcgccagggctagcgggcggccggacccgctgcagcacccgccgtggccagcagggagcgccgcgagaccgccgaacccgcggccgggcctgacgtcagcgccccgcttgctccggctcgcgctctggactcggcgccagtcccgctccgcgccgcgccgctccgctccggctcgggctccggctcgcctcgggctgggctcgggctccgggggcggcgtcccccgcgccgggccccgggacgggcggcgacgctccaaccatggcccgtgcccaggcgctcgtgctggcactcaccttccagctctgcgcgccggagaccgagactccggc

SEQ ID NO: 948 - DNA, 2300 bp, Homo sapien
cacactctgcctcagtggggtctggttgtggagttcaggcagggctgtctccaagattaggcccagcagagcctggggtaggatgagtgattcaggggactttggctggggagacctcgagggtttggggatggaactcgagacctgatgtctggaagcaggggagcttgtcctggggagaatgagctggagtctgctccaggaccaggcctgggacagtgatctctggccccattcttccctgggtgggcatgggccctctgagggctcaggagccttttagaagtctctttccctgcttcaagctcaggggctctgcctcctttactgagggttgcaagcagctcaggagatgggtgctggcattttagtcccctgctaaatggctccaagatgctgctgtctgaggcgggaagggtctaggattattatccctattcctctgccacactggaaccagttcagatatagacacaggagacacacgggtggagatcatatgttatagataaaactggagatggagtttgagatgtgtggccagttggtgggccgctccttcacccctccccgatatagccgtgcaaccgcaggccacccctccccgtcagggactggcctttactggcagggagcaggagcaattgagtgcacactttccaagggtaggctggcctggaaaaagaggaaggagtggagccaagcagcctcgctcatgggaggagtgagtgaaggatgggccagggccaggtgtgtcactgctgcgtctctccacgcggaaatgagggatgccgatggggaaggttctcccacagcggttaagagggagatgggctttttgcggcctgatgcctggccaggaactccttggcaggacagtgcgggggacagcggggtttctttaaagagggtaaccacccagggggcttccgggtgtcagctgaaggggaggggaagagctgccctagccactgatgagagatgtgaggggcccatcagtcactgtcactcagcttggtggatggaatgtgtgtgcccacatgctcgccgggggacatctggcctgctgaggggtcaggggtcctggaggggtggcatgtagtaccgggaagatctttgaactaaacttaggaagctgtgccctcccgcccagccccctccttggccttggtgtgcccatctgcacattgggggcctggaaaggagactgtctgagggtcctgagctggggctccctggccctgatgggtgggttatcacgtggaaaagttctgagacagccctgtcccctcctgaggtccttgatgcctctgacgtctgaccccagccatgcaggtcctattggcttggagccaggaggccccatttctcagacaggccctgaactcgtcagtgaggggccagctggagtctttgtggtggtcaagtctgcaaggagccctgttgggcacccaggcctgagttttggaatctggctgggcctggccttgaggagttgttaatcaggagccttcagagagtcctggagagagatcgctgggggaccaggggggctctttgtttctctgcactgcaccttgcaggattacaaagggcagatcaatatttggttagggcccaagtcagggtcaaggccagaagaagccagacaaagaccagggtcatgggagcttgtgccagcccctaggtcaggaggaagactgggggacaggagaagagctcggggaagggaggggggacatggcacagggtggggcagggcaggtcaccaggggaggctgggagctagatctttaatgggagaaggccgggtgccagcccccctggcaggacgagggagcagtgagcagcgtcggggcctgtcactgcctggagagcctggggccccagacccttcacttatggagttggaagggacctagagatttattcaaaatatttattgagcccctacagggttctgggtggagaccataccctagaagctctgctctcctgaaccttgcttttagcaggtggagtgggatagtcaggaaatatacaatgaaatgtcatcaactggaaatttctacaaaaacagccaggcagtgtttaatgtggatttggggtgtgtgtggggctatttttgatgaggtggtgggggagggcttctttgaggaggtgataagtaaagaccagaaggaagtgagggagacagccatatagacatttgggaaatttggcctaggcagccaaaatagcagatgccgaagcgcggaggcagggagtaagctcggccagcctctgccttgagctcagcc

SEQ ID NO: 949 - DNA, 2300 bp, Homo sapien
aaatgaagaaagtggagccagacatccctgatttcaagttctagccctttcactccttcatggtgtgaccttggactgccccttaacctctctgagcacactgtgtctcatctgtaaaatgcacctaatgatcacaccaaactcagaaaggcttgtgaagccatagcagacaaatgcaggcaaactgcctagcacagtgcctggtgtgcagcatattctccaaaataaaagatataattgttgctgttattgcaacagtagcaagttcgatccttcatttaaccctctacaaacacacattgacacctcttctgctgtctgatgctggagacagaaaaatcactctggcttctgacctaggtatgctcacagtttagtggaggagacagacgaggggacatgtgccaagacagaaataggccaagcagggagggcttcactaagaagggtatattggagctggatcttgaggcatgagtaacagctcaccagatcaacagagaggggagggcatctagacagggagaaaggcaggtgcaaaagtagggacacatgctttatggtttgtgtctggctgatgtctgtgcctctgcatgggctgtgagctgagggcactgggagcctgggaagggtttccagctgggagggacccagccagctttgtgctgctgacgggcattctgggttagactggaggggacaagcttgagggcagagagcatgcatagcatgtggagctggggcatgaggtgggcttgactggaggaccaaggagggcacaaatggtcaggatgtgcctcaggtcagctggagagaagcagtcaagacaatgggcttgatgtggaaatgcctgagctgcagaacaaggcttcttcaaactcccaactaacgttggggcctccccacctaggcagagatagactggcaggcaagcttgggggctggggggtcagagagctgagaaggtcaaccagggcatcacccacacaactcacagggatcaggaggaacattctgtcaaccagaaccagggcaggaaagctgacaagactagagaagtttcctcccaccagacagccaaagggaaacacatttgttttcaggagacaacgtgattgttttttgcactgaaaaggcaggaatagaaaattccactttccaagacagtcatctcctcccccaagcattaaagggagcttctgtatccagcttattggtgcttgaaattctaccactggagctccatttctatggcttgaggctttgccatttgttaaaatgcaaacaacttcaaagaagtcatgtcttcaacagaaacttattttcattaattcaacaaatattgagttctttctttaaaccaggcagtacccagagtctgagaacagagaaattaattaagtcctatccagagccaaaccttcaaggaactggcaagctctgcgccgatagcaggtagaaagtaggggcagggatgccataaggaaagctgaccataatggtgttggaaatgatggtgggagcgaggtgctgtgggaatccccggcagagattattcatttcaaaattgcaaaaggtgaagcttgacctgggatctaaaagataaggagggtagagattaggggctgagaatcccggatggagggcacagcaagggcaaatgaatggagtcatgagccagtatggatgaggggggctccattccactaagcagagggcttggccataaggcaggacacgaagacagggctggagcagcggggggagttctgattgactggatcatattaatgatctcaggcaatggcgatggcgactatctcagggctttgtttgcctccccagcctccatgtcagcacttcccaccaaatcgacagaccctccctcagggaactaccctgtcctctcaacacgtgccctgaacgacccaccctcagctccagggccgggttctgattggcctaagccgtggggctagcctatcttgctggataaagtgattggttcaggaaatggcacatgacccagttcagaccaatgaaaggcgaggagatgttcgctggggtttctgggaaagaggagttgtccctctcttcagagggacgtcccggaagcgactggctctttttttctggtcgctgcagagtgagggtgtgacgggccagcaaggacagcaacagtcgaggagaaaggagagaatgccagagagatggagcccaaacctgaacccaggatcaaagggcaactgagtagcactcgctctggagttctcggtcggctgcgccgctgacttgccaaa

SEQ ID NO: 950 - DNA, 2300 bp, Homo sapien
atgagtggatgattgtggaggactggtcagagtggtgcaaaaaactgtagggaaagggcacaaaccttctgaaaggttggaaggttttgcagagccttggggtagaatagctgaaggcagctgttctataaccctgaggcagcagtaggtacaagggaatgtgggggaatttgtcttaaacaggcttgtttacttatgttgaccaggaactgacctttgatcatccaaatgcgtgaggttccctgaaaggggaacaataaatgttaattacctacaggttgtgttggctccaggttttcagcattgtgcctgcactgaataaaagcaagcagctccagcttctcggggctgttctctggccactagagccaggcagtcacctagctgctcttacactacatacatcagtgtctgagtactgatttcctctcttggccagggtctgtgggacagacccggcaggtgggccctgtgtgaggaaggctgcaatggactgcagtggaaccctcggaaacgaaagtgaggtgactgcacagtaagtaattggtgcccgttgggttcctattacttggatttccaagttcgaggggattttcaagctagggtttcatcatgggaaaacagttatcagctcaacagcaacagtatataaaagtattgaaacagctgcttaaagctagcggagccttggtctcagaggcccaattaagggacataatgcaaactgttgttttccataacccgtggttcccagaagaaggcacactagacctagagctctgggaacgagtgggaagaaatcttaaacgacaatatgtacaagggcaacgggtcccagtaacaaatgtgacaaaaccctcctggcatgcactatgtggatgtggctttggccattgcagccctgatagtctccagggtggcagacttgtaaatggacaatgacagccactcagggttagggcatgaggaacctatgagtgggagagaaggggacatggggcaggtagtcagccctggggctgttagagaaggagatgtaaaatcttaattgggctttgagggatgagtaggagtttccctggcattgaagatagaaaagggcatcccaggtggaggaagcagcacgcacaaaagccaggagtggtgggggatggtccagtgaggctggaccaaagtgatgcatggggctgtggcctccacaatgccagagatgtcaggtcgagagtgaccacagctttggatgccaggatgaggggtgtggacttcattctcgggccagtagggatcatggaagtgacttggtcagatcaccaagaggagatggaggcacggaggccagagaagaggcagctgtagggctgaggtcaggggtgacagaggcctggtccagggtgacacatgggcagagtccacatgctgtgagtcagagagggcagcctgcttccagctgatccttccccagaggacagtggccagtgcccccctgggagcagtggatccagtgattcaggtcagtgggcatcactaaggggactctgagagcccaggcctcggggcagatggagatttgaagcctggctctgctttcccaaccatgtgaacatgagctgatcactcagcctctctcacccagggcctgacacatgacaacagaggtgaacacgctgctcagagccaatctccttcctagagtctagactaacaaccaccacaagcatttggtaggtgcctgctgtctgccccgccctgttctcagctttacacctagtaattattctaatccttacaccaaccccagtgggaacccagaatgtgagcactacccgggactaggtgacccaaacctcacctctggtctacggatgggcaagagcatatgatgcttgctgataggtgggactggcatgagaactgaggtcttacctcatccacttcccactcacacagcctcccccagccctggccttacgtgcccccttcttcccacctggctccctggttgttggcctcaggcagggccccacatggcacaaatgtccattgtccacccacccgctgggaaggtgacatttacccatgggtgtgtgagggatagtcacagactccacataggccagcaggaaccagagcaaagcacccggagcctcagctgttaaaatgactggtactgggagctggaggtctcactggccgtgactgggtcgaacccagggtaagggcctttctgattgggagagatgatgtcacagagtgaccctaatggatggcacagggcaggggtgggaaggcaggaaactgag

SEQ ID NO: 951 - DNA, 2300 bp, Homo sapien
cgggcctagccccactggacacagtgaaggaattgtcaatgaggtacttgagagcagccccagtcattgtgcccttctccatgtaggacatattccgcacagccgccttgatgtccttcttggtgtggaagcgacccagggggaactcctggcgcacagagcttgagtactgcaccagccccacctgggccagcttgtctgacacgtccagcgtatccacgatctgactgatgaacttcttcaccagctcaaagttctctggcctcacactcttggatccgtcaatgaggaagaccaggtcagtggccgagctgccaccaccaccactgcagactgtggaggacaggaaggcaacgggctgaagctgaaggacatagtcaaccatcctgctccccggctggacacccaccacacaccaagctctgtgctgaggatcattacattgtgccctcagaactgcctctataaagccaaggtgactggtcccactgtacagtattggaaactgaaactccaatagctgtgagatcacacagctcagaagtggtagcaccaggatttgattttgagactatgtgagtccttctaccacactaaacccaccgcccattgtgttgaaaacagggacagaagtcaggtgagaacttctgcagataccaaactctaaaaggcatctgtctgctttgaagattggttcagaggtatggtgcagggaggcttgaatgggtttcctggggaggccccatcacctcccctccacaccctctccagggcgagcctgtgtccaccccactgaccattgcaggtcttgccgtcgctgttcagagtgaagccctcgtggcaggcgcaggtgtaggaaccgggggagctgatgcacacctgctcacagtcatggtcccctgtggcgcacaggtctgacaccactgcggggacaataagtagctcagatctcacagtcatagtgccttgggcactacagacaggttgtccctccctgactgtggataccaggccccatccagactcagggaaactaagatctccaacatactggggcccaggcccccgactctcagcccacgtctggaatcattgcaccagtgcctagatccctgaagaaggttataatgctgatgataagaatgaaaagtctcactaaaaaggtaaaggccaagggttagggcctttagtctgtttagttcactgctgtatcaagacacccaagtgtctagaacagcatacaatgaacacagcacctatctgtcaaataccatataatgagggttacattttgcattatctcactggatcctctcaataacgtgcatgctcttcttagacccattttacaaatgggtaaagtccctgccctaaccctgatcctgtcctactggacaccctgcccctgcgggtcacatcccaaagacccacacacacacctcccctccgagaagggctctgaaccttctcctgccagtgcccaggcctctcagactctcccgcatcacagaaaactctggcacccaaaactcacgacacagaaacatgtgtaggttttctgggagctctccttcctgagctctgggccctccttggtccctgccaggattctgccacataaaagggctctgttgttttttgtgtgtgcggtttttttttttgttttgttttttttttgagacggagtcgtctcgctctgtcgcccaggctggagtgcagtggcacgatctcggctcactgcaagctccgcttcccgggttcacgccgttttcctggcgcagcctcccgagtagctgggactacaggcgcccgcaacaacgcccggctaattttttgtatttttagtagagaccggtttcaccatgttggccaggatggtctcgatctcctgacttcgtgatccgcccgcctcggcctctcaaagtgctgggattacaggcgtgagccaccgcgcccggccataaaaggactcttaacatcgcctctccccaactcccttaacctggggctggagaccctcctccgttatcaggctccgccccagctacggccccacccctggtgctggcaccacctcagtctaatccaggttccacccccaatccacctaagccgtgtccctagccctggccccgccctgatgttgccgtgtaactcagttcccgccgttttataggctaccgccccagccaggccccgccctctgatgtggccccgccccccgacgctgactttttctgtcttcactttagcgctggctccgcccctagccttggcccgcctcagcgcggactctcagt

SEQ ID NO: 952 - DNA, 2300 bp, Homo sapien
tgctttgaagattggttcagaggtatggtgcagggaggcttgaatgggtttcctggggaggccccatcacctcccctccacaccctctccagggcgagcctgtgtccaccccactgaccattgcaggtcttgccgtcgctgttcagagtgaagccctcgtggcaggcgcaggtgtaggaaccgggggagctgatgcacacctgctcacagtcatggtcccctgtggcgcacaggtctgacaccactgcggggacaataagtagctcagatctcacagtcatagtgccttgggcactacagacaggttgtccctccctgactgtggataccaggccccatccagactcagggaaactaagatctccaacatactggggcccaggcccccgactctcagcccacgtctggaatcattgcaccagtgcctagatccctgaagaaggttataatgctgatgataagaatgaaaagtctcactaaaaaggtaaaggccaagggttagggcctttagtctgtttagttcactgctgtatcaagacacccaagtgtctagaacagcatacaatgaacacagcacctatctgtcaaataccatataatgagggttacattttgcattatctcactggatcctctcaataacgtgcatgctcttcttagacccattttacaaatgggtaaagtccctgccctaaccctgatcctgtcctactggacaccctgcccctgcgggtcacatcccaaagacccacacacacacctcccctccgagaagggctctgaaccttctcctgccagtgcccaggcctctcagactctcccgcatcacagaaaactctggcacccaaaactcacgacacagaaacatgtgtaggttttctgggagctctccttcctgagctctgggccctccttggtccctgccaggattctgccacataaaagggctctgttgttttttgtgtgtgcggtttttttttttgttttgttttttttttgagacggagtcgtctcgctctgtcgcccaggctggagtgcagtggcacgatctcggctcactgcaagctccgcttcccgggttcacgccgttttcctggcgcagcctcccgagtagctgggactacaggcgcccgcaacaacgcccggctaattttttgtatttttagtagagaccggtttcaccatgttggccaggatggtctcgatctcctgacttcgtgatccgcccgcctcggcctctcaaagtgctgggattacaggcgtgagccaccgcgcccggccataaaaggactcttaacatcgcctctccccaactcccttaacctggggctggagaccctcctccgttatcaggctccgccccagctacggccccacccctggtgctggcaccacctcagtctaatccaggttccacccccaatccacctaagccgtgtccctagccctggccccgccctgatgttgccgtgtaactcagttcccgccgttttataggctaccgccccagccaggccccgccctctgatgtggccccgccccccgacgctgactttttctgtcttcactttagcgctggctccgcccctagccttggcccgcctcagcgcggactctcagtctctgcgcctgccacggcctcgtcccgctcagccctggccctgcccctggagccgactctctccgcctccgccccggtcccgccctggcactgactgtctccgtcttcgcccctgccctggccccgccccctgcctgctctggccccgccccgccgctctctccgtctccgcccctgccctggccccacccttgccccgccccggcgctgactctctccgtctccgcctccgcccccggctcctccccggccccgccccggcactgacattctatctctctcccgtctccgcctctgccccccccccggccccgcccctgccctgcgccggcgctggctccgtctgcgcctcagcctcggtcccgcctccagccctggccccgccccgccgctctccccttctccgcccctgccctggctccgcccccgcctgcccgcgcaccgcagaaggcctcctggaacttcctggacagcttctcgatgacgctgtagctctccacgtaatcgacgtgttcgtcctgcggctcgctggcgatctgccgcagcgtggccttgtccacgctgcccactccgatggcgaacagctcgacgccgctggcccgggcccgcgcagacacgtcctgcacgctgtcctggggcctcccgtctgtcaccacgatgaccacctgcgacacgcggg

SEQ ID NO: 953 - DNA, 2300 bp, Homo sapien
cttgcccctgttatagaatgccaaagctgccttttttttttttctggtggtgttcggggggggacccatctctgttcctgaaaagttacctgtagtgtatttctgcagctctgctaatgagcggagaagtgacacagagaaggcgcctgtgttcttccgaggagcccatagaactgccattcagaggtggagctgaaagggctgtttcatgggccagctgctgcccagctaacggagccttgtgccctgagccctggacacagccctggccgtcaggggggttggggtggggggagcagttggtgaggagaccccagctcacgttctcctcgttcacctccagcatggcacgaggacagcattgcgtttctcaccgctggtcaccgtggatggcccttgtgtgaccctgggtggtttatagggaaatggaacaggttcgtagttagttttcattcattccttcatttgcttaccagagatcctgtgccaggcaccatgctgggtcccagggattcagtggtgactgagacgggcaagccccctgctcggagggagctcacgtccttggggagacaggtaacaccttaattacaccattttgggaagggagaggcaccaccatcatcacaccttgcagcatctctggagaagaattcgacttcaaagttgtagcagaaaaaggaatcagcagcttcaagtggtttttggaattggggagggcagtgaattaggcacacatgaaatataaggggaaaaagtcagaaggcaatgctcttaacctcctccttctctaacactggtgcaaaggggagtgaggcctgagctttaggcttggctctgcccctaaactggctggtggcttcgggtaagtcagtgaacctctctgggcctcagtttctccatctgacaaatgggccaagagactcaaatctgctgacttcacaggtttgttgggtgagcaaatgagatagagtgatagaatgagtaactgccatgtcaagggtggaagggattgttataattattgctaaagagtgtggtagcggtgagttgggtctgctgcacccagcagtcgctttttgtctgtacatttccttttattgaggtataatttacacagagtgaagtgcataggtcccaagtcttaggattctgcctcctggagcaatgacaatcctttaactccatttccacttctgtccccctcttgcccctcacatggggcaggcagatcaagaacgaccattcccactgcaccatggcaagctgaggctcagagaggttaagtcaccagctccaggtcacacagccagttaggagcagaagtggctttgaacctggatctctcaggtagccaagcccatgctctttctgctctatctcatgaactacttgacccaaatgcaaagaaggggatcgttcctgctgatgttactttgtttagaaggctttatctttgccttctctgtgctgggcctgatgcagagttgaatccactggctgacaggtgaggtgggccaagcagggacccacagggggaagagatgggcagggagaagccacctacatcaagctacactgagacagcagcatggctgagagccgggcctggggctctatcctggcaataacacttcttagctgtgtaacttcagacaagttattttacctctctgttctttaacagtagctgctttaaaaagttgtcaagaggattaactgagaaacctcatctaactcctttgctccttgaatcaaccctaggaggcgctattaccatccctagtttccagatgagcaatctgagacatgagaggtgaagtcacttgcccatggtcacacaggtggtttgctggtatagcaaacccaggtaacctggctcccaagtctgtgctcttaaccatggtctccactgccctgcccatactaacagtgaaggtacatgttagccctaattatgaccttgaaagattctacaaggcagagagttagtgagaggaaaggattctgggcagatggccctgcatgtgtgatggcctggaggccttcgaggagaatccaggggtagctggagagcagggcgtgtgcggagagcagggcacagtgaggctggggaaggggaagtgaatttaatgagaaacttggggttgtgagtgggggaaggatttgggtgtgggatgaaggtgcaggacagggctgggccgggccattggactcaggtatgcctaggcttggggtggagcttcaaggcagcgcgggctccagcccctggaagagccaccccccacccacctgagatt

SEQ ID NO: 954 - DNA, 2300 bp, Homo sapien
cgttttgcagaggtgaaaacaacagctcagagagatcaagtgccttgtctgacaccacacagctactaagtggggagctgggattccccatgccccaggattcccaaacggatgccacctactccacctccagggctgtctgccacatctgcgtcctcctaggctgtggcttccttaatatgttctttaaattgacttactgccttttttatttaaatgcatttcttttaaaatgagactttatattactcctataaatggaaaatcacaggattcatggactagttatgtatatttttataatgcacattaaaatgaatttatcaccataaaaaatgagaaatgtttacccatagaccatgtacaattattccacatgctgtcagtgtgtttcatccctctctttgggagttggctttgcacctgtcctggtttcaccaaatcacaatgttatgaatggctatcatttattatggtaggaaatcgtcaaatggcttctgtgcacaatcaaatgcagactccccagcatggcctcagggccctcctggcccctggtttcctgatctccagttcctctggtcttgctactcttagacaaaggaggacttctcttggttttctgcctacccagccagaagatcccaggccatgggcctgtggagccaaagttcttaaccactgcactgtgtcacctttctatgatgtcaggcctcagcaaggcttatgaaggaacaggaacagccttgaaaatgaagttgggaagggataggccaggcctcccaggagcccaaagcttgcagagtccccttggtctcattggcacatggagaatggattgatcaagtccaccaatcaagttttgtgggtctaacagagcaactcctgccaagtgggaggagcttagggactttctataacctctcctggggcagaaatgatgggctgcagcagtgtccaatcctaactccatgatctcctgggagggcagggcttcatggcagttcctgtctgctctgcactagaagcttggcattgcaaaggggctcagctgtggaatgaagcagggcttcttccagaaatgttgcatgtacttcctattccctttctttattgcaatatggataatttatcatctgaggagggagtagagattccagggtagcttgcctaagagttgtggcttattaattccaactttttgcaagatcaagggggaaaagcaatccctgattttgtgtgagtatggggattgggtcttgaggccctgaaagtgaggttcgggtctcacagattgctgtgaagagttattgacccacctagaagagaagcctagcccagggcctggcgcacagttgatgggtttgcttcctggttattcttccgtccttgtctggagccctgcacgcctcttcgtagcttaggaagaacaagcttctccctgcggctcagggtgaggaagtgggagagaacaccagctccagggaggcttctagcaccagtcagcctcagttaaaatccttgcaccttcattgactagctgtgtgaccttgcacgaatcattccccctctctgtgcctcagtttcttcatctgtaaaatggggatcataatagtacctctctcaaaggattgaggtgaggatgaaaggagtgaatccaggagcatgcctggaagaggcaggaaatgcctcctagacaatagctatttttgcagccagacagatctgggtttgaattctgccaccagtgctaactactgtgtgatttggggcaagtgccttgacctctctggacagctgtttcctcatctggaaatgggcttggtaacagtcctggcttccaaagttggtagtgttcttctagtaagcaagctgtgtgaaacggtggaaccctggccctggtgcagagaagggcatgatgaccgtgttagggtctgtcctctctggaaccccctcctgggaatggcagagggcagtggggtgctctgaggcaggctgctgccctgtccccactccccctccccagctgccccgccccagctgtgacgaccttgtccctgcctgtctaaggggcaggaaggaagtgaggagggcagccagcagcttccccttctctgccctgctccaggcaccaggctctttccccttcagtgtctcagaggaggggacggcagcaccatggacccccgcttgtccactgtccgccagacctgctgctgcttcaatgtccgcatcgcaaccaccgccctggccatctaccatgtggtgagtgtgcgggccccgggtgtgtgtgcgtgcgtgct

SEQ ID NO: 955 - DNA, 2300 bp, Homo sapien
gtgctcccaggtcagacagagcccttgctgagcctcagttttctcacctgtaaagtgggaccaccaatatttaaccccaggggcttggaaagatgcagtgagacaaggctgtaaggggattggcactgtgcctggcaccagggaatcctcaacccttcccctgagacagagagaagagtggtgggtgtagagaatgcctgcctgcctcgcctgccataggcacgagcctggtgaagtggggaggccccctggtgactaatctcgttaatagtaatcatcaccctggttctcattaatataataacactgggctcccagccgccgcctggctccagcgctggctcctcggtgcctctcatctctgcctggcggggggctctgcaaacactcattacactccagtccctggggaggccgccaggagaagcagctattccaggcacacagctcaactctgggccgcaggctctgtttttaataagcaccatcgtacacactcgagcacacacacacactcacatgcacacacaggtgctcacacacacaattgtgcagcactttgcaagctcttcactgaccattaattataattgctcacaatgactaagccttatgtgataacaatgatcgtggatgcctgctaaacacttccacttgccaggaacagttctaagtgctcgctccacttgtattaacccatctcatctaaatgagcattcctgttgtttccattttgcagcttcggaaactgaagtacccgaaggttatgagacttaccccaaatcaccgacccgtggagccacagagctaggatccgaatgtttaacactgtctcaaaagatattagttcctcaagtcaatcctcatggtgattccgtccttattctccccattgcaccagtgaagatgtgggcccagagaaatgatgtcctttacccaggaacacacagtcagggaggcctgaccagagtggcggccttaccactccccagtggtggaagtaggaagggaaatactatttcccttttaaaatgggagaaactgagccccagagaggttacacagggattggtggagccctggccccctcttcttgcctcccaccctcacccccacctctcatcctcccacccttacccccaccttggagaccttaattaagacacagaccagctggcttggccatgggggactcagtgtcagaggccctcaggccacctggggctccctccaggccactgatgttctgtgccaccacctcctagctgcatgtccctggacaagtcacatcacctctctgggcctggttttcctcaaaatggggaaaaaagctgacacttagggagcatttacaatgttccaggcctattctatgtacattccacatagtatctctctttttttcatctttttgagacagagtctcactctgtcaccaggctggagtgcagtggcgcaatctcggctcactgcaacctccgcctcccgggttcaagcgcttctcctgcctcagcctccctagtagctcagagtacaggtgggcgccaccatgcccagctaattttttgtatttttagtagagacagggtttcaccattttggccactatggtctcgatctcttgacctcaggatccaaccaccttggcctcccaaagtgctgagattacaggcgtgagccactgcacccaccttccatgtagtatttcattttgttctcaccacaaccccagaaggaagatattaaaagagtctgtggttttttaagattctgttattctatagaatagaattctgattcccacagagtctgttatgaaagattccacgatcttagaaagattccattattctgggattctcaggtactggaagtttccatcattttatagatcatggtgttaaagaatttaatgaaatggtgattcgttgcacctcaagggcaagaggcaatttgtcagcccttggacagccttaaaggccaccactgtccaccccctgcccctgtcccctccctcagctatgatatcagagccagccaaggcagaacaacctgtctctatggcacggccttgagtgtaaggtcagtgaggactgtggagaccgccagagcgcttggtgggtgactcggcggacaaagggctctgtgcacccgcctctgctgtcctggctgggcctcacacacaatggaaggacctttcgaagctgcacccagcctgccccctccctcagcaagagacacccagagatgcagctgagctcagtctcagagcaggccccctccctgctcaaaaggtccac

SEQ ID NO: 956 - DNA, 2300 bp, Homo sapien
gggcaggggcaggagccggagcctgggtccctgctcagtccccattcttctgtgtgacttcaggctgcttgccagagagctggagggagcagggactccaggttggctggttcaggttgtggaggggagtgccatggggagttctagctcctccaccgtgggtatttttctttctgggcagaggggagctggggaaaagttgggccctactgctctgagctcctagaatgtttaaaaaaggaggaagacccagcaattcgtcacgggagaaattacactaattgttccactccatgactcactggtagaaagtaaatactgattaattcattactttgagactatgtgtgtgtgtgcattttgtgagggggcacctcctggctccctgccctggctgggctgggcagggctctggagcaggtggttgaggctggggatatgaagacaggattgagatcctcactctggctctgtatcaactccagaagggggcccatcagtggcagggggtgagaggctgggccccaaatgcagggccattccagccctcgcctgctcacacatgccccagggctccccacagccagcccaacattgcggctgctcagagaccaccccagacctactgaaccactgaatttagttttcacaatattcagatgtgcagtcaagatgaaaaatgaccagtttctaagagaaagtcatcagccagacactgaaagccttctgggatgggaccccaggtgacttgccacaccccacccctgccctgtgaattattcacacacgcactttccttcagggtacacacaagatctctgtcacccacgtggatgtcactcagcccacaagggcacctgtcgcccttctgggctcacccaggctgccagtctcgggtgccgagccctgtgtccacctctaccttccctaggcccagcgctggcgcagtgagaacttcgagagacccgtggacctggagggctctggggatgatgactcctttcccgatgatgaactggatgacctctactcggggtcgggctcgggctgtaagtacccccctccctacctctgcctgggggcagtgaccagtctgtatccagcctcaactctgagaagcccacggggggcttgcttcagtgaggcagggggcattcactgcctgggtcaggcaagttcttcttgctctggatccccagaacaagaagggcagaacatccttctggggatagaacaagacctgggaggacctcagggcccagaatgtccaggtctccagggtcccacgtctgcatctttgtgtgtgctatgtggctttctctgcagaccttgcttggttccggtggtcccgtcaggtgcaataagctgtggccaatggtggggttagggcagtgatgacacagggcaggtgcttcaagtggtgcctgggatggccccgccctggggaaggggagccaggtcagctgggtctagcagaatctcgggagagaagggcaccgcgaaccccactctgccatgtagcaactgtgtgcccctcggtgctccccctccctgaatccctgtattttcacctgtggatggtgagaaatacgacttcttctcagtgcctctaggagggtttgggataggaagctggggtctggcacagaggaggagctctcaaaatggtagcaaaaagaaggcagctgagactgggcccagtgagggcacgggctggcatctgaggagatggtacggggtctgcacgccacagagctggctccccacagccctcgcctctggtctcccctccttagccaagtcctttgagcctctttcaaattaatctttgtaaaacccgtttatattgggtcacatctctattcgcaaagttccctggctcccctccctcctgcctggttccgagcccaggagctggctgtggcttctccctcccccatcccctactccccatctcatttcctcccaagttccttcactgtcccggctttgcgtcagccagattgctcaagcagttcccctgcctcaagggcttcttttcccttttaccctccgcctctgcctctgggggaagcccttagtgtaccacccctgccttgagcttgtggtaggggtgcctttggggtctgactcttcccagaatgccactcctgtgttcccctgcaagccccagcaagttttgcagccagtagcgcctcagttgctgctgcctggattcaacctcatagaaactgtaggctgggtgggcaggaatagtcaaggaaggcttcccgggagaggcggcccccagaatttttgac

SEQ ID NO: 957 - DNA, 2300 bp, Homo sapien
ttgaattttcagaggctgggacctcagaattcctagttcgaaagtctccctgtcttccctgtccaggatccctgtcaaagggtggtgagcttgcctttcataccctttagggactgggctctccctccctcctggggagccccttctaatttatctctactttatgttgagttgacctttgtcccctggtcctcctcccaagggccctgcaggacaagtacagttacccccaacaccaaaaacccatggctggtcccccagagtctcttcctcaaggcctgcccctccattcatcctggttttggttcccctttccttgagggaattgttccagtttcaactcaatttcgttcccctattttcttttcttttctttttttttttttttttgtttttgagaaggagtctcgctctgtcgcccaggctggagtgcagtggcgcgatctcggctcactgcaagctccgcctcccgggttcatgccattctcctgcctcaccctcctggtagctgggactacaggcgcccgccaccacgcccggctaatttttttgtattgttagtagagacggggtttcaccatgttggccaggatctcctgacctcgtgatccacccgcctcggcctcccaacgtggtgggattacaggcgtgagccaccacgaccggcctgatttcattcctattttctaatggcaggctctaagctgggtgctgggacacaggggccagagaggagagtaactgagggtagagacgtccagccagctgtcatcagcaaataacctcttcttgctggctctcagcttccccacctaagaagtgaagatattgacagaccgaccttatggggttcctgagaaatgatataacacatgaaagcgctgggcacctggcatgtggtcagggttccagaaatgtttcactctcccctatcttgccccaaaacacttggttttgagccccagtaaatgggaaacacattcattgattcagcaaatttggattgagcatcgatgtcatgccgagctctgtgctggtgctggggacatagcagtgaacaagacagacacaaaaccctgcccccgctggagctaacacgccattggagacttggagaagtaagaacagcatggggtatgccgctggggatgaaggtgaagggggaaaaggcaccgtgaccacacagggtagaaagaccaccagcgctagagactgccactcagagatgtacttttctcgccatcctgcactggagggggtggtcccattcaaccatggggggtctgagtctcagagaactgggggccttgctggaggcgcacagctggtgtggaagcagctgcgctcaggtctgcgtggcttttcctctgcagatccacagtgacagggcccagaagtgaccacccccatggtcccctggggagaccgaggcccagagagggccgggccctgatctgaggtcacacagcccctgggtgtcctggaggcatgaaagcccgtggtcttggatgacctctggcccactgggtggactggctgagtgtgtgagggtgacgatgggagtccaggaagagacacgtgcgtggagccacagggggaggctgtagatgaaaacgcccatgcgacccctccgctcggcgacttcagggagccaggcccgggccctggtatcccacgcgggacccttcccttctacctagcacggcggccgcggaggtgcgtccggcgggctccgcgacctccagccccgggatcggcgaggccggctgctcactcaggtgtccgggtgcccactcggcagcgcggggctccctctgggtgggggcgggggctgggactggggtcagagggcgcggagccccgcggggggcgcactggggcccgccccgccccgggcccctcctccgttccgcccgcgctgggggcggcccggcggcggcggcggcggcgcacgcttcctgcgggcgcggccgctgtgggcgcggagctgcgaggcggagccgggcggccgagccgggagcccgcgagcctagagcgcgtcggtccagccgccgggccgcgccgccgccaagcagccgccccgcgcgccgcgcctcgggaacaaaggcgcccgcccgccgcccgccgcccgcgcccgcgccgccgccatgaagccggggccgccgcaccgtgccggggccgcccacggggccggcgccggggccggggccgcggccgggcccggggcccgcgggctgctcctgccaccgctgctgctgctgctgctggcggggcgcgccgcgggggtgagtgacacgcgc

SEQ ID NO: 958 - DNA, 2300 bp, Homo sapien
ttaaaatcacctaggatagatgccttggaacctttcttaagtttctcccaaattaccgtattagagagctatggttactaatggaatatgtcatatccctctggtggtttagagggaaaaacagttgagaacttgtgcattatctcatttgagtctcatgagctctttttgaggtaggtggaccaggtatcattttccttattttgaagagccagagatgcagcttaaatgatttgttcttaatcatatctcttctgcagatgcctctcattccatctctggtcatgattaatgtacaggttttaccctattatttaagttacacagtattaaaataatgtatatttatcttccacaattggcacatattcttgaaaaatctataaaaatccttgtccagttatatatacaggtagaggatttttttttaatctccagtgtgatagtacaggtagagaatttaattttgagtaattttaatatcagtgtaaagctaatgtgtgtgcatgcacacactcacacccctctgcttattctaatgtctgccaaagtcaaaatgaaaatgtattttggaccatcgttgtaggacaagtgtcagttgttttgtatccctaatctaattattgttaatcttgcatgtgtaaataattacagtcttaaactttttaaaaattatttttatttatttattttttggagacagggtctcactctgttactcaggctggactgcagtggcatgaagttagctcactgcagccaccacctcctgagttcaagcagtcttcccacttcagcctcccgagtagctgggactacagccgcgcaccaccatgcctggctaatttttatatcttttgtagagatggggttttgccatgttgctaggttggtcttgaactcctgagctcaagtggtctgcctgccttagcctcccaaagtgctgagattacaggcatgagccaccatgcccggcctgaattacaatctttggaagaaatttaaggcacagggtaataaatacttacctaaggtctttcagatgagttcaggtgtcctctccaccttgaatatccagcagcctgtagcagtattttgttgtatttaaatgggggctggtggtggtggtggtgagtgtgtgagtgagagaaagaaagagaaggaaccagaataatacctttaatatgtaccagctactggactacaggattttttggggtagggggttggaggtggagaagaagggcattgaatgttgccacaggttacactcttctgtttatataatattatatattagtctgattttggatcatataatcctgaagtccttttatataaggtgatggtagaccctgggttacccagaaccttgtgtcctacaataattatcaatagtgccctgttttttttttttttttttaaatcttaggcatgtcctggtttggatgataaattacatcttcccattacttttaattcttagaattgtctccttaacaggggcatatcctagataatgagttcatcttgtactactttggaatagtctgcttatttcggtttcttagaaaggggagttagttttaacattggtcagtaataccaacgacatgtaaaaacttttttcattctgtttctttcctcacaaatatgccaggaagataaaaactttttagaatcactgagttgtggaatttcccccagaaaccaactttttccattgtctctgtatttaaagagtagatagagtagatgttgcattttgatgcattttgggatctgctttcatggatgctatagacagtgatttttccactttatttcagttttcctcaaacccggcccccttggtgaagggatgtaaattaatagcaattaatgtgaatttaaggggtgagttatatggaattgccggcaatagaagcatcaatttagaagatgtaaccctgtaagccctgtaaagtatctctggttattttatagaaatagttttaaatactgttgataatgagctatgttgaggacattgtccttaaacttgggttgctgtagtccctccccactgaaaataaggtttaatgccctttactttctctgtttagccgtacccctggtaattgccagaactctgctaatgaagtggatcttctgggtccaaaccagaatggttctgagggcttagcccagctgaccagcaccaatggtgccaagcctgtggaggatttctccaacatggagtcccagagtgtccccttggaccccatggaacatgtgggcatggagcctcttcagtttga

SEQ ID NO: 959 - DNA, 2300 bp, Homo sapien
ggctacttttatgtttcttggctgtatgtgattttgttatgtttgtttattttggatttattttattttggatttatttctttccttttgacatggaatctcattctgtttcccaggcagtgcttcatctcagctcactgcaacctccacctcctgggttcaagcgattctcttgcctcggcctccagagtaactgggattacaggcgcccataaccacgctcggctaatttttgtagttttagtagagatggggtttcaccatgttggccaggctggtctcgaactcctgacctcaagtgatctgcctgcctcggcctcccaaagtgttcagattgcaggcatgagccgctgcgcccagcccatttcggatttttagaaattgattacagattttatttatttatttatttgatacagggcctctttctgtctcctaggctggaatgtagtggcccaatcatagctcattgcagctcaattcctgggctcaagggaattctcctgctttagctcccaagtagctaggactacagatgtgtgccaccatgcccagataatttttaactttttgtagagacgaggcctcactatgttgcccagcctggtctcaaactgctggcctcaaccaattctaccacctctgcctcccaaagtgctgggattacaggtgtgagccaccccaccaggaccctgatgggagaaattttgcatttatcatgatgatcaaccatttccttatcatgtgtattgcaaatatatatatatgtatatatacgtatatatatgtttatatatgtatatatgtgtatatatgtatatatgtatatatgtgtatatatgtatatatgtgtatatatatgtatatatgtatatatacatatatgtgtatatatatatattttttttcttgagacggagtcttgctctgtcatcaggctggagtgcagtggcacaatattggctcactgcaacctctgcctcctgggttcaagtgattctcctgcctcagcctccccagtagctgggaccacaggcgcccgccaccactcccggctaatttttttgtatttttagtagagacggggtttcaccatgttggccaggatggtcttgatctcttgacctcatgatccacccgcctcggcctcccaaagtgctgggattacaggcatgagccatcgcgcctggccgtgtactgcaaatattttttatccatttgttctactttgttgatggcatctcttctcgtacagatgtttatatttctttcaatattttcttttatgatcttttgactttgattcatgagtataaacattttccctcctccaattatagagcttctccccatatcttcttctggtcttttacagtattgcgatttgtctgttttcaatctattttttttttttttttgagacggagcctctccgtgtcgcccaggctcaagtgcagtggcgcgatctctgctcactgcaagctccgcctcccaggttcaggccattctcctgcctcagcctcccgagtagctgggactacaggtgcccgccaccacgcccggctaatttttttgtatttttagtagagacagggtttcaccatgttagccaggatggtctcgatctcctgacctcatgatccgcccgcctcagcctcccaaagtccagggattacaggcgtgagccaccgcgcccggccttcaatctattttgagtttagtttgagacagtaagactaaaagcacttaacatacattattccacttaatcctccaggccattctgttaagtgggggttattttcttcttcattgtacaaatgtggaaatggaggcaggtcgatttaaataaggccgcagagctagaaagctgcagagaaggggtttgaaccctgcacctctggggccagggcagtgcgggtggccgtccgcgaaccctgctagctgtggtgctcgggggcaagcttccgagggcgcggcgggcgcgaggagcgcgtccgagactcggtggagcgtcaccggcgcaaccccgcgtgcccagctccaggccgtgttctcccaggtgcgggccggcgggaccccgccttcggccctggcggcgcgcgctcgcctagcgggcgggcactcgcgcgcagcgtttgtgttgcctgcgagtttcccgagttcacacaggccctgggttggcatggcaaccaggcaacctgttccagagccgccagccttctccgcacatgccgctgccaccgccggggccggggccggagcctatcccaggatgcaccgcgccaacccagtcccca

SEQ ID NO: 960 - DNA, 2300 bp, Homo sapien
tacccaagcctgcagcttccttggtctctgcccaagccttgccatctgtgtggtagcatcagctccacctcctcctgcctccctgcctggaaaaaggcttcttatatcttctcactttatctgaatattccctccccctccccagccagaccctcttctctcctcttctgttgtagttaggactctttgttgcaaatgacaaaaatcagcaggacaaggagggagaaccagctttaggcatggctgtattcagaggcctgaaagatggctcaggacattcccttgtgtgttcagtcttcctcccacacacactctctctgtaccttagctatggctttctcctcaggcgggccatccacctgaggtggccaaggcagccaccaacagctccaagctcacaccacacccattcaggtatcctggcaggatagcagctctgttctgattgttccagcaaatatctagggtgattctcaggggcagagcatggggtgagcgcctatccctaaattcatcattgtctttgattatttggctagacttggcttacctgcccaccccagaaactagaaatgagtcagccccactcaagccatgtggacagagtggtaggaggtggttctttaaagcaaaatttggctgggcgcagtggctcacgcctataatcccagcactttgggaggctgaggtgggtggatcatttgaggtcaggagttcaagaccagcctggccaacatggtgaaactctgcctgtactaaaaatacaaaaattagctgcgtatggtggcaggtgcctgtagtcccagctactcgggaggctgaggcaggagaattgcttgaacctggcaggtggatgttgcagtgagctgagatagttccactgcactacagcctgggcgacagagcgggactctgtttaaaaataatgataataaatatttagaaataaaaaataaacgaccattttatttagttcatgattctgtgggtcagctgggagattcttctggtctgggctatgtgtctgtggtcagctagtgacccggggtgatctagcatggcctcgctcacatggttgatggctgatgggctattagccggggtgccttcgctctcctccccgtggcttctcatcctccagcaggtcagctggggcttgttcacaaggtggtcttgttataagtgaagcaagttggcaagctccaatgaacgccgttttttttttttcttttcttttttttgagacggggtctcactctgtcgcccaggctggagtgcagtggcatgatcttggctcactgcaacctccgcctgctgggctcaagagattctctcacctaagcctcccgaatagctgggactacaggtgcgcaccaccacacctggcaatggtttgtattttttgttgagacggggtttcaccaggttgcccagactggatgcatgcatttttcaagcctttttcaaacatggtttgcattgtgtttgccaaagtccctttaggcaaagcaagtcgcatgggcaagcacagcattagtgtggaagggcactactgaagagcatggaaataggaagaggaggattcgaggccaattttgcaatctattccagctccttcagggaaggggagtgaaaagcattccttctctgtagcccaggaatgccatgggccagggcaagctccagatggggatccttggaagaggtgactcgggctccaggacttccttgccctccaaggctaggggtggcagtctggattctgatcccaccatcttctccacatggagaaggtgcaggagcttgagccgctagagggaagggcctccttggcagggaggaaggtgttctgaaccctcactcctatcacctttcagcccaccccaaagtgatgatcaggcttaaggaccccccagcatccctttggtagtgaaggactggattgttctgaggcttatgcctcatcaccatggtaactggtgccacctgctccccaaggtcaagcaggaatccctgtccttccctttcaggggggtgacagtggcctcagcctgtctcttccacaggtggctgcgctggagcggcagatctttgacttcctgggctaccagtgggctcccatcctagccaacttcctgcacatcatggcagtcatcctgggcatctttggcaccgtgcagtaccgctcccggtacctcatcctggtacggctcacctagccccttcccaagccaactcctctcctcacccctgcccactccacccctccctgctcctcaaaaccagaactgccccccaac

SEQ ID NO: 961 - DNA, 2300 bp, Homo sapien
taaatcatttacttgtggttcatcttctcaagtgtgtcattcatttattgaaacatctctgagccctctctgtgttatccacgctttaaaaaagtagagctataagggtttgtttgtttaagagatggggtcttggccgggtgcagtggctcacgcctgtaatcccaccactttgggaggccaaggtgggtggatcacctgaggtcaggagttcgagaccagcctggccaacatggtgaaacccccgtctcttctaaaaatagaaaaattagctgggcgtggtggcgcatgcctgtaatcccagctatccaggaggctaaagcaggagaattgctggaacacggaagcagaggttgcagtgagccgagatgccgccactctcacccaggctggagtacagatccgcaatcacggctcactgcagcctcaacctctctggcccaagcgatcctcccatctcagcctcccaagtagctgggactataggcatataccaccacacccaactttttgtttttattttgtagagatgaggaatcaccatgttgctcaggctggtcgctaactctgggctaaagccatcctcctggcctcggcctccgaaagtgctggggttacaggcatgagccaccatacctggccctctaagaattttatagttttagctcttacatttaggtccttgatccatgttgaattaatttttgtgtatcatgttaggcaggggcttaccttcattctttggcatgtggttagccagttgtcttagcacaatttgttgagaagactactttttccttctatatggaccatagttacttgcttctttgcatgccttatattttgttgaaaactaggcatttaaatattatagcgtggtgactctggaaattaggtccccagagctgcttattgtagttgtttgtttagtgactttctgtgggttggggtaaggtgagagtggttggttggttggtttttgagacgaagtctcgctctgtagcccaggctggagtgcagtagtgcgatcttggctcactgcaacctccactccccgggttcaagtgattcttgcacctcagcttcctgagtagctggggttacaggggcacaccaccatgaccagctaatttttgtatttttagtagaaacaaggttttaccatgttagccacgctggtcttgaactcctgacctcaagtgatccatccacctcggcctcccaaaatgctgggattacaggtgtaagccaccatgcccggcctgtttagtgaatttttgaactaattttgtaaagtttgtattctttgtcctgtgtgaccactgaattctttttttcgttagcttagtggtcagctagtgaatgacacaagtttcctaaattacctacaacaacaagaacaaaaattctcccagtctttgcagattgtctttttgtatgttggagcctgccttcaactccttgccatgcagtttacatctctccttagctttcacttcctgcttgtgcagagcctgaaggtgaaccagagagcttacggccttctcagatcttttctaagtatgtgcccagccctggacatgcaagtggtctagattgccaggaatgggccaggcgtggtggctcatgcctgtaatcttagcactttgggagggtgaggcagacagatcacttgaggccaggagtttgagaccagcctggtcaacgtggcgaaaccctgtctctactaaaaatacaaaaattagctgggcatagtggcacacgcctgtaatcccacctactcgggaggctgagacatgagaattgcttgagcccgtgaggtggaggttgcagtgagccaagatcgcaccaccgcactccggcctgggtgacagagggagagtctgtccctagatagatagatagatagagattagatagatagatagacacatagatacatagatagatagatatagatgatagaaagatagatagatagatagatagatagatagatagatagatagatagatagatagatagcctaggcgacagagggagagtgtgtccccagattagatagatagatagatagatagatagatagatagatagatacatagatagatagatagccaggaatatgtcggtgcttttcgaagctcttattccccaaattgtctccttccccagcccttcctcccaaggtttttggtttgtatttttgccccaactgtttttccttgcccccaggaaccagaggctaataatgtcctttcctttaaatgttttcaagggaagttccaagttaggcaaaa

SEQ ID NO: 962 - DNA, 2300 bp, Homo sapien
ttgcgccactccactccagcctgggtgacaagagcaaaattccatcttaaaaaaaaaaaaaagaagttacgtgctaggcactgggcaaacagcaatgaacaaaataaacaatggagctcgctgttccagtgggaaagggggaagggagaagggaaggtgagagaaaacaagcaaactatatatgtggtgtcatgtgctatagagcaaaagaagggatggggatggtggctcatgcctgtaatctcagcattttgggaggccaaggtgtgcggattgcttgagctcaggagtgaaatcctgtctctacaaaaaaatacaattagttagatgtggtggtgtgtgtctgtggtcccagctactcaggaggctgaggcaggaggatcacttgagcccaggtggtggaggctgtactgagccagtggtcaacacagagagattgtctaaaaacaaaaaaacaaaaaaagagagagagagaagcaatgtgggttccacagtatgtggtactgcaatttaaaatagggtggtcaggaaaatcctcactgaaaaaattacatttgggcaaatattcgcaggagctgaatagtaaaccatgtaaacatttgtgaagagcaatcccacagagaggacagcaaatgcaaaggtcctgaagcagaggcttggaagagagagtaactgaagccaggtgagcaataagaaattggtcagagaggtaaagggaaagagggcaaataattacaagaattttggtttttactctggatgaagtacaaagccaccagaaagttttctgcagagtgtaatgtgatctgatgtttagaaggattcctttggttattggcttggtaacaggtgctgatacaaaggtagaaagtggaagaccagttagggtcccactacaaaaatgccagatgagataataatggcttaggccatgaggcaatgatggagatggtagaagtagcaattctagacctattttgaggacggtgccagcaggatttattgaggagatgtgaggacactcgtatttcctcgtctgagcctaaacaggacattagaagtgtgatcactatttctatcttacaaaaaatgtagttaggagcatggtttctcagttcgaaatctgcttctatcacgtacttggtaagtctgtttttccatctgcaaaatgggttaataacgttcctaacaggctgctaccaagatcaatggaaatttcatatacgaaacactttagtacaagagtcaatgaatgttagctgctatttagttgttaataatactagtgcagagaaataaagggaaaagcaacttgcccaaagtcccaaaacgagccaacacaaatcatttcccttttttcttccctccctcattcattcattctacacactcttcggaatttttgttctatgccagatccatgttagagtcaggatgcttaaacccgggtcagggttttgagcccaaggtcctcaactctaattctaatgctatctcagggcagtcgagaggctgaaaacgggcgccaaacgggggaacacgtacgcagcattcgcaggctatggggagcttttacagtgtttatgtgctttaactctgcgtagaaactctcgttctgcccccgcaatgcgggaaagggtcagggatcaccagatacagcgctctgaggggaggaagatgagctgagggccaaaggccgcctgcttcttcacttaccgcttgcagcaaggctcccggcgtcgcctgctgctgcccggctcctgggccagaccccgctcccaacagcaactcatgccgctgccgcttgactggaaccagcggcaactctgggcccttacgcttctgctgttctatcatggcggcaaccggtctcttcagcgccgccactgaccgcgctgccgctctcaggcgccacgcaattggttccaaattagtccttcctccacaacttccagcttggaagaaccaatcggctttcaatatttccatttgcaccgccctcggatagtctcttgttattgggcatatctttctgacgtcatgagagtgcgataccaggattggtggacggagctggcgaccgccctaggcgcgctgggtcttgtgggtggaaacgcgctggctgactggggtcggcgtttagttcagcgcagcgactcggggacctggagctgacgcctagtacgtatgaggaagaacggggtgggtggctgcctgagtctggaggcgacgcctcggttgtgcagtctgaacctgcccttctcagctgagggtgctgacagcaaggggtgggaggcggg

SEQ ID NO: 963 - DNA, 2300 bp, Homo sapien
ttggaactagtcaaggttctgacttagctgaccttacccacacctatggctcaattcatgtatatacaaattatgcccaattttatattcccaacacaaatctctcttctgagcacaaagctgtatttcaaactgcctcttggatgtcatgaatgaccccacacaatcaatcaatcaatcaataaaaactgatctcagctgggagcagtggctcaggcctgtaatcccagaattttgggaggctgaggcaggtggatcacttgaggccaggagttggagaccagcctggccaatatggtggaaccccatctccaccaaaaatacaaaaattggccgggcacagtggaggcgcctgtaatcccagctactggggaggctaaggcaggagaattgcttgaacctgggaggtggaggttgcagtgagccaaggttgcaccaccacactccagcctgggcgacagagcaagaacctgtctcaaaaaaaaaaaaaaaacaaaaaaaaactggtctctaatcatcttctagtgttccctatccagcttgagggattccgtgatagtgagtgaatggtaccaccatctattcaactacataagccagaaacctaggagttacctttgattcctctcttcactccctaaaatcaacccatcaccaagtcccacccattttacctcctatatacctctagaatctgtccaattctctgcagttccacccatatctcagtcctcactgacatctctgaccaggattactgcatatcccaagtggtccacatacatcgactagggcttccccaacccccgtctgttcacaccactgagcctgagggatcaagtcccctcctccaccacaccccactgggggaagacggctcagtggtatctcatccgttttaaaataaaagctacaaattcctgcaaggtctgaccgctatcacgtacagcttcatcttgtaccatactcccttcattctctttgtaccagccacactggctctttgtgcttttagtcattttcctcccaagtgcctcagggctctgaacaagtagttctctatggaaggttctgccttcacttcttcacctaattaattacaacacttcctgcagctaccagcgcaggcatcttttcctctgaaaaaccttcctgcttatttcaggcactcatagcatcaggcagcagtaggaggcatttccatgtattagtgaggtcattgtttaacgttttccccaccagagttaaacgccctgagagtagggaccgtgcccggttcacaacatacccccaacgcgctgctaaatgaatatcagcaggacgactgaggcaatgaccacgttcatgggcatgagtctcaaatttctcaacaagactgtgctctggagaaggagtcggacatttccttcatcactgtctctctcaggggggcatacagtaggccctgatcaaaaactgcaaaatcagtggcagaaacaagtcagcctcctcggccaaatggggcaccggaggaggctgggacgcaggcctttctccctgggaatgcccggcacaggactggccacgatgggcgctcttgaagaagggagccgcaggggctgggtcttgccgccagagaccccaaggctccgctcctgccccgaaagggagcccaggctactacttaccacagctggggactcggggcccgcctcccaccccttgctgtcagcaccctcagctgagaagggcaggttcagactgcacaaccgaggcgtcgcctccagactcaggcagccacccaccccgttcttcctcatacgtactaggcgtcagctccaggtccccgagtcgctgcgctgaactaaacgccgaccccagtcagccagcgcgtttccacccacaagacccagcgcgcctagggcggtcgccagctccgtccaccaatcctggtatcgcactctcatgacgtcagaaagatatgcccaataacaagagactatccgagggcggtgcaaatggaaatattgaaagccgattggttcttccaagctggaagttgtggaggaaggactaatttggaaccaattgcgtggcgcctgagagcggcagcgcggtcagtggcggcgctgaagagaccggttgccgccatgatagaacagcagaagcgtaagggcccagagttgccgctggttccagtcaagcggcagcggcatgagttgctgttgggagcggggtctggcccaggagccgggcagcagcaggcgacgccgggagccttgctgcaagcggtaagtgaagaagcaggcggcctttggccc

SEQ ID NO: 964 - DNA, 2300 bp, Homo sapien
cagccattagcccagccccagctctccatcattgcattacaagggccacataaggagtcagttctagttcctggccacacagtccttgagaggaggccctatgtgtgagggctgcgaccttgagtcagaaatcatcttttccccctcctcctctcctggcacctgttccaacagtgagatcaccaaggctccatgcccagccctgaagcctgtccctatagctttggcagaaatgagcctctgagtcttctggcaactggaccgtccaaaggaatcaagatcttagggtggggagagggctcttcctccctggccttgttctcagaacagtccagggaagggaggcagggtttgcacatggagaaacagagtcccaggaaggagggcctgccatactctacgcacgtggcaggcctctgggctcctgtgttggctcctgcaggcccaccctggacaggctgctgctggctgaaattcagttcggcactactccttggtgtgcagggcctcctgccatccctcagaaattcatttatacctcacttcctttgagaagtctacattgggccctcaggtcaggacaggacaggactccctttagaggcaccacgctagttttatgtctggctgcccagaggtgaatgtgtgtcttgttccctgttgtctctctccaaagcagggcctggcacaaagtaggtgctttattaactgctgaattaatgagtgagctcctcagagcttcaacttgttcacctttttaaaaagagaaaataatacagtaacacctacttcatggattttgctttaaaagtccaatgaggccaggtgtggtggcgtgtgcctatagtcccagctgctggggaggctaaggtaggaggatcccctgagccccggagtttgaggctgcagtgagctatgatggcgtcacagtactccagcctgggagacacagcgagagactttgtctctaaaaaataataataaaataaaaagttcaatgaaacaatacacccaaagccctcagcatgcaataaatagcaagacaaggcaggtcttatttttactgaaagtgcttagtaaactatacagtgacaaaccaccgcacaacaggctctcgaaaggaggcagcaaattacccaaaagtgcaggcggcttgctagtgtgcacaggccaaagaaagggcggcaggtggggaaggcagccatgggccttgaagagctgaccgaattggcagaatttctgcaggaggggagctgggaacgacctgagctaaagctcggagctgtgcgaagaaaccggaaaagcccagagcacttgcaggggcgggtggggagctagatggtggggtggggtggggacggaggagggccagcaggagacattccgcagggaggggcaagcacgtgtgaggcgggcggggcgcgaagggtcaggcttttgctcaaaacaggcagaggacaaggtcagctcagccgcagaccgagccgctggtgactgtctccgccaccaggcagtgagagtgaagggagagcgcgagctctgaagcccgctagactaagcttgcaatctgagctccattcaccccctcctatttcttgagaccttgtcagttcccctgtgagcctcggactcctcacttgtaaaacgaggacagatgcccgtgccagaagtcaaccagagctttccccggcgtgggcaccagcccaagggcgttttgcttttctagtctcatctctgctctgacgctaagctcaaagagggactgggggacgggaagatatccaccatggcatgcgccctagctctcgggctggtgttggctgcttccttctcagattccagagtgcctagaggccaggaaagggagaaggtcctaccagcctggggtagggactcgggggccaggcactggcgctgacgcaggctagcagggcgccactggctggtccccacccacctcggtgggttgggggatgggcgcaccagcccctcctgggtgagccctagcctggggcttcctatttcgggagccgggggcgtgggccacgtctcctcatgtgatgcgagggctatttaaagcggcagcccgggcagggagccgccgtcggagcccttgcacgcctgctctcttgtagcttctctcagcctagcccagcatcactatggtggacgctttcctgggcacctggaagctagtggacagcaagaatttcgatgactacatgaagtcactcggtgagcaagccgcggggctcaggatgttggcttggggactggctggtggcgtgcctagccccacg

SEQ ID NO: 965 - DNA, 2300 bp, Homo sapien
gcaccctgcatagtaggggctcacagacggaaagagccaggccacttcttttttttttttttgagacggagtttcgttcttgttgcccaggctggagtgcaatggtctgatctcagctcactgcaacctccacctcccgggttcaagcgattctcctgcctcggcctcccaagtagctgggattacaggcatgcgccaccatacccggctaattttgtattttttagtagaggtggggtttctccatgttggtcaggctggtctcaaactcccgacctcaggtgatccgcccgccttggcctcccaaagtgttgggattacaggcgcgagccaccgcgcccggctgagccagaccacttctgtcttttaaggctcctgctaatttaaaaatgaagaaagtcctaaataggatgttcacaactgtggtatgtttttatttaacaaattaatgttttttaacacacacatgcacccacacacatccaatgcagtgcaactgagagactcacaagatcgtcacaagaattataaaaaatgtgatttcacattgctgtgtggtccagtgatgggatgtaagtttcaaatggcatgaagagcattctgttcttcccatctcatccataattctctggggctagacatccagcccactttgtgtactcgttgtattatgaaaagtatcaagcatccagaagggttgaaagaatggtacagtgagcacccacatactcagcacctggggactacaatgaacattttgcagtatctgctttatcacatatccattcctctgtccaaccctctgtccatctctctgcacagacagccctctgcctatccatctacctagccatccatccctccctccctcccttcattccatctcatttttggatgcatttttgagacttctgaatgtgaggcctgggccaaatggcactctcttctctcctttgcagtaacaggccctgccacacacacaagcatacccccacctctacatgtaaaccccacctgcgtacacaccatatatgacttacccatgtccccacatttatacatgcacattccatgcacatattcacataaccacacacgctcatctgtgcacatatacctaaacacccccccctccccaacacacacaaactgcccacatatacactcacagaagaccctggacatctgtaaggaaagcatctggagacctttgggaatcctcagacctgtgactgtcgtggagccggtgccaggtcctggctgtctcctccatacatttctggcaagtgccagaggctcccttgagctacctacctcagatgtcctaccttttccactcttacccatcttctctctcaacccctagtcacttcctacaaaggaaacggattccttccagagtgttactgttatgggaagcaaatcccacagaccatccactccatgcaggctgggactgtgtctgccctatccacactgcattcccagctcctggccccctgtggctaagtgttgattggaaaaaagtcaccagagcagcacagaggcacatacactgggcagccacaggggtacctccaccccacacagttacgtccatgcacacagaacaccctgtgtgtgtgtgcatgctcaagcttgcatcactgtgtgcctgcacacatatgaacacgcatcgtgtctgcctgtctccatactttccagatagagtcccttccaggacctgggtcctttcacaaaatcacctaataccactgtgggctcatctgctgacatgtgagatccagatgtggccccatgactgctcagggctcctggcttggccctgaacatctgggcgcaggggtttagagcaccagctttggaattgcattctcctgagaaaacctgggttccaccctggctctgcacatgatcactgtgcatgttccccgtatgatttatgtacaagttacctaacttcttggagcatcaatttccttatttgctaaatgggggcaatagttcctaccttaaattcatcttaaaggagataatctcagcagagtgcctggcatgttgtaagctcttaaaaatgcttgctatgaatatgattattgttactttagcctttgctctgaaatcccatgcacgctttgtgaggaaggacagccttggttggggggtgtttatggggagagcagagtggatggtgcgtatgtgaatacctctccccagatgctcccccaatcccaagctctcattatcttatatgcatattcataagggatggccctgctctgtaaatgggtcagaagcag

SEQ ID NO: 966 - DNA, 2300 bp, Homo sapien
aagaaggaggaaagtggacttatggtaaaaggtcagacattcatccagtaagcattcactgcttgactgtgtgccaggccctgtactgtgctctgggtaggagagggggtggccagagagcagaccgttcttgggtggctcacagtcccctaaaggcctcgggttagggaaggactgaaatattgctggacagaaaaataggaagactagatattgtcacctctactttttcaagggaagcagtaggacatcagggtgaaagccaggccaggttgcctttcagctctgtttcttctgagctgtgtggccttcagcaatagtaacaacaaccacagtgatcacagtcaacgtttattcgacgcttgatttacatttcgcgtgtcactacttctttgtttctcggtttcctcatctgtaaacgagtgggtggggaattaatcgacttctcagggctgttgtggggctcaaatggtaccacgggggaaagttgggcatgtgctcgggttgtttgtgaggccataagggaggcccatattgtttggaggcttgggggaatcaggaggatgttcattcctaatggaaccaggtagtgggttgggggtgagggtggtggctctcttcactgagaggtatggcatgtgagcaagcttcaaaggggagaaagagggataaggagaaggacctttaagaggagggcatctgccaggtgcagtgcctcacatctgtaataccagcactttgggaggccaaggcaggaggattgcttaagcccaggagttcgagactagcctggacaacataaggagacctcatctctacacaaaatttttaaaaaattagctgggtgtggtagtacacactggtggtcacagctacttgggaggctgaggtgggaggatcacttgggtccaggaggttgaagctgcagtgagccatgattgggccactgtgttccagcctgggtgacagagtgagaccctgtctcaaaaaaaaaaaaaaaaaaaaaaaaaaagaggagggcattgtgtgggcaaaagtgcggaggaggaaaagtatagggtgtgtttgtggaacagtcctggtgcaattaatggctaagcctggcgcccagtgaatcagccaaggatgcagtcaaccagctctttggccctggggccagcttcgaggcacagagacttctttccctaacattatcttgtccagaggtggctgaggacagggctaagggtgaagggagactaattacagagccctacttctgggtctctcacacctacccctggaaagccatctgtcaggaatgtggccgcccctccccaccttctgacctccttagctagggaccagtttgggcatccctagggagtgataagccaccaagcaggggtggctgtagggagtgtgtagctcccagcaggctgttgggagtcagtggagtttgaagaacagatggagagaagggaggatgggtttagagtgagaggctggggtcttagaagaagcagtaggtgggcatggtggcatgcacctgtagtcccagctactcaggagcctgaagcaggaggatcacttgagcccaggaggtcgaggctgcagtgagctatgtttgcaccactgcactccagcctgggtgacagagcaagaccctgtctcttaaaaaggaagaagaaaacagtgacgatgggggcttacatttgtcaagcacctaccatgtgttgtaaccaccctgtgaggtatgtatcctcactttacagaccgggaaactgaggctcatagaggtgcagtgacttgccgaagtttctttatccagtcattcagcattcaacctcagcatctacgtattgagcagaggccctgcgccaagcactgaggagtcagcggtgaccacctcttggcttctgttcccaagggtgacagtgtcctggggtcacacgggctcaaaccgaggtcgatttccgaacgctcactttggagcaggatgcgagcccgggccacgattgggtcaggttgcgccgctcgcgtggccgcgggaatccccgaccggccccttccctagggtccctcctggcgcacctgccccaggtgagtctggggaggccccgagcgccgccggaaagcgtcgagcggcttcggtaggtggggcggggccggggcggggccggggccggggaggggccaggcccggcacccggatcccgaggtccgcgccccgcgcccggcgccgggcgcccgaagccgggagccgccgccatgggggcctgcctgggagcctgctccctgctcagctgcgtgagtcccga

SEQ ID NO: 967 - DNA, 2300 bp, Homo sapien
atctgccaggtgcagtgcctcacatctgtaataccagcactttgggaggccaaggcaggaggattgcttaagcccaggagttcgagactagcctggacaacataaggagacctcatctctacacaaaatttttaaaaaattagctgggtgtggtagtacacactggtggtcacagctacttgggaggctgaggtgggaggatcacttgggtccaggaggttgaagctgcagtgagccatgattgggccactgtgttccagcctgggtgacagagtgagaccctgtctcaaaaaaaaaaaaaaaaaaaaaaaaaaagaggagggcattgtgtgggcaaaagtgcggaggaggaaaagtatagggtgtgtttgtggaacagtcctggtgcaattaatggctaagcctggcgcccagtgaatcagccaaggatgcagtcaaccagctctttggccctggggccagcttcgaggcacagagacttctttccctaacattatcttgtccagaggtggctgaggacagggctaagggtgaagggagactaattacagagccctacttctgggtctctcacacctacccctggaaagccatctgtcaggaatgtggccgcccctccccaccttctgacctccttagctagggaccagtttgggcatccctagggagtgataagccaccaagcaggggtggctgtagggagtgtgtagctcccagcaggctgttgggagtcagtggagtttgaagaacagatggagagaagggaggatgggtttagagtgagaggctggggtcttagaagaagcagtaggtgggcatggtggcatgcacctgtagtcccagctactcaggagcctgaagcaggaggatcacttgagcccaggaggtcgaggctgcagtgagctatgtttgcaccactgcactccagcctgggtgacagagcaagaccctgtctcttaaaaaggaagaagaaaacagtgacgatgggggcttacatttgtcaagcacctaccatgtgttgtaaccaccctgtgaggtatgtatcctcactttacagaccgggaaactgaggctcatagaggtgcagtgacttgccgaagtttctttatccagtcattcagcattcaacctcagcatctacgtattgagcagaggccctgcgccaagcactgaggagtcagcggtgaccacctcttggcttctgttcccaagggtgacagtgtcctggggtcacacgggctcaaaccgaggtcgatttccgaacgctcactttggagcaggatgcgagcccgggccacgattgggtcaggttgcgccgctcgcgtggccgcgggaatccccgaccggccccttccctagggtccctcctggcgcacctgccccaggtgagtctggggaggccccgagcgccgccggaaagcgtcgagcggcttcggtaggtggggcggggccggggcggggccggggccggggaggggccaggcccggcacccggatcccgaggtccgcgccccgcgcccggcgccgggcgcccgaagccgggagccgccgccatgggggcctgcctgggagcctgctccctgctcagctgcgtgagtcccgaccccggcgcccgcccgcgcgcgccgcccgttcctgctgcgggccctcactttcttctgttctgctccgagtagtttcttctttttccttcctgcaaacttgtctttctgggccggtgccccgcctgctcgccctcctggaccttcactcggcacccggatcccgctgcccccgtccccctgctcagtcctggccggcaggcgccgggcagctgcggtcccggctcgggtttccgcgggcaggaggggagtgccctcggcgggcgccctcctgggacctggagagactaagcctggagcccggggtcggggcagctctgtgggccctcgtcgccccacttggggcggtcctcggggtggcctctgtccccgtcccggacgccctggttctctgtgtaggtcgcccgggccccgtccctcctggcgagtgccctgccctacccctctggccgcctgccagtccgcctgttcctgtcgctcgggctccgcctgtccgttcgtatttgtctggttcctgtctgtgtccgtcgttcgtccgactgtctttgtccgtctgctgtcttctgtccgtctgcccgtccgcccgtccgtccctcagtctctctgcggtccctttaccgtcctcagtctggctcgcgctgcctctcaggcacttccccagctcgccccggatcatctgggccccagcgcggagactgg

SEQ ID NO: 968 - DNA, 2300 bp, Homo sapien
gtaggaacctgggtcctggggctagggctgtcatcacagaggcacggcctgagtgtgtgggctcccaggtcagcctccccaggttatagtcaggctctcacggcttcatgctgggtgtctttaggaggtgccctaacctctctctgcctctcaaatattaaatggagataataagacctactattggagttattctcaggattgagatcctatttgtaaacactccatgcctggcctgtagatatctctcagacattagctattattgtagttattattgttgtcatttttgtttttatgcaaatcagtagaacattaggggcagtccctgagtggtgattcctagacacctctggaagtagtgtaggaaggtgcaatttcacatttccaatccaagaccatctggaataatgggcaggagctcccagaggaactgcgtgttcttcagaaagtaccgctggagccccttgtgagtacagtggtgctttgtggtttgagatctcagcacaccggcagcttcagggggcttaggtagtcttcaggggtctttagcagaaaggctgggaacctcccttctggtcagagcctcatatcccagtaagaaaagctgaagcccagagaaggcgatgtctgtgtcccaggtcacacagcaatcagtatttatccagcaaatacctcttgagcacttcctgtgtaccaggccctcttctagatgttggggatatggctgtgaggaaggggaggaagaataatgatgatagccagtagttagtggcctcggacatgttatttgatcctcacaccatcctcatcctcactttgcagatgaggaaacaaaggcttagagaagaggcctagccaaggtcacatggggagctgggattcaaacccaggcaggctggctccagagtctgtgctctggttttcttttttctttctttcttttttttttttttttttttttgagacagggtctggctctgttgcccaggctggagtgcagtggtgtaatctcggctcactgcaagctccgcctcccaggttcaagtgattcttgtgcttcagcctcccaagtaaccagtgagctgctcacctcagcctcccaaagtgctgggattacaggcatgagccaccacacccagcctaaaattttttttgtttttgtttttttgagacagaatcttgctctgtcacttaggctggagtgcagtggtatgatctcagcttactgcaaccaaccttcgcctcccaggttcaagcaattctcctgcctcagcctcccgagtagctgggattacaggcacccgccaccacacccagctaatttttgtatttttagtagagacagggtcttgcgatgttggccaggctggtcttgaacttctgacttcaaaccatctgcccgcctcagcctcccaaagcgctgggattacaggcatgagccgccatgcctagctgcctgtgctcttaatcacagagttcaggttcatgtttttatgtgcatgtgtggtgaggggtggggaaggacaggcaacaggggactaggcccagtgaggtgattttgggtaatattgcaatgtggaacatgaaagagggtgtgggctgaaaggtgggtggctggcaggtgcagggctgccgtagttcaggttcccagggctccgcaggagtcctgtctgaatactgaagaggcgctgcctgtgcggagatgctgggaaggaacttgtcagagggagggcacagcgacggcaaaggccttgtggtgggagaggctgggcagactctccagacggagagcagggaggagggggacagtgggccaggtggagatgaaggaattcagtgtgatgagatggggtttcagcaggggaggagggcaagtaatctgaggggtgttaagagaaagaagaattaggactcagcctttggttagtgaggtgggtggtaggtggcctgcttggtgttttccctaagtggggtgtggtggggtatcctaggtgggtgggagtttctgaggtcccttggctggtgtgagtgggctgggtggggtggggtgtctctggtctggcaggggtcttaccaggggtcctcttgccaggacgcccagcccaactcgggtctgctgcaggcctcggtcatcaccctctacaccatgtttgtcacctggtcagccctatccagtatccctggtaagtatgggcccaggctcaaggaggcctggcctcgttcctgggtcagtatcagtctactgtggggctggggaccctcacaggtgacagggacatccctgctccagcccattc

SEQ ID NO: 969 - DNA, 2300 bp, Homo sapien
gcttaggtagtcttcaggggtctttagcagaaaggctgggaacctcccttctggtcagagcctcatatcccagtaagaaaagctgaagcccagagaaggcgatgtctgtgtcccaggtcacacagcaatcagtatttatccagcaaatacctcttgagcacttcctgtgtaccaggccctcttctagatgttggggatatggctgtgaggaaggggaggaagaataatgatgatagccagtagttagtggcctcggacatgttatttgatcctcacaccatcctcatcctcactttgcagatgaggaaacaaaggcttagagaagaggcctagccaaggtcacatggggagctgggattcaaacccaggcaggctggctccagagtctgtgctctggttttcttttttctttctttcttttttttttttttttttttttgagacagggtctggctctgttgcccaggctggagtgcagtggtgtaatctcggctcactgcaagctccgcctcccaggttcaagtgattcttgtgcttcagcctcccaagtaaccagtgagctgctcacctcagcctcccaaagtgctgggattacaggcatgagccaccacacccagcctaaaattttttttgtttttgtttttttgagacagaatcttgctctgtcacttaggctggagtgcagtggtatgatctcagcttactgcaaccaaccttcgcctcccaggttcaagcaattctcctgcctcagcctcccgagtagctgggattacaggcacccgccaccacacccagctaatttttgtatttttagtagagacagggtcttgcgatgttggccaggctggtcttgaacttctgacttcaaaccatctgcccgcctcagcctcccaaagcgctgggattacaggcatgagccgccatgcctagctgcctgtgctcttaatcacagagttcaggttcatgtttttatgtgcatgtgtggtgaggggtggggaaggacaggcaacaggggactaggcccagtgaggtgattttgggtaatattgcaatgtggaacatgaaagagggtgtgggctgaaaggtgggtggctggcaggtgcagggctgccgtagttcaggttcccagggctccgcaggagtcctgtctgaatactgaagaggcgctgcctgtgcggagatgctgggaaggaacttgtcagagggagggcacagcgacggcaaaggccttgtggtgggagaggctgggcagactctccagacggagagcagggaggagggggacagtgggccaggtggagatgaaggaattcagtgtgatgagatggggtttcagcaggggaggagggcaagtaatctgaggggtgttaagagaaagaagaattaggactcagcctttggttagtgaggtgggtggtaggtggcctgcttggtgttttccctaagtggggtgtggtggggtatcctaggtgggtgggagtttctgaggtcccttggctggtgtgagtgggctgggtggggtggggtgtctctggtctggcaggggtcttaccaggggtcctcttgccaggacgcccagcccaactcgggtctgctgcaggcctcggtcatcaccctctacaccatgtttgtcacctggtcagccctatccagtatccctggtaagtatgggcccaggctcaaggaggcctggcctcgttcctgggtcagtatcagtctactgtggggctggggaccctcacaggtgacagggacatccctgctccagcccattctgagactcagtcctcccatgagatgggagggccccgtctgttcctgagttgtctctctgcccttgtgactgctgagcgctctgttgctgggacttgagtggttggctgtgtatctgtctgtctattaggggtggctctctagccatcctcagggccacttggctacctaggcctggcctgcatgggctgagggtgattgtgctcccatctccagaacagaaatgcaacccccatttgccaacccagctgggcaacgagacagttgtggcaggccccgagggctatgagacccagtggtgggatgccccgagcattgtgggcctcatcatcttcctcctgtgcaccctcttcatcaggtatggccaggtctggattctggggaaggatcatgattgagggccctgagccagagtgaggggagggtgtgggagccaggataccaaactggaacgtgctcttcacattcaatatatccaggtcttgcattgtgcgggaggggaaactgagtccctcagagggcatggc

SEQ ID NO: 970 - DNA, 2300 bp, Homo sapien
ttgtttgtagttctccttgaagaggtccttcacatcccttgtaagttggattccaaggtattttattctctttgaagcaattgtaaatgggagttcactcatgatttggctctctgtttgtctgttattggtgtataagaatgcttgtgatttttgcacattgattttgtatcctgagactttgctgaagttgcttatcagcttaaggagattttgggctgagacgatggagttttctaaatatacaatcatgtcatgtgcaaacagggacaatttgactccctcttttcctaatgaataccctttatttcttcctcctgcccgattgccctggccagaacttccaacactatgttgaataagagtggtgagagagggcgtccctgtcttgtgccagttttcaaagggagtgcttccagtttttgcccattcagtatgatattggctgtgggtttgtcataaatagctcttattattttgagatatgtcccatcaatacctaatttattgagagtttttagcatgaaaggctgttgaattttgtcaaaggccttttctgcatctattgagataatcatgtggtttttgtctttggttctgtttatatgctggattacttttattgatttgcatatgttgaaccagccttgcatccgagggatgaagcccacttgatcattaaaaatatggaacgcttcacgaatttgcgtgtcatccctgtgcaggggccatgataatcttctctgtatcgttccaattttagtgtatgtgctgccgaagcgagcacacaatctgtttttttaaacaactttgttgagatatgattcatataccataaaatttgacctctcaaagcatacaattcagtggtttttagcatgtttgccaagtcgagcagccatcatctctatctaattgcagaatattttcaccaccgcagaaggaaaccctgtccccactagcaggccctccccattcctctctcccctttccccagtcataggcaaccacaaatctactctctgtctctgtggacttgtatattctggatattttatataaatggaatcatatgatcatatatatatttatttatttaactttttaaaccatttcacttttattctattgagaagtgaggttccaaacagactttactttccaaactgtttacctattgtcccagcaccacttctctgtccccttcaccttctttggtgattggtgatatgttccagtttttgctatcagctctgcttctgggccctcaattctgccccattgatgtttctgttcaggatacctacagggtgtgaagtcagataggagttgatctaaatcccagatctcatatgttagctgtgacatccatttattaatttatcctacaaatatttactgaattctgtgccaaggcttttttttttttttttttgagacatggtatctattgcccaggctggagtgctggagtgaagtggcatgatcacagctcactgcagccccaacctcctgggctcaagccatcctcctgctcagtctcccaagtagctgggaccacaggcgtgtgccaccacagccagctaatttttgtatttttttgtagagacagggttttgccatgttgcccaggctggtctccaactactgggctcaatctatccacccaccttggcctcccgaagtgttgagattacaggcatgagtcaccacgccccggcccaagtcttaacctaggcactggggacccagcaatgcagatttggtccctgttttaagcagagggaccaatacaatctggcagggctccatggcagtgtgtgtctaagtgtgtgtacgtgtgaatactcagggtgagtgccccttcgtaggtgcctcgttggcctgagtgtgcagctgtctgaaagcacacacttatgccagtgtaatcagttatgtttccgctctttgtttctgcatttggccccagtggcttcatgccttatgtgtgactgtgcctctctgtctctgttgcggttatccacagtctgtgtggctttgtggtttggaacatgtgtttcagtacatatctctcaccatgtcacatgcactggctctgctagcttccacctgggctccaactgccagacccccccagagcttcacacaagctatcgctgactgccggtgcatgttggaaatgggccacagggctgggcatgatatgagctgcctggacattggagggggcttccccggaatggagggctccgggcccaagtttgaggaggtgagctggtacgggcgctgggggtgttcag

SEQ ID NO: 971 - DNA, 2300 bp, Homo sapien
gctggtctcgaactcctgacctcaagcgatctgcccatttcagtctcccaaagtgctgggattacaggtgtgcgccaccacacccagcccaaactttttcatttctactgtatctgttatggtgatctgtgatcactcatgtttgatgtttctattgtaattgttttggggtgccacaaattgcacccatataagacagagaacttaagaaatattgcatgtgttctaactactacatcaatcagtggttcctctactcctctctccttctcctcaggcctctcaattccctgagacccaacaatattaaaattaggccaatgaataaccctaaaatggtctctacatgtttaagtgaaaatgtcacacatcccttgctctaaatcaaaagctagaaatattaaacttagtgaggtaagtgtattgaaagccaaaataggccgaaaggtaggcctcttatacctaacagcgtagttgtgactgcaaaggaaaagttatcctcagcctttcatgtgtattggcttattcagtcctcataacaaccctaccaagtagcatgtgttagcctcaccatttggcagaggaaaatggaagcacagaaaggtcaagtacttgcccagatcagcagcagaacaggctcaaaggttggcagtctggttgcagagtccatgaacttcactaccacactccacagcagttgtgagaccatgggcaagccatctaaacttttgaactttaatatcttcatccataaaatggggacgataataccctgccccattgcccagtgagtgtgtacacccttaactcggtgcataggcttgggttggcttgatccggtctcattcatttctccccacctgaccctacacttgagtcagagtatctcatgttggctgagcttgaagtatgcaggagcacaccccagaaaggccagggcacaagccctgcttggggtggagcagggagggcctgctctgccccactggggtgttcttaggtggaagtgggtgtgggatggtccctctgggagaactctctccctccagcctccctgcagagtcacccagggaactgaatcacagcacaagtgaaatgggaaaagttcccttatccccctcgcagggcctgcaatgggggtgtggctcgcttctttggtaccctgctgctcaaacctctagggggagcatgcagatgggcaggttgtggggcttcaaccccacggcagtgtctaggggtgaatgcttacagttcctgaagccccaatgggtgtgtgttacagagcgctcttttagttttgctatctgtaggcagcttgtgttaatcagctcgattagatcctctgccttatcacaaggacagagggctttctgtatcccagggtttttgccttggtgtactggaggaatcagatcacacgtgggcttagggaccgagtgcaagtttttattgagtggaagtagctctcagcagatgggggagccagaagggagatggagtgggaaggtgaactatcaagataaaatcagtctactactccataacagaggtaaggaagagtatgcatggaatacaggacatcctttagagcatctcttagtattaccatgccctttgattaaggtcaatgggaaactacaatagcgcaatccaggcaggactacaaatagcccagacccctcaggaatgaaggtttgggtcactccaccaggaaaaaaaccacaacctgctgaggtgcttgctgaaggcaaagggaatacagaatgggtagtagaagaaggtaatcatcaataccacctatgaccatgtgaccagctgcagaaatgcggactgtaactatcatgagtatttcctccttctttggctaaaaacatgtttgtgcatgtatacacttgtacgaagaaaatatatccattttatttccttttcctttatcatgtgacataagatttactgacttcatatcaacatttaagtattattaactttatgtaataatatttgggttggggattggtgggtttccagttgtaccaaggatagttgtattattttaggcataattatgaccttattattgtctttatttgaagattatgtatgatctcaggagatgtgtatgggttcagcttgacaaggggtggacttaccatggttaatactgagtgtcaacttgattggattaaagatgcaaagtattgatcctgggtgtgtctgtgagggtgttgccaaagaagattaacatttgggtcagcgggctggagaaggcagacccacccttaatctggtgggcaccatct

SEQ ID NO: 972 - DNA, 2300 bp, Homo sapien
gcattctcaacttggctaactggtgcaagggacccagctttcggtctctcttggcttttgataggtcttcctcgctaagcttaatcaattctagcttttaatttaaaatgagaggcatgcaattcctcctttcatttgaacacatagaggccattgtagggttattaattgacctaatttcaatattgttgtatctttgggaacagggaggcctcaggatgagagtgatgggggaatagctggtcagtggagcagtcagaacacacacagtatttattaagtttgccatcttgtatgggtgtggtttatggcacccccaaacttttacaatagtaacatccaagatcactgattatagatcaccaacaccaacacagacataataacaatgaaaaaaaaaggtgttttttttttctgaaatggattctagctctctcgcccaggctggagtgcagtggtgtgatctcggctgactgcaacctctgcctcctgggttcaagagattcttgtgcctcagcctcctgagtagctgggattacaggcacccaccaccacactcggctaatttttgtatttttaatagagaaatggcctcgaactcctgacctcaagtgatccacctgcctcggcctcccaaagtgttggaattacaggcatgagccaccgcgcctgaccaataataaaaatgtttgaagtattgtgatctcgctgctgtttccccacttgtgcccaggcagtggggttctgcaggagatcttctctgtgccacccctcttcccttgcaccctctatggccacatgtgaaacacctttgacaggctcttcttgaaggaagtacagctgcccaagctgaacataggcggttgtctggtcttcccctccatgggcacctacatgtcctcatttcattcagttagtggcccctgcgttgttctagaaaagggtttggatgaactataggtgccttctctagtggtgagagctctggcttttggaacaaatccaggctctgccacatactagcagtgtggtcagagcctcagtttcccccccatgaagtgaggatgatatgagtatcccccttgcagggttgttgagagggttaatgcagataatgcaaatccttgctgaacatcagtccgtgtccagggccctgcctctggcaggccctgatcctggcctgaccctcagaggccgcccctgcctcatggtctggctgtcctcagagagcacacacagcatctgaccatagccaatgggccaggtgcagggtgtgcctcagaactcaccttggccttgagaagcccccaggttggaaggtgtgatgaatgaggtgtggatccagccaattctaaaatagagcagatgctacagcatgtctcccaggcactttaaaacttcaaaactactatttggggagttctgagctcagaaagagaatgtgccctacaaggatggacattgtcagagatgggggtaggtgcacattaggatgaccagccacatccctgcagtgcagggagggcagtgggccctagaggctaagaccacctccatcctgtcccctttataaacttcacctgctgagggagttatctgaatgacagcctctgcaaacaatcctccccatctgccagagtcagccccaccaattttgctgctacctcctcagctcagccaaggccagaaggaatcattcagcacccttgggctgaagagaattctccctcagacatcttaggagcaggggtgaactgcagatgctacccatagaagccagaggggccttcaggcttcaatgtgttactcatctggtaccctcccaaagcctgcaaattagaagtaaaaacatccacccttacccctcagaagtgtttggaagtacagatatgagtgaactttagggaaaacataacattttattcagatgcaagagattctggtgtgttttgtttgccctatgggtactgtcttatgagattgtggatatccatccatccatccatccatccatgcatgcatccacccatccatccatgcatccattaatccatccatctatgcatccatttatccatccatccattcatctatgcatgcatgcatgcatccatccatccatccatccatgcatccatccatccattgatccatacatcaatccatgcatccatttatccattcatgcatccatccatccacccatgcatccatccacccatccatccatccacgcatgcatccatttatccatccatgcatccatccatccacccatgcatccatccacccatccatgc

SEQ ID NO: 973 - DNA, 2300 bp, Homo sapien
agcagacaatcagtcagacaaggacaggcagatagccaaaatatccagactcacagatacacaggcacatagcagatagacaggtaaacacacttcggaaggccaaggcaggcggattgcttgagctcaggagttggagaccagcctgggcaacatggtgaaaccccatctctactacaaatacaaaaaaaattcaggcaggcatggcggtgtgcacctgtagtcccagttactcaggaagctgaggtgggaggattacttgagcccaggaggtcaaggcttcagtgagtcgagatcgcgccactgtactccagcctgggtgacaaagtgagaccttgtctcaaaaaaaaacaaaaaacaaaaagcaaaaaaaacccagacgatcagatgtggactgacagactcaagcagaagcagaaacacccccacaaacaccgcaactcagatatacacatgcatacatgcacacagagataacacacccagactcacgagggtagcctatgcggtgtgattttgggcaaaagagaggccagatgtctctaaacaagcccccagccccagaaccatgaaaaagtaggtaccataaaagtaggaactctggacacgaactcttttgaaagaaagcagctttcatctcttaccctgaggatatgacatttaccaataccgaggggcccgtcctgcagtaagatgaatggagtttagataagaaaagagacttcccaaccaggagcacgttgagacctgtagtgggtgactaagggtgactaggggtaaaggagtgggctggtggcaggcagggagcctgtgttctggctgcacgacctcaggcaagtgcattcttctgagcctcagtttcccacctaggctttgtcctcccaggtccctgcagggagcagatgggcagctcctgggtgtgttagtgccagtgctggggcccccggatattatccctccacccccaccaccagggcaggacccccttggtgactcaccacccagtggtccatggcaggggtaacccagccacaggtgccggtgatcctcggctctctcccttcccccagggtctggccagctgaggatgccccttggtttgggggaggtttgcagggaggtcagtgggagggcaaagggagtccctgatgccttccccggggccacatgtgaggctcaggcctgggcctgggagggtttgtccaggtgtagtctcttttatcctctttgctggtagagacctctggcctgggcccaacctgttgaagagagggcgttgcacaatagggaggtaaaaggtgacggcagacctggcgggacagaagccccattgtttgggtcccaggccagcctgggcaaagaaaggtttatgcctgcggcaggaaggagggcctctgcagggggtgccagctggtagggcccttgcctttggacccttggagggggacaggtgccaagcaggatgcccttgggtttgctagagagggcagtgctcgtctaggggcccaagcaggcaagggaaggcagactcaacaagggatcaaagggtgcagaggccacccccacaccctgcccacctcccagggatgagccgcccagggcacctaaggatcatactcctggaattccaatcattcctaggagctggggtggctaggggggcggcacccaagcctagggggcacagtggagaggggtgtgcatggctatttttattaccgaggggtcaggagaggcttacagaattttgcctcacatgccctccccatcatttcccaaacttgtgtccataacccagagctcggctgcccatatccccccttctccaccagagcccctcagctccacagggatgcccactgtgaagtccttcccagtgtgaaaccgcaatccttcctgcttggggttcccctaagggaacggcttccgccacaggagacccagccaggacaatcgtgtgcttgtcgtttctccaccctgcaagcccatgagttgtggggtagttactccaggtacaagccaggcgcccctcccttccgccactgctggggcggtgcagagggcgggcggtacaaaaagcgccccgccccgcgctcctctcttgactttgagcgtccggcggtcgcagagccaggaggcggaggcgcgcgggccagcctgggccccagcccacaccttcaccaggtagggacgctcccctgctcagagggcggaaggtgtagacagagaagaaacagggggagggggcaggtagaggaaccaagacagatggcagagagagggacagtggagggggacag

SEQ ID NO: 974 - DNA, 2300 bp, Homo sapien
aaaagagaggccagatgtctctaaacaagcccccagccccagaaccatgaaaaagtaggtaccataaaagtaggaactctggacacgaactcttttgaaagaaagcagctttcatctcttaccctgaggatatgacatttaccaataccgaggggcccgtcctgcagtaagatgaatggagtttagataagaaaagagacttcccaaccaggagcacgttgagacctgtagtgggtgactaagggtgactaggggtaaaggagtgggctggtggcaggcagggagcctgtgttctggctgcacgacctcaggcaagtgcattcttctgagcctcagtttcccacctaggctttgtcctcccaggtccctgcagggagcagatgggcagctcctgggtgtgttagtgccagtgctggggcccccggatattatccctccacccccaccaccagggcaggacccccttggtgactcaccacccagtggtccatggcaggggtaacccagccacaggtgccggtgatcctcggctctctcccttcccccagggtctggccagctgaggatgccccttggtttgggggaggtttgcagggaggtcagtgggagggcaaagggagtccctgatgccttccccggggccacatgtgaggctcaggcctgggcctgggagggtttgtccaggtgtagtctcttttatcctctttgctggtagagacctctggcctgggcccaacctgttgaagagagggcgttgcacaatagggaggtaaaaggtgacggcagacctggcgggacagaagccccattgtttgggtcccaggccagcctgggcaaagaaaggtttatgcctgcggcaggaaggagggcctctgcagggggtgccagctggtagggcccttgcctttggacccttggagggggacaggtgccaagcaggatgcccttgggtttgctagagagggcagtgctcgtctaggggcccaagcaggcaagggaaggcagactcaacaagggatcaaagggtgcagaggccacccccacaccctgcccacctcccagggatgagccgcccagggcacctaaggatcatactcctggaattccaatcattcctaggagctggggtggctaggggggcggcacccaagcctagggggcacagtggagaggggtgtgcatggctatttttattaccgaggggtcaggagaggcttacagaattttgcctcacatgccctccccatcatttcccaaacttgtgtccataacccagagctcggctgcccatatccccccttctccaccagagcccctcagctccacagggatgcccactgtgaagtccttcccagtgtgaaaccgcaatccttcctgcttggggttcccctaagggaacggcttccgccacaggagacccagccaggacaatcgtgtgcttgtcgtttctccaccctgcaagcccatgagttgtggggtagttactccaggtacaagccaggcgcccctcccttccgccactgctggggcggtgcagagggcgggcggtacaaaaagcgccccgccccgcgctcctctcttgactttgagcgtccggcggtcgcagagccaggaggcggaggcgcgcgggccagcctgggccccagcccacaccttcaccaggtagggacgctcccctgctcagagggcggaaggtgtagacagagaagaaacagggggagggggcaggtagaggaaccaagacagatggcagagagagggacagtggagggggacagagggacacaggaacagaagagaggtgtacccaaaagaccgggggagacaggaaagcacaaagtcaaggacccaggtcagggatggaggctgctggagggcagagagacctaggacaggagagaagaccttgggtccacaggatgagtgttgggtgggagcaccaagaatgccaccaccctcatttccttgtccttgaaggtccctgcctaggtcagggaggggctccgtttctgcccagtccccatccccctatagccagggcccacacactggggctcctctgcccgtgtcctgcctggggactcaggaatcgggatctccctccctgctgggccctcttgaactcacagctccaggaaactgggagactcatccctggtgttccagggagtctctgctgcccaccatctctgccccccagggcccaggagccaccatgtggcgatgtccactggggctactgctgttgctgccgctggctggccacttggctctgggtgcccagcagggtcgtgggcgcc

SEQ ID NO: 975 - DNA, 2300 bp, Homo sapien
ccaggagccaccatgtggcgatgtccactggggctactgctgttgctgccgctggctggccacttggctctgggtgcccagcagggtcgtgggcgccgggagctagcaccgggtctgcacctgcggggcatccgggacgcgggaggccggtactgccaggagcaggacctgtgctgccgcggccgtgccgacgactgtgccctgccctacctgggcgccatctgttactgtgacctcttctgcaaccgcacggtctccgactgctgccctgacttctgggacttctgcctcggcgtgccacccccttttcccccgatccaaggtgggcactaagatggccaggagggtgggtcactttgtccacctcagactcagcaaggctcaagagcaaagctgatggatgcactgacatttccaggggaagctctgtagaatctgggactcttccctgcccctctgggaactttactctccagcaagactgaagaagctccttggttagaattctaatttggcccagggaaagggcaacctcccacattttctcccaatcctgtctcttttccagacacggaaggtgctggccgcacctgctgactcactcttgggctgataaggcacatatgggttggtgagggtcatcttagccatttttctgcctttgctgaggattctaggatcctgtgccccgagatggctgctcatacctgggagatgggtcaaatcttttcctgctttcagcctcaccatcatccttttccatgcacttgcccctgtccaataggagaatcacttgcgttccttcccacagttccatggggcttgggccggcagactgcatacctgagctgtcatctcaagagtgctgtgttatcttaggacggttgcttaccttctctgggccttggcttccccatgctcctcccactccccatctccaagccctaacttatttaaatggaaaaggatcccaggaatgttgtggctggcatccaagtaaagtaagaggaatccaggttggaatcattgaagaacttcccaaacagcagttggtgtgtgaccctgcaggatttgtcttcagttatagtttaatttcagtgagagctggtgtgtgtgtgtgtgtgtgtgtgtgtgtgtgtgatgtcttcagttatagcttaatttcagtgagagctggtgtgtgtgtgtgtgtgtgtgatatcttcagttatagtttggcttcaatttcagtgagagctggtatgtgtgtgtgtgtgtgtgtgatgccttcagttatagtttaattttagtgacagctggtgtgtgtgtgtgtgtgtgtgtgtgatgtcttcagttatagtttaatttcagtgagagctggtatgtgtgtgtgtgtgtgtgatgtcttcagttatagcttaatttcagtgagagctggtgtgtgtgtgtgtgtgtgttgtcttcagtatagcttaatttcagtgagagctggtgtgtgtgtgtgtgatgtcttcagttatagtttaatttcagtgagagctggtgtgtgtgtgtgtgtgtgtgtgtgtgatgtcttcagttatagcttaatctcagtgagagctggtgtgtgtgtgtgtgtgtgatgtcttcagttatagtttaatttcagtgagagctggtgtgtgtgtgtgtgatgtcttcagttatagtttaatttcagtgagagctggtgtgtgtgtgtgtgatgtcttcagttatagcttaatctcagtgagagctggtgtgtgtgtgtgtgtgtgtgatatcttcagttatagtttggcttcaatttcagtgagagctggtatgtgtgtgtgtgtgtgtgtgatgccttcagttatagtttaattttagtgacagctggtgtgtgtgtgtgtgtgtgtgtgtgatgtcttcagttatagtttaatttcagtgagagctggtatgtgtgtgtgtgtgtgagacagagagagagaaagagagagaatcttggaaaggttcaaggtacctgacctccaaggacctggccaattagcccatcctctctggttctggttccacttctcttctcttcccttccaacaggatgtatgcatggaggtcgtatctatccagtcttgggaacgtactgggacaactgtaaccgttggtgagtgtttggagcttagaggggtcttgctttgtgagcctgtggctgacagacttggttcaaatcttatccctgaccccttttgcaagggagaagtcttttcccttctttgaacctcagtttcctcatctgcaatagaggaattttaacactgaccaagtcaacttat

SEQ ID NO: 976 - DNA, 2300 bp, Homo sapien
ggaaggatagagttgccgttttctgagaactgtagggggaataagtgaggggggtcaggaattcggttcagggagtgttttggttcagggtagtgatgttgagtagccgtgagatccttgactctggtgttcaggcagagatctgggccacagatataaacttgagaatcatgaactagacgttgacatttaaagccaccaggctggatgggatcacctagagattctcccacagtcacttgcacagactccctggcccatgttaacctccgaggccacattccttcaaagtatccccagtcccccacttaccctttccttctctccttttctcaccagcacctgccaggagaacaggcagtggcagtgtgaccaagaaccatgcctggtggatccagacatgatcaaagccatcaaccagggcaactatgggtgagaggccctagaggcaccctcagtgggcacacatgcatactcatgcatgtatacacgcatgctgtgctgtggggcacgtccagcaggccactcctacacccagatttgactgtgtgtgcgctcagccactgtgcgtctctcccacccacatgcacccacgccaaggaccctgagcctcggcagatctgtgacttccttccgtcccctctccttcagctggcaggctgggaaccacagcgccttctggggcatgaccctggatgagggcattcgctaccgcctgggcaccatccgcccatcttcctcggtcatgaacatgcatgaaatttatgtaagtccatccttccccacaatgctgccatctccccatggctcagaacctcagggatgctggccctgtgccctgctcctccaagggcctggaccatcccctactacaaggctgtgtgtccctggacaagttactccccttctctgggcctctgttccctgcttccacaggatgtgctgtgctggaagaactgatgctcagattgaatttcgtggtcttggcatcagctcccccctgatctctccagcctgggaaaaatgctgttggtctcagtacagctgggttagggcccaaggggacagggggtcaccttggtattttgggaagggaaggacacacactcctccagttctggccagagggcagcagttctcggaaataaatgccggttcagcggaaccccaagggaggagagggcttctcccttcccaccagtgggaccctctgggagaggaatgaaaaccaggcccaaagtgaaagggtgaggaaggggagcttcagcaggcctggaccgggacatgtgccggagcatttgtccatcagtggcaggcagcggggaggcaggggctggcaggagtggccctccctgcggagacttcggccttgggtgaccagaccctggccctgcccttattcccctgggcctctggctattttctgcctcttgctgtttgtgttggcagactgcctggtcacgggaccctactgcctcttccctcccctgagggaaagctaaggcctgaagaaagctaaggccgatcagaaggtgcagaggaaagaggcaggggttgagaatggaaagctgagggacctggcctggccacttctctgtgcctggcctcagctgcctcatctgggaagcaggactagtcaccaccgccaccccgccccgccccaccacctgatacctgggaggcactaaatggtgcttggttcttcaacacaagtcaaaattggaggcagctggaatcctgcagcagcaggagggctcaagattaaactgcagaaggccctggacttggtggccctccagtgccaatgggcacctgaggggcaggccagggcagagcaggaggcagacagggcaacctttatcttgcagacagtgctgaacccaggggaggtgcttcccacagccttcgaggcctctgagaagtggcccaacctgattcatgagcctcttgaccaaggcaactgtgcaggctcctgggccttctccacagcaggtaagccaagggcaagggctggcgcctgggagaggagggccaagtcctgagcctcccgacagcccctctatctcaccccaccagctgtggcatccgatcgtgtctcaatccattctctgggacacatgacgcctgtcctgtcgccccagaacctgctgtcttgtgacacccaccagcagcagggctgccgcggtgggcgtctcgatggtgcctggtggttcctgcgtcgccgagggtatgcagcaacaggggatgtgggcagagaagagggcaaggagctccgtgggcatggcctgggccatgatgca

SEQ ID NO: 977 - DNA, 2300 bp, Homo sapien
ccatccccctacatgctgcagccccctctgcagcccctacatagcaaacaatcacagctccaggtaggggggagaatgtggggggataagatgagtcattgccgtgggaacagatgtaccaagttccacatatgcacactcacagaaccttacacacaaaggcatggccacactcacattcccacactcacagggaaacacgctgggaggccagtgctagtcaaagccacagttgaacattcagatccacactgagaaacagtcatctcctcacacatacacattccccatagacacaaacgccaaaacacagggacagatcaagacccagacagacacatcccacccagagtgacctccagtcatcaacccagagcccaccccctgctcatatgcacagtcagactcaaacacactggattccctagacacacaccacagcccttacttgaattcaagactcaaacacaaacacacactcatgcacacatatgcagacatgcacacacccacacattcacacatgcacacacgcacacacacacacacacacacagcagcccctcttctgagtcccttcactcattctcctacctcggccagcacctagggaagacaagacatcacacaccatgcagatgccatacctgcccaaggacaaagttctgccttgggtttagcttcagtccatcctcctgttctgcagaggttaaggtcactggccccctcccttatgctgctccagttcctctcccacacctcctatgcctaacggcgcatcttcagagcctttgaaaagggctttggctgcaatgggaaagatggtggttgcatcccaggagtcacctcccaggagggaaacagtgtgagtttcagagggtgacatgttaggaatgtcctatgctgagctaggggatggccaaggtgactgcatgatgctcaggcagtcacccttcacctacctgtgatttccagaatccccaaccttcaaacctttgcacctgctgtttcctgaccttgaatgcctctcctcgaataccacaatcccccttgcaggctaccttcttattcttcaggtctccatggagatgtccctgctccaggaagcctgttctcatgccctggctgagtcggtctgtcctcctgtgccccacagcccccagggccctcacaccctcctcacaccacaggttaattgcctgggtgtgcacctgcctcccccaccagccagagagattttgcaggggagggagactgtgtctggtgagagaggctagaggcctgagaggggcagaggctcaaagcccagctctgcctctgctgtgcgaccttgggcaagtcattgcgccatgtggatccagtgtccttatctgtaaaatggggacaataacgaccacctcaccaggttgatatgaagattaaatgagagcaggcatcatatgcattatccaaacggtagctgtattattagaactcactgcctagcacacagcttaataaatcgttatttgtggaattaacgaacccccacttctgtccccaccggcgtccttgatttttggggggaacagtaggtataacaaaaagagaaactgggggcagataggatggggggctgggagatgggagaacaggcttctctggcatcgttgggagctagctgttacagcagcatccggagctaggctggaggcggtgcaggcatcctctctgtctcacccctgtgacccacctgtgccatcctcctcctcagttaggtgaggcagcaaggagaggcggggctgggctccacctctgcactgtggccctctgaagctgccaggcccgccggcacacactaagtgcgcccagaatgcggggtggccaggggcataaatgttgaatgaatgaggatggaatgaatgaacggatggacgcatgaatggaggtgggatggaagcttgaagtgggaggctagaaggaacgagcgtctccctccgccctgcgggtctcggggctggaagacagggagccaagaccgtctgggggctcccaccccgccctgcccctcccgccggccctccctccccgcagcgcgcagcccggcggagcccgcgccgagccacagcccgcgcagttgccgcggatcgtgctgagccccgcgagccgaggcagcgcagcctagggagggggctgccccggccccctcctgcagtcccggcccctagaggctcggccttcctcgcaggaaggcgaagtccccggtgccaggtccggggaccagcagccgagaacgcccgggtcccggagccaacaggtgc

SEQ ID NO: 978 - DNA, 2300 bp, Homo sapien
gatccagtgtccttatctgtaaaatggggacaataacgaccacctcaccaggttgatatgaagattaaatgagagcaggcatcatatgcattatccaaacggtagctgtattattagaactcactgcctagcacacagcttaataaatcgttatttgtggaattaacgaacccccacttctgtccccaccggcgtccttgatttttggggggaacagtaggtataacaaaaagagaaactgggggcagataggatggggggctgggagatgggagaacaggcttctctggcatcgttgggagctagctgttacagcagcatccggagctaggctggaggcggtgcaggcatcctctctgtctcacccctgtgacccacctgtgccatcctcctcctcagttaggtgaggcagcaaggagaggcggggctgggctccacctctgcactgtggccctctgaagctgccaggcccgccggcacacactaagtgcgcccagaatgcggggtggccaggggcataaatgttgaatgaatgaggatggaatgaatgaacggatggacgcatgaatggaggtgggatggaagcttgaagtgggaggctagaaggaacgagcgtctccctccgccctgcgggtctcggggctggaagacagggagccaagaccgtctgggggctcccaccccgccctgcccctcccgccggccctccctccccgcagcgcgcagcccggcggagcccgcgccgagccacagcccgcgcagttgccgcggatcgtgctgagccccgcgagccgaggcagcgcagcctagggagggggctgccccggccccctcctgcagtcccggcccctagaggctcggccttcctcgcaggaaggcgaagtccccggtgccaggtccggggaccagcagccgagaacgcccgggtcccggagccaacaggtgcggggtgtgggggacccccaggcctgggatgggggttccaaaggacccgcggcgagggatgggaggagccaagagtctcggggggtaacctgggtgctgggagactggctcctcggccagcgctgctctcctctaggcaggctccgagtgccctcgctcccccgcgccttcccggagccccgccagcccccgaggtgcaggaaggtcccgcggacggagcgggcctgccggcgttcagtggggtatgaaggcgtcccctccccttccccaggggtctccagggatccgcaaccctccggcacctggccggggtcgtcctagcccagccgggggaaggaggggctgagtgcgggaggaggggaggggcggggagctgggctggctggatttatgaatggagagcgacccgcgcgccggaacagcggctcctggcggccgtcggggagcgtcgcggccctggggacccaaaggggcctcttagggggcctggatgctccccttgctcgcaaggggtcgtcagtccctccgcgcaccacccccactgtgtgtgtgttgtatgtgtgcgtgtccgcgagtgcccaccggagggtctggcaggtatggcgggtggggcttgggtctctaacacctcccttggcccgttttcccaacccaaagttaaagcctctgaactggctcaagaaatatttgcaatcgggatggcttctcctcccaaatctacggtgtttggtgggttcgaacagacctggcttaagagctttgtgaccttgagcaagagactcaatctctctgagcttcggtctcatctgcaaagcagggtaccctaataatggtaaccggaaacgtccccgaaactaccttctcgtaccaggttcttggtgaagcacttggcacgcatcggagctcattactcctcatcgtggtcctgtaaggtatgtagggctgtcaccccattagacagatggggaaaccaaggctgaaagaggccaggtaagctacccaaggcaactggtgtggaattgggatgcaacccaggtctgtcttcctccaccaatttcatgactgtgagaattaagagggaacttatacgcaaagcgcctggcacaatccctaatgtttccttccttctctcttttcccactccctcctttccttcctcccttcaggaagtttgaggctgagacccgaaaagacctgggtgcaagcctccaggcaccctgaagggagtgggctgagggctggcccaagctccctcctctccctctgtagagcctaggatgcccctctgctgcagcggctcctgagctcatggagccctcagccaccccaggggcccagatgggggtcccccctgg

SEQ ID NO: 979 - DNA, 2300 bp, Homo sapien
acatgtttgaattagagcaaatggagatgagggaggtgagggagtgtgtggagaaaaaaaggacacacaggaatgatcttaggtttttggcctgagagactgggtggattttctgagatggagaggaatgggttttggggaaaacaccaaaagaaaactcttatacaaggcaggctggaataccacacagtgacagtaccaagtgcaaagggggagtggcaagagagagtggctaactctggagctaaggggaatgtgggagggttaggtggagaatggaattggaactgagccttgcaggactggagttgggagggctgctggtccaggtgaaaggagtggtttgaacctaagtttggggcatgagcaggtataataagctcattttcaaatttacacatttgttcctgtcagctaagaaaagtgaaatttagagaggttaaataacttgcctaaataaaatgtggtagatatacactgtggaatactatgcagccataaaaaaggaacaagatcatgtcctttgcagggacgtggatggaattggaagccattatcctcagcaaactaacagagaaacagaaaaccaaacaccgcatgttaccacttataagtgggagctgaatgaggagagcacatacaccactggggtctgtcggagcgtagagggaggtgggaagagggagagcatcaggaagaatagctaatggatgctgggcttaacacttgggtgatgggatgatgtgtgcgacaaaccaccatggcacacatttacctatgtaacaaaccacatcctgctcatatacccctgatcttaaaagttggaaattaaaaacaaacaaacaaaaaacctgcctaaggtgatacagttagaaagtgataaaacaaagatcctccctccaaagcagaagtgctgaatggtggaactgagcacagaaatacagagtagcagaaggggccgtaagattggaaagttgaggctgggccagattctgaagggcctggagtaccagaatgaagagattgggccttattttgtaggcgtggatgaagagcatccattgtaggctgtgtagtgggcaagtggcatgatcagcactgtgattttggaaagtgcacttggttagatagatggactagactggataacagttcgtaacattcatttattcatttattttaataatcgtgtcagtcgctatactaggtactggagttataatgacaagcaaaaacagacaaaaccctagcccacatgaaagaacttgacaaagaaatcaaataagcacacaaataagtgtagaaacggaaccactgagtggcaagtacatggtgctgagatcactcggtcaccaggatttgacctacgatggggaccgacctagacctccctgctgagaactggacatccattgaccccggttctaggcgacccactgtgagctagggcaaggcaactgcctctctgcacctcagtttccccatttatgaagaaagaggcactagataattcaattttcctccaactctaatgatctggggtttttttctccaaagaccacagatctgtatcccactacaagggtactaactggtacccagtaccttgacattagaggagtaattccgccatcgcctctccctaccgggaagagtcggtcggttccccgttgtcagggcaaccgcctggccaccgcccctcgtctcctttcccgcggctcatctgcggaaactcaggagctactccagcaattacgtcactatcatgcgtcccatttgccaggttataacatggctaccgcagcaacaccccacccaggcttctcactaaatttcccaacctgaccacctcttcggcccactccacctcaggaaaaggaggaacattagcgctggtacagccgccaagacttccggaagctccatcaatcacttagctcccctggtctctcgggtaggcatccgcccaccgcccccatcgtcacttccgtcggccgacagcacccaagattgacaggcgcggacgtccaatcagatgcgggcccagccccaaagccgagacgaggggcgggtttgagagcggaaagccccaccccttgcctgagtgtgacgtcagaatcaccatggccagctatccttaccggcaggtgagtgtgtgaggggcccgcgaatccaggtagcggcggtgccaggcgcaggcccgacgtccccctgctctttctccccgctttctccgcgcccttcccacgatgggttcgcttcagcgaggccttgcgctgtagagaaccgaaaagggaccg

SEQ ID NO: 980 - DNA, 2300 bp, Homo sapien
ccagggtgacaacagtgagggagatcctggctgtgttgggagcccaggcctacctggtcctccgggattgccaggccagagaggagaagaggtaagaccagggatggggattcatcctcaagggagctggggccctgtctgcctttgagacctcttgggggcctccgaggcctcacctgactgatgccctttaccactctgggctcatctgctctcctggcacgtggcttctctgggatacacaggacccagcgtaggacacactctttctccccagtgcccagctgcatcctctgcctgcaacgctcttctccagggcttattcctgcactccttcagctcggctcaaatgtctccttctcagagagacctcccctgaccaccctctttaaaattgaactccacaccaaccccagagcctccagtccccttggcctgcatcatactcatcaccatccaacatcctgcctatttacttcattcaggaacattctacaggtgtcagctcaacaccaactatgtgccagctcctgttctatttgttagtgtccgtctctcccctagaatgtaactgctttgaggcaggggtttttatttattttgtttatgctgtgatcctagcccctggactaatgcctggtacgtaatagttgcttgttaaatgtttgtaggatgaccgaatgggccaaatgaaagattgttcgaacatcagctaagtggtcctgcttggacagcagccaccctctgttgaccttggccctggcaagctgggaggaaggctgctggaatcccaggggctctatggggcctgggcctcttcatccatttcccttggcttcctttgcagggtccgcctggcatgaggggctccccgggtcctccaggccctatcgtaagtatcagtggtgccctggtctgcttgagaagctctcaaaggggtcattacactcagacaccatcccgcggccttgtccccaaaaggctgggcaaggcaggaggagggaacttccactgccctccccatccctccgcagagcatctgcagggactgtgctctcccaccaccggatgccctggaaccgccctgctctgcctactgcctgcggtcctgcttaggggaggtcctcagaggcacctctttgcttccctgtccccaccctctgctgcgctttccacagtggccccaggccgccctcggcagggggcctaggcttcaggctcacagcctcccaaccagggaagcatgcggcatgctggccagacctctccatgcccctgtgactccagtccccacaagggctcggggctaagatggagctgtcctccattgctctgtagggccatctctagggtaaatctacaaaaaccagaccagggtatctactctggagtcctctgtgatgttgacatggcaggaaaatagaagtgactaggaaagattgaaagaactgaaaatgctttctctggagaagaaaatggctggtgggagctgtcttagagccagggagccccccactcgggggacaggtggaggtcgggtggcaggcatggtgggcaaggctgaaagaaatgggcttctgctgcaaccggatcttcagttagactccggaagactcaggaagccctctgactctggagccattccgcatctccgtcaacggaggagccattcttcctggagccaaggggaggaacagttgtcttttgagccaagactttcaaggagtctcttttccagctgccttgaaaatactcccatgacctcctctccccatgacccccaagccccagactgtgccctccaggctgtcccagggttactgtgcctgtgagatgtgacctgcctgtttctcccaccagggccccccaggttttcctggtgctgttggctcccccggattgcctgtaagaacctagcgctgctcgacctcccctcccccccgtcagccaggtctctgtggcttttgcttgtctccctcctgtcgtgccttcacctccgtcctccgtgtttgttgtcccccttcaggcacggtagctaacgacacgggttctctgaggtcccggcagcttggacatcctcccagtctctgactcctttccgttttctcctctccctcctctcctgcgttctttctctcctcttctctctcttaccccgttctgtcttccttctccatttctcgcaccatcttgcagcactcccccaagtcctcctgagctcgtgaaccttcctcttaagctggtgcctctagggggcccctccattcctgccttctcgctctgcctcctgcttctcacca

SEQ ID NO: 981 - DNA, 2300 bp, Homo sapien
gtggccatctatgtctgtgtgcacacatgtatgtgctgcaggtctgcaggcttctctgcttgcatatctgagtaattatgcctgtggtcacatgtatgtttatgtgcacacatgtctatgtgtacaggcatgtgtctgtgtgtgcacattcgagtatatacagtgctgtatgcaggcattctgagaattatgtacctgtgtttggatatgtccagggatatatttctgtggggtaatctgggctcttacatgtgtttctgtgtatctttgatgtggaggcgtatcttgagtctctacacatctgtgtgtaactgtttctagggccagggtgtgtctgtgtgaacatgagtgcctatacatgcatatggagtctgcgtactcaagtgctgtgctagaactttacctgactgcgtgtttctggatgtgtgcacgtatgtgtggaagggaggaaggggcatgggcacattcctagactgtctatgatagtgtttctaggcgtaaggtgtgtcccaggcttggctgttcctgtgagcacccttggggtgctgtgggaaggcatctggctctcccttctcaggttcctccatccctggcccagccacctgccctgtctggggcacgggtgggagctgtcaggatggcatggtggttaagagcacgtgctgagtctaggctggctggacatgagttctgctccaccactgactagctgtgggatcccgggcaagttgtgtttttcctgtgctgcaggtttgggaataaaaatggaattctgccttaaggcgttgttgtaaagatcgaaggagttagcatatgtgaagttctcagcacagagcctgacctatatgcgcttcccacctctcccgagtgcccactgctggggcagcaccctctggtagggcaggcggggcctgtgcccacccaccccgcaggccagagtgctcagaaggccccaccccctccgcttcccgcctgctgagctcagcacttcccaggccccaccactgccacagccacatctggggccagctcctcactgggaccacagtggggcgcctctgtggcgtggttggggtttccgctgactcagcgcctctgggtctggaggcgggaaatcccaggcctgcccctacaacctccccctaccccgggttagccgaggccacagggctaggcgcgttgcttccacagagcccccagagcccccctcaactggggacgctcagtttctccctcttcagcccagcatctcatggcctcttgaacctactttgtggatcctcagccttggtgccaataaatttgctttcggtctacagcgggaggagacccttggtggggattccaccttggtcaacggccctgcctctgggcagaactcggaacattaccggctccttcctcctcagagctccaatctttcagcccagctcaattcctcttgcgtccttggaccgtgaatataaagcaggtccctccccagtgctggtgtaaaggcttgaaatccagtcccgtcccctgccagggatcacagtaataacgataatagcagcaaatatttactgagctcctctcatgtgccagaccgtgtgctaagcgcttacagcctttggcccatttcctgcttacagcaaaggtctatgaggcatatactctcacgatcccatcttccagatgagaaaacggagtatggttacacagcacatttggaaccgcaaagccagagcaggggccagggatttgagcccttccaacctcatggagtaaggaggaataaggggactccctcagtctcacttctctgggagtcaggccagagcagagggggttaatttagcacggaggagggagggggttcccaccctcctcctcccagtacagacagacctagggacagactgactgggaatgttaggcagaggaattggaaaaagctgaccaccgaggcttgggcggcagccacatcatgggtgccacgcacttgggaggagggtctctaccctgctccctccacccctgtcccctccccgcccccccaccccgcagccttctgggggcccagccagggacatggaaagggggagctcttcaaactccaggcctgactcttaaagggcccgcaggagcccccttccagggcagctctgggcacgtagggtcccgcctagctcgaggatcgctcacctggcggtgaggcaggaggggcgggcctgggagctcggccagacccggggcggggctgtgcaccccgcagtctagccgcctctggtgccgctggagccccctctaggccctcctcc

SEQ ID NO: 982 - DNA, 2300 bp, Homo sapien
tcggtcccactgtgtctgcgtgtccttccccaccttcctggtccctgctctgaccccgtagttcgctgctttcggtctctgttctgtttctctggctctggctcctcagcccctctctgcttggggacattactgaggccctggggtttggggccctcccagtcttgggcagctgaagagctccagctgagtggaggcctaggctcaagccatcctgtcccccggagtgtcactctgatgggctctgccactgtcccctcagggcctcactctggagctcctgcgtggtgctgcccctgctggcgctcacctggatgtctgccgtcctggctatgacagaccgccgttccgtcctcttccaggccctctttgctgtcttcaactccgcgcagggctttgtcatcactgctgtgcactgcttcctgcgccgagaggtggggctgggcctctcccgcctgtgtgtgcccaccacacctgccaggcccttggcttctcctcactgtgcagaccgggaggatcgaggccccgaccagggtgccccaggccccatctgggcagcccttactgtggaagctgatagcccggggtacccgcaactgtcccttatgcttatccttggcctcctgggtctcctcctcccgttgcaccctgcccaggtgtcatcaccttccccaaggttggatgtgttgccttccttctacacttgcctgggcatctggggtgggaagcacagccatctgtggtcgggggccctgcagtggcctcaggcccagcaggcgccctctgtccccaggtccaggatgtggtgaagtgccagatgggggtgtgccgggctgatgagagcgaagactcccctgactcgtgtaagaacgggcagctgcagatcctggtgagttaggggcctgggcagggcctgggcagattctgggcaccccccaccccaatcctcctgccctagaccatttaccttccccatccatggcagggttgggacagggattgggtttgattcaggctcagccactaacacctgggtggcattgggcaagtccttcccccactcagttttcctagccatcaggtgggctggggtaggccatgcctgggctctgctgggccatgggctatgggccatgggcagccctaaggcaggcagactgggcaaagctggctggggagggcctgagcctcctcccaccctgatacattaatcctccctctgcccacctgcccctccctttctgcctatagtcagactttgaaaaggatgtggatctggcttgtcaaacaggtgagtgtgccgtggcagaactgagaatggtcctggggttggagaagaaggggaggccttgagccccatcatgggaggccctgatggagttctggctgctggagtccagcttcgaagttagacagccctgagctggacgcaaggctgcgaatgtcccttactgtatgaccctgggcaaacaacctgcctctctaagcctcagttaacacacctgtaaaggagagaatactgtcctcccagggcaggtggggggcttaggggcatgcatgaattcggggacatcgagttcttagcaggacccatggcacagagtgttacgttattatatcatttccagattcttaccagaatctttccatttctgtctcctggggagctgatgcacagggaggtgggaagacaaagccctttgacagccgtggggctgtggggtcaaagtcgggacctgcaccaggacactgggagctgggccttgcctttgtttcttgccctgtctcaatgtggggactttggagccgttgtcttcttaacccctcttatatgtgagagattaccaaccacccagccatctctccaggacccagtttcctttcctgtccaagcgcagaagcttggtacctccccagcctgggcaatggcatctggaggttccttctcctcaggactcaccccctccctcccactcctgcccccagtgctgttcaaggaggtcaacacttgcaacccgtccaccatcacgggcacactatcccgcctgtccctggatgaggatgaggagcccaagtcctgcctcgtgggccctgagggcagcctcagcttctcaccactgcctgggaatatcctggtgcccatggcagcctcaccagggctgggggagcctccgcccccacaggaggccaaccctgtttacatgtgtggggagggtggcctgcggcagctggacctcacatggctgcggcccactgagccaggctctgagggagactacatggtgctgccccggcggact

SEQ ID NO: 983 - DNA, 2300 bp, Homo sapien
gaggcctggctggtgggaagcactctgtccctgatggtgggctgaaccctggacctgtgtgggagctgctgtggcccccatggcatgggcagtggtggggtgtggtgagcttccctccctagactgcactcatgtcttttgctccccaggggaccacggatccccattgcgccagctgggactactccagagcgtgagttgggtggctcctctgggtgaggaagggagcagccctagggccctttgccagaaaggggtctcctgcctaaaaggcaagagggatttttggtgccatcctagcctaaggggtcaagaacgtatcctgggactccctgctgttgcctcgtggatgtggccttactgtggatttagcctgtccttgggcagtggccaggactgggggcagggccacgtagctggcctggggctcactgaatctctcccctacccaagagatgccagctcaggagactgggacactgaaaattgccagaccctggagacccaggcagctcacacccgctgccagtgccagcacctgtccacctttgctgtactagcccagccgcccaaggacctggtgagtggaacagaggtgcctgggctgaataagggaggaggccctgggcttccagcagccatcagtgatggtgttggcaggcgcctgggtgatcctgaatgtgcatctgcaggtgcgcttgtgggattgtacgtggatgtctgtgcccctgggattgtgctcacagcaatgatatttgcctgggggtatgcggcagtggccagttgtgtgtgtgtgtgtgcacatgtgtgtgtctggttgtgtgtagaagagtgcaggtgactgagcataaatatgtgtccacatagatacccgggtctgttctgtgcatacatgagtacaacagcaagaaggtgttgcccttctgcctgtgggtatgccagtctatggtagatgaggggacagggcacccctgcagctcccccctcccaggaacccatctgactgtctgcccatcttccccagaccctggagctggcgggctccccctcggtccccctggtgatcggctgtgcagtgtcgtgcatggcgctgctcaccctgctcgccatctatgccgccttttggaggtaggtctgacacctggctcttgtggctgggggagggggggcaggcgcagaaggtggccagccacaccaggtcggatggggcagccagcgcctctgtccctgcctgctgtgccccggcaggttcataaaatctgaacgctccatcatcttgctgaacttctgcctgtccatcttggcatccaacatcctgatcctcgtgggccagtcccgggtgctgagcaaggcaggtgcagacttccagggctgccaggggtgtgagtggggtggaggggtgagggtggagagcgcagtgtgtgtgtttgcttgtacgtccattagtggtggtgtatgtgtgccccatgttgggattagagtgtgtatgaaatagtgtgtgagaccatatgtgaggacattggagagggggtgtgtactcaagtgaggaacttctgtgaacatcagtaaatgtgtgtgtgagctgagcgctgggtgtgtgttgggcaggtggcattgggcctccttgtgtctgtgagcgtgtggaagcctgagtgaggcctccttttgccacctacctgtggacgacctgtgcagactcttccctatgcccccttggccttctctgcacagtgccagcaccatgcatgccaggcacagggcctgcccagctgtgacgtggcaggtgctcatgtctgtccccctccctgccagccccgtctgtgcgtgggcagcctgcccacccgcctccctggatgccgagtgctgtgtgtgtgtcaccaggcccgtgtcgtgctgtgtgtgggtgcaggaaggcgggggtgcctggcagggctctgtggggggcggggctcaggtgggcggctgtggcagcgcccagcagcgggcgtgggaagcccggcgcctcctgccctggcggctgctcagggccactccctcccattccctctccctgcagggcgtgtgcaccatgacggctgccttcctgcacttcttctttctctcctccttttgctgggtgcttaccgaggcctggcagtcctacctggctgtcattgggcggatgcgcacccgcctcgttcgcaagcgcttcctctgcctgggctggggtgagcagggccagtgctggactctgctgctgggccttggtgggcaggggcagcaagagaggttcagctttggccctggcccagctctctggg

SEQ ID NO: 984 - DNA, 2300 bp, Homo sapien
gcttgcatccttgtgggcaacccatgtctccaccattttccccacttttgcctacctccttgaagccccagtctagcaaccccattccccctcccagtgcccatgtaaggagggggcccggatttcccactgccctggggtggctttcaacatactttgcagctggcaaggcctgcctggcctggctttcacatagtagctgagccttgaaatccagagatgtctgactgtgtttgagggtgcctagcaaaccctaggagccttgcttgccagtgctaggcccaaggcacaggcctccttgggcatccgcagcgaaagggaaggtgccggcccagccctcctccctgcctcataaggcctcataaattctcttaaggtgacaggtgagattccttcatcgtcccttattacctccttccattaaagttgataatctctcacaatcactcacaacaaatgtcaccgaggctgctggaggtgggagggacagaaggagggaaaagagggcggttctatgcctcttcctggtactgcccctgggaagaggtaggcttttctcttcttgccccatcttgagggtgccacaacttaaggggcatcagtggagaggtggggttggtatttgctgaaatgaggacttctttgcactgaaaatttggcccttcctggctagtgaaccttcaaaaagtatggtcctgaaaccatcccaccctcatcgcaaagctgaaaccatcccacccttattgcaaagctgccccctgctggtttctcctctgaccaaagccatgggattaacctacttgtgttggctgcaatggtgcgtccctggtcggcctaccttactgatggcaacatgcccaggccacaaactgcctgaccagagccctgaaccatgggcatctccctgtgtaccgcctgaaccatgagggctcaggccccacccaactgtttctgggcttagtgccaagatggggaaggggtgggtctgtacatctctgctgcttctacacaaacagatgcaacatgggggcgcccctggcacagggaaaggcacttgtgggaatagacagggactcaggaaaacatgtaacacactgcacacgtgtagcatccccgtgcctaaggacgtgcaacattgcagtttacagtatgcatcaaacatgtcacattgcagtatacatatgtggctgctacatgagttacccacagtcctcagcacacatgtggcacctgtaagcttgcatacatataacatccctgcgcacaggaacaagcaacatgcattcaggacttgggcacatgttaatacaccgtgcatgtgtgtggcacttgcatgcacctacccaggcaacatggcagtgcacacttagggcacctgtatgcatatgcaaagttcagcgcacatgactggcacctgcatgcacagggacatgcaatatgcaatgcacatgggaaggtgagcaaatgcttcagcctgcagggcccgggacaccctggcggcgcgacaagcctccggcatgggtatagctggaggggcgtcgcggatcgcctcattctgcggtccaagaagcagcgggctgggcgggggcttacccagggcttctcccgcgccggcgcctggggcccaaggcggggaggtggggggcacgatcggctcggctggcgctgttccccctttaacaggaggcggcgcgcgtcgcccccgccccttctcccgcggctcctcgcgcccggcccggcgcgcgccccctcccgggcccggcccgcgcaggcgccgcgtcccgcctcggccgtcactcggcccggcgcgcgctgcgggcagcggccggagcggccggaggaaccgggttcggcggcagcggcggcggcgctcagagaccgaagaggatgcggcaccggctctcagagcccggggctgcggccgccgcccgcaaataggaggcggcgcgcggcgcgggcggtgctcggggcgggggagcgggggagcggggggcggcgcggcaaggaggcggcggcggcggcggcggcaggagcccgcgcccggcccggcgccgcccgcccgcccgccccgcgctgctccgcggcgccttttctgcacccgccgcccgggagagcgggagcctcggccctccgcgcggctgcagctacctaccctgcgcccggcccggtccccgacttagggatggcaaacttgcgccccgtggccgcccccgccagcgccggcccccgctcctgctgctgacggcgcccaggtgagtgctcggccccagaccccgacctggcctcgcaccgagccctgc

SEQ ID NO: 985 - DNA, 2300 bp, Homo sapien
catagtcatccccaacctggcattctgcccagatctctgctgggaagcagcaggctgcgctgttccaggcagtgactttttcagatggaaggaacgaagacccactgtattcagtggattggtttagggatgctccaggcagggaaccacccggcaccctggcagtccatccagagggcctcctggaacttgtcctcagacctgggaagccaacgggagtgacaatagtctagggctcttggcgctgaggatctgctccatcctcatgtccatcctgctccttcctctcccttggccctggcttgcacatagcctgacatggtggctcagcagccccagaatccatgaagccatcatctcagactcctgcagttgattagaactttcccttggcttccttcggtcactctcagaaggccactctggctgtagttgaatgttctgtgggtcagatgttcacctgggtctcatcagctgcctgttcaggagaggggtgcagggcaggtccctttaactatattcagtcagtcagtatatttatggggcacctaccaggtgccaggcacggttctaggcactggggaagtgacagtgaacgacagaaatccctgctccccactcctaccactaatattcaggccaacgactgggagaacctctacctgtgccaagaggatccctaaggggtgtggctgctcctcagtctaaatcagtttgtattccctgaacaaactgaatggcaatgtaggagaaagacctagatagccccagagaggaagagagagaggaggtgggaggggaggggaggggaggggaaaataacacatgatagctatctttactgtttattgaacacctactgtgtgcaccttttacaagcagtgtctcattcacatctcacaatggcctaggaggttggtgctattccctgcccatttctgggatgaggaacctggcaccaaggtcacatatgtgcagtggggaagctgagatttgaacccaggctggctgactccaaagcctgtgctttgagactgttctggaggtggctgataagagtagagtttcaaaatctctttaaaccttcctaaagcaatgattgttttatgtttaaagctatttctagtatgaggaaaaaaagtgatttggcaatagacgtcaagagtctttaaaatgttccttctccctgattctgtcatctgcttctgaaatcttgtcctaaggacataatttaaagtttaggaaactactttctgcacaaaaaatgtcctcagtgctatttagtaatagtgaaaacctggaaatgacccaaatgtatagcaacagaggtgagacgtccactccagtctcaccccatcacagcagtgtctacggggactatatgatgtgacaaatgcctctgctattattagtgaacaaaaagagaacaccaagttgaatatatgatcccagctgtttcaggaaaaggacccccaaaccctgtgtatagaaaaagattataaagggctgggcacggtggcccacacctttaatcccagcactttgggaggccgaggcgtgtggatcatgaggtcaagagatggagaccatcctggccaaccaacatagtaaaaccccgtctctactaaaaatacaaaaattagctgggcatagtggcacacgcctatagctactcaggaggctgaggcagaagaatcgcttgaaccggggaggtggaggttgcagtgagccgagatcgagccactgcactccagcccaggcaacagagcaagactctgtctcaaaaaacaaacaaacaaacaaaaaaaaaaaaaagaaaagaaaaaaaaagaaaaagattgtaaaggaatacccaggatatcaacagtggtctctgagtggtgtgacaagaagtgattttctttttaattttcaagttttggtgttttccaaattttctttatgagttcacagtattttggtaataaaacaacatttattattgagaaaaataaaccacatcctggggccccctacccatggaggcctccgggcacccccagccacgttttcagcctgcccctctgtcttctgcctcccagggaccgcagatgttcatggactgcagcccacaggccctgcccatcgcatcagaggacaccacggggcagcatgaccaccacttcttagaccccaactgccacatctgcaagggtgggaggggacacgggaggggtgcaggggtggcagccaggctggggctgagcgtgcagttcagcagcaacagggatttgtggcctggggagagggtggcagagcag

SEQ ID NO: 986 - DNA, 2300 bp, Homo sapien
ggatgcggatggagacaggcccctctcctgggacagaggctagccaggtagcaaactttcactgaacactatgtgccaggccttttccaagcattgcaaatacagcggggaccaggacaggcatgttctctatcctcacggagcttacactccagtgggagagagatgttcaacaattacagatgaggcgagcactctgaaggcggggacagcggctggccccgcttgcttctgaagtgcgatctcccccgcagctgggttccgggccagtgatccagctcctgggggccatcagccacggccaggcaggggggcagctgccaccaaagctggaggttctagaggacttgatggaggtcagctcaccctcacctgcccagaggctcagaaggaagaaaaggcccatggtgcagggccctgctgggtgccaggtacagaacaagtgatgtcatttaatcctgctgagagaggcaccttcacacctgattcacagagatgtcactgaggctcagagagagggtgccacttgctcgcggtcattcagaatagccagaggcagggttcggccccagcctgcatggctggcctgggctccatgtgtactactttctgcagctctgaattcagggtggactggaggagggaggggctgggcctccagtacatctggggagggaacagtccctggcctccatttccggccaatagcttgtctgctccctgccccaaggttttccagccttctccttcaggaggcacagcaggggaccctggtggcctctctgaccccttctaccctccaagaagcggttccctggcccttggcgaccccagctcggaccctgcatgttcccaggcaagttgttctgccccggccatgtgcctccttcactggagcatgggtcagggaggacgtgggagtggggaggtgactagaggaagcagtgtcccctgggctggaagccaggcccaccagcacagcctcaattcctcacgcctcccctacagagtggcccaatggaggctgaagaggattctcttccggagcagccagaggactcaggtgaagggccctggagggagcctcttctgcttccagagactgctggggtctggggaggactcaggcccagctcctgggcccagcccctgctatgattcttctctccccacatcccatcagcctatagctcctccccaaaggggtgggggaaggggtgggggccactggctgcctgggcttggctcccagatggatagagggaggggtctaggtctttgagggtgggacccctctcctgtctgcctaaacccatcagccttgagtcagccccctcccctttcccctgggcacccctgggagcctgtgacgctctctccctacagctcagctccaacaggagaagccatccctgtatattggggtgcggggcactgttgtccgttccatgcaggaggtactatggactcggtgaggccttgctccccactcccctgacatcccaagggccgccctcacatgcccccgcctccggggccctgccatgttctaagggcttctgggtgtctggctaaccccatttggtagctgtgccaggtcccttgcccataccaagagccagtggagagctgaaatttgaagctgggtctctctggctttaaggctgtgcttccccacttagctgctgcagctctcagcctcggctcaggtccatccacatcaatgtcacccgcagcaaatgctttcacgtagagtgtgtgctgggagcggctcagagatctgagcccagagctgtcatttgctgatggggagaccaaggctcagagagggttggactttgcaaaggccacacagcaagtcaatgacagatgacaccgagggccagggctccattctctccccctgactcctgccttactctgacctgaccccggcttcctcccctccacacatcccgtgagccagagacggggcacaggctggtgagtcagacagtcgagtttcaaatcttgcttttgccactaattacacagttgtgagtaagcctcttattttccctgagccccagtaaccccatccataaaaggagaatgatcctatttcctcctcacggagttggggtgagaataagtaggttcctgcagggaaacacccacgacaggaacaagttggcccagaccctgccgcccacccagctgcctccctctgggactaagtgcctggagagcctcctgggctcagtgcccccgccctgccctggcctccacagccttcgggagctcccagacccagtgctgag

SEQ ID NO: 987 - DNA, 2300 bp, Homo sapien
aggcagccaaggcccctcgctgccccatgcacccacctacctctgcttgggagccaggattggcacctcctccaggaagccctcaggaggaagagggcgccctctgccggggcaggaacgccagcacgcctggggagcagccttttgctcatcatcagggactccgcccctatccctcagcaagggcctccctcccccgcatcacgtgatctcagctccttttcagctagtgggtggaaccccaggagggaaaactcagggaagcccaggtgagagcgacgcgaccgatggggcccggatttcttggatgctgggggactgtcccagtaaggcttgggaacctgggtggggcgcctttcagaacgggaccgatgggagagagacgagaagggttatgggcacgaaccccgttcagtatctgctccttgcgcagtgtgagaactgggagagagactcctggcccttccacttcctgtgcttccttgggtgagtgtcttaacatctcagaatctcagtgtcctcacctgtggctgccagtatgaaatgaaataagcacataagtcataaataaatggtatcttattaggtcccatttaagcgaatgtgtgaactctcagagacaagaagaccctggaggccactgtagctcggccctgtttggaggcaggcctctccaccctcacccaggacaccagctcctgctgggtgctcccctccctggagtgctcacccctaggcctcaggagtggaagggtctgggagagctggctggaagaggggctcctcccagttcccactgaacgggctgacaggtcggactctccaagacaaagtctcctctttctgtctccacacagggcccgtgttgtgcttttggcccaggtaggtggacagacatgtcccaggcgggggacgtagaaggccccagcacaggagaccctgtgctcagtccccaacacaactgtgagcttttacagaacatggaaggagccagctccatgccaggcctgtcaccagatgggccgggagcaagctctgggcccggagtcagggctggcagcagaaggaagatccccaggaaggaggcccttcgaggtggcagctcccgggctgcaggtgctgctgaggtccggccaggggtcttggagctgctagctgtggtacagagccggggctcgatgctggctcctgggctccacatgcagctgccctcggtgcctactcaggggagagctctgacctccaagaggctccaggtttctctgtgtgacatcttagatgacagttgccccaggaaactttgtagcaggtctgctggcctcccagagagagctctggcctgcagggagaggcttgcaggagtggaggaggtgagctgcctcaggcccagggaggccagagacggtggaatgagttctccagggtgtgacagaagaagccccacactcagcaaagaggagccccctggaaggcccctgacatcctcaccagacccagtccctgtgagggtaagaaagaaatggaggaggcaaggggctcattcagagtgtgaggaaggggctggtgacttcctgtggcttgatcagagccctcgtggggacaacctcctgtctgtgggagaccctccccaagttgctgacctggagtccttgggaggcccttgcagacctccctctccaaaagacactgggtctgggcctggagagccaggtggaagtggggcaggatgtgcctcagggactgagaaatttggatatttgcccgctacaggggatgggccccagccaggcagcccctgtggccctgtcgggttcccagtgcccagtggaggggagtccctcagttcagctgcacaggctcctccacagagcgcagcactgtgcctgggggcgtcagcacaggcctctgcagagcagcaagaagctgtgtgtgtcgtgcggactggcagcgatgaaggccaggctccagcacaggaccaggaggagctggaggccaaggctcagccagcttccaggggaaggctggagcaaggactcgctgcccccgctgacacctgtgccagctcccgggagcccttgggcggcctcagctcctccctggatactgaagccagcagggcctgctcaggcccattcatggagcagagaagatccaagggcactaagaacctgaagaaaggtccagtgccctgtgcccaagaccggggcacagacagaagctcagacaactcccaccaggacaggccagaggaacccagcccaggaggctgccccagactggtgagctgagtctgagagttt

SEQ ID NO: 988 - DNA, 2300 bp, Homo sapien
ggcacaggtttagtgccagggaattccatctccctcgcaatcagacttatcaaatctctggttctggccgggtgcagtggctcacgcctgaaatcccaggccaagatgggaggatcgcttgagctcaggagttcgagaccagtctgggccacatagtgagacctcgtctccaccaaaaataaaaaaaaaattagctgggcatggcggtgcatgcctgtagtaccagcgactcaggaggctgagaggggaatatcacttgagcctgggaggtcaaagctgcagtgagctatgattacactaccacaactcagcctgagcgacagagccagaccctatctcaaaaaaaaaaaaaaaaaaaaaaaaagccaaacaccactgtttctgcagtaaaagtatttacataatcataacattataaatgtcatttggctttcagtgttaagaatcaatctacaggtaaacaacggtaaactgaattatctttaccgaatagaatgtaaatgctataaacctcagcgatacaaaaataaaagcttagttcatggataacggcagaagcagggaggggacatcaagggaaattatccatttcacacagagaagagtcaagagatacaatatacagaagaaacagacatttaagaatagtattcaaagtgataatagaaaccaatagtaaaatttaaaatataaatataaaaaagagggccaggcacggtggctaacgcctgtaatcccagcaatttgggaggctgaggtgggtggaacacgaggtcaggagtttgagaccagcttggccagcatggtgaaaccctgtctccacgaaaaatacaaaaattagcagggcatggtggcacgtgcctgtagtcccagctactcgggagggtgaggtaggagaatcacttgaccctgggaggcagaggttgtagtgagctgagactgtgccactgcactccagcgtgggcgacagagcgagacgctgtttcaaaaaaaaaaaaaaaatatatatatatatatatatatgaaaagcggaagagaaagggggaaagggtggttaataaaatcaccacagcaggaagtcaacagatacaacagacacagttaaaattaataaatcaagtaatagaggcatgagtatattatttacagttatgaaatttaaaaaattaacatgatgacaaacatggtaaaaaacaaaaaacaaaacacagttgtttccaggagttggggtattgggaaatgagagatagctttaaactttttatttctaaccttctattggaattgattctgcatttccatctacattaattatatttgagattttctttttaaattaggcaagcactattcacaatagcaaagacatggaatcaacctaaatgcccatcaatggcagattggctaaagaaaatgtggtacatatacacaatggaatactatgcagccataaaaaagaatgagatcacgtcctttgcaggaacgtggatggagctggaggccattatccttagcaaactaatgcaggaacggaaaaaccaaatattgcatgttctcacttataagtgggagctaaatggtgagaacacatggacagaaagaggttaacaacagacactggggcctgcttgagggtggagggtaggaggcagtagaagataagaaaaaataaatattgggtactaggcttgataactgggtgacgaaataatctgtacaacaacccccgtgacacaagtttacctatattaaaaacctgcatatggacctctgaccctaaaataaaagtttaaaaataaaataaaataaaattaggcaaaaaatctaggtaattctgacattgtcctactggctcagggactattgcggtaggatcaagttaaactctcaggcaggcagccaaggcccctcgctgccccatgcacccacctacctctgcttgggagccaggattggcacctcctccaggaagccctcaggaggaagagggcgccctctgccggggcaggaacgccagcacgcctggggagcagccttttgctcatcatcagggactccgcccctatccctcagcaagggcctccctcccccgcatcacgtgatctcagctccttttcagctagtgggtggaaccccaggagggaaaactcagggaagcccaggtgagagcgacgcgaccgatggggcccggatttcttggatgctgggggactgtcccagtaaggcttgggaacctgggtggggcgcctttcagaacgggaccgatgggagagagacgagaagggttatgggcacgaacc

SEQ ID NO: 989 - DNA, 2300 bp, Homo sapien
acaccacttctaggacatcagcttctctgggttttcctcctacctcactggttatgctaagtctccttggtggttcctcctcttccctcgtctctgctcatgttggatgtcctgggtcttggcaagatccattgaagctcctctcttccctatgtgctctcatttcctggctggtctttaatacattttcttatatgcctatgattcctgaagttttattgtcagcctagaactctcttctcactccatactcaagtatccaaccacctagtggagctctctacttggatgtctaatagacgtctaagagctgggtgtgtggtacgcacctgtagtcctagctactggggacactgagcggggaggattgcttgagccaggagttggaggctgcagtgagctgtgatcacgccactgcaccccagcctgggcgacagagtgagactctttctcaaaaaataaaataagataaaataaaaatagacatctcaaactgaacatgttcaaaactgaattcctgatctttcccccacaaaggctgctctacctcagttgatgagtgtccttccaattgctcagaccaaaaacggatgactcccctctcttcctcacaccccatattccagttgggaaattctgttggttctaccatcaaaatacatccagaatctggccatttcttaccacctccgctgttactgcctttgtctgaaccactgcgatctctcgcatggattgctgcaatagccattgcatttcctgactgttcttcctgcgtccaccttgttcacttatcttctagtctcaacacagaatccagagggattcttttaatatgtgatcagatcatgtccctcctctgctcaaaacctttggtggctcccatatcattcagagtaaaagccaaagtcctttcattgccctccagggcttgccaccatctgattcctttccttttttttttttttttttttttttttagatggagtctctctctgtcacccaggctggagtgcaatggcgtgatctcggctcactgcaacctctgcctccccggttcaagtgattcttttgcttcaggctcctgagtagctgggattacaggtgcatgccaccacatccgactaatttttgtattttaagtagaaacaagggttcatcatgttggtcaggctggtctcgaactcctgaccttgtgatccacctacctcggcctcccaaagtgctgagattacaggtgtgagccaccgcacccgaccctgattccttttcttactcctttctcccctcctcagctgcagccatctggttttcttgttttttctccaacactccctgacaagctcttgccgcagggcctttgcactagctgtttgttccttctgctgggagagctttttccccagatatctgctttgactcactcactcacctcctttaagttcccactcaaatctcaccatctcaatgaagccaactctgacaactctaggaatctagcaagccctccctcccctctttctccgtctttctctgctttattttttcctttttccacagcacctatcatctccagaaatacatatatttgcttgcttattgcattcactgtttgtctccccctgcgagaggtcaagatctttgttttgttctctgatgtctaccaaatgcctagaataatgcttgcatttggtaggcactcaataaacactttcttatatgtgtaatccacgagataaatataatttttatcacttttacagcatctgaaggacgtagtctggggcctggccccagaagctgaggtacaaagaaggtaacaaacttaatcagatcacccagccaataagtagtggagctgagagttgaactaagaatccttgcacttagccgctacttcaaattgctttcttgaaacttacaaaatgggagcctcatgtaggctgcttcctggattccagtgactcacatgatctaattattctctttgctctgagaaggctgcactcctactcagactggggctaggtttcacatttctttgtctcctaagatatgtaaacatggtatttcattttacaacaaagacctttgaactggattggatctttcattctgtcacgttcttggggccccacaactccatggacagaaagtgagcaccacgaagacaggtcttgttggatattctctttgtccctttctgattccccagtgcccagagcaaggtgggtgctccacaagtatgtgttaaatgtcgtatgaatgacattggagatggtatccagttaaattttagc

SEQ ID NO: 990 - DNA, 2300 bp, Homo sapien
aataaataaatagctatgatcagataaaatgaaaggtttaacttacacttgaaaaaacaagggcatttagccttaagcttggaatttccttttcccagacagagattttaagagttaatctaattttgctaggtgaggagggttttggaacatttcatggtaagaggatatccccaaataaggcctgtcagtcctctgaatgctcttgcaaaccagacacacattggaatagactaatggtggttttagctgtatcaatttgaggttcagatgtttctaaatgattaatgatttttttaaaaatagacactacttatatgagtaagtgaagcatgttttatattgtttcttaactaggtgcattttagggagtattagaggaagtaagctcttgactaaggtactggttttattgctatttacagttaaactctctagtgacatttataataacacagtcctttaattatggggcgtagttgtcaactcaatcatgtactgttttggctaatgggctacatgaagtgttctagtggtgccaataatgaatgcagaatcaatttaatgctctgtcacttttctctttttcctcccctaatatcttaaagtgtccttatccaatctcattagaatagccttatgtttttaaaaaaattcctaacagtgtttttgcatttctatctttgaagcttagatggcaggagggaaggcttgtaaaatgtcagcccccagtccccctcctccactccccatttgtgttggtttcttaggacctcttgctaagtagtgaggaagataaacccctgcctatactgtgaatgctcgtgggattagtcttaattgaaagatagcccaaataggtgaatacagaaagagaaagggatacttgacaaaatggtctccatttgcccaggaccctgtcatgcagccctgtccttgttaaatggggacatatataatttagtaagcactttaaaaatactcactgcttgccttttaataagcacaaagatggtagtttgtttctgttatgatttactaactattggagatttcttatcagataacctttctctaaagatgtcataacttagttatcttgaattataatcttcaattatctgtagagaccaatgagacaccagttggtatgctttgccagagtggacttttaaatcatgttgacatgtgctgtgtcctctgttactttgtcttggctttaattacagttttgtctattatgtctaattactactctattcagatatcatttttgggagaacactagctcttatgactctgatagagatttctgtaagtttttgtaaattcagatgtgtgcgacactgcattgagaagggtaatttatttggcaaactttaatttcaatcctggatcattttacagcaatgatcagaattgtgttaacaataggtatatatagtgcagttagttcagttaggcctgccgtgtgtactgtgtgcaggtattctgtattaggatgttaatcatggagaaaatatcaatttaatgtaaaaggtcatttcttttcaggattggccatttgatgatggagctccaccccctaatcagatagtagatgattggttaaacctgttaaaaaccaaatttcgtgaagagccaggttgctgtgttgcagtgcattgtgttgcaggattgggaaggtaaactcttacctttattaccctttttgtctgaattcattaccatgcctaagttagttgaaagtttcactttggtagacatttgcatatattatactaaataacattaaattacctgaaaggaaaggaaatgagaggaaaaactagtgtaatgatttctcaaaagagcctgttcatttcatctggttgtctgattctgatgccagcctggattgtgggtgttttatttttctccctatttcaagtaatcaaaagttcaggtcactgaaattggcaacaaaattaaaataattttagagtttgatgaatctatacatggttaattttggactgagatgaatgggaagttaatagatagcagatatctgaactttaaactcttgaaagaagatgtatggacaagaattgactttgatcttaaaaccttttcccctgagcattgcttagaatggtgttgcaacgctgtcatcagcagcagattaaatgccaatttaggatgcacactttgactcaaaacattagtgtaggctgccattgcctcaaggtggtgattactcaagctgttagttctgctctgcccttttgtttgctatttccttttttgtagtgtggtac

SEQ ID NO: 991 - DNA, 2300 bp, Homo sapien
tagggattaatgtttggggagaagtgtgtgtgaatcagtgaccttcaaataattttgtattcttgaggcaattattatgtgacaaataataaaaaggtaaactgaaatagaaaggagaggatgaggtttatacattagttgagtcaggaggcatttgtggtacattggaaaaaacgggactaacagaagacttgggtttgaatttgggctcagttaaaaacttccattgtgtgatgttaggcaagtcacttcatttttctgatcttctttcctcattccttatatgttgtaacaactactcaagacttgtgaggaaaaggggaaatgatttttaaaaaatcaattctttatttacgtaacaagttggttatgtccactgcattgtgtgaaacattacagtatcatataggaaagtactgtcagtacagtgttggatcacaggattttttgagagtgccttatgagttagtctcatcattgagggccaacacatatactttggatagaaagaataaaatcctcaaagtgaaattttgattaatatcctctacccatttataggtacaccttattttaaccaaagagtatatgtgaaggacctaaccatcaaagcagaaaaataaggagatctttgtgaagtttatgaagagttcatgggccaggcgcagtagttcacgcctgtaatcccagcactttgggaggcctaggcaagcgaatcacctgaggtcaggagttcgagatgagcctggtcaacgtggtgaagccccgtctctaccaaaaatacaaaaattagccaggtgtggtggtgggcacctgtaatcccagctacttgggaggctgaggcaggaaaatagcttgaacctggggggcggaggttgcagtgagctgagatctcgccattgcacttcagcctgggtgacagagcaaggctccgtctcaaaaaaaaaaaaaaaaaaagttcatggaagttttaagtatctagtaatcatttaaaaattatttgagttaaaagtaatcgagtctctgattttttttgtttttttgttttttgagacagagttttgttctcattgtccagactggagtgcagtggcacaatctcagctcactgcaacctccacctcccaggttcaagcaattctcctgcctcagcctcccaagtagctgggattacaggcatgcgccaccatgcctggctaattttgtatttttagtagagacggggtttctccatgttggccaggctggtcttgaactcccgacctcaggtgatctgcccgcctcagcctcccaaagtgctaggattacaggcatcagccaccacacctggctcaagtctctgattttttttttttttttttttttttgaggcagagttttgctcttgttgcccaggctggagtgcaatggtgccatcttggctcatcacaacctctacctcccgggttcaagcgattctcctgcctcagcttcctgagtagctgggattacaggcatgcaccaccacacctggctaattgtgtatttttagtagcgacggggtttctccatgttgatcaggctggtctcaaactcccgacctcaggtgatctgcctgcctcagcctcccaaagtgctaggattacaggcatcagccaccacacccggctcgagtctctgatttttaaaactcttcataatacccctttatccaattcttcatagatggtaataacgtataattggtgacatttcacatcgctttgggcttataaagaatgtattttgacttcaggcatttgtgtttactgtgccatcagcctctagttcattttacttattcttttcttctccaggtttttcgttggaatatacgttgcacatttatggcgattctgagtgtgagggcagacttctgccaggctcagcacagcattttcgctgacaagtgagcttggaggttctatgtgccataattaacattgccttgaagactcctggacaccgagactggcctcagaaatagttggctttttttttttttaattgcaagcatatttcttttaatgactccagtaaaattaagcatcaagtaaacaagtggaaagtgacctacacttttaacttgtctcactagtgcctaaatgtagtaaaggctgcttaagttttgtatgtagttggattttttggagtccgaaggtatccatctgcagaaattgaggcccaaattgaatttggattcaagtggattctaaatactttgcttatcttgaagagagaagcttcataaggaataaacaagttgaatagagaaaacactg

SEQ ID NO: 992 - DNA, 2300 bp, Homo sapien
attttatttcagggccagaaggagagctaggtggagggaagggtcattcacttggtcagacaatctactagatgaaaacaaacaagcaaacaatctgctagactgccccaaatagatccatttaagcaggggagaatctgaaaacaggcaattacaattccatgttaagtactatggtagagtattgcacaaggtgttttgcaactttatcggaagaatcaataactcacagacgcagcaaaagttttgcagaggtggtagctctttctttcaaatcagtctatgtttccaggaagtagaaaatactgcttgctggaggcagacagaatgcaagtgagcccagtctgtgctcctcacctaagggccttgctactgatctgcagcccctcctgctcctcaaggcctctctcaactcccacacagccctgctagccagccttgccctagaataccccctcctgggccacctggtggtgaacatcctggactctgtgctgtggcttgatgcggctgagtcataagacctttctttttactgctaagcgctaatggaagccttctggtcagaagcaatgccccaagtctaccttgtggggaaggtctaatgacgacagatcactgcttctccccgcagggctggatgagcatggatgtggtggcgaggtgggggagaagcacccacgggagcatcttcatttcttcctatataggcgccagttctgggcaggcaagacttcccaggggtggacagaaagaacagaccctccccaacccgcaattcccagggggagacatctccctcccaagccagcctccaatgccgcactttgccatctggtcgtggcccaaaccagcctcctagctcgctagtgaccacattttccaaaccaaaactcaggacgcatgatctggcaaagaatttctggctagcttccaaatgcaagaggcaaaaacctttccacctgagaatctctacgataatctgcgtcgttaaaggtgacattaagtcggaaagcttgaaattcagggtctcttctttctcactttctcaactcaagcgttttctttttctttcttttttttttttgagacggagtctcactctgtcgcccaggttggagtgcagtggcacgatctcggctcactgcaaactccgcctcccgggttcaagtgagtctcctgcctcaacctcccgagtagctgggattacggccctccttccgggcgggcgccaccatgcccagctaatttttgtatttttagcagacacagggtttcactatgttggccaggctggtctcgaactcctgaccttgtgatctgccctcctcggcctcccaaagtactgggattacaggtatgagccaccgcgcctggcccttctcaagcgttttcatacgttgttatcgatacgtgaaagagcccatgaggtagctgattattatttccatttaatagttgataatacttggaatcacttgcccaagatcctacatcctgaaagtctgaattttggcttgtcagggacagttcttagggtgggtgtgtgtcttgtgggcagagctgggggtggcgtattaatatcttcgacgaagatgcacacgccattcatttggggcctcaggaagggcagccgagaactgagctggccaggttcccacttctgagttggaaatccccaagcccaggacgtggcggccaccccgtcccatcaggatctgacccgaggccttagggccaagtagcgagaaagaacccttcgaccttgcaggtcacacctcggctgcaggccctcgacccagcccaggtgcggatgggcggggcgcagcgtgggcgagcgactccccaggccacgttctgccttccctccccgatcacatggactcgccttccgtagccgggagtgcggagcggaacgaaccacgaggaggaggagcgggggaggcgcccagggcagtgggtcagcgccccgcggggcaggtgggcgggcccaactgcccgcgagccggccagccagccagtcagcgaacgcggagggcgggccggtggccctgcgcgccgcgccccgcagcgccccctgaggggcggcggcgggagctggttccggctgcgcgcgcagcggtggtggtggcggcgcgatcggccgggctgtaaccgtcgtctgtccgggagcggctggagcggcagcggcggccgggcacggcgcgaggtgacgccacagggcagcggcggcagcggaggcagcggcggcagcaggagacgcagcggcggccgcagcagcagcagcaagacggactcgt

SEQ ID NO: 993 - DNA, 2300 bp, Homo sapien
tgcaatctcagctcactgcaacctccgcctcctgggttcaagcgattcttctgcctcagcctcctgagtagctgggactacaggcacaccaccacacccagctaatttttgtatttttagtagagacggggtttcacaatgttggccaggatggtctcgatctcttgaccttgtgatctgcccgcctcggtttcccaaagtgctgggattacaagcatgagccatcgcatctggcctatattttatattatatatatataatttatgtagatacgtgttttgttttcatttctgtgggtaatttggaaatcctctcccttaaccccttaaagaaggcctttaggttctctagttaaagggttctaagcttcacatccaaaaatcaagtttccaggcactcagaagacaatttccaaataaacctttttttcctttttttttttttttgagacgtagtctcgctctgttgcccaggctggagtgcagtggcgtgatctcggctcacggcagcctccgcgtccctggttcaagcaattctcctgcctcagcctcccaagtagctgggattacaggtatgcaccaccacacccggctaatttttatatttttagtaaagatggggtttcatcatgttggccaagttggtctcgaactcctggcctcaggtgatttgcccacctcggcctcccaaagtgttgggatcacaggcatgagccaccaagccgggcggaaactttttttattgtagagatgaggtctcattatattgtccaggctgctctcgaactcctagcctcaagtaatcctcccacctaggcctcccaaagtgctgggattacaggcataagccaccgcaccggtccccaaagacttttgaaaagtgtgggctcattaggagaactaatccagaaggaaaagagatgggagtgagtgctttaaatggaagaagaaaataatctgcggagggaagggaaagttagagagggcaccaggcttttgatggcttatgggacaagtagggacctaaggctccacttgcatatagcacaccaggatgtggagaacgtcgtaggcgactgtccactatgtaccttgcctttgagagtagtggcaagggtctctttgagcaagtctggagtggtagaagaagccatcctaatgatgcaaccaacgtggattaaggatctggtctctacctcactttttgaaggaagaaacacttaattggcaataatgacggcgaaacaaaacaaacacaattcagaaaaagcagtaaaatatgtaaaaagagctaaaatgctgcttaagatttcccgtaccaacaatgtcaaccgttttagaaccgactggaatatatgtaatactggaaatatatatactggaaacaacttcttgtgttccctgatgtctgggacccttttctttgctagacttcagatctctgatctgaaccatccctcttagttcaagtactccaatcgccttcagtgtttccaccaagccgtccttcctcaatttctccctccaggtttcccttccccaactttccccctgcatcagactctccctcagccttcctttctccctgtgcagtctgtctcactcctgtcttcctccccaggcggtctcaattctctctccctcccctttccgtgaccctctcggcagtcttttacttccttacttcggtgaccgccccccaccccactccccacagcctccctccactgctcagccgttggagagggcgtggccccgcgagtaacaggtctcccgccccacactccgcgggcccgcgcgcagacaaagacattccacagctcccgccccctccacgccagaaaggggaggagacacgtgttccgctagcgccgagtcacgtggaaaacgaaacgaacggagcccactgcctcccgcgcatgcgcatcaagctctggcctggcgggagcggagggaaagccagagtcgggaggcgacttctcggacgccgcggcggtgcgcaggcgccgtggccggactggggactttgttctccgcggagaaacccaagggcggtgccggtggctggctgcgcacgcgcgccgcctcatttccggtgctctctctcgctgggtcgctcgggtcggcttcggtcgctaccgctcccgctctgccacccccgccaaccgccgctcgggcctccgtcgctgccgcgtcgctttctcgctccttggatcgcacatcctcccagatgcagcgccgggacgaccccgccgcgcgcatgagccggtcttcgggccgtagcggctccatggacccct

SEQ ID NO: 994 - DNA, 2300 bp, Homo sapien
gtgaaaccccatctgtactaaaagtacaaaaaaattagccggacgtggtggcgggcacctgtagtcccagctactcaggaggctgaggcaggagaatggcgtgaatccgggagatggagcttgcagtgagccgagatcgcaccactgcactccaggctgggcgacagagtgagactcagtctcaaaaaaaaaaaaaaaaactgtcataatttaaaaatatacatctgttgaattggactccatattttcattagtgcaggctacataccttggagtcatccttatctcttctcttcctcacacactcctatccattttgtcaacaagtcctgttttgtttttgttttaatttttttttagatggggtctttctacatttcccaggctggagtgcagtggcactatcacgtctcactgcagcctcaatttcccagggctcaagtgatcctcgtacctcagcctcccaagtagctgggactacaggcacatgccaccacaccttgctcattttaaatttttttttttgtagagacagggtctcactttgttgcccaggctggtctcaaactcctgggctcaagcaatctttccacctcagcctcccaaagtgctgggattacaggcatcagccaccatagtcagcccaacagatcctgtagactttaccttcaaatccagaattcaaccatgtctcaccatctcacccaacctggtgcaaacgatcaacatctcttgctaagatcattgccacagcctcctgcctggtctccctgcttccaccttggtgcccctgcagtctattctcaccatacagctggaatagttcttttaaatagaagttcaaaccctataatagctctgcatctcattcaaagtaaaagccacacagccctacatgatctatcccttctcatgtcctactcttatatctatacctgtgtcacacttgcctccttatttctcaaacacaccctcttggctgggcgtggtgtctcacgcctgtaatcccagcactttgggagaccgagactggcaggtcacttgaggtcaggagttcaagatcagcttggccaacaaggtaaaaccccgtctctactaaaaagtacaaaaattagccggtggtggtggcacgtgcctgtaatcccagcactttgggaggccaaggcaggcggatcatgaggtcaggagattgagaccattctggctaacatggtgaaaccccatctctactaaaaatacaaaaaattagcaaagtgtggtggcacacacctgtagtcccagctacttgggaggctgacgcaggagaatcacttgaaaccgggaggtggaggttgcagtgacccgagatcacaccactgcactccagcctggggacagagtgagactccgtctcaaaaaaacaaacaaacaaaaaaacaaaaattagaccaggcgtggtggtgcacacctgtaatcccagcattttgggaggtcgaggtgggtggatgatttgaggtcaggagtttgagaccagcctggccaacatggtgaaaccccgcctctcctaaaaatggaaaaattagccgggcatgctggcgggtgcctgtaatcccagctacttgggaggctgagacaggagaatcgcttgaacccgggaagcggaggttgcagtgagccgagatcgtaccactgcactccagcctgggcaacagaaagggagactccagtctcaaaaaaacaaaacaaaacaaaaacaaaaattagccgggcatggtggtgcacgcctgtaatttcagcttgttgggaggctgaggcaggagaatcgcttgcacccagcaggtggaggttgcagtgagccgagatcgagccactgctctccagcctgggcaacagagactccatcccctcaaaaaacaaaataataaaataaatacaccctcctgcctgagggaccttgcactaactattccctctgcctgaaatgccccctttctccagaaatctgcaccactgactcactcatttccttcatgtgtttactcaagtcaactctgaagcctgctctgcctgccctatttaaaactgcaaccccatccccctttcctgtttttccttcacaccattcccatctaacatactacagaatttaccaattttgttcatgtctatctcctcccacttgactgtaagctctatgactattaatgaaatatctactaattcattcaattaattgaatactgctattaagtgccaagcactgtgctaagcaatggagctacaagatgactaaaactgcttgtaggtcttgtgagggaaga

SEQ ID NO: 995 - DNA, 2300 bp, Homo sapien
aaagtaaaagccacacagccctacatgatctatcccttctcatgtcctactcttatatctatacctgtgtcacacttgcctccttatttctcaaacacaccctcttggctgggcgtggtgtctcacgcctgtaatcccagcactttgggagaccgagactggcaggtcacttgaggtcaggagttcaagatcagcttggccaacaaggtaaaaccccgtctctactaaaaagtacaaaaattagccggtggtggtggcacgtgcctgtaatcccagcactttgggaggccaaggcaggcggatcatgaggtcaggagattgagaccattctggctaacatggtgaaaccccatctctactaaaaatacaaaaaattagcaaagtgtggtggcacacacctgtagtcccagctacttgggaggctgacgcaggagaatcacttgaaaccgggaggtggaggttgcagtgacccgagatcacaccactgcactccagcctggggacagagtgagactccgtctcaaaaaaacaaacaaacaaaaaaacaaaaattagaccaggcgtggtggtgcacacctgtaatcccagcattttgggaggtcgaggtgggtggatgatttgaggtcaggagtttgagaccagcctggccaacatggtgaaaccccgcctctcctaaaaatggaaaaattagccgggcatgctggcgggtgcctgtaatcccagctacttgggaggctgagacaggagaatcgcttgaacccgggaagcggaggttgcagtgagccgagatcgtaccactgcactccagcctgggcaacagaaagggagactccagtctcaaaaaaacaaaacaaaacaaaaacaaaaattagccgggcatggtggtgcacgcctgtaatttcagcttgttgggaggctgaggcaggagaatcgcttgcacccagcaggtggaggttgcagtgagccgagatcgagccactgctctccagcctgggcaacagagactccatcccctcaaaaaacaaaataataaaataaatacaccctcctgcctgagggaccttgcactaactattccctctgcctgaaatgccccctttctccagaaatctgcaccactgactcactcatttccttcatgtgtttactcaagtcaactctgaagcctgctctgcctgccctatttaaaactgcaaccccatccccctttcctgtttttccttcacaccattcccatctaacatactacagaatttaccaattttgttcatgtctatctcctcccacttgactgtaagctctatgactattaatgaaatatctactaattcattcaattaattgaatactgctattaagtgccaagcactgtgctaagcaatggagctacaagatgactaaaactgcttgtaggtcttgtgagggaagaatcctaatgacaataaatgtagctcatttagtcaatgcttctccaaacatcgtgatggctaatactaaaacagactcagttctgcatgctctatttcatttaaccctcaccgaaacctacacggtgaccatcagcagcctcatcgtaaagcataaaaaaacaagattgcaaggctgggaaatggcagtcaggatctgaaccacggtgttgacaatgagaacggtgagtaacgtcaaatgtgagaaatatttaggacttaggctcacaaagactaaggcaaagatcggatgtgggggccgagggagggaggaaatgactcctggattttgactggggtggactaaagcgcagtgaggcctaagagaaggatgaagcgcaacgtggggctgggctggaggtgcctgcggaccggtcagggatatggtccacccctaggggagcggagaggcggctccgcaccctcctccggtcgccgccgccccggtccaggagatgctgagagaagacacgcacgggaagagcaggaggtgggttccgttcccctccctcttgagtctcttcaccagcagctgcaggaagggcgtgggggaccgagagacaaagagcgcgcaggcaccgcctccgtccgggcggcccctttaagaagcgcgcgccagcttccagcccgccttgtatgcaaatgtagcggcgcggcgggagcgcgcggctgatacccgggactgggctgcggcggttagtcctctcccggccgccgtcgcctccgacatattgcccgcaggagctgcggcggcgaagcggagagcaccggggggaggagatgggtgagcagagcggctcaggctcggcctggcaacgagcgggcgcacgggtt

SEQ ID NO: 996 - DNA, 2300 bp, Homo sapien
ggaagggaaataaagtgcgccccttcctgaccttcatcctagagttttccttttgatttctttgcctcaagaaaatgggccaggcgcacaactaaagttggcagtttgttgtgacaggcccttgttctgcttccagaagatagatccctctgtgtcttgaagatatagcctggctctgtgtgtcgaggtgggggacaggagggctgccatgtcatggaaaaagaaaggcctgatatgtactagccatacgtcccgtgattgaaaaggcatatgaacaataaaagcctcaatttcctcatctctaaaaggggagatcatgtcccttgctctgtgtaactcaattttttgttcattcctttgtttattcattcaatagttatttatggagcacacacaatgtgccagattctgtgctaggtgctggagatacggtggtaaacaatatagaacccacccctgccttcaaggagcttgctgtgaggataaatgaaatgattatgaaatcactctgttaactatactgcatgggtctcattgtttttcttttttttttttagagacgggggatcttgctatgttgcccaggctggtctcgaactcttgggctcaagcaatctgccgcctcagcctcctaaaatgctgggattacaggaatgagccaccatgtccagcccatttctttctctctctctctctctcttttttttttttttagagacagggtctcactctatcacccaacctggagtatagtgacacagtcatggcactgcagccttgacctcccggactcaagtgatcctctcgcctcagccgcccaagtacaagtgctcattaccatgcctggctaatttttttcttttaatttattttttgtggagatggggtctcactgtgttgcccagtctggtcttgagctcctggcctcaagtgattctctggcctcagcttcccaaagtgttaggattatagacaagcgtgaaccaccacacccagccctatttttctatttctcatctcccaataagattgcaacctcaactagggctacctacgtaggcctaatcagaaaacctgagtttagtcttacttctttgtttccttctctccatagcctcattgagcaaggcacttcccctctctagatgattcgttgttcatattcagcccaaggtctatgattgctgtttttgtttttagagacggagttttgctcttgtctcccaggctggaatgcagtggcacaatctcggctcactgcaacctctgcctcccgggttaaagcaattctcctgcctcagcctcccaagtagattacaggcatgcgccaccacacccagctaatttttgtatttttagtagagaccatgggcaggctggtctcgaactcctgatctcaggtgatccgcccgcctcggcctacccaaagtgctgggattacaggcgtgagccacagcgcccagccgattggtttcaactattagaagaagggataaactggcccggagcggtggctcaagcctgtaatcccagcactttgggggcgggcggatcacctgaggtaaggagttcaagaccagcctagccaacatggttgaaacaccgtctctagtaaaaatacaaaaattagccaggcgtggtggcaggcgcctgtaatcccagctactcggggggccgaggcaggagaatcgcttgaactcgggaggcagagtgtgcagtgagccgagatcgcgccatcgcactccagcctggggggacaagagcgagactgcgtctcaaaaaaaaaaaaaaaaaaaaaaaaaaaaaaaggagggataagcttctgggagaaaaagttccgggtaaagaaatctcactataaaaaagaaatagtagcagaaacagctgggaactcctagacacacttaactttcttaggtatcccttccagtctcctcccaaccactcctttcctatttcatttccactccccacctttagtagctgcggtctctttaagtgcgcactttcggtgtaatgataggcgattgggccaataaagcgtttcgtcctggagttaactggtttgtccctttcgggctgccgtcctacagatccgccatattgtctactgaaagctgccgctgaagctgccgccgttgcctccgccgccaagagtgagcgagcggacccgcgatgggtgagtgaggaaaccacgcagtagggttcttgggctcagggagtgtcggggcctgggatttggcgagagcctgtctccggtctgcggaagatgtctgcatcccctctagctaggtctgagg

SEQ ID NO: 997 - DNA, 2300 bp, Homo sapien
agcctgggcagcaaagtgagatctgtctctacaaaaaaatttaaaagttagctggctgtggtggcacatacctgtaatcctagctacttgggaggctggggcaaggggatcacttgagtccaggtggtcgagtctgcagtgagctattatgatcactgcactccagccccagcagctgagtaaaacctgtctaaaaaacaaaaatacaatctggccctacccggcctgagtttctgcttgctaacaatgtgcaagagctgctgtattttactgcaatcaccacctctccctcactctggcaggtgctaatattgttgctatatattgtttatagcaaaggagaaagtaacttgttaacctatgtttctgtcaattattcttgcctgttctcattacccaactggcccctctaggctattgttgacccttctactacatcctctatccctcaccccatgcatacatttttatgttctttatctcacctagaacacccttgttatatggaaatctatcaaggcctgatttatatggtgccttctcaagagatttccagaatgcttttctagaaataatcagggccttggtttcaggacatctagattccaacctttctgagcctcagttccatcattatactaaaaattgaatatctcttatccaacatgcttgggaccagaagtgtttccaatttgggattttctcaaattttaccggttgagcttccccaatctgaaaatctgaaatccaacatgcacggctctgaagtctttcactgagcctttgggggaaatatttaacatcctaacagccctaaaccaacgctcaattagcacaacagtttacaatcttctctacccacagcctgatgcgaggctctgggactagactatttagccaacagttcttgcaaaattaactgacttataagtaaatagtaatttcaacacctcactgctaatgctgtaacaactctgcagacctagggagcaagtacggtttgcagagcactgggaaggctctgaagtgacctttgaactgggcctcaaaaaattttgggtttggcaaaagtcaaatctcttaggcttcaaattccaggcacaaggattgttgggtttgatttcattatccagaagcaatggggatacagaattgtgatctcatgtgtagggaactgtgggggttttttctactttaaccccagtgagactttgtagagtgtggggtagagaaaaggctcatgaatatgcctgaagcctaactcagcacctttctgaggaactgactgccaaaatggtaatggagaggggaaaatatgacctactttcacaagttaccttgactgcctcagggaaacctgctgtggtagtgtttcttctgggtgaaagaccaggtaattacctgggtgctggtctcagacttaccagttttgaatccctgttttaaccactcactatcgatatgaccttggataagttacctaacctttctcttactgtccttttccgtaaaatggggataacagatagtagttatttctatgagtggttatgagaaccaagctattagatagcgggaaagcacacagtaagcgttcaaggaactgctattgttattaaaagcctcctttggaagaaggacattgaggcccagagagagaacagaacgtccagccacacagcaaatccgtgatgaagttgggactggagtatgggtctcctgagtctcagcccaggactctatccctcttcccgagtcctcggagttcccggatggagtcacatttgttcacggccagggaggaaggtttgatggaggcctgcaggaaacaacagccaggcgcaaggctttgggagttgaagcatagcttctgcgagatagaaacaaggttgacatgggcactcgtgcagaatgacgggctccttttggactcccaggactacagtcccttatgcaccttgggatctgcggctagcccctgcgtaaagagggacgcgtagtcttttccctgccccgccctgccggggcgcccgcctccgaggccgccctcgcttcgtccttcccagcaagctccgcgccggcgccggctattgattggctgaggcgggagcaggcggctggccggcagcagttactcggggtttccggtgcgaggccagaggtggggaagccatcggacgtcggcggtgaggtacgtgcagcggcggccggtgggcgagactatttgagagtgtgcgggccgggatgttctcggcctgtggggaaatcacgccaactccccgcgtgggccgggggctgtc

SEQ ID NO: 998 - DNA, 2300 bp, Homo sapien
catcattatactaaaaattgaatatctcttatccaacatgcttgggaccagaagtgtttccaatttgggattttctcaaattttaccggttgagcttccccaatctgaaaatctgaaatccaacatgcacggctctgaagtctttcactgagcctttgggggaaatatttaacatcctaacagccctaaaccaacgctcaattagcacaacagtttacaatcttctctacccacagcctgatgcgaggctctgggactagactatttagccaacagttcttgcaaaattaactgacttataagtaaatagtaatttcaacacctcactgctaatgctgtaacaactctgcagacctagggagcaagtacggtttgcagagcactgggaaggctctgaagtgacctttgaactgggcctcaaaaaattttgggtttggcaaaagtcaaatctcttaggcttcaaattccaggcacaaggattgttgggtttgatttcattatccagaagcaatggggatacagaattgtgatctcatgtgtagggaactgtgggggttttttctactttaaccccagtgagactttgtagagtgtggggtagagaaaaggctcatgaatatgcctgaagcctaactcagcacctttctgaggaactgactgccaaaatggtaatggagaggggaaaatatgacctactttcacaagttaccttgactgcctcagggaaacctgctgtggtagtgtttcttctgggtgaaagaccaggtaattacctgggtgctggtctcagacttaccagttttgaatccctgttttaaccactcactatcgatatgaccttggataagttacctaacctttctcttactgtccttttccgtaaaatggggataacagatagtagttatttctatgagtggttatgagaaccaagctattagatagcgggaaagcacacagtaagcgttcaaggaactgctattgttattaaaagcctcctttggaagaaggacattgaggcccagagagagaacagaacgtccagccacacagcaaatccgtgatgaagttgggactggagtatgggtctcctgagtctcagcccaggactctatccctcttcccgagtcctcggagttcccggatggagtcacatttgttcacggccagggaggaaggtttgatggaggcctgcaggaaacaacagccaggcgcaaggctttgggagttgaagcatagcttctgcgagatagaaacaaggttgacatgggcactcgtgcagaatgacgggctccttttggactcccaggactacagtcccttatgcaccttgggatctgcggctagcccctgcgtaaagagggacgcgtagtcttttccctgccccgccctgccggggcgcccgcctccgaggccgccctcgcttcgtccttcccagcaagctccgcgccggcgccggctattgattggctgaggcgggagcaggcggctggccggcagcagttactcggggtttccggtgcgaggccagaggtggggaagccatcggacgtcggcggtgaggtacgtgcagcggcggccggtgggcgagactatttgagagtgtgcgggccgggatgttctcggcctgtggggaaatcacgccaactccccgcgtgggccgggggctgtctggggatatgcgcatgcgcgggcgtgcctcgcggcttgagggcgcgcggggcgtgggtggctgcgcgcgcggggggcgcacgtggggcctgaggggcgggggcggtgccgggagtcccgccacgtcagtctccggccctgagccaatcccgcgcccggcctgccgcgagggggccggttgtgccgggaagtggctccagggagaagaggcctcttccctcacccgctgtgggagctgcgccccgaaagcctgccccggcacgtcgggctctcctgacccgccaagaccagagagccgttggcgccctccgcccgggcctgccggtccgtttattttaagaagctttgtgcgcctgctgtggggatttctgatccaggctgcgaagaatttcgaagtctggaaaatagcaactgtgtttgtttctaaaggatcttctcctgacccagcatcgctcatcacaatgaagaaccaagacaaaaagaacggggctgccaaacaatccaatccaaaaagcagcccaggacaaccggaagcaggacccgagggagcccaggagcggcccagccaggcggctcctgcagtagaagcagaaggtcccggcagcagccaggctcctcggaagccggag

SEQ ID NO: 999 - DNA, 2300 bp, Homo sapien
gatcttccctgccagtcacctggctgttctgggcgcgttctcatcatgagaagggagacctgcagcccccttacagggctggcagaggacctgctctggattaggccctttcctagcccctggggtgtggcagtgggtgagaccgggaagatctgccctcttaggttcataggccaaagtgatgatcgtgtgtgcaggacctagagggcgctcccctgacccacccctttccttgccatacttcatcctctgggaacaaagctgcttgtttggtttgaggggagttggtttggttcttatccctcagcgctgagacatagaggcttcctgggccactacagtgagacacgaacttcaagaatctgaatacccccgttttctctccccgccaaggcaaaaaaggacttagtactacctgtggagaaggaggtgcaggactaccaggccctgctgctttgcatttacagccctccccagacagacacaggcaccctcatcatacccaaactggacttacctgctaggcaccttcccttccccatccaaaaaaatggagttattttcccttatttcagcaagtccagttgattttacctttgaagtagcacctgagtccttcaccttctctccatcccttctctctcacctgacacaggtctgcagcgctcctctagtaggcaggacagccattccttggggatgcacatgtctagtctttgcctagatatggcaagtctttgccaactgagctaggctgttatgttcttagaggcattgtttttgcccattcttcccatttacaagagaatcagggacacagaagtgagggcttccagccccataggtgatcaatcctggggtcagagatttgagtgtgtttattgcttgccttcttgggagcagattccatccataaaccatgtgcttaccaaggtctgactcactgggagagaaacgacgtgaggttggaaagctgaccttccagagacttggggcccatgttgtgtggtacacatgggagtccatcatatcagattgagatggggggctgggcaaagtgccctggtctgtggctgtggggctaccctgagaaagggagcgcctgacaagccgactgctcccaccatctttgttgcagcatatcgacaaagtcttcaaacacaaggacctacaacagcagctggtggatgccaagctccagcaggcccaggagatgctaaaggaggcagaagagcggcaccagcgggagaaggattttgtgaggctcaggccccagggttggggtgggggtgggaggagacaggctgggctctggctcagctcatagccgggttatatgggagaagtctggccagaccaggcacagattccttgagtaccagtctgagagcaggaagcctcagtgggtctggtgcttgtggctaaaaaccaaacatagcccctgggggcttctgacaggatctggggttctgtcttggaaatagctcctgaaagaggcagtagagtcccagaggatgtgtgagctgatgaagcagcaagagacccacctgaagcaacaggtgagagcatataacctgaccctgtgccttcaagtttccctcactgggccccatcctgggggtagtgaaatgggaccctcattctaggactggctgtgtcctggctgctatgacgccttggttgagcctttgttctctccggacctgcacagtacctatgtggtggtgaccaggtagttaggtgggctcagaggacttcatttgtagctcagaaatgtattgcttttgaggaggtaggaacagaagagtttgaaaatcaacataaaggcaaaataaaagtcaccctaagtctcctactttccaggcttagcattttggattatatccttccaaatatatagctttgctttgttttaaggaaaaatagtatctcaatagaattactggtcagagagtcaaggacgggtctgagtgtgttgaccagagtgcctcccagagaaacccagtcttatctgtgggctgctttctccccacagcttgccctatacacagagaagtttgaggagttccagaacacactttccaaaagcagcgaggtattcaccacattcaagcaggagatggaaaaggtaactgtggtccaggccaggcatggctgctggggcataagctgcttcattcaaaattgttgggcctgccttcaggaagctcccatctggggtgtctcaagggcagggctgttaggaaggttcacagcctttcccctcttgaggcagtatcagtggtatgtatacactccag

SEQ ID NO: 1000 - DNA, 2300 bp, Homo sapien
ttcccatttacaagagaatcagggacacagaagtgagggcttccagccccataggtgatcaatcctggggtcagagatttgagtgtgtttattgcttgccttcttgggagcagattccatccataaaccatgtgcttaccaaggtctgactcactgggagagaaacgacgtgaggttggaaagctgaccttccagagacttggggcccatgttgtgtggtacacatgggagtccatcatatcagattgagatggggggctgggcaaagtgccctggtctgtggctgtggggctaccctgagaaagggagcgcctgacaagccgactgctcccaccatctttgttgcagcatatcgacaaagtcttcaaacacaaggacctacaacagcagctggtggatgccaagctccagcaggcccaggagatgctaaaggaggcagaagagcggcaccagcgggagaaggattttgtgaggctcaggccccagggttggggtgggggtgggaggagacaggctgggctctggctcagctcatagccgggttatatgggagaagtctggccagaccaggcacagattccttgagtaccagtctgagagcaggaagcctcagtgggtctggtgcttgtggctaaaaaccaaacatagcccctgggggcttctgacaggatctggggttctgtcttggaaatagctcctgaaagaggcagtagagtcccagaggatgtgtgagctgatgaagcagcaagagacccacctgaagcaacaggtgagagcatataacctgaccctgtgccttcaagtttccctcactgggccccatcctgggggtagtgaaatgggaccctcattctaggactggctgtgtcctggctgctatgacgccttggttgagcctttgttctctccggacctgcacagtacctatgtggtggtgaccaggtagttaggtgggctcagaggacttcatttgtagctcagaaatgtattgcttttgaggaggtaggaacagaagagtttgaaaatcaacataaaggcaaaataaaagtcaccctaagtctcctactttccaggcttagcattttggattatatccttccaaatatatagctttgctttgttttaaggaaaaatagtatctcaatagaattactggtcagagagtcaaggacgggtctgagtgtgttgaccagagtgcctcccagagaaacccagtcttatctgtgggctgctttctccccacagcttgccctatacacagagaagtttgaggagttccagaacacactttccaaaagcagcgaggtattcaccacattcaagcaggagatggaaaaggtaactgtggtccaggccaggcatggctgctggggcataagctgcttcattcaaaattgttgggcctgccttcaggaagctcccatctggggtgtctcaagggcagggctgttaggaaggttcacagcctttcccctcttgaggcagtatcagtggtatgtatacactccaggttgtcccagggaatggggcagtcttttctgtttgtttggtttttttggggggtttgttgttgttgttgttgttgttgttgttgtttgagatggagactcacctattgcccaggctggagtgcagtggcatgatctcagctcattgcagcctttgccccccgggttcaagtgattctcctgcctcagcctcctgactagctggaattacaggcgcgtgccaccatgcctggctaattttttctttcttttttttttgtatttttagtagagacggggtttcaccatgttggccaggctggtctcgaactcttggcctcaagtgatctgcccgccttggcctcccaaagtgctgggattataggcgtgagccaccatgcctggccccttaccattccttgttattggtggtggacacctctgacttcctggtggtgaggtggcacagagggcattgactgcatcctgtaatgccttgcgccttgggatcaatcattccccaccttggagacacaggtgcagtccccaccttggagacacagaccttggagaggccagctctgaccatttccttctgtctgtcacataacctagatgactaagaagatcaagaagctggagaaagaaaccaccatgtaccggtcccggtgggagagcagcaacaaggccctgcttgagatggctgaggaggtgggctgtctgtgatctgcagccagggtgggggtgtgcacttagcgcatatcaggccctttcctgtatgttctacccatcagtgacacagctagcatgagg

SEQ ID NO: 1001 - DNA, 2300 bp, Homo sapien
gtgctgtgcaaggcggaaaggctggggcagcagctggagaatcagctcagcaggccttggccctcccccgtggacaccaggcagctccactggcctccgggtcagccctcagggccaccgtgatggggtggaggagggttaaataaccatctttacagaaataacagtctcctacagaaagtgcctgagctcagcccatggtccgataacctcatggaaaacaaacaacaaataaaaaaaaaaagtgctgctgacacctctcagaatctggtggacatgaagctctcagctggacaaggccctgaaaacaatttactattagcagagccatgcgctcttgagcttcacctgctgtggtcccctggaggaaaagctagcaatctaagaaaccaacacagatcttggtcctaaaactgaggtcacaagtgtgggacccacccaggtgaggaagacactggccttcactcatggataggcacctcccctgcatctggcccaggacctgggctactttggaaagcagaagcagagcagctgtagtgattggttgatttggtcaatgaagagaagaaaaaggtagggaacctcatctgcagactggcctgaaggtctagacatggatggagctgtgagcaaaggctgcaccttgcctggggcccacattcctgacctgggaaacccagctggggccacctgctcactgtggcctcctacaccaccacactgggatccagcagctccagtccctccacaggcattaagaggtagctgaagtgtgagtcaggcaattatgtgggccactgtaggcctttcccctctcttcaagggggaaggtgcatacctctgcctcttccctgcacctctctcgcctagcaaacactctgtgaggttggcagctcttgtaccagcttagcctggcacaggggctggggtagggaaaaggccctactggagcaggaagaggcaaggactactccagacagagggattcaaaggggaagaaaaaggtcatgggaaacacttcacaggacagcagtatctcagccagagatggcagagatctcaacactcacacagctgcttgagggcacctagatgtgaaggatacaccagagaatagcaggcaactctgatgcagatcagtggtacctgccctggggcaggagaaggagaaatggtgtgccattcatttgccatctctggtctcagtcacacatgattcagtacttaacattctttgtgaaccaacttatctgagagatttaaggtaagggctaaaagagtgggctaggtatggaagatgaagggacctgcaggacaatgaactagcttcaaagaaaaacagcaagaagcaaagccctaaccatcctatccatcttggtctgagtcattctgttgtcccagaaaactgcttggcacaaacactggctaataccctggcaagtttgcaacagcagaacattcagcatatagaatggctctacacagtacatagtagttatgtactggagtgggggtagaacaggacacagaaacaactgtctgcagccattttatggatttctggggcccagtcaatagttcaatttcatttcttacctgttagacaacagctatgggctcccacacaggaagaagtagaatccccaaggacaggcagggaggtgccaggaaatagaatcaggacaaatcttgaggattgcacatgtgggggtgggggcaggaagcagaaaaacccatgaagccaaagaggcagctggacatgggacccagcaactgctgcatggagacagtgctgatgggaactggtggtggcctctcaggactgaaacccacaggtaagcttgtggcaaagccatcagaagccctttcctttcttttaccacaaacaacctgatctcaccaaacaggaaacctcagcatcaagatggcaaaggagccaagtggggtggtgaaggaggtgggacactggaggccaggcacccaggcaccactgctacagcatccctcttccttggaaggtcctcaatacaaacactgtcatgtgcaaaaaaaaaagaaaaagaaaaaaaaaaaaaaagaaaaagaaataaagaaaaaaacaccttcagaaataatcctttgggtgatctcttgtcaatcatttgtgcaggctagagaggcacctgtgaatgataaggctactgagaagcatcattggcctggtcctggcactaccaaagggcaggggaagcgatgcccaaggggctcctgaccagcacatcatcccacgcaaaaacattctccaggtcccttgttcc

SEQ ID NO: 1002 - DNA, 2300 bp, Homo sapien
aagacccttgcctcagagaggatcacacacacacaaaaaagttttccctgacctgggggctcacaggctagtgaagggaaaaggtacttttagctatagacaggtcaatggtgctgagagcagagaggaggcccctgcccccttcagcaaggtgagggggtgatacctggaatggccttctgaaccacagggcaggtagaagatgaacgtcatttagtgattaaatggtacagctgggaagcaggtccatgggactgggagagggggtgaggctgggcccagagtctgggtaccaggttaaggaatgtgggctagatccagagggcagggggggcaactgaaggtgtttcaataggaaattgataggctccagcagtaaggcaaaaggcatggagccaggcataggccatttgaggcccaggttaagaggggtggacactcatcactgctatttgggtctgagctgtgggtaggctcctatagccctggcctgcccaagggaattcacaggggcctctaattgtatgcattccttaaggagagcacattctctgttcagtttttacaccccccatttacccacctcaagcatgggactcctatatgggagacatgctgctggtggcctcacccagcaccctgttctctctgggtcctgggttggtcaggcacaaaggatgatatgtgctgaatgcccaggaaatggcagagacaacccacctgcccttccctccaggcctccacaaatagatgtgcccacaatgactgtgacagtcccagcagagcctctgacccttctagctgggtcctgatacatgttttccatgctggccatgttatttctagtcgcagatcctctggagggtgtggggggggtgccgccccaactcttggagattccaagcaaagcagctctgagaataatgaggtttctgaccccccagtgaagcagctgaggatgggaaccacaggggtgctccctctgtcagcagcattaccactgtctactctagcagctccggtggggaaggagagggatttctgttgtccccagtctgggcccctggttattgaaaaagttcggaattactctttacccttgtggagtgttctgagtgttggaagtacccaggaagaagccctgagcaggtgccctcaggagcagtgcccatggctccccacatcagccaagaggcccaaccccaggaagccactcctgcccggggatggggaaggtgggctgggtggctgtgtgcactgccctgggccagctcacttgagcctgctgagccgcctggccaaacatgagcctctctcctgttgtatcagatgctgttctggggacctgcgccaggagcctctgccagggctttaaatagctgcccccattgatctggctgcaggcagcagcagtcacactgggtcagcctccatcaggtgctcaggtttccctgaggactggagtcaggtgccagggaatcgcgtggtctaccttatgacctggtgctccccacacctgtctcctaggcctggggggtggggaggactcctgtcacttcatctgcggcaaaatacagcccccaccacttaccagagaaaactgtctggcattgtagagagaggggttttgccctcaaaagactgttgcttactttcagtagaatggggaatgacactggtatcttccttaagggttgttatggggatgaaatgtatgtaaagtgctcaatagggcactggactcactccattgatggctgtctttgctcgaagtgtcttcctgatgctgctgctgttgctgcttgtgcttcttctgtgcttacattctctctctctcactcactcactctgtctctcctctcccccgccccaccccctttctgacaaagccaccaccattttgtaaggaactgtagcttctctctgaaactgccgggaaagggaaaatctttttaaaatagacatcacacaaccaacagggtcccctaggttcaggcggggaggtgaggtcgagtgagaggaactgcttagcatacgcggggatgctcctcccatctcaccccaccgcgctaaggagaaggtcactttctctttaaatgcaaatgaactccctccagcttagctttcacccggtggtgttcccgggaggagagggcggagggcggagggaacttgcaccgaagcatcactcgagaccccaaacctccaggtcagtagccccctgagggagtgagggcgggggcggaatgacgcgggtctgacgctctgtcttcgagcgcggctgcggagctgagcgatga

SEQ ID NO: 1003 - DNA, 2300 bp, Homo sapien
tacgctgaagactagggaggataagtgactcattcagggtcataaaacaaatgagtgaggcactcagacaggaacccagggaccccctttcaggcactgctctggctgtgttattagcagaaaagacttctttttgacctcttcacgcctcctcaccccttcccagtgcccaaggggaaccataaagttacccatttatgctagtaagtagatgggcagatgagttagtgcagatagacagataaactggtgcataggcagatggcacaaaagatcgggaggtgcctgactgccccctaccctgtgatcatggtcatgtccaccccacccagagtaggcaaagagaagtgccgcccagtcctggctggaggtggaagcggctctgcaggcacgcccctgcagcactccttcctgaccgaggtgactgatgtctatgagatggaggggggactcctgaacctgctcaatgatttccactctggccggctgcaggccttcggtgagtcctgggggctggtttcagcgggtgtgtggatagggctgtagggcccagtccatggggcatggctgggaccatggttccagggttccagggttccaggactctttcccagggttcagacaggggcttcgttccagggaaggaatgctcctttgagcagctggagcacgttcgggagatgcaggagaagctagcccggctgcacttcagcctggatgtgtgtggggaggaggaggacgatgaagaggaagaggatggggtcactgaggggctgccagaggagcagaagaagacaatggctgaccgtaacctggaccagctgcttagcaatgtgggttcatgtctgggtgctttggttcctgggggcatgaggggtggagaaggtacatactcccaaagccattcctgggccctgggtgaaaaggtgggagtgcatggatccaagagctctgggcccctcaacctccccagaagatagcccccagagcattggggatttggcctggttcccctcctaacagaagcctccctttttctctttgttggcagctggaagacctcagtaattctatgtatcctttccaaggaacccgtctatgtgtgtgtgttcctgagaggtcagtttcctcctctccagccctccaggagtattcacacacaaccaacttccccacctcttgcagtcctgtcagatttagccacagactgcccaaacccaggtacaggaatttagaatttccccaaaattagaagaaaagtggttgtaggggatgttttactactgatcaaaatctttgtgagtactttagctgacatcaatcatagcaaagcttgtccgatgtcctcctatcctttcagcattgaacaattatttttactaatttacactaccacctcacctggtcctcagtcagaaacagcgcgagtgcgcgcgcacacaccccagtgtgtctgacctgcacgatctggatgaagagagagggggtgagagagggcaggcggggactgcaacctcagtccacagacggcccgagaccctcgtccccggccctttgcacaggtgagggaactaaacctgtgcaagatgggagaccggggtgggaggaaggactggtccaaagcgccacgatccttgacgggcacagccagaagctgcacctggccgagaacgccgagcctgaggagcagtccgctgcgtaggcgtcccacgcaggcccacactgcccctctcattctcttcaaactgtgactttttacagactcgggcgggtgttctgcggccccccaggtgctatgggggaggggggcgttgaatggaattaaaccagaaagaaagcaagcggctccgtgtcctgcttcccctccttgcgcctttcctcccggtctccgcggagacagccctcggttatggaggtaccgcctgcgggattggagtgccccttgcggctgtgggaggggcagtcgggggctggggggacgcaggtacgcctgtcgccaggacgcctctaccctggacggtaggaggttgccgtgggaacggctggggcaaagcccacgcccgcgcatgctcaggagcgacgccgaccaatgacgtacttcgcaggcgcgcgggcgggcctggcagttggcgcccatggagccagagctgctggttcggaaggtgtctgcattgcaggtgcgggggcgggcgcggggttcacaggatttttcctttagggaaatcatggggtctcgtacctggacctcccagcgagatgctaccacgttcagtcccctaactgcgcgccaacctctggag

SEQ ID NO: 1004 - DNA, 2300 bp, Homo sapien
tcacagaagccacagatcaaagactgccccacagccaacctcagcttcaagagcttcagtaccaccgcagccacttggccatggaattgctgtggctgcaacaggccatcaatagccgtaaggaggtaacactaacctggaactctttctgaacatttagggtcaagggtgggggttagggagagacgacctgccatgcccaagcaggcctgcttggtacaatgtatgttctctcccccaacagtacctacttcttaaacaaacactgagatccccagaggcgggcccgatcagagaggaaccccgcgtgttcctagaacatggggaacaggcctgtgagagggaccagtcacaaccaagcgcaccactggaggaccagtcctacagagacaggaccactggagagctagaacaggaggatgactcctgtcacagggtcaaatcaccccacagatccccaggaagtttggccactacacaaaaaaacattgctggggctaagtgcagagaaccatgctacagcaagtctggaccaccgtcgtctataccatcaaacagccaggccttgggggacaggctcaccaaagggccagacgatggaagacagacctttggagggacctgcctgctgcagatgaaaatcctggaggaccagacccccagaggtttaaaacctaggaaccattgtcccaggaagtccaggacacagctgtctgcactctatgaggactcaaatattaaggagatgtctcccagaaaactagaccacaaagagcctgactgccgaacagtcaggacacaagagttgggcctctcagaggaccacatcatctgggatggtaccttgggggggccagagcatagtgtcctcgatctctggaggactaaaccacccaaaggccaggcccccactgatagaagctccagagatggaacctccaatgagcctagtcatgaaggacagaaaaagcagaggactataccatggagatcaaagtcacctgagattctgtcttctacaaaggcaggctgtacaggagaggaacagtggaggggcaggccatggaaaacagaaccacctggctagaccctaggaagccaggagaggatcaggttccaaaggggaatgctatgaaagggcagtgagacaagacctcatcctacctccctgaccagctctggcttctgctcctgcccctggccattggtgactagtggggccaagagaagctggagcagagagctggcatgagtatagggaaggaggaaggacacattttcaatcctctgcctgtagctcaatccaaatttgtggataaggggccgggtgcagtggctcacacctgtaatcccagcactttgggaggccaaggtgagtggatcacctgaggtcagaagtttgagaccagcctgaccaacatggtgaaatgaaaccccatctcaactaaaaatataaaaattagccaggcgtggtggtgcatgcctgtagtcccagttactcgggaggctgagacaggagaatcgcttgaacccaggagatggagattgcagtaggccaagatgatgccactgcactccagcctgggctacagagcgagacacggtctcaaaaaacaaatgtgtggctaaggagttacctgggggaagtagaatgagaggtctgttgggaataaaggtttttcttagattctgagtctggctgctttcatttctgcttctggccaggacagattctgggccctgccgttcacttcctactggcatggggcattgaccccggagccagctgggagccatggcccaggaaaagatctagccatcctccttagggaacagctcccaaagctgatccccaattgagctcagccttgtgctttagagtggcaaggaggctctggagagtagggtaacacctatgtttaagtgtgatctccccagggcagatgggataaaaccctgaatgcagataaatgctcctgccacagtctccctctgccttcctgggtgagagggcaggactccacctctgattggcaatgttcccagcccttccttggttgcctggcaacaggtctgtttctctgactgaggatacactatggcaggtggcagtccagcagccaagagggtagtggtgtaccggaatggggacccattcttcccaggctcccagctggtggtgactcaacgccgcttccccaccatggaggccttcctctgcgaggtgacatcagctgtgcaggccccactggctgtgcgtgccctctacacaccttgtcatggccaccctgtcaccaacc

SEQ ID NO: 1005 - DNA, 2300 bp, Homo sapien
aagtagctgggactacaggcacacaccaccacacccaactaattttgttatttttagtagagacggggtttcagcatgttggccagactggtctcgaactcctgacctcaaatgatctgccctccttggcctcccaaagtgctgggattacaggcgtgagtcaccatgcccagtcgagcataaacttttaatatatggcttcaaatccttctgcactgacatcctgtgggacttgagaggtgaaattgcacaaagttttgcaacttcattttctaagataatcatatctgctttacagagtcatgattggaattaaataatgtgtaagactagtgcagtatctgacgtagtagagggcagtcacaaatgtcaagagaaaggaaatttatgtatatggagctctgactgtgtgccaggcactctcctagatgtttcccattcattaaatttaatcctcacaatgctatgaagccaactatataaaaccaaggctcaaatgggtgacttgctcatggtcaggtaggtagcacacagtggaagcaagaatgtgaaagccagcacttggcacagcaaaatgaaccttccttcttcctccgctggtcacacatgactgccaggcttcaaaccaactccagtgcctagcaacatactcataaccagcacactgtgcccctcttgttcagagaagaggatagtaagagggaactagagctagtcagccctctctcactgatgggaatgaggtgtttcaagctccaccccgccccccccaatcactcttccaggtggcctcaaacactaagcagaacagttccaagccaggacccacctgtcgatgccaaggtgaggtaatagagaagggatccacactggttgaggagaaagggcatcaggtactggaaagaggagaaacctgcagtcagtgtgatggcctgactgagcagcactgccttctttgagctcctagcgaatgtctttccttggagggaggcagggttataaggacccagagaacactaatccctctaaggaggatccttccagggcaaagagggaaacagactgaagtctgtgcctttgctcaaactaccctctccctcacctctgctagttcccatcctgcaaggccttgaagccaatgtcagcccctccaggaagccttccccaagtcctccagctccagccttcctcctctgaactcctcccctgcagggccaatttgagccccaagccctccctctggaaaggctcacaaatgttgccttatgtaactgaaggaatcacaataaaatgtgaataatggcagccatagattgagcacttactatgttctaggcctaatgctaagtgctctacgtatctcacctaattcctgcaactgacctatcagatggttattattataatcgccatttacagatgatgaaactgaggctcaaggacaactgacttttccgagaatttctagtgagtaagtggtggggctgacccagacctgtttgactccaaagaccaaattcttggcggcaactccaccgagagaggggcctttcacagagacgcacctcagtattcaagaagagggtcttcatctcctgtagcaactgctgggcccaggtcggctcatgaacccgctgcaggccggcggaggcccgcttcagcagcggctgcgtgccaccccacagagcggccaccagcaccagagccaacacctgccctgaatgcagacgagtgagtcaccctgacccccaccccaaacggccgcccaccccgccctctcctggccttctagccccagctagccgcccccacttccctccttcgctctcttcgcctcggctgcgactggcggctaaggcaggcccagggaagctagggagatgaatccaggagtccggcctctggggttgtagcaggggtcggggttagagggtggatgtggagcaggaaatgaattcgaggcgagggtcgggaaatccatggaagggcggggccggctacctacccagagacgccgccatggcaacgccgctgtcttctacttccgggaacgaaggggcggagacccataatccggaagtgacctcgaaaccttttccggtcttactcacgttgcggccttcctcgcgtcacagccgggatggtgagtttcagagttaggggtattgcagtgggggtcctgggctgaggctggggcccaattccgagcactgacgttactgtcttgtccccacagaagccgatcctactgcagggccatgagcggtccattacgcagattaagtataaccgcgaaggag

SEQ ID NO: 1006 - DNA, 2300 bp, Homo sapien
aaaataaaataaaatggccaggtgcctcaaaaggcagtatcatgagggattgtttggcattgagtagcaggatgggattgacttaaaatgagactagagacaccctcattaagttccctgtgtctgaataacacagcctgcacctatcctggtagaaagattagattatccctaaaggtcgcatcccgttctctgggcaagctgaccctcatctttatcccctttccacagtggtctcttgcttttcttggagtgcagtggcacgatctcagctcaccgcgctcaagcgatcctctcgtttcagactccgaagtagctgagaccacaggcgcgaggccaccatgtcaggctaatttttttgtgtgtagagatgggtcttactacgttgctcaggctggtctccaactcctgggctcaagcgaccctcccacctcggcctctcaaagtgctgggattacaggcgtgagccaccgcactcggccaatagagttcttccccacctttcccggtagaatactttcgccaacctacccccggcatggcctctccctacttctcacaatgggctgctctttggttccccgctaacggcaaaactggcgtgtccacccatcgtcctggcagaaggatcccgcccctcccggaccccctccagccaacactcacagggtccttggccacagtaaagaggaggtctccttcgcggttatacttaatctgcgtaatggaccgctcatggccctgcagtaggatcggcttctgtggggacaagacagtaacgtcagtgctcggaattgggccccagcctcagcccaggacccccactgcaatacccctaactctgaaactcaccatcccggctgtgacgcgaggaaggccgcaacgtgagtaagaccggaaaaggtttcgaggtcacttccggattatgggtctccgccccttcgttcccggaagtagaagacagcggcgttgccatggcggcgtctctgggtaggtagccggccccgcccttccatggatttcccgaccctcgcctcgaattcatttcctgctccacatccaccctctaaccccgacccctgctacaaccccagaggccggactcctggattcatctccctagcttccctgggcctgccttagccgccagtcgcagccgaggcgaagagagcgaaggagggaagtgggggcggctagctggggctagaaggccaggagagggcggggtgggcggccgtttggggtgggggtcagggtgactcactcgtctgcattcagggcaggtgttggctctggtgctggtggccgctctgtggggtggcacgcagccgctgctgaagcgggcctccgccggcctgcagcgggttcatgagccgacctgggcccagcagttgctacaggagatgaagaccctcttcttgaatactgaggtgcgtctctgtgaaaggcccctctctcggtggagttgccgccaagaatttggtctttggagtcaaacaggtctgggtcagccccaccacttactcactagaaattctcggaaaagtcagttgtccttgagcctcagtttcatcatctgtaaatggcgattataataataaccatctgataggtcagttgcaggaattaggtgagatacgtagagcacttagcattaggcctagaacatagtaagtgctcaatctatggctgccattattcacattttattgtgattccttcagttacataaggcaacatttgtgagcctttccagagggagggcttggggctcaaattggccctgcaggggaggagttcagaggaggaaggctggagctggaggacttggggaaggcttcctggaggggctgacattggcttcaaggccttgcaggatgggaactagcagaggtgagggagagggtagtttgagcaaaggcacagacttcagtctgtttccctctttgccctggaaggatcctccttagagggattagtgttctctgggtccttataaccctgcctccctccaaggaaagacattcgctaggagctcaaagaaggcagtgctgctcagtcaggccatcacactgactgcaggtttctcctctttccagtacctgatgccctttctcctcaaccagtgtggatcccttctctattacctcaccttggcatcgacaggtgggtcctggcttggaactgttctgcttagtgtttgaggccacctggaagagtgattggggggggcggggtggagcttgaaacacctcattcccatcagtgagagagggctgactagctctagttccctctta

SEQ ID NO: 1007 - DNA, 2300 bp, Homo sapien
tgttgtcagctgagccagtgaggacatgcttggtgtcccctgaagagttgttaagaaatatgacgaagttcacccgagcccttgtcctcttgggatgccaagtgaatcatctccctgttcagccccaaagagcctttctacccctcttacctccttatccagaactggaatttgtcctgaatgtttcctcagtcagtgaagagaccagggagtaggaggtatcgttctctaggccctcaacagcacccccaactcccaactcccaactcagcctctccatcgctgacagaccctagcaacacggactcagacccaaaataaggatacagtcagcgtccacacaccacacagctccggtatggcccatgtaggtgcccagcctctcaccattcacagagtaccatacattgacgatctggaaaagtcaaaccacaggatagtacacatcccagtaagagcaatggcttcctattttgccccaggaaccctcagcagcctgtagcaaggctgattctgccctcttctgtttatttcttgggaaacagcagggagctggtaaaaagaccaactcctggattctcctcccttcctgaagggaagcaacagaggagtcaggcggcttgtaaaggcatcctcatttgttagctccagctctcctgggactcccaacggctccaaagaataaaaggccaagttgagctccagtccagaaaaacagtatctctgatgtcttatccaagtgggagcagctggtagtaaggaagtctgggttctggtgcctgctctgccactgtctcactatatgatctcaaatacagtgcttctctcctctgaacttcagttttctcatcttgaaaatggccaggccgggtgtggtgactcatgcctgtaatcctagcactttgggaggccgaggcaggcggatcacctgaggtcaggagttcaagacaagcctgtccaacatggtgaaaccccatctctactaaagatacaaaaaattagctgggcatggtggcacgagcctgtagtcccagctactagggaggttgaggcaggagaatcgcttgaacctgggaggcagaggttgcagtgagtcgagatcgcgccactgcactccagcctaggcgacagagcgagactccgtctcaagaaaaaataaaataaaatggccaggtgcctcaaaaggcagtatcatgagggattgtttggcattgagtagcaggatgggattgacttaaaatgagactagagacaccctcattaagttccctgtgtctgaataacacagcctgcacctatcctggtagaaagattagattatccctaaaggtcgcatcccgttctctgggcaagctgaccctcatctttatcccctttccacagtggtctcttgcttttcttggagtgcagtggcacgatctcagctcaccgcgctcaagcgatcctctcgtttcagactccgaagtagctgagaccacaggcgcgaggccaccatgtcaggctaatttttttgtgtgtagagatgggtcttactacgttgctcaggctggtctccaactcctgggctcaagcgaccctcccacctcggcctctcaaagtgctgggattacaggcgtgagccaccgcactcggccaatagagttcttccccacctttcccggtagaatactttcgccaacctacccccggcatggcctctccctacttctcacaatgggctgctctttggttccccgctaacggcaaaactggcgtgtccacccatcgtcctggcagaaggatcccgcccctcccggaccccctccagccaacactcacagggtccttggccacagtaaagaggaggtctccttcgcggttatacttaatctgcgtaatggaccgctcatggccctgcagtaggatcggcttctgtggggacaagacagtaacgtcagtgctcggaattgggccccagcctcagcccaggacccccactgcaatacccctaactctgaaactcaccatcccggctgtgacgcgaggaaggccgcaacgtgagtaagaccggaaaaggtttcgaggtcacttccggattatgggtctccgccccttcgttcccggaagtagaagacagcggcgttgccatggcggcgtctctgggtaggtagccggccccgcccttccatggatttcccgaccctcgcctcgaattcatttcctgctccacatccaccctctaaccccgacccctgctacaaccccagaggccggactcctggattcatctccctagcttccctgggcctgccttagccgcc

SEQ ID NO: 1008 - DNA, 2300 bp, Homo sapien
ctgcaaccttggtctcctgggttcaagcgattctcctgcctcagcctcccgagtagctgggattacaggtgcacgccaccatgcctagttagttttgtatttttagtggagacggggtttcattatgttggccacgatggtctcgatctcctgacctcgtgatcggcccgcctcggcctcccaaagtgctgggattacaggtgtgagccaccacgcctggccaattttttgtatttttagtagaaacagggtttcaccatgttagccagggtggtctcgaactcctgacctcaggtgatccgccccgcctcggtctcccaaagtgttgggattacaggcctgagccactgcgcccagtctttctttctttttaaagttagcagtagtgctagcacctcagggcttgaaaaaacaaaaatacaaaaatattgagtgtctcctgcaacccaggcacagggttaaggactttaggcaagattattctccccatttcacagacgatgacatggagatttgcttataacagtctctggccagggacctcgctaagaaatattggcaatatgaggggaaattcctgtgaaactgtgatcctttcctctgaggggcctccttaacagctgtccagacggcgtcgccagctgcccaggcagttcctatccctttcggagctccagcctgcccctcctgacgctctcagagtctggccttctgctgggccccgggtctctcactggcagaatggagttctcggagctgatccatacgggctgagcccaagcagagtttctacggggcccggaggcgcccccgcttcgcggcacggtgtgagtcaccgtccaccacctgctcctgtcgccagggcccgcgtcctctccggacctgtggctgctgctgttgcgtagcgtcgactccttcgagaagcagtgagacgtggcggggtgggggagggtccccggggttggggagcgcgcggcttggcggagtagggggcacggccagcgcagtcagagctggcgccctcctgcgtaagcccaatccgggaaactcgttgcccctctcctgggaaaggaacgtccctccccagggttgcgagtgactcgggcaccatcaccctgtgctgtaaagacctgcgagtgctgcagctggaaatagagggcgcggaagcgacgctgggcatcgcccgctccatcgaggtgtgccgagggagctcccgagccctttaagctctccctgtctcgcgtagaggggaataaaaaggtgcttctgttcaaagaggctccgcagccgcagctaaatggcagggggatgcagggtggtccggggtacttggagaggccgaagctgaagctacaggactgaggggctggaaagggcgcgggcgagacaattccgaccctccccagagcccctgacttccttctccggacgctgtcctccctggaatcagtcatcacctccttccctttattctaccgtcccaagggcctgagattgggcgactcctggcacttcctcccgcccgaactctactgcaagagagtagctcgcgaagtgggcgcggtcgtaggggcccgggaaggtggaagcgccgggcctggaagaggcgcggggacagggcactccctgggtgccctagacctggcctctctcctccctgcgctgcagaccaacgcgtggcggctgagcgaggtgaacgaggacttcagcttgtgccccagatacccccgtgcggtgatcgtgccatacttggtggacgatgatgccctggcgcgcagcgcccgcttccgtcagggaggtcgcttcccggtgctcagctaccacccggctcccagcggcagagggagcgcgccctccccacgctccgcccctgggtggctgcgtcctttctgggccttttctttttggcccggtcaattcgcggcgtagccgctgccccaactcctgccccattctggtcccgcccctctcccgccttttcgctgggaagggtatcacctttctctggccccgcccctgacggttccgggccccgcgaagcttagtcccttctttgtcaagccaggacccgcccacggtctattcatagggtcccaaaccactttggccacaacacccccagactggtccgaagcctcgtgagttcgccctggtcgttgcactccagcctgtcgctgtgcagacctggcttagaggacccctaaggctgaggggtcacttccagaactgagtccggtccgcaggttctgctacgctccagccagcccctaactggtccccagaagcggcgctgctacagg

SEQ ID NO: 1009 - DNA, 2300 bp, Homo sapien
gctctcgtcctgcaattttaccagcttaattgtgtctcttgccagactgaaaaccctgtgaacagaatcttccccagtcatccctgggccccagcaccaaacacagggcccagctaactcactgtacaggtaatacacacttgctgaaacgatggtggatagctgatggggttcttgaggtctggactcagccagaagtgggctgcacagagggcgccctcaggcagggacttccagctgcgaggtcgaggagggacgccagctacacagctgcagcatttaaggtggaccaaaggatttccccaacccaagtttcttatgtatgggaggaagtaggcagttcccagtttcacacccactttccagcccttccaccagggtatggtggaagagatagttatctttcttcctttccttccttccttccttccttctttctttccttccttccttccttccctccctccctccttccttcctttcttctttcttttctcttttttgacggagtttgctcttgttgcccaggctggagtgcaatggcgctatctcatctcactgcaaccttggtctcctgggttcaagcgattctcctgcctcagcctcccgagtagctgggattacaggtgcacgccaccatgcctagttagttttgtatttttagtggagacggggtttcattatgttggccacgatggtctcgatctcctgacctcgtgatcggcccgcctcggcctcccaaagtgctgggattacaggtgtgagccaccacgcctggccaattttttgtatttttagtagaaacagggtttcaccatgttagccagggtggtctcgaactcctgacctcaggtgatccgccccgcctcggtctcccaaagtgttgggattacaggcctgagccactgcgcccagtctttctttctttttaaagttagcagtagtgctagcacctcagggcttgaaaaaacaaaaatacaaaaatattgagtgtctcctgcaacccaggcacagggttaaggactttaggcaagattattctccccatttcacagacgatgacatggagatttgcttataacagtctctggccagggacctcgctaagaaatattggcaatatgaggggaaattcctgtgaaactgtgatcctttcctctgaggggcctccttaacagctgtccagacggcgtcgccagctgcccaggcagttcctatccctttcggagctccagcctgcccctcctgacgctctcagagtctggccttctgctgggccccgggtctctcactggcagaatggagttctcggagctgatccatacgggctgagcccaagcagagtttctacggggcccggaggcgcccccgcttcgcggcacggtgtgagtcaccgtccaccacctgctcctgtcgccagggcccgcgtcctctccggacctgtggctgctgctgttgcgtagcgtcgactccttcgagaagcagtgagacgtggcggggtgggggagggtccccggggttggggagcgcgcggcttggcggagtagggggcacggccagcgcagtcagagctggcgccctcctgcgtaagcccaatccgggaaactcgttgcccctctcctgggaaaggaacgtccctccccagggttgcgagtgactcgggcaccatcaccctgtgctgtaaagacctgcgagtgctgcagctggaaatagagggcgcggaagcgacgctgggcatcgcccgctccatcgaggtgtgccgagggagctcccgagccctttaagctctccctgtctcgcgtagaggggaataaaaaggtgcttctgttcaaagaggctccgcagccgcagctaaatggcagggggatgcagggtggtccggggtacttggagaggccgaagctgaagctacaggactgaggggctggaaagggcgcgggcgagacaattccgaccctccccagagcccctgacttccttctccggacgctgtcctccctggaatcagtcatcacctccttccctttattctaccgtcccaagggcctgagattgggcgactcctggcacttcctcccgcccgaactctactgcaagagagtagctcgcgaagtgggcgcggtcgtaggggcccgggaaggtggaagcgccgggcctggaagaggcgcggggacagggcactccctgggtgccctagacctggcctctctcctccctgcgctgcagaccaacgcgtggcggctgagcgaggtgaacgaggacttcagcttgtgccccagatacccccgtgcggtgatcgt

SEQ ID NO: 1010 - DNA, 2300 bp, Homo sapien
ctattcctctattctttttctttcttttttcttttctttttttttttttttttgatacaagtctcactctattgcccaagctagagtgcagtggcgtgatctcagctcactgcaacatccacctcctgggttcaagcaattctcctgcctcagcctcccaagtagctaggactacaggtgcgagccaccatgcctgacaaatttttctatttttagtagagacagggtttcaccatattggccacgctggtcttgaactcctgacctcaagtgatccgcctgccttggactcccaaagtgctgggattacaggagtgagccaactcgcttggcttttttttttttttttttttttgaggcagagtcttgctctgttgcccaggctagagtgcagtggtgcgatctcagctcactgcagcctccgtttctcgggttcaagggactctcctgcctcagcttcccgagtagctgggactacaagcacataccaccatgcctggctaatttttgtatttttagtagagaccagatttagccatgttggccaggctgttcttgaacttctggcctcaaggtatccacccacctcagcctcccaaagggttgggattacaggggtaagccaccgcacccagccctattcctttattctcaattaaaaagaaagaaagaaaataaataaataaataaataaataaaataagctgggcatggtggctcatgcctgtaatcccagcactttgggaggccatgcagcaggagcattgcttgaggcttggagttgaagaccagcctgggcaaaacagggagacccccatctccacaaaaatatttacaaaagaaaaagaagacggatggatgaatagatgggtcctgtggtaaatcagctcagctctcgtcctgcaattttaccagcttaattgtgtctcttgccagactgaaaaccctgtgaacagaatcttccccagtcatccctgggccccagcaccaaacacagggcccagctaactcactgtacaggtaatacacacttgctgaaacgatggtggatagctgatggggttcttgaggtctggactcagccagaagtgggctgcacagagggcgccctcaggcagggacttccagctgcgaggtcgaggagggacgccagctacacagctgcagcatttaaggtggaccaaaggatttccccaacccaagtttcttatgtatgggaggaagtaggcagttcccagtttcacacccactttccagcccttccaccagggtatggtggaagagatagttatctttcttcctttccttccttccttccttccttctttctttccttccttccttccttccctccctccctccttccttcctttcttctttcttttctcttttttgacggagtttgctcttgttgcccaggctggagtgcaatggcgctatctcatctcactgcaaccttggtctcctgggttcaagcgattctcctgcctcagcctcccgagtagctgggattacaggtgcacgccaccatgcctagttagttttgtatttttagtggagacggggtttcattatgttggccacgatggtctcgatctcctgacctcgtgatcggcccgcctcggcctcccaaagtgctgggattacaggtgtgagccaccacgcctggccaattttttgtatttttagtagaaacagggtttcaccatgttagccagggtggtctcgaactcctgacctcaggtgatccgccccgcctcggtctcccaaagtgttgggattacaggcctgagccactgcgcccagtctttctttctttttaaagttagcagtagtgctagcacctcagggcttgaaaaaacaaaaatacaaaaatattgagtgtctcctgcaacccaggcacagggttaaggactttaggcaagattattctccccatttcacagacgatgacatggagatttgcttataacagtctctggccagggacctcgctaagaaatattggcaatatgaggggaaattcctgtgaaactgtgatcctttcctctgaggggcctccttaacagctgtccagacggcgtcgccagctgcccaggcagttcctatccctttcggagctccagcctgcccctcctgacgctctcagagtctggccttctgctgggccccgggtctctcactggcagaatggagttctcggagctgatccatacgggctgagcccaagcagagtttctacggggcccggaggcgcccccgcttcgcggcacggtgtgagtcaccgtccaccacctgct

SEQ ID NO: 1011 - DNA, 2300 bp, Homo sapien
ctcccgggttcacgccattctcctgcctcagcctcccaagtagctgggactacaggtgcctgccaccatgcccagctaatttttttgtatttttttagtagagatggggtttcaccatgttagccaggatggtctcgatctcctgacctcgtgatccacccaccttggcctcccaaagtgctgggattacaggcgtgaaccaccgcgcctggctgagttcaaaaccattatgagcaacagaggaagacctcatctctatcaaaaacttaaaaaaaaaaaaaattagctgggtgtggggtcttggccctgtaagtcccagctactgaggaggtcaagcaagagaatcacctgagtccaagagttcaaggttgcagtgagctgtaatcccaccactgcactccagcctggcaacaaagcaagaccctgtctcgaaaaaaaaaaaaagcataaattgtaaaattccagaccagcagcagcagctgggatgggaatttggtagaaatgcagattaccaggccccaccccatacatactgaatctgaaactctgggtggtggggcctagccatcttagcaagctttctaggtgattctgatgcatgctaaagtttgtgaaccactagaaggcatataaacagagaaaactatgctgttagaatgagggtggtgttacccttagattagtgacaggccaggagcacatgggaggctaacagcggttcctgggtgctggtaatactctgttgcttgatctgggtgctggttacatggatgtgttcagtttgggagaattcatcgagccatacattcatttatttacttatttacttattttttgagatggagtttcgctctttttgcccaggctagagtgcagtggtgtgatcttggctcactgcaacctccgcctccaggctccagtgattctcctgcctcatcctcctgggtagctgggattacaggcatgcaccaccacgcccagctcattttgtatttttagtagagatagggtttcaccatgttggccaggctggtcttaaactcctgacctcaggtgatctgcccgcctcagcctcccaaaatgttgggattacaggcgtgagccaccgtgtctccatgcatttatgatatgtacagtttttctgtgtgtatgttacacttctttccccttccttccttccttccttccttcctccctccctcccttctctctctctctctctctctttccttctttctttcttttgacagagtcttgctttgtcacccaggctggaatgcaatggctcgatctcggctcactgcaacctctgcctcccgggttcaagcgattctcttgcctcagcctcccaagtagctgggactacagatgcatgctaccacactcggctaattttttgtatttttagtagagacggggtttcaccgtgttagccaggatggtcttaaactcctgacttcgtgatccgcccacctcggcttcccaaagtgcagggattacaggcgtgagccactgcacctgtccttctgtgtgtatgttatgtttgaaaacaaagtttaaaaaagggaactgctctggttgaagccctgggaggggcagggagatggaaggcaaggagcccatccacagctctgtccttctcctgcaggcagcccttgagggctccttagagtattagcttgaaatccttcatctgtcccaacagagctctgagaaggtcagtgacttgcccaaggttctgcagagccagcactagaactcaggtctcctgactcccaggccagggccctggaggctagtcctttcctgaagggctggtgtcacgagtaaggacaaggggtggctaggcagcctccttcctgatctcagctcccttaacatgagtcttgggaggagggccaagactctggtatgaatgatgcttttctcatcctggagcaacttcctttctgggaattgggtgtctccttctgggcaaagacaataaaattcatccaaagggccagaggagcagggttcctccggcccccacccagatgggcatcacgtggctcccaagttagcagtccaggaaaattccagcccttgcatacttggcctcacacacccatctgctcactcaccctggcacattcagcccccctaacccaccttgaacattgaccaccacacactccctggcacgctcttctcaccctcaacttctgccacctctccctgggcaatactgccagcctttccctaatctcagagctgcagccctgccctgtcactcacctcaaacctgccatgtccctggg

SEQ ID NO: 1012 - DNA, 2300 bp, Homo sapien
attctcctgcctcagcctcccaagtagctgggattacaggcggccaccacctcgcctggctaatttcctttcttttcttttctttttttttcttttttttgagatggaatttcactctttcgcccaggctggagtagtggcgcgatcttggctcactgcaacctccaccttctgatttcaagcgattctcctgcctcagcctcccaagtagctgggattacaggtggccaccacctcgcctagctaatttcctttcttttcttttcttttttttttcttttttttgagatggaatttcactctttcgcccaggctggagtagtggcgcgatcttggctcactgcaacctccaccttccgatttcaagcgattctcctgcctcagcctcccgagtagctgggattataggcacccgccaccatgcccggctaatttttgtatttttaatagagacagggtttcagcatgttggccaggctggtctcaaactcctgacctcaagtgatccacctgcctggggtttccaaagtgctaggattacaggcctgagccaccgtttatttctattcgaccctgaggagctcccttaacccctgagtctgtttcctcacctccacaatggagatgctgattctcactccacaggcagcagatgtgccttacgggagatagtgcacagtgagcgctcagtgaatatgaactattactcactcccagcgcggcagtctttctactctgtgctgagacagggagatggaccgtgaagtgttcaggcttacattgcaagggagtctgggccctgcaccaggcttggagctccaactctaggctctgtgtcactgtgaaggtttttcactttgtctctctcagcctttgtttctgtgttaccctctttgtctgactttccaactcaggcttcctcttccccccacctatttcctgcccccacttctctctgcagctgaggtgcacacagcatcgcttccacctcacaagccccaacaatgctctgtgggttcccctccccctaccagctcactcaggcagtgacgcatgtgcactttcctcctggtggggtcaaggccgagttcttggacctgatgaggccacctggagttcctcatatcactggtgacctggccctcagctaatgatgggtgccccctcagcctggccccaggggaaatggaaattctttgcctgcctgctgctcgtgacaatcttcttgcctcctgcttataacagaaagtcctgacagtctgtggcctgcacctgggggcctgagcggccctgtttgctctgtcttccacctgttgcaggagatagtgccaagccctccacctctgccaggggctgtggccttgcctctacctgaattcgaactgttgccctactctccaaccatgattaatgggtgttgtcctggcctctgactacagcaggggccgttactatgccctcttgaagacatgaggttgtcctgtctgcctcctgaaacaggctgttttccagcattctgtctgtaagagggatggtagcctgccattcacctacccttgactataataaagctactgttccatgccctgagatgacatgggaattgttctctcggcctgacctgactgtaacatgcatggtctgctcaccagctatttaacagggatattgtcctctcctctgactctgaacgatgctacctttgctgccagacagaaacaaaagggtctctcagctgcaacggtggtgctgaggtgctgtttgcctctcaccataagctgagtgtgtgtccgcttgccccctgctcactgggcccaaaggctgcccttgaatctcttgcccagatgcaccctggagggcagaagggagggtctatcagacatcctcccctcaactttaaacctcccagtgtcaccctgggacagtaggggaagatggacctggtctggagatgtaggggacccccaggggctgagaggcaggggtctatggtggcaggaagcttggcgtgctagagggttgtggttgggctgctggggcccggttggctgcggagccctccggaggaggcaggaagtcagggtgggacgtgggcgcggggagacaggtggtggctacgacggcgaagggagctgagactgtccaggcagccaggttaggccaggaggaccatgtgaatggggccagagggctcccgggctgggcaggtaaggagcgctggtattgggggcgcaggcgccggggtgagaggcctgatagcagacggctgcagctgtgcgggcccaggctccctagggatg

SEQ ID NO: 1013 - DNA, 2300 bp, Homo sapien
cgagcactttgggaggctgaggcaggagaattgcttgaggccaggagttcgagaccagcctggccaacatggtgaaaccctgtctctactaaaaatacaaaagttagccaagcgtgatggtgcatgcctgtaatcccaactactcaggaggccgaggcaggagaattgcttgaacctgggaggtagaggttgcaggaaaaaaaaaaaaggtaatatttcagctgagccttgaaggttgagttagaattcagcagttggacaaaagagagcatgccgactgggttcggtggtgcatgcctataatcctagcatttggggaggccaaggcaggaggattgcttgagcccaggagttcgagatcagactgggcaacatagtgagacctcatctctacaaaaaaataatcagctgggcatgatggtgtgcacctttagtctcagctactggggaggttgaggtgggaagattgcttgagcccaggaggtctaaggggattgcgccactgcacttcagcctgggagaggaagggagaccctgtctcaagagagagagagaaagagagagagagagagaaagagagagagagagagaaagagagagagagagagagagagagagcgagagagcgcacgcatttcaaagcagggagaaccacaagtacaaaggcattaagtaagaaaatagcatggggtgtttgggaaaggcaagaatagttcagaacacaggctgtgtgtgtgggggtgtgtgggggtgcctgtgtgtgggtgtttgtgtgtgtgtgagtgtgggtgtgtgggggtatctatggaggggatgcctgtgtgtgtgtgtaaggtgagtgtgtggatgtgtgcatgggtgtgggtgagtgtgtggaggtgcctgtgtgtgtgtatgaatgtgtgttggggaggggagaatgtgtgtgtgtggggtgagtgcgtgtgtgtgggggtgaatgcgtgtgtgtgtgtatgtgggtgtgactgtgtgggtgtgtggacgagtgtgtgtgttcctgggtgtgggagcctgtgtgtgtagggggagtatgtatagggtgtgtgcatgaatgtgtgtgtgggtacgtgtgtgagagtgggtgcctgtgtgtggggggtgagtgtgtgtgtgggggggcacttgtggagggtgagtgtatgtgtttactgagtgtgagtgtgggtgcctgtgtgtgggagggtgagtctgtgtgtgagtgtgtgggggagtacctgtgaggggtgagtgtgtgtgtttatgtgaaagtgtgtgtgtgtggatgcctctgtggaggtgggatagggggtgcctctgtgtgtgtgtgtgagagtgtgtgtgtgtagggtgtgtatatgtatagggtgtgtgtgagtgtgtgtgtgtgagagagtgtgtgtgtggcagaatagactgcggaggtggatttcatcttgatatgaaaggtctggaatgcatggtacattaaactttgaggacagcgctttccaagcactctgaggagcagccctagagaaggaggagctgcagggactccgggggcttcaaagtgagggccccactctgcttcaggcaaaacaggcacacatttatcactttatctatggagttctgcttgatttcatcagacaaaaaatttccactgctaaaacaggcaaataaacaaaaaaaaagttatggccaacagagtcactggagggttttctgctggggagaagcaagcccgtgtttgaaggaaccctgtgagatgactgtgggctgtgtgaggggaacagcgggggcttgatggtggacttcgggagcagaagcctctttctcagcctcctcagctagacaggggaattataataggaggtgtggcgtgcacacctctccagtaggggagggtctgataagtcaggtctctcccaggcttgggaaagtgtgtgtcatctctaggaggtggtcctcccaacacagggtactggcagagggagagggagggggcagaggcaggaagtgggtaactagactaacaaaggtgcctgtggcggtttgcccatcccaggtgggagggtggggctagggctcaggggccgtgtgtgaatttacttgtagcctgagggctcagagggagcaccggtttggagctgggaccccctattttagcttttctgtggctggtgaatggggatcccaggatctcacaatctcaggtacttttggaactttccagggcaaggccccattatatctgatgttgggggagcagatcttgggggagccccttcagccccctcttccattccctcagggaccat

SEQ ID NO: 1014 - DNA, 2300 bp, Homo sapien
ttttctgttaccttataattaatgactcaaatgcagtttctgagtgagaaacacaagtcccaaacactctttaaagaggcataaagatgtatcttgttgttttcttttgtttgagacaaggcctggctctattgcccaggctggagtgtggtgacatgatcttggctcactgcaacatctgtctcctgggctcaagccatcatcccacctcagcctcctgagtagctggaactacaggagcgcgcccccacacctgggtaatttttctattttttgtagagatggggttttgccatgttgcccaggctggtctcgaactcctgagctcaagtgatccacccatcttggcctcccaaagtgctgggattacaggcgtgagccactgtgcccagcctcttgttgactgtaggaccacaagttggcggctaacttagagcaatgtttggcacacaggaagcactcattaaatattgacattattgtagttattttaatagcccagcattgcacttttaggtctttcagctttcagtgatgatcagttgataattgatgatctggtggagtggttcttaatggtagagttgggggcaattttacactcccttacaccccactaatcttccccccaacccaatggtaaagctattgcacagtacttggcaatgtctagagacaattttggttgtcacagcctggggggaaggtgctactggcatctagtgggtagaggctaaggatgctgcttaattttttttttttttgagacaagagtttcactctagttgcccaggcacagaacagcttcacagaagctgttaatgcacagaatagcttcctacaaaaaagcattacctggcccaaaatgtcattagctaccaggctgagaaacctgccctcctaggccgggcgctgtggctcacgcccgtaatctcagcatattgggaggccgaggtgggcggatcctgaggtcaggagttcgagaccacctggaccaacacggagaaacccagtctctaccaaaaatacaaaattagccgggcatggtggcacatgcttgtaatcccagctactcgggaggctgaggcaggagaaccgcttgaacacagaggcagagattgtggtgagccgagatcacaccattgcactccagcctgggcaactagagcgaaactcttgtctcaaaaaaaaaaaaaaaaaaaaaaacagggaaagaaaagaaaggaaacctgccctcctatcataggataatcccatttcctcctgtctaaagagacgcctacttagtcatcctgggtgactgcatcagggaggtagattttggagtctgaaaggctgggttctgtcactttgttacagtgcctctggtgcaaagaaagcattttaaaaaccctgtacaattaaaaaattgaatttaattactttgtgtaactttgaataattcacagaagtctgaacttctttatcctgtcctgtaaaatggaggtaaaaagcccttggccgagagctgttttgaggaaaaactgaaataacattggtaaagtgtcgcacagtacttggcacacagcagcccctcgacaaacattagctttctttccctttcttgtcggtttcttcctctccaaacccgcgtgttgcttttctttttaattatttttctgtagccctcctttgcggccacaaactcgctttctaacccaggttcagcccttttattggctgagtgaccttgtgcaagtcacttttcccctgtaggcctcggtttattctccgtaaaatcagaaagttggcctccgatctccaagcacgcttttcacgacgaagtgggactgttaagtttacagagctgctttcctcccccgggactgatggtacggtccccgggcggctccccacccatctgtcgcagaccttggtacaggcccagggggccctcggcggcctctccgggctgcccttgccccctgccgagttccgggcccgtgtctgcgcaagctgattggctggagcggtgcccgggctgcgcggctataggtgagcccaggaggggacgggcggggcgggccggaggcccgccccctcccccctgggtcggacgctgagcggagccgcgggcgggagggcggacggaccgactgacggtagggacgggaggcgagcaagatggcgcagacgcagggcacccggaggaaagtctgttactactacgacggtgagcaccgtcctcgcggcgggggcggggccaggccgggccggaccgggaacctggaggctgaggctggagcgccgatgggaggctg

SEQ ID NO: 1015 - DNA, 2300 bp, Homo sapien
cgcggccccggtccccggcgctgccccccggccgccccgagtgccgcgcggggaacaaaggcgctgctgggccacgccaagggggcgcccaggggccgcggagctggggcccggcggggagcgcactccacccgccgacccgacctcggtggcccacggtctttttttttttaagggggagccgagatgcgggagagcctggggtgggtgggggccacttacacaaagcgggaggctgggaaaataggccgtccaggtgcagagagacagcgccccggggcggcttcccgcccaatgtcgcctagagcggctcgcccgcctgcccgggatccgcacagcagatccggagcggttccgcgcggaatagagagcgcgccccgggggacgggggtgggggccacgggaccccagcgcctcctgccggtcgcgccctctgcgcgctcgctccccgcgcgcccgtgaggggcgagagggaggtgtttgacgggatcctgggtgtgggtgaggctgaagccagactttcgggttgcagtagaatcgaatcgaggaccccttcctctagaagggatcagaagcgggctgggggagggggagcccctgccctcattgctattccctctgccctgcaggagaatggccacgtgaaaagcaatggagacttatcccccaagggtgaaggggagtcgccccctgtgaacggaacagatgaggcagccggggccactggcgatgccatcgagccagcaccccctagccagggtgctgaggccaagggggaggtcccccccaaggagacccccaagaagaagaagaaattctctttcaagaagcctttcaaattgagcggcctgtccttcaagagaaatcggaaggagggtgggggtgattcttctgcctcctcacccacagaggaagagcaggagcagggggagatcggtgcctgcagcgacgagggcactgctcaggaagggaaggccgcagccacccctgagagccaggaaccccaggccaagggggcagaggctagtgcagcctcagaagaagaggcagggccccaggctacagagccatccactccctcggggccggagagtggccctacaccagccagcgctgagcagaatgagtagctaggtaggggcaggtgggtgatctctaagctgcaaaaactgtgctgtccttgtgaggtcactgcctggacctggtgccctggctgccttcctgtgcccagaaaggaaggggctattgcctcctcccagccacgttccctttcctcctctccctcctgtggattctcccatcagccatctggttctcctcttaaggccagttgaagatggtcccttacagcttcccaagttaggttagtgatgtgaaatgctcctgtccctggccctacctccttccctgtccccacccctgcataaggcagttgttggttttcttccccaattcttttccaagtaggttttgtttaccctactccccaaatccctgagccagaagtggggtgcttatactcccaaaccttgagtgtccagccttcccctgttgtttttagtctcttgtgctgtgcctagtggcacctgggctggggaggacactgccccgtctaggtttttataaatgtcttactcaagttcaaacctccagcctgtgaatcaactgtgtctcttttttgacttggtaagcaagtattaggctttggggtggggggaggtctgtaatgtgaaacaacttcttgtctttttttctcccactgttgtaaataacttttaatggccaaaccccagatttgtactttttttttttttctaactgctaaaaccattctcttccacctggttttactgtaacatttggaaaaggaataaatgtcgtccctttagtggtgctttaatgagtggtcttctgggggtagggtgagaagattggtggaaagtagtttacctcaaacctcaagggaggagttaaggcaggcaggtaagtttatggggttttcttgttcagggggttgccccaatactcatggacaccagaacggcagggaagtagagttgaaaccaacccagggacacataggaaacaagctcaggaggatatagaaatgtaccattttattacaaagaggctcacaaaaatgaaaatagtatctcaaaaaggaaactagactagcaacctccacctgcagaattaggagaagacagacagagggcaggcagtgtttcttggctcacttgaggccagtgggaaggtacgaaaacagaaccaatctaaaaatggctgatgttactttagga

SEQ ID NO: 1016 - DNA, 2300 bp, Homo sapien
gggacctggatttgctgagggatcaggctcccaggcgccccctccccagcctcctgggatgtctggtggggatacagggcatcccctggggaccaggctccctctggggctctggggacttggggtcttttaccctgatgctcttcgatgcccctcctgggatccttgggaagatttgcctctcatccccgccaggcagtgcctggggatcagaagccttaggttctgctcttaacctctgaccccaacccgtgcaagactcacacaccctccgtccctctgagcccagccagctggtgcgggcagcgcctggcagcattgtgggttccctattgtggctgagacagagagcaggtcatgacatccttcccttagtggcaagctgtggagaagtcacggtactttcagtgagctgcagtgggggcacagtgcctctccccgtcccaaagctagcccttgcctcccactctgaccaggcagccccagatctcaacagaaaattctgccaggggattccttacagcccttggcccatgttatcaaacctctccaagccttttctcaccctcagctactggtagctgctgtgtgcccttgggcatgtcactttctcttcctgaacctcagggtcccagtctgtgaaatggggcgggggtggggggcaagtgaagctgagatagctgagggtattctgtagtctcagggtgggggtggggatggaggatacaggagtgagtgcagaatgcagaagccacctcagccctccccgcccctctgtggtcagatctctggggagttcccaatttctcaggccctggggtgtctccacacttcacagcctcaggcctcccaggaggcttcaccgtaggagggaggggagggacttgctgagctggctgggacacagccttgcatttgcaacactttgcttccttccagcccccatccctttcctcctgggggctgagggctggcagccggacacagacatccggggccggccaggattctggggttcccaccagcctatccaggccagcagaaggagaggtggcagaggaccaaagctagggagtctccagcccggagcacctccgggctcccttgctctcaggcagggtgggaagctgggctgggcagctttgagggctgtcctcaaggggctgtcccttgaagggacccttggtagcatcctatccctccccttcagaaactggggtgttttgaggtttgttgagtccccagctggggttcctctgccggcctggggcaccctgatgtaggggagcagagttgtgtgtggaggtaaagaggaaggaccagagccaagtcagacaggttgtcaatgcctctgagccttggcctttcaatggggatggagatgcccttcaaggtcacaaagtcccccacgtgggactttgcagtgggtccaggctgagggcaggaggggctcaaggcgaatctgtctgtccccactcagaatgactggccaccaagggactgaaaggaggaatgagggaaaggcctcactagtccgaccagagtgaccccgaggcaaggcagagccctccgctccccggctggccatggcaggcaggcagggacgtgggtgggacctctgaccgctctccaggccggagcgggtgccgagcccagcgcaggggccctgcagcttctatgaccacatttctagagtataattcaggaccagccatctgacgagcctggtcgtgtgagcccttcgaagggttcaagcgggagactgccagcggctgcaggaccaaggcgttgggggccgctccaggctgcgggggcgcccaccggagaggtggagcggagaggatggaatgactgcccgtctccttcctccaggccccccgccccgccccgcccagctcgcgggaggactggcctcgctcctgcccacaccggactctacctgcccctgggattcgggtggggtggggggtacccgaccgccagcgtcgcctgctgcgcaagtggggcctgcgagccaaccccgcctccgcccctcgattgggcgcgcatttaaatgtccggccccgccccgagctccgggcgcttatatataggcagctcggcgggcggcgggcggcattctggcgcggagcggagcggcggcgggcgcagctagcgggtcggccgcggagcggaggtgcagctcggcttcccccggcacccctccccctcgggcgccagccccacccctccgccggccgggccgaccccgccgtactatcccctgcggcgcgagcccggggcggctccaagcgcccccc

SEQ ID NO: 1017 - DNA, 2300 bp, Homo sapien
atgtggtctcaggatgctgaggagtgtgctagactctcattgggggaccttgggtaagtctcaaaggctcagttcactcatctgtaaaataggaagttaaaccaacgtctttctttctctctcttttttttttttttttggatagagtcttgctctgttgcccaggctggagtgcagtggcatgatctcagctcactgcaacctctgcctcctgggttcaaggaattctcctgcctcagcctcccgagtggctgggattacaggtgcgtaccaccacacccagctaatttttgtatttttagtagagacggggtttcgccatgttggccaggctggtctcgaactcctgaccttgtgatccacctgcctcggtctcccaaagtgctgggattacaggcgtgagccaccgcgcctggcaagccaccatttttcaaatggcctcttccccaatctttttatgatcacttcagtcctgggagaaaccaaggctcaggatggactggggcagctccaaacccttccaataaggaaggtcccaggcacctagggccacaaagagcaagtcgcagaactttgtcgcagaacttctcgctcgagaggattaaaatgggtctggtcgggtgcctgtagtcccagctacttgggaggctgaggcaggagaattgtttgaacctgggaggcagaggttgcagtgaacagagatcatgccactgcagtccagcctgggaaacagagcgagactccatctcatagatagatagatagatagatagatagatagatagatagatagatagatgatagatagataagatagatagatagcctggtgtgggtggcctatggctgtattctatgttacttgtcggtccacctcttcctcctgttccccgcttctgtgggttgccagggtccagcacagtgatgtgaatttcaccggagaatcaccagagggttagagagatggaccagggcagggcccaagggaaaggctgcccaggaggggtcaggaccagcaagatacgagaggagtgaagtggcgtaggttgaaaggcggaagggcgggcccctaaggctgggtccaaacgaggaggctgcggaagggaaagtgttattggactgggcagagcagctggtgggcccgacggatagacatacactgccagcccggagtggaaagaacagtttgtgctgtgctttattaaaatgtgcatcattcttttattttaaaatgtgcatcattgtctcgtgctcggcgcatgcgacctcagcgtggtggcccgctgggggcctcgttcccgcccagctcccgcggagccgcagggagcaggcgcactcacgtggcgcgggcccgggggctcccgcccatggcgaggtagacgtcgatgggcacgtgcagcagcgtcaggcagtggcatccagggcagcgacgaagcggcctggggaaattgacgcgcgacaggggccgctgaggcaggggcttggcccatcctgtggggcgcacccagggagtgcacctggggtccccgggggtccggacgtggatgcggggtcctgactgctgggggcgccaagtgggacggagggcggggccgcgggacgggcggaggcgggggtggggcgcgggccttacctgaccgggttgtgctccgtcgctaccgcctccgggctgtcctgggactcgggggcggcggcaaggccacgggagtctccggcctcaatggggaatctccgaccctgcgggggctcctgggcgctcatgtccaagccccggggcgctctgcgcggggagtggcggtcaggcctctcccgggtcgccgggcgccgccgcctcgcgcccgccccctgggccgtcgctcacctcccggcggttgagaccggtcccaggctagaagcagctgccggagccctggccgcgggagaacgctccggtccaggcggagccgggcaggtctctgtggcgtgcccgggcccgggcgtcgaggagggcagcattgtgacccgggccgcggcgcgctgacctcacagagcacgttcctcccactggagaacccccaacggtgccccctgccgcccctggcactcagcgcgggccagaatcggggactggaggcctctggccatggcgcctggagacggggtcgcgcagaccccggacacccgaggggggcgcagcaggccagggcaacccgccgcgaggcggcgtccacgccgaggagccgcgcattcccggtccacacagacgcggcggagcgccctcccaggcgggactacaactcaatgcctggcacgggggcggg

SEQ ID NO: 1018 - DNA, 2300 bp, Homo sapien
ttgaaactctcatcaggcttctgcaaaagctcttcttcctgaagacagacccagcctttgtgctctcaccctccactctggtaaagctgcacctctgggggaatgaggggctgcaggaatctctggagagcctggtgcttcacgatgctgctctggtgattcttgtacctaatctggtgtgctcaccaatgagtgaaagggatcgtgggtcagggacaccgagagagtgaggtcacttccacttcaaaccttcagtgagggggtgggatggagagaatgctgaatcttttttttgacgggatggggtttttctctttgtaattatttctttagtttaattaaccttttggttgtttgtgcaatattatatattttaaattataatgcatctccccagagtattttgtagctgggaaaagaaaaaaggaaaaaaagaaaaaaagattctaacagctgttagttttataattaaaaaagaaagaaaaaagaactttgtcctgaaccttttacagacttgccgttaacagcattaaagtgattcacccgaagctgaaaggtgtctgggggtctgtttttgtccccttggcagctgcactgggccagggcaggactggcttcccacttggagccagagacagggtagggggatagcctaggtccagaggacgtaccttgtcctcatcccagattcagctttgcctttgggatgagaaagggtcagggctcgcaacaggcctctcactgggacaaggagtcgggaggccatctctgcactcccagtgcctctgctttcctttggaaaggaagttgcaacaagaatggcttcagttgctcttggtcatttttatcctctcttccccctgtttgtatatgattcttgggtctattttaattaactttagtatgaaaatcacttgtcatgccaggcgcagtggctcatgcctgtaatcccaacattttgggaggccaaggtgggtggatcactaaggtcaggagttccagaccagcctggccaacatggtgaaaccccatctctactaaaaatacagaaatagccaggcgtggtgggaggtgcctgtaatcccagctactggggaggctgaggcaggagaatcgcttgaacctgggaagcagagttgcagtgaactggaatcgtgccactgcattccagcctgggcgacagagcaagactcttaaaaaaaaaaaaggaagtctgaatgaggccctttgattccatgaagatctctaaaaggaaagagtagtagtaaggctggggtagatgtaggtaagttttaggataagtaaacttaaagcgtaaaatatatatcaccattttagaagcgggtttttgggtttgctttctccccctactttattggagagcacttgccattgcttttatcaagtgcttgctagccatggatgccaactaacttcttcaattgaaggccggaggatcatatcgggttccaggagcctcttgagcaggtcctggcaatcggccgagatgctcagatgagtggggaaggacacccccttctgctgctgccacagcatcttggggatgtctgtgtcgtcaaaaggtaggctggcacagagcatgacatacaggaccacacccatgctccagacatcaccttttttgctatcgtggggaatgccctgcagcacctcgggggcagcataggctgtactgccgcagaaggtctggctcagctcccggtgtgacttgggcaacaccttggcaaagccaaagtcagtcagcttcaggttgaagccctgcaacaaggcgttctcacatttgaggtcccggtgggccacaccacagccatggcagtagcggatggcctcaaccatctgacggaagagggccttggcccggctttcaggcagtggccccccattcagcacgcagtcaaagacatcccctccctcagcgagctccatcaccaggcagattttcccgtcggcagactccagcatctcatacacctggatgatgttcttgtggtccagggtacggacgatttggagctcccgagggaggaatctctggataaactctgaggaagtaaggggaggagagatgggctggcagatcagaaaggcccacctcctcacacctgtctcctgccttccaacttctgcccaccttgtctgggtcttatttcttggctttcttaatggtcttaagtgtgtctagctgcttggacattgcaaagaatgttcacttctattatttttgtcgttagtatatcattcaaaagaagcactccccaccagccttgtggactgttgtg

SEQ ID NO: 1019 - DNA, 2300 bp, Homo sapien
cctgaggactcctgctgggaagtcccaagggatagttctagcccttctgcctgtgtagacagaagctaaaccaccagtctctctcggaggaagctgagacaacatactctgtccatacataagcaggcagggagggccatgccacctacccttggctaaacagggacagtgaacacattttggttcctatcccagtgggtaagaggcacttatctctgggaaatttgcctctcttgggactctccccctcccaggcattttccattcctggaaaggctcctttggggttcagaatccagagaccaaaccctgacccacctccttcctttcctccagcccacgctggtctgtccccatgccttcccagggcttcttcatgtcggatgcacccaagtccttagcccagctgtgccacctgcaggagttcgctcttgcgtttcttcccctccccaagaagggagggggctacttcaggcccttctgtgtgttgcctggcaggataccttgtccaaccagctacccacctcaactcccctgtagtttaggacacaaaacagctaccagcggtacagagcggtgatcaaagccgagtacttacaactctggtaagcctagcttctccgcctcagcccttctgcttctggaagggctatcctgggggtgaacttgaaactctcatcaggcttctgcaaaagctcttcttcctgaagacagacccagcctttgtgctctcaccctccactctggtaaagctgcacctctgggggaatgaggggctgcaggaatctctggagagcctggtgcttcacgatgctgctctggtgattcttgtacctaatctggtgtgctcaccaatgagtgaaagggatcgtgggtcagggacaccgagagagtgaggtcacttccacttcaaaccttcagtgagggggtgggatggagagaatgctgaatcttttttttgacgggatggggtttttctctttgtaattatttctttagtttaattaaccttttggttgtttgtgcaatattatatattttaaattataatgcatctccccagagtattttgtagctgggaaaagaaaaaaggaaaaaaagaaaaaaagattctaacagctgttagttttataattaaaaaagaaagaaaaaagaactttgtcctgaaccttttacagacttgccgttaacagcattaaagtgattcacccgaagctgaaaggtgtctgggggtctgtttttgtccccttggcagctgcactgggccagggcaggactggcttcccacttggagccagagacagggtagggggatagcctaggtccagaggacgtaccttgtcctcatcccagattcagctttgcctttgggatgagaaagggtcagggctcgcaacaggcctctcactgggacaaggagtcgggaggccatctctgcactcccagtgcctctgctttcctttggaaaggaagttgcaacaagaatggcttcagttgctcttggtcatttttatcctctcttccccctgtttgtatatgattcttgggtctattttaattaactttagtatgaaaatcacttgtcatgccaggcgcagtggctcatgcctgtaatcccaacattttgggaggccaaggtgggtggatcactaaggtcaggagttccagaccagcctggccaacatggtgaaaccccatctctactaaaaatacagaaatagccaggcgtggtgggaggtgcctgtaatcccagctactggggaggctgaggcaggagaatcgcttgaacctgggaagcagagttgcagtgaactggaatcgtgccactgcattccagcctgggcgacagagcaagactcttaaaaaaaaaaaaggaagtctgaatgaggccctttgattccatgaagatctctaaaaggaaagagtagtagtaaggctggggtagatgtaggtaagttttaggataagtaaacttaaagcgtaaaatatatatcaccattttagaagcgggtttttgggtttgctttctccccctactttattggagagcacttgccattgcttttatcaagtgcttgctagccatggatgccaactaacttcttcaattgaaggccggaggatcatatcgggttccaggagcctcttgagcaggtcctggcaatcggccgagatgctcagatgagtggggaaggacacccccttctgctgctgccacagcatcttggggatgtctgtgtcgtcaaaaggtaggctggcacagagcatgacatacaggaccacacccatgctccagacat

SEQ ID NO: 1020 - DNA, 2300 bp, Homo sapien
ggttgtcttatggctggccaggttacatttccctcttgcccctccctttctctctctacagaggagctcatgggcatttcacccatatctccaaaagaggcaaaggttcctgtggccaaaatttctacattccctgaaggagaacctggcccccagagcccctgtgaagagaatctggtgacttcagttgagcccccagcagaggtgactccatcagagagcagtgagagcatctccctcgtgacacagatcgccaacccggccactgcacctgaggcacgagtgctacccaaggacctgtcccaaaagctgctagaggcatccttggaggaacagggcctggctgtggatgtgggtgagactggaccctcaccccctattcactccaagcccctaacgcctgctggccacaccggcggcccagagcccaggcctccagccagagtagagactctgagggaggaggcgcccacagacttacgggtgtttgagctgaactcggatagtgggaagtctacaccctccaacaatggaaagaaaggtaggtctggaggtccaagcccagagggttgtgtgcggtcagggccacctcctgaggcagatttgtctccttgtcccttgttaggatactatgagcagattttttttcgtttctgataatgatgacagctgctatatattgactatttgctaacatatttcattctaagttgcacaacatctctgaaataagaatgcatcttcaattgttggcatcttaagagtcaacaaaacaagtttgatgccagatcccatgctaaatatgttatatggcacctaatttctcagtattattgtcctcattttacaaatgaaaaaaagtgaggcccaaaaatattaggtaacttgcccaagttcacatggccaggaggcccagattcagacccagggctgtctgactccaagcccatgcccttaactagcacactgtgccaatttctatctttttggacaatttaaccttaccctggcttgggaatcccagtgacattgatgttaagggtcttcttcctgtgtaaccttaggaaagtcattcagcttccccaagccttcgttattatgaaatatataaacaaaactcatacctacagtttaaagaagaaataatgaacacccatgaatttacagcgacccagcttgagtaatggagcttcagtttcttatctgtgtaatggaattttagactggagactctgagtttatgtcaaagagcaacctctgtaactgcaggaattaaaggacaaggatagccttggtgtcagtcagcctttttgccacatccaaaataccacttcagggacggctgattatcactaagaaccccccctccagtccccccaccacctgtacacttcacacacacatcctcctgtctttgctaacactcagcaccagccacagccacaaagcttgcccagcaggtaaggcctggcctgctggtgtagtaagggactggtttgccacagtggatgggaaatggaccccaccccacccctaacctattccctgatggaaaccatagagtttccagtctccaacccagtgtctcccttctgactttgatcaatgaggtcatccattgggctcctacctggtttttattgttttttttttgaggcggagtctcactgtcgcctaggctggagtgcagtggcgcgatctcggctcactgcaacctccgcctctcaggttcgcgccattctcctgcctcagcctcccgagtagctgggactacaggcgcatgctatcatgcccggctaattttttgtatttttagtagagatggggtttcactgtgttagccaggatggtctcgatctcctgaccttgtgatctgcctgcctcggcctcccaaagtgctgtgattacaggcgtgagccaccgtgcccggcctgagctcctacctgttctttatgagacactgagtgggagaggggcagaagccgcagcctttgtgaggaagcataaagcagggtgggccagtctggtactggaggagttcagagaaagaaggaatctctggacatctgcggtgcttcactgaggagacaagcctcgtataggagagttggtgagtttggggcaggtgcaggggagtggtagtctaagctgaggaggcctacaaagactagctagcaaagggcatggggcatgtttaaggcgcggtgacctaaacccactcttctgtattctctcccaggagaaggaggtacaagaagggtgagtgggttgactcagaaatagaacttcagaatttaaaa

SEQ ID NO: 1021 - DNA, 2300 bp, Homo sapien
cgacagagtaagatcctgtcttaaaaataaaataaaatgggccaggagcagtggctcacgcctgtactcccagcactttcagaggccgaggtgggtggatcacctgaggccaggagttcaagaccagcccggccaacatggtgaaaccccatctctactaaaaatacaaaattagctgggtgtggtggtgggtgcctgtaatcccagctattctggacgctgaggcaggagagtcatttgaacccaggaggcagaggttgcagtgagccaagatcatgccactgcactccagcctgggcaatagagtgagactccatcttaaaaaataataataaataaaatcatgagactttatgagaatatctggggaatgactataaacatcaaaaaggaggaggacaccaagggctgagccttctcccagggaatatcccattccagcaacaagaaggcggtgagaaaacagcaaagaatactgagatgccaatgaacggggaagaaagtcaagagggcatgatgtcctggaagccaaatgaagaaagtggtcaactgtgtcaaataagatgcggatgtaaaacaagaactgaaaagtggccattcctcttggcgaccttaagaaagttatgtcaggctgggtgcagtggttcatgcctgtaatcccagcactttgggaggctgaggagggcagatcacctgaagtcaggagttcgagacaagcctggccaacatagtgaaaccccatctctactaaacatacaaaaattagtcgggcatggtggtgcacaactgtaatcccagatactcgggaggctgaggcaggagaatcgcttgaacccgggaggcagaggttgcagcgagctgagattgcaccactacactccagcccgggcaacagagcaagactctgactcaaaataaataaataaataaaatagatgtttccgtcttccacagggaggaccaaaaataaataaataaataaaatagatgtgtccgtcttccacagggaggacgtgggatggtggcggagctggctgcagcagagctacaaataaatataaaataaataaaattaaataaaattaaataaataaaagaaagttatttcaaaggattgtctgagaggcaaaaacctaactgcagtgagttcaagagagaatgggaggagaggggagttgcagactgtgagtaggcaacgcttttgctgtaaaggggagtagggaaacggtgagggatatagagagggctggtttttgtttgcctttgagatgggagaaacagcagtacggatgatgacaaggataaatgcagtcatcagagggaaaagagatgaaggggggattactagatctatgtccttaagcaaacaagaggcgatgggatctaccgcacacgtggaggggctgaccttaattaaagtccaaagtatgtgggctgtggaatctcccttccaatcgcagtagaactcaatccaggcggtctccggatttctccagaccacctccacctggcgttgttctgagctgggccaccgaaagttgagattactgaatgtgtgtgtctcccattaacccgtaagccctccaaaggctgcatctaagtcgcctctgaattattcacattcctccaaactctgggccacagccccgcaatatgggcttattgaattagcccaaagagacacaaagcagcctctacgcagctggtttcacaaaggggggcggtcctaaccctgcgctctgggatcctgacgttcgagctatctctcctcctcccctctgctcccagctctccgcagtccagcttgtcggctgatcatcgtccatagaggccaccgtacccgacgtttgcggacagtgacaaagagtcaagcttggtggagcctgaggacaggactgaatgacgattgaactgagagttcaggggcggagtttgagggcgaactcgggacagagactggatagagttcagggaggcgggacctaatgatggcgcagggaggggattgggctgagggcggtgccggcgcgaggattgggccgagcgcctcgggggcggtccttgagggggcggtgccgtgtcggaagtcaaaggtcagtaaatagtggtgatgtcatgcaggcaagatggcggaagggtgagcttgtcgttttgctcctaggcgttggggcctgaattctcccagggttggggtgctgggcgagagtcccggtggggaacgtgagatcagcgggggcgtggactgatctgaaagggcagagtggagtcgcattgtgagggggtgggcaagcggtctgcga

SEQ ID NO: 1022 - DNA, 2300 bp, Homo sapien
tgaaaatgcagagctccttgttcaaaaactactaagaattttaagagggcaatggcagagcattaaaccaggcatcagccctttccttttttttaatttttaaaatatttatttagattttctttttgttagtaattaaatctttcttcttcttcttcttctcctcctcctccttctccttcctctccttcctcttcctcttcttcttcttccctcttccctctctcctcctcctcgtcctcctcctccttgaaacagtgcagtggcacaatctcagctcactgcaacctccactttccatgttcaagtgattctcatgcctcagcctcccgagtagctgggattacaggtatgtgtcaccatgcccagctaatttttgtatttttagtagacactgggttttgccatgttggccaggctggtctcaagtgatccgcccgcctcagcctcccaaagtgctgggattacaggtgtaagccaccgcacctggctctttttttgttttgttttgttaagtataaaacctcacctggaagcaccagccctttctgagtgtgcgggcctgtgccactgcgtgggttgcacgtccattaagctggtctacctgccatccacttcctcaacccaatggcattctcctgtttcttagatatgtaccaaccggttttctgttttatcttagcatggctcactactcctcattagggtctctcagcgaagggggtagccttttttttttttttttttttttttgagacagagtcttgctctgctgcccaggctggagtgcagtggccagatctccactcactgcaatctctttggttcaagcattctcctgcctcagcctcccaagtagctgggattactggcccacgcccggctaatttttgtatttttagtagagatggggtttcaccatgttggccaggctggtctcggactcctgacctcaggtgatccacccgccaccactccagcctgggcaacagagtctgagactccgtctcaaaaaaaaaaaaaaaaaaaaaaaaaaagtcatactggcatagagtgaacccctaatccaatatgactggtatccttataaaaatactttttttttggagacggagtctctctctgtcgccccaggctggagtgcagtggcgcgatctcgactcactgcaaccaaaaggagacattttgacatggagacatatacagggaatatgccctgtgaacatgaagatggccatatgcaagcccaggagagaagcctggaagagaccgtttcctcacagcgctcagaaggaaagaaccctgccaacatcttgctttcagatgcccccaggattgtcagacaataagatctgttattgacgccaccgggttggtgatacttaggtacagcagccctagcaaacgaatacacccccatgagaactaagctccctgagagcggtaagctgccttgtcttgctcacagctgacaagaacacgcctgtacggtcacttagcacctagtactgccatttaaccgtttcactagtatgtatgaaccggagagcctgtcaagggaagagctgaatcttttatcttttgtaacgactacccagtgaaagaaaccgcgggtatgcaataaaaacctgttgaatcgattaaaccatttcccttatttccagatttttgcggaaagcgccagtaggtgaaatatgtgcggactgatgagtcaaagctcttattccctggactgcattaatacccacgacgtgcttttcgctctccagacaaagagaccggtacttggcaggtccctcaagtgggactcaaaagaccgaaccgagctgcagcctttcgctagcactggtcctcgccccttttggcatcttggtacttgtagttttgtccactctatctttacccgaaaagccagcgctgagaccacaactcccatcaccctgcgagcaccagcgccttcagagcgcatcctccgaggggcaccagcgccattgaccaccctgctggccgaagggcccgccttcccgaggccaggcgctcccgcgattggccagccgccccgcctctcatcggagggcgccaggtgaatgaaaggggggcgtgtcggtgcgcggtgctccgtggctgcgctgctggaacccgctggaaggtgagcgcgaagaagcgggttggcgctgccgctttcgttggtttggggaggattcctagcacccgggaggctggctggagattggggttagcgggcagggttgcccccactcagtcatcctccttcggaccgcttggccctggcaactcct

SEQ ID NO: 1023 - DNA, 2300 bp, Homo sapien
ggtgaattttttgctcaccactgcattccaagagcctagagcaaaaactttacccttagcaggcactgttaaaattggaatgggaccaggtgcggtagctcatgcctgtaatcccagcactttgggaggccaatgaggctggatcacgaagtcaggagttcaagaccagcctggcaacctggtgaaaccctgtccctactaaaaatacaaaaattagccaggcgtggtggcgggcacctgtaatcccagctactctggaggctgaggcagagaattgcttgaacctgggaggcggaggttgcagtgagccgagattgcatcattgcactccagcctgggtgacagagcaagactccgtctccaaaaaaaaaaaaaaaaaaaaaaaaaaaaaggaatggattatcttcctcaagatttgaactgaataggtggaaacagggatgggggttgggtggggtgggagacagagtttaagagactagcactggttaatggtggagctctagcatacagaaacgtgctcccaaagctaggagaatgaaggtgagggacaaaactctcattacctcttccttgcaacaaagaggttatttttgtttgttgtttttgtttttgtttttgaaatggagtcttgctccgtcacccaggctggagtgcagtggcacgatcttggctcactgcaaactccacctcctgtgttcaagccattctcctggttcagctgccccagtagctgggattacaggcgcgcaccaccatgcccagctaatttttgtattttaagtagagatggggtttcaccatgttggccaggctggtctcaacctcctgacctcgtgatccgcccacctcggcctcccaaagtgctgagattataggtgtgagccaccacacccggcctcaacaaagagtttatcaccaacctgatgtgctctcttgaggaatatgtttgtggaactcttttgcatgttttaattaactaaggctaaaataaaacctttggctaaaaccatgtccaggtctttctgggggaattctcaatgggggcgctagcagagtaatctgagtacatccaacacaccagacacctaatggttttcaaatatgtttctacttacctgttcagaaggtgaggaaatgcaactaaatagcaaagcacctctgcagtgacacagaagtgacattgagacaattgtgaatatcttgtatcctcaaaatgcatagctaattattcctgaaatcaaagttacaaactgtccaatatgaatgattttgaacaggagaggaatccattaaaagctaaacgcaagttttgataatttgaaccttttccctccagttttactataacacagtacttttcagtacctgaccccagcataaggaactagaaaactaatttatagaagtaatgcttctacagtaacagtgaaaatccattgatttactattttagcaaatgtataacctgatatctgtactctaaatattagagacgtaaatttgtcagaggaagcttggtgtacgatgaatgcttgcattggaaaagacgcaacttgctatttttactaattttatatttctctggacttaactaagaattatgttctcttatctcagcctctctgggttttcctattcaaatgaaatgcttctgacctgtacaggtttagaaaaggttatcctcaactaaaataactgcttcagtacaagggaaaattctgtggaaatcttttgcatttgacgttgctaaacttaagtacaataatgtcacatgtacttatacagtaattgtgggcacgcctaagtccctccctctttcctaaaccaaatccccagatcctagaaatccagcccttctgccctccggaggcgcctttcccaacgtaaagtacaattttaaatttcagctcctgactaaaatcatgatccgcagtcaactgctagagaatctgggcaccccggtgtctctggagcgtgcagcgagtgtgggcaagggcagggggagtgggcgaagctgctggttggtgcctgaaatctgtgcgttgcccctttaattgtgtccccagccctcgggcgtttctgtccaacgcccacgtcagcaaataccttttgtttctctcacgttggggctacttgttttagggcgcaaaggaacggcctcgaaagggggtccttccccagccgagaaccaggaatcttccctcggcccgcgcgcgcgaccggccggtgcgccgcggcccgcggtaagtggctgcacgcggcgccggcggagggcgggcgggcgtcggggctgcccg

SEQ ID NO: 1024 - DNA, 2300 bp, Homo sapien
tagagacagggtcttgctatgttgaacaggctggtctcacactcctgggctcaagctgtcctcctgcctctgactcccaaagtgctgggattataggcgtgagctaccaccctgggctggagtctttgtttaatgtctgataacacttttagactgaaaacaacatgaaggcaaaaatcaaatgtgttggttcagcatatagcagaaggcctgatttattgaagatgcttggctggatgcagtggctcatgcctgtaatcctagcattttgggaggctgaggccagaggatcgcttgagcctaggagttcaagaccagcctgggcaacatagacctcatctctatatttaaaaaatgaaagaagatgctcaataaattttgctaataaaacaagtaattttctaaaatctaataacggtctagttgtttttttgttttttgtttgtttgtttgtttgttttttcagacagggtctcactctgtcgccaggctggagtgcatggcgcaacctcggctcactgcaacctctacctcccaggatcaagcgattctcctgcctcagctcccgagcagctgggactacaggcacgcaccaccatgcccagctaatttttgtatttttagtagagacggggtttcaccatgttggccaggatggtctccatctcttgaccttgtgatctgcccgccttggcctcccaaagtgctgggattataggcgtgagccaccacgcctggctgataacagtctagtattaagtgatatgttgaaacctattatcttctgtgtcttggcgattatattctccaacaagaaagtgttcttaatggaataaaagaggcttctgattattattttagttgactcaccttagaaaaggattgttcattttgggaggctgaggcaggaggattgcttgagcccaggagttggagaccagctcgggtacgtggtgagaccttatctctattaaaaacaaaaaaacaaaaaaaaacaggcatggtggtgcacacctgtagtcccagctacttgggaggctgaggtaggaggatcacttgaaaccaggagttcaaggttgcagtgagctttttttgtttgtttgtttttggggtgtttgttttttgagatagagtcttgctctgtggcccaggctggagtgcagtggtgtgatcttggctcactgcaacctccacctcccaggttcaagcgatttgtctgcctcagcctcctgagtagctgggattacaggcacccgccaccacgcccagctaatttttgtatttttggtagagacagggtttcgccatgttgtccaggctggcctcgaactcctgacctcaggtgatctcccccgcattggcctcccaaagtgctgggattacaggagtgagccactgtgcccagccacagtgagctttgatcacaccactgcactgcagcctgggccacagagcaagatcctgtctcaaaacaaaataaaataattgtaatgtaggttttggtaaccacatgtgtcttttcctcttcagaatggagatctcctctcatcagtctcacctcctgcagcaactgaacgagcagcgcaggcaagatgtattttgtgactgcagtattctagttgaagggaaggtcttcaaagcacatcgaaatgtattattcgctagtagcggctactttaaaatgcttctttctcagaattcaaaggagacgagtcagccaaccacagctacatttcaggctttctcccctgacacttttacagttatcttggacttcgtatattctggcaaactgtctcttactggtcagaatgtcatagaagtgatgtcggctgctagcttccttcagatgactgatgtcataagtgtatgtaagacttttattaaatcttccttagacattagtgagaaagaaaaagatcgctatttcagtctctcagataaagatgccaattctaatggtgtagaacgttcctctttttatagtggtggctggcaagaaggaagcagttctccacgttctcacctaagcccagagcaaggaacaggtataataagtggaaaatcttggaataagtataattatcatccagcctcccagaagaatactcaacaacccttggccaagcatgaaccaaggaaagagtccattaaaaagaccaaacatttgagattgtcacagccttctgaagttactcattataagtcaagcaaacgagaagtacgaacatctgattcttccagccatgtttcccagtctgaagaacaagcacagattgatgctgaaatggactctactc

SEQ ID NO: 1025 - DNA, 2300 bp, Homo sapien
tcatgcgcagctaatttttgtatttttagtagagacggggtttcaccatgttggccaggctggtctggaactcctgacctcaggtgatccacccacgtcagtctcgcaaagtgctgggattataagtgtgagccaccgcaaacggcctataatattttaaaattgtttttaagtgagagaaggggatatgctaggaggtatgccagctccagaaagcacattgcctagaatactatggtaaataagtagattttacagagaggacaatgagaaattaatgaaagattttaagcagataaataaaagtcagatttgtgctccccaaaccacagctacctttagggatgacagcttaacgtttaatatagaatttaagagacaaagataggttatgtgatttgcctaaagtcactaagcgaataaatggcaaaaccagctgggcactgcagcgcgggctatgatcgctccattgcactccagcctggacgacagagcgagaccccatctctaaaaacacacacacacacacacacacacacacacacacatttttttttttttttgagacagagtttcgctcgttgcccaggctggagtgcaatggggcgatctcggctcaccgcaacctccgcctcccgggttcaagcgattctcctgcctcagtctcccgagtagctgggattacagacatgctccaccacgcccagctaattttgtatttttagtagagacggggtttttccatgttggtcaggctgatctcgaacttccgacctcaggtgatccgcccgcctcggcctcccaaagtgctgggatcacaggcctcagccaccgagcccggcctaaaataatcatttttaaaaatcacaatcataaatggcaaaaccaggttttttgctaatatgatcgaggtgaaacatcaagttagaaatcccctaattagctttccgagtcctctaacctcgcacactctaatctcaccgttgggaaatacatgggggtaacaaccctgcaaacgcctgaaaatatggttatctttagaatttacgaagataaatgtgattaggcacatgtggaagaagttcaagagactgtaaatgagggaggccaggtttcgcgactattaaaccaggtggctttttccttcagcatccccaggagaagtacgaacgcgactacaacagccggcacaaatgggatcatgcctgaagtacccatggggcacagtagaaagagcagcaggaagccgcgggtaaggagaggggatgcctgtgtgcttacatgtaaagagagaagtaagccacctactcacactcgtacttcctattgactggcggatacttggccttgatcgccttctgttcttcagtcaaattgtaatctctaacatcttcctcttcctgcgccatgactgcaggattagacactctacttccgcccttcatccaccggacttcggcccggagttactacttccgctctagactccgccccttggcgcacacccttaaaggaccacactcctttctcggagttggctgttgacctactttagtccctaccctgccgcttggatcgcatatttaaaaagccaaaaccccatcttctgcgattccttcattactagttctttccaaagactaaggaaaaacgttgaagggcaccttgaatgaaacccgtctgggtctgactggcgaggttctttcccccgcttcacccccaaaattgataactagacccgaaggcattctagatttttcatctcagtactctgaaagggtcgtaagcttaatagccttcaagaaaatggctgccctcttgccgcgggagtgtgcggaccaaacctctctcacgtgaccctgaccgggcgcagtcccgtcaacgccggcgcgcgcaatcgctggaagtcggctcggggaggcgtggggggaggggcggagcgcgcgcctcggtccccgcggaaagctactccgcgcgtctggattggtcgcgaacgcggcttccccgcccatcccgccattaggagcgctcccattggctgatgttggcgcgaaggtgcgcgagtcagccctcgcgctgggggcgcaggaaacaatagaggccgcgcgcacagagcgagctcttgcagcctccccgcccctcccgcaacgctcgaccccaggattcccccggctcgcctgcccgccatggccgacaaggaaggtgagggtgccggggccgacccaggagggcagtgggtgcctgggctgagccgcggcctcgacatggcctaacagtgagggcaggcccgagtttgccga

SEQ ID NO: 1026 - DNA, 2300 bp, Homo sapien
ctgtaatcccagctacttgggagggcttaggcaggagaatcgctcgaatctgggaggcagaggttgcagtgagtcgagctcgcgccactgcactccagcctggacaacagagtgagacaccgtctcaaaaagaaaaacaaaaaatttttgttgtaaggactagactcattgtaatacttttttctttttttgtgtggggggcagtagagacgagggtattcccagggctggtctccaactcctggcctcaagtaagtctcctgcctgggcctcccaaagtgctcggattccaagtgtgagccactgctcctggccataatactttttgaaagttgacaagttttgtactattatttggtacagccactattattacaggtattatcatcagctacagctatttaattcagtattgagaaaaaaacgccaatatgttttctcttgtcaggtaagttacaaaatcattttgttattttgccttactttgtggcctagaaaaaatgtcaccaagaggttttgatcacatgccttctccgggtgactgaagagcggaaaaaagaaaatcaatatgagaaatctacactgaaaatacatcaaaataacgttcgggagagtcatgtcacctggttacatctggaagccactgggcagttaggctgggccactccagagcatgggtcatcaccaaatcataaagaaaaggggtgttctttttccatattttgtattcctcgttgatcactcgttcttccactgcgtcgtcgaaggctgctaaaatttttaaaaacaaatttaagttagcaaacaaacggaaaccgagtaatcctctgcaaagccacctgcatgactcctacagcctaaccatgaaatggaggtgatttgtctaaatccccacggcagaggcatccacactctccactttcgcggcgccgaaactcctcgggccatccccgccaaacactccgttacccgttccaggccaaggggccagccaggccttcggagcacgctcgtgcgcgccgaaactcacaagcccgacgaggaggcccgagctccgagccttgtgggtaggaagcggtgtccccacgctcgggacagaggccgagaaaccgatatcggaggcaggaagagaaacaaacactggccgggggccccaccgctggcttcgccagctgcgaccgaaatcggtcccagggaactggcgagccgttagcacgccccgcggggagttccctcttcacgccttcagtaccggggactgcactcggcaaactcgggcctgccctcactgttaggccatgtcgaggccgcggctcagcccaggcacccactgccctcctgggtcggccccggcaccctcaccttccttgtcggccatggcgggcaggcgagccgggggaatcctggggtcgagcgttgcgggaggggcggggaggctgcaagagctcgctctgtgcgcgcggcctctattgtttcctgcgcccccagcgcgagggctgactcgcgcaccttcgcgccaacatcagccaatgggagcgctcctaatggcgggatgggcggggaagccgcgttcgcgaccaatccagacgcgcggagtagctttccgcggggaccgaggcgcgcgctccgcccctccccccacgcctccccgagccgacttccagcgattgcgcgcgccggcgttgacgggactgcgcccggtcagggtcacgtgagagaggtttggtccgcacactcccgcggcaagagggcagccattttcttgaaggctattaagcttacgaccctttcagagtactgagatgaaaaatctagaatgccttcgggtctagttatcaattttgggggtgaagcgggggaaagaacctcgccagtcagacccagacgggtttcattcaaggtgcccttcaacgtttttccttagtctttggaaagaactagtaatgaaggaatcgcagaagatggggttttggctttttaaatatgcgatccaagcggcagggtagggactaaagtaggtcaacagccaactccgagaaaggagtgtggtcctttaagggtgtgcgccaaggggcggagtctagagcggaagtagtaactccgggccgaagtccggtggatgaagggcggaagtagagtgtctaatcctgcagtcatggcgcaggaagaggaagatgttagagattacaatttgactgaagaacagaaggcgatcaaggccaagtatccgccagtcaataggaagtacgagtgtgagtaggtggcttacttctctctttacatgtaagcacacaggcatc

SEQ ID NO: 1027 - DNA, 2300 bp, Homo sapien
gtgttctttttctggtgtttacccagatccgtttcccccctttaaaaagaaagaaaaaccacggttgtagttctgtaacactgtcctctccttcattctttttctggttcttgtctaaccttctacatacaggtaattccaattttctgttcatatctctcttcatttcttttcagtgtaatgtagaagctctcagagctttgcctgtgacatctgtgcagaagaattcctattgatatctttagacctcacttctccagagcttttcctgatttttcttctgcctgcccgtgtcttccctggtatatcttactggcttccccagtttgacatgttgtaaatggaattattccttacgtgaaggccttaccccaactttctctcctgttgttcctatttcttttcatcataattggctttagtttgacattttctctttctccattttataggcagtcaatttataaaccccaatgaattctggttgtgtagcatctttcccatctaggccaggggttctcaaaattttatatgcatcataatcagctggaggtactgtgaaacagttagttgtgccccaccttctagagtttctgattcaatgggtctggagtagatgtgagaatttgcgtttctaacaagttcccagatgatgtggatgcccttgacccagtatggagtacagaatgccttaagacggcattcagaacactaaatagtcagttttaatcggccttctctcccactgtgctttcccatatcagaagtcagatttggacttcagcatacttgttacttagtagctgtgtgatcttaggcaaattgtttaattttctttcttttatttatttttttcttttttgagacaggaagtagtctttctctgtcacccaggctggagtgcagtaacacgatctctgctcactgcagcctccgcctttcgggttcaagcgattcttgtgcctcagcctcccaagtagctgggattagccagccgccggttttttttgttttgtttgttttttgagacagagtcttgctctttcgcccaggctggagtgcagtggcaccgtcttggctcactgcaacctctgcctcctgggttcaagcagttctcctgtcgcagcctcctgagtagctaggactacaggcaccgccaccacacccggctaatttttgtatttttagtagagaccgggtttcatcatgttggtcaggctggtctcgaattcctgacctcaattaatccaccctcttcggcctcccaaagtgctgggattacaggtgtgagccaccatgcctggcccagctgcaggttttttgaggtcaggaatcatgtcttaattgtctttgtacttccatcgcgtttggagcgatgtgtccattgataggcggttagtaaatgtttgaaaaattggtttatgttatttactcttctttcccttttttcattcttttcaatttctttgcaccctttccccttctttcctttttaatgaaagttttagtaagcaaaattattagcatacccaacaatggtttgctttccctccaacctgttggtagtgagtgagtagttaattcacattttattccataaaacgttttactttttctccagagtaattaagtagaaaatatggctcttggccaggcacggtggctcttgcctgtaatctctgcacgttgggaggctgaggtgggtggataatttgaggccaggcgttcgagaccagcctggccaacatggtgaaatcccgtctctactaaaaatacgaaaatcagccaggcatggtggcaggttcttgtagtcccagctactcgggaggctgaggcatgagaatcgcttgaatccgagagccagaggttgcagtgagccaagatcgcaccactccattctagcctgggcgaaagagtgagactctatttataaaaaaagaaagaaagaaaagacccttaatgactttttcccctctcttaaaacctggttgtattagtgactttgacatacatgtatattgttgacttcgccgtctcctgatgttactaatttgaacagtgactatatattgccgttacagaccagaagggaaagatttcagcattcatcgacttgtcctggggacacacacatcggatgaacaaaaccatcttgttatagccagtgtgcagctccctaatgatgatgctcagtttgatgcgtcacactacgacagtgagaaaggaggtaggaatcttaaaggtgaaagaagtaaagatgtgtgggtcatatctgttatgtgcactttgataaagtaaac

SEQ ID NO: 1028 - DNA, 2300 bp, Homo sapien
ctcgaaaatcttgacacctgactttccaggatgcacattttcatacgtagaccagtttcctcttggtttcttcagttaagtcaaaacaacacgttcctctttccccatatattcatatatttttgctcgttagtgtatttcttgagctgttttcatgttgtttatttcctgtctgtgaaatggtgtttttttttttgttgttggtttttttttttttttttttaacttgggaccaccaagttgtaaagatgtatgtttttacctgacagttataccacaggtagactgtcaagttgagaagagtgaatcaataacttgtatttgttttaaaaattaaattaatccttgataagagttgctttttttttttaggagttagtccttgaccactagtttgatgccatctccattttgggtgacctgtttcaccagcaggcctgttactctccatgactaactgtgtaagtgcttaaaatggaataaattgcttttctacataaccccatgctgatgggttttatttagtataaaacatccatcaaacaccagtctctggcttctagaagagtccttcagatgacagttgttgtccatggtctttgactatcaagagcagaattaaatgtaatagtcccagagctgtagaaaagaactttactccttcccagggaaagtgaaagacataaaacactgaatcagaggtggcacagattagtctttgataaggtaacgtttctttgaagtctatctgtagagaactacatggacttccaagagtgtcaaaggcagtgtggtagagagaatttaaggcaagatttaaatttggaaaaggtgcttgaaccttttctcagaggttttatttccccagtatgtttttcactggggcctttacttaggttagaaataataggctttgaaggcctctatcaccagatgcaataaccagataaaattcctgttttttcccaatcgcttagttttttgttgttgttgttttttaactgagtagatcattctgacccagaactactttcatgaggtaagatctttgggaaaatctgaatagcgttaaccattagattcaaatctcaaatggtttcttttcaagtctagttgttttagagtatagtgagaaataccttgacacaattttaagagtaaactatatgggtcagcatatccttgaacaaaaagtagactttgtaaaagtattcatttaaattctaacactcgtggcacaaaagaatggaaattgtaaacccatgtaatggaaattggctatctttttgaccccacatgtgcccctcaaaaatgtttttggtttgggtcaacacaaggcaagatacattctttaaaatactcccagatgtgtccatacattcatccttcactcagtgcatatgtgagggttgttgctggaagacaggaggctcatctttcctttccttggtgcattgagatcagtatcaacagcagatgaaatagaatccagcaaagagttgacatgttctgcctccggccaactctagaatctttttaagcaggtcagccagtatttgcaacttccacaggatgaattgcttgccaagtttctggcactcttgtctggttggaagagtacatccaaagggtacttagtgatcctttgctaagaagttttttgctgtttccgggttacagatttggccatatatttctaaacagcccctgtaaagttgaaagaaaaagtttataacagtgaacttctgaggtttagttactgcaggctttgttgagaagagattgttacagtgtgatttatggatgatcagggatgactttcccctagcaaatatttggatgcctcctgtttgtcaaatagaatgaatggtgatggtgatgggagggatagttaaacgttttctctgctaggttaacttcttacaggtataattacaatgcctgaaattctgtagtttcatttctttggattagtcgttgtcttttccagattgtacacaatctgatcaacacaaaggtagttagtagatcattaacctcaattgcaaggttataatttctcaaacattaagcatattatcagtcatgtggattcaaacacagtataagaaaatcctcaaggctgggtgtgatggcttatgcctgtaatcccagctacttagcaggctgaggcaggagtattgtttgaacccaggaggcagagttgcagtgagccaagatcgtgccactactccagcctgggcaaaatagcaagacccgaccccccatctctactaaaaagaaatttaaaaaaataaaat

SEQ ID NO: 1029 - DNA, 2300 bp, Homo sapien
tactgattacatgttgaaatatatgtgttgggttaaataaaatgcattaaagttaatttcatctgtttctttttttaatagagctaccagaacatttaaaatgacatctgtggcttgcttgcagtgatagacagcactactctagcctaacaactcagatctgtgtgcctgtgttcctgccacttttttcacctagacagccagtcccttgttttctgctgccttctacctagatactaatttctcaagggccaggacatgtctgtctacagttgccccagcacttgcattgacagcattgccagttttaattttctacataggacaaagacaaagaaaggatacattccccaactcaggaaaaggggaactgctacagcaatagtagtataaagtaacaggtgctgtggaaacaggagggttatctgtcgcacactaaggatatcgggaaacttcaggaagaagggaaatgggtttaaaggatgagtaaagagttaaaggggaagaagaggtctaatcaatgtatagtcatggaattgtgggaaagtggcttactagttcattccttgcaaccctatggatatgggagtattattaatctcatgtttcatgtgagggtgctgagccacagagcttaagtaatttgtccaaagtttccaacttagtgatagagccaggatttgccattggcttagagctcatactcaaggtaacaggctttttagtggttctcaaacttttctgtgcaaccccaaaagctggccaaattggagtgcccttggtacttttccgttagagaataactccgcttttaactgctttatatattgcattctatgtaaaattatctgggggagaaggtccacagctttagagaaaactttagttttggaaaccactagtctaaagaatacataaaactggccaggcacagtggctcatgcctgtaatctcagcattttgggaggttgaggcgggtggatcatctgaggtcaggagttcgagaccagcctggccaacatggtgaaacccagcctctactaaaaatacaaaaaattagccgggcgtggtggcaggtgcctgtaatctcagctactcgggaggctgaggcaggagaattgcttgaacctgggaggcggaggttgcaatgagctgagatcgtgccattgcactccagcctgggggacaagagcgagacttcatctcaaaaaaaaaaaaaaaccataaaagtgtttagtaggccaggcacggtggttcacgcctgtaatcccaacacattgggaggccaaggtggatcacgaggtcaagagatcaaaaccatcccggccaacgtggtgaaaccccatctctactaaaaatacaaaaattagttgggcatggtggcacacgcctgtagtcccaactgctcaggaggctgaggcaggagaattgacttgaacccgggaggcaaaggttacagtgagccaagattgcgccactgcactccagcctggagacagagcgaggctccgtctcaaaaaaaaaaagaaaaaaatgtttagtcccagctggatctagttaacattccttgtgattccaccactaagctcacttcccaaaacatgtctttttgtgtttccatgcttttgtatgagctgttccctctgtctggaagacctctcccttacctgcccagtgaattattattattattattattattattattttttgagatggagtcttgctctgtcgctcaggctggagtgcgctggcaccatcttggctcactgcaacctccagctcctgggttcaagtgattctcctgtctcagcctcccaagtagctgggactacaggcggcctaatttttgtatttttagtagagacggggtttcaccatattggtcaggttggtcttgaactcctgacctcaggtgatccacctgcctcggcctcccaaagtgctgggattacaggtgtgagccactgctcctggcatgaattcattcttaaggttcagctccagcatcttgaagagcctgagtatggactcaagctagattgttcaggagttacatcctcgctccatcactctcaagctgcctaaccctgggcaaatcactgctctgccttacctctgtcttcttatttttcaaatgccttatacctaactcatagagatgtaaggactaaaggaattattttgtgtaaagaacttcaagtacatactagctattgttgatctatgaaatgtcccctcttttgcccaggctggggtagtcatgcctgttttcatcaggacagtgccttatcactaca

SEQ ID NO: 1030 - DNA, 2300 bp, Homo sapien
tctgcctctttgaagttcaagagattctcctgcctcagtgagtatctgggattacaggcatgcaccaccacgcccggctaattttgtatttttagtagagatggggtttctccatgttggtcaggctggtcttgaactcccgacctcaggtgatccgcctgattcggcctcccaaagtgctgagattacaggtgtgagccaccacgcctggccgaccatggttctctttaagtgtttagataacttacacagaaaagaaggtagaaatatctgatcctagaaggaagaatcaggtaaatccagtggctaaaagttaccaggaattgctgggcatggtggctcaatgcctgtaatcccaacactttgggaggctgaagagggcggatcacttgaggtcaggagtttgagaccagcctggccaacatggtaaaaccccatctctactaaaaatacaaaaatcagctgagtgtgatggcacgtgtctgtagtcccacctacctgggaggtggaggctgaaatggcaccactgcactccagcctgggtgacagagcaagactccatctcaaagaaaaaaaaaagttataaggaaggttttacctcaacattataattttattagaactgggctgggcgcagtggctcatgcctataatcccagcactttgggaggccgaggcgggcagatcatgaggtcaggagtttgagaacagcctgactaacatggtgaaaccccatctccactaaaaatacaaaaattagccgggcgtggtggtatgtgtgcctataatcccagctgctcaggaggctgaggcaggagaatcacttgaacctgggaggtggaggctgcagtgagccaagatcgcaccactgcattccagcctggcaacagagcaagactccgtctcaaaaaaaaaaggcgtggtggtgctacttgggaggctgaggcaagagaatcgcatgaactgggggacagaggttgcagtgagccgacatcacgctattgcactccagcctcggcaatacagcgggactccatctcaaaaaaaaaaaattattataattgtggaacaaacagtggtgcctcaggtatgtcgagtccttggagctgcataagcagagaccatatggtgatgtcgctgggatgctggcaggggatctacaccgtggttgggtgtgtggaggggtggattgacagagtggagggagcagacgaatggctgctgacatctaagaacctgaggtagtctaggcccatggctgctggctccagaattgcaccatcctgggattgtggctgccctttcactttcaatcatttcttttgcaggaaaacaagagtagaggccaattctcctcttccaaagaactctggatccctaaatgaggcagaagccttgaacccagaagttactctatcttcagaggggtccttaaacctcgaagacattctctacctggaggacacaggtgaccttgatgagacactctatgtgcaagagactgagaaggcagaggaggccctgtatattgaggaggccatgcagccagatgaggctctgcatgtggaggagcctgggaatccagaggagacagtgtgtgtggaggaaaccacggagccagatcggatacagtttgtggaggggcccgtggagccaggaaagcccacaagcccagagcacgttgtttatgagggagagacagtcacaagggcggagaaatctaaccctgaggagagcctcagagccgagcagagccccagcatggaggagaacctgagcatagaggacctggaattgctagaggggcgtttccagcagtgtgtccaagctgtggcccagctggaagaggagagggatcagctcatccatgagcttgtattgctccgggaaccagccctgcaggaggtacagcaagtccatcaagacatcctggctgcctacaagctccatgcccaagcagagctggagagagatggcctaagggaggagatccggctggtcaagcagaagcttttcaaagtgacaaaggaatgtgtggcctaccaataccagctggagtgccgccagcaggacgtggctcagtttgccgatttccgggaagtgctgactacaagggcaacccagctctcagaggaactggcccagctccgggatgcctatcagaagcagaaggagcagctgcggcaacaactagaagcccctccaagccagagggatgggcactttctccaggaaagccggcgactctctgcccagtttgaaaatctcatggcagagagccgccaggacctggaggagga

SEQ ID NO: 1031 - DNA, 2300 bp, Homo sapien
tattgtattttatttatttatttttgagacagagtctcactcttgcccagactggagtgcagtagcgggatctcagcttactgcaacctctgcctcccgggttcaagcgattctcctgcctcagcctcccgagtagctggaattacaggtgtgtaccaccacgcccggctaatttttttgtacttttagtagagacagggtttcaccatgttggccaggctggtctcaaactcctgacctcaggtgatctgcctgccttggcctcccaaagtgctgggattacaggtgtgagccaccgcgcctggctgattttattttttaaagatgcctgtcactcaggcgggagtgcagtggctcaaacatggctcacggcagccccaacctcccaggctcaagcaatcctcctgtcttagcctcccaatatctgggaccccagctgtgagtcaccacgcctgggtaattttcaaagttttttgtagagataggatcttgccttgttgcccaggctgatcttgaattcctgaccacaagccatcttcctgcctcggcctcccatagtgctgggattacaggtgtgaaccaccatgcccagcctattcttttcttagaggggcttttcttgacaacctaactaaaccactctccccgccccccggccccaccaaagcttcctgttacagctctggagtcttcactacccaaaattacattgttagtttacctcatccatgtattcatcaaatattttttgaactcaactcataacatgttccaggcactgatttagcctctggggataaactggtgaacaagataaagttcttctccattaactatagtccctagtactaggttaacacatgtttgctgatcaagtgaatggatacaaccatcttgtttttttcttttttttttttttgaaatggagtcttgctctgtcatccaggctggagtgcagtggtgggatcttggctcactgcagtcttcggctcccaggttcaagagattctcctgcctcggcctcccgagtagctgagattacaggcatgcaccaccacaccaagctaatttttaattttaattttagtagagacagggtttcaccatgttgggccaggctgatctcgaattcctgacctcaagtgatctgcccaccttggcctcccaaaatgctgggattacaggcgtgagccacagcaatcttaaaaagaggagttattagccttattttcatatgagatcgtgacttgtgtgatggagctggatttgaacctcgacctgacttcttttccagtacttctccacctcacctccttttttactgccttcacccatggactgtttcttggctaattctgttctccctgcctggtgatccaggacagaatcactgacagcgtggggccaatgtgaagaattccaggctaggggagaaggaggtctgctttgaagtctagcctctgcaagattaagtgtgatcttggagagtttactgtgtttctctgggcttctgatgtcacattgccaaagtaggaagaaagtcctttggaaagtgtggggctgaacctatgtatgaggggctgtactgccagccactgtggttctgctctgggcatctccctggcttcccaggactgtgtcctgggactggcccctgcccctctgggggcctctgcccacagccttgccatcccactagcagctctgggctcctgcctggctgctgcaggctccgagctctttccccagggaattacgctaggcagccaggaggcttgcaggtgggcaccctgccaagtctagtctggtagcccctccacctaccatctggcagctgggacccctgccttaactctggacttgcaggcagggtgagtgatctgctgctggattgagtatcttcggtcctcctaatcatactctactggagcagagcacccacggactcctggcctcagttgcctttctgtgcccctgcaccccatttaaggggtggggtcggcagatgggcgggatcagtggcgaaggtgggaggaggacatggagagcagcccctccccctcctctgtctggagccggtgctctgcggcggggcgggagggctcgcatccccatagtgctgggttacagtgaaggtacgccccgcgctctgctctggagaggcagggtgggatagggaacgtctcgagtggcgcccgcagtcatggtggtgttcgttggccgccgcctcccggcgctcctagggctgtttaagaagaagggtgagtgggtgtggcttggggggaggggagggatgctcg

SEQ ID NO: 1032 - DNA, 2300 bp, Homo sapien
cataaatggagggactagaagaattagactaacaaatacattcagctcctaaacaccctcaagttagtatagatttcagaatcaaaagacttggattttggacacgttagtctttctgaatgtattttcccttctcctacctgcctcacaagattatcacaaggatcaaataagactgttgggaaaaactcccttgatcctacttttttggattcaggtgtcctgtgccctgttctagactttatctcactaggtcttgttcgattctgcaggttgtacatcctggagacctgaagaattctgttgaagtcgcactgaacaagttgctggatccaatccgggaaaagtttaatacccctgccctgaaaaaactggccagcgctgcctacccagatccctcaaagcagagtaaggccagctggagaggggccgacatcatcaggagagagagcttgtcaatgagccttggaaaaatgcctgtcttaaattgagggcacaacaacccagggggtctgaagtgcaggaatgtcatgtcctactggctcctagaatggaacttgagtcattttgatttgggtttggttaacatcaggaagtgatcacatccttttgtaccggcattgctgagagctgctggtgtaagatgtatactttggtccttctagtctgtttgttaaatctgcctcttcattaaagatagtgaccggggccagacacagtggctcacacctgtaatcttaacactttggaaggctgaggcaggcggatcacttgagcccaaaagttagagaccaaaacccagtctctacccaaaaaaaaaaaaaaaaaaaattagccaggcatagtagcacatgcctgtagtcccagctacttgggaggctgaggtgagaggatcacctgagcatggggaagttgagactgcagtgagccatgatcgcaccactgcactccagcctgggcaacagagtgagactctatgtctcaaaaaaagaaaaatgatagaaattagattagacctattatacccaaccggtatatagggtatcgatagtttcttacacagctgttgggcagagcctgcagagcttagagaagcttatctttagattctcccagtttccttctatgtgcatgggcctggctcttagttggccatccacttgtgcgtaatgctaagatattggcattgatagctttgtgcgacccttccagaaaaaaactcagtaactcagtaaaattttttttttttttttctaaaagagacagagtctggctctgttgcccagcctggtcttgaagtcctgggcttaagcaatcctcccgtctcagcctcccaaagtgctagaattacaggtgtgagctaccacacctggccaagactcagtaaattctatgtggaatgcatgaatggaaatacctaaaggaggcaaagctactactgctccctccccgctagtctaataattgagggagagaacagatgaaaatcaggtatgtcatgtctgaaaggttgccaacccagtattaaagaagttacaactcagtgtttagactctggggattctacactaaatcttacctaatctcagtgtcttaacgtggtgggatcagcagctgacctgccacagggaagaattctacctcatggggttcttctcattcccagagccaatggccaaaggccctgccaagaattcagaaccagaggaggtcatcccatcccggctggatatccgtgtggggaaaatcatcactgtggagaaggtactcatttttcaccacatctcagagaggcagattggggtcaggtttgtctgtttccatccggaggaaacgtggcctggagatgggaagtaacatcctgaggtcatattgcaagtcagagtgcaggtgtctaattccaggcatcaggctttctgttgcgattgttgcctgtggatattatgcaaccaaacacagccaggaactcagcatgggggacggatgttagtcagagggaacttgtttatctgttaaatctggtctgatagactcacctgatccctatcggcttgcctggactagctacaggccttatcttggatgggccactttgcccccttcagaaagtggtggagggaagacttcctttttcccagagacagaaggttatgcacccagtggcctgggaccattgttctgggctttttttcccttcgacatggatttgcttctcactgtgtaccccaaccaccaaaaccaccctgagatcaatgctggtgctcctgcatcagatggcttagagatccttccacctctta

SEQ ID NO: 1033 - DNA, 2300 bp, Homo sapien
gtctctacaaaaaaaaaaaaaaaatcaaaatactggccagccatgatggcgcatgcctgtagtcgcagctactgggaaggctgaggtgggaggatcgcttgagcccaggagatcaaagctgcactgagccatgattgcgccactgtactccagctgggtaacagagcgagaccatgtctcaaaaaaaaaaaaaaagtcttttgtgggaattaggaatagatgaaattcctcagaaaaaaggtctgcagccatgttatccaacagtactttctgtggtgatggatatgtcctatctgtactgcctgatacagaagccacatgtggctgttgagcacttgcaatgtggcaggtgcagttgaagaactgaatttcagtttacatttaaatacccacacaaggctagtagccaccatattggacagcagcagccctagagcttttattaaaattaaatattcccaaggaaatgaagaagtagtatcagaaacaaaaatgttcgctttgttgtattaaaagtgttcattcctaagggatgtcccctcagaatatctagaagattctttcagaccagatttgagatataaaaaaggcagtcagctgggcgtggtggctcacacctgtaatcccagcactttgggaggctgaggcaggtggatcacgaggtcaggagttcaagaccagtctgggcaacatggtgaaaccccgtctctactaaaatacaaaaaattagctgggcgtggctgcatgcgcctgtagtcccagctactcaggaggctgaggcaggagaattgcttgagctcaggaggcagaggttgcaatgagctgagattgcgccactgcaccccagcctgggcgacggagcaagactccgtctcaaagaaaaggcagtcacaggacacaaggaataaaatggaattactgaactattaccatgtacgagcagcgttctcatcattttcacacccacattcagtgatttaaccctcatccccatcctgtgagatatagctgttgttagcttcactttataagtaacaaagccaacactggcccggcacgttggcccatgcctgtaatcctagcactttgggaggcagaagcaggcagattgcctgaacccaggagttcaagaccagcctgggtaacatagcaagaccctgtctctacaaaaagaaaagagaaaaagcagcagccaaagcttagaggggttatgtgcctagtttggagtcgcacacagctagctgggaatctaatctgggtctgtcgaactccaaagcccttcctctttcttcttactcagctgtctccctcaggttatctttaggccttgggttacctatgtgaatgtttctctgcttgtaaataccagttggtctgtgaccctactctaagcataaatggagggactagaagaattagactaacaaatacattcagctcctaaacaccctcaagttagtatagatttcagaatcaaaagacttggattttggacacgttagtctttctgaatgtattttcccttctcctacctgcctcacaagattatcacaaggatcaaataagactgttgggaaaaactcccttgatcctacttttttggattcaggtgtcctgtgccctgttctagactttatctcactaggtcttgttcgattctgcaggttgtacatcctggagacctgaagaattctgttgaagtcgcactgaacaagttgctggatccaatccgggaaaagtttaatacccctgccctgaaaaaactggccagcgctgcctacccagatccctcaaagcagagtaaggccagctggagaggggccgacatcatcaggagagagagcttgtcaatgagccttggaaaaatgcctgtcttaaattgagggcacaacaacccagggggtctgaagtgcaggaatgtcatgtcctactggctcctagaatggaacttgagtcattttgatttgggtttggttaacatcaggaagtgatcacatccttttgtaccggcattgctgagagctgctggtgtaagatgtatactttggtccttctagtctgtttgttaaatctgcctcttcattaaagatagtgaccggggccagacacagtggctcacacctgtaatcttaacactttggaaggctgaggcaggcggatcacttgagcccaaaagttagagaccaaaacccagtctctacccaaaaaaaaaaaaaaaaaaaattagccaggcatagtagcacatgcctgtagtcccagctacttgggaggctgaggtgagaggatcacctgagcatggg

SEQ ID NO: 1034 - DNA, 2300 bp, Homo sapien
tcccagcactttgggaggccgaggtgggtggatcacctgaggtcaggagttcgagaccagcctgaccaacacggagaaaccccatctctattaaaaatacaaaaaagtagccaggcatggtggcacgcacctgtaatcccagctactcgggaggctgaggcaggggattcgcttgaacctgggagtcggaggttgcagtgaaccgagatcgcgccattgtactccagcctgggcaacaagagtgaaactccgtctcaaaaagaaaaaaagaaaggaaaagaaaagaaaaagaaagataatccccactcaactctgccagacctctccatcttggcccgctaggtttgtagttatatgctacagggctctgtgtttttgtggggttttttttttttgagacagagtctcactctgtcgcctaggctggagtgcagtggcacgatctcggctcactgcaacctccgcctcccaggttcaagcgattctcctgcctcagcctcctgagtagccgggattacaggtgcccaccaccacacccggctaattttcatattttttagtagagacggggtttcaccatgttggccaggctggtcttgaactcctgacctcaggtgatccgcctgcctcggcctcccagagtgctgggattacaggcgtgagcccctgtgcccggccagggctctgtttatgctctccagggctgcatattttgttaatggctttgatgaggattcaggtggttcccagattcgataggcaaatggtacaatgctaatatactggtgctttaatcactctccaaatgacttagcaggctggaataaaggacctaactcagcaaaaatgaagtatttcaggaacagatgcaaaatcaggattcaaaaacaagagataattataaaaggacagaatagaggctcctattcatttcaacagacacttgaacaaaagacttactaggtgcccatgtgttaggcactatgctagggactggtattacacagagggttcagtcctcctaatgctcagtccagtaggcgaggcagacttgtaaacatttcattggctgcattttacatatatatctatatgtgttttttaacatatgtgtgtatgtgtgtatatatgtgaatatatgtgtgaaaatatatatgtgaatatatataatgaaaagaatatatatataccagaaataatataggaggaaatgattaactgactctagaaaagcttgtggaggagacactatccaagcactattttgcttgaggaataggagttcacaaggaaatctgtgagggaataagttgtacaaagacatggtaggatgaagcagcatgatgtatgaggaattccaggtggtttggtctgactagagtctaaaaggtgaggagggggattatgggagagataggcagggccaggtcacaaagggaagatgtgataataccatatataggaataaaatggggggttttgtgattgactctgaattcaggtccaaccaatttaatggagctgctagaaatgttaatgtacgccaggtgcggtggctcacacctgtaatcccagcactttgggaggccaaggcaggagaattgcttgagctcaggagttgaagactagcctaggcaacatagtgagactctgtctctacaaaaaaaaaaaaaaaatcaaaatactggccagccatgatggcgcatgcctgtagtcgcagctactgggaaggctgaggtgggaggatcgcttgagcccaggagatcaaagctgcactgagccatgattgcgccactgtactccagctgggtaacagagcgagaccatgtctcaaaaaaaaaaaaaaagtcttttgtgggaattaggaatagatgaaattcctcagaaaaaaggtctgcagccatgttatccaacagtactttctgtggtgatggatatgtcctatctgtactgcctgatacagaagccacatgtggctgttgagcacttgcaatgtggcaggtgcagttgaagaactgaatttcagtttacatttaaatacccacacaaggctagtagccaccatattggacagcagcagccctagagcttttattaaaattaaatattcccaaggaaatgaagaagtagtatcagaaacaaaaatgttcgctttgttgtattaaaagtgttcattcctaagggatgtcccctcagaatatctagaagattctttcagaccagatttgagatataaaaaaggcagtcagctgggcgtggtggctcacacctgtaatcccagcactttgggaggctgaggc

SEQ ID NO: 1035 - DNA, 2300 bp, Homo sapien
tccgttccagaaaaaaaatccccaaaacaaaaaacccaattgagtcaattctaatagttttgtgtatttttagtctccaaccagcactattttatggagagagaataggaaacaaagaatctagctaggggaagcgtgcaaaaacctttggttaagactaagttgtaaatggaataacccaaatgtccatcaactgatgaacggataaacaaaatgtatatccatacaacagagtatcattcaaccataaaaaggaatgacgttctgctaggtgcaaatacatgcatgaactttgaaaacattatgctaagtgcaaaaagtcagacacaacaaacatattgtatgattctagttacaggaaatgcccagaatacgcaaatacctggagacagagagtagattagtgtttctctaaggctaggagtagtgggtaataggtagcgtctgctaacgggtgcaagttttattagatagtgtgatggttgtggccgggagccgtggctcacgcctgtaatcccagcactctgggaggccaaggagggtggatcacgaggtcaggagatcgagaccaccctggctaacacggtgaaaccccgtctctactaaaaatacaaaaaattagccgggcgtgggggcggtcacctgtagtcccagctactcgggaggctgaggcaggagaatggcgtgaacctgggaggcggaggttgcaatgagccgagattgggccactgcactccagcctgggcgacagagcgagactccgcctcaaaaaaaaaaaaaaaaaaaaagatagtgtgatggttgcacaaccttgtgaacatactaaaacccactgaattgtgcactttaaaagggtgaattttatagtatgtgaagtacatctctaaaaagaaaaaacagaacaggctgtgtggcccaactgatttatcactactcttagaaggaagcccaatttaaaattgaacagaataaggcctgcaaggctcccgtgacttggtccctgcctacctctcttaaacaaataaataaaatgtatactatgtagaaacaataacaaaaaaaaggcagagcaaggtatggggcagttctggtgccagagggtttgttatttaaataaagtggtcggaaatcatgcgtcgctgataaggtgacaacagtcagaagcctgaaaaagttaaggggtaagcaatataaatatttaagtgcttcctcataactttgctcactccactccagctaaatttgccacaatttctgtttcctccatctgaaatgctctccctccttattcttccattcttcctctggttcacttctactcctgtagttcttggtaacaaacggaacatttgtggagtgagggggggggatccatttccttcaaggcgcagtttggaggtcacttcctcagggaagccttcccttctctctttccctttaaagctcccagtatagcatcttccagtacttacttgaaccgtaatgggtcatttttaacgtctgatccccttcagacaagctctggcaggcccttgacgtatccccagcgactaagcaccacgtctggcacttaataggggggtggaatgggagtcctggattcaaagtttggctccaacacaagacaactggacgcaagaggtgagcccactgtgatttctggggaacccagggaagggctgcttgattgactgaccgaccagcagtgagatctacaggctctctcagagctgcgccagcgccgagtccccggccccacatacttagaaccccgtaatggggctcaaaatcactgaacctcgggctcctaatccccaacggcgcatttccaacccccaggcctgacctgcaggttccgggtgataaggtgcagtttctcttcagggctgggagcgtcccccatggctccgctacccctgcttcccccgctcagcccggcaccagagccccttcctgggtcaccgtcgccgccgcgtgccgggaactgtcacgcgagtccagccaggttgcatcagctgggctcggcgctccgcttactcggcctggacccctccggcagcggccggaaaaagtgaggagcagcagagagtcgagcaggtcgatgagacgggaaaaggtggagccagtgggcacggtgggcggtgcggagggcggggctgaggcgcctgagcggggcacaaccctcctagaggcgggacggtttcctgccaatcactgctggtttgccctccccctggtgttggcccggctgactcggggtaggggaggtcggggagggggcgataaaatggcgcaggggg

SEQ ID NO: 1036 - DNA, 2300 bp, Homo sapien
ccagtagctgggattacaggcgtccaccatgctaggctaatttttgtatttacagtagagatggggttttgctatgttggccagtctagtcttgaactcctggcctcaagcaatcctccggcctcggcctccccaagtgctgggattacaggcgtgagccaccatgtctggccatatcccttcatttttaagggaagaatatttttccgatcttctaattctatttcttagttcctctacaccccatcctttctgtgaccccattctgtccttccacatctctctcacctgtccacccccttcttcacacttcagtttaccaccccctctctgttctcgaacctcctggttgcaacctcagaaactggttccctttctatttttatctcacctcagaaaacctactgccttcgagcacaaagccttactttattgaggccactaaaactgcaacaccagatgcaagcccacatcctctttcaagctctaaagtcaagaccattaccaagcagggtctgacaggtacagccaagagcagagattatttccagtggacaagacttccccctggcctttgatttccaacctttcccaaatgcaatacatgtgaagcacacagcacgaaacgcactcagcaggctttatcactccataaaaaataggcacaacatttacaaaaaatcaaaaagaactgaaattatctgtaacagttttgcaaattccttcgaagtaactaaaaacactgcaggacggaaaaaacaacccagggctgcaaatctttgctttaggtaacatttcactagatgagggtgccaggattctcctcccacatggacacagagaacagatgcgctaagctgcagcaacaggtttcttttcaaaaagaaaatgtgctttaaaacacttcaggcaggtctggtagagcttggagtccctaataaatacacaaaacaccggagatcaggttagggcaggccgtgggcaattcaaccacttctaggacctttccagggcccactgaggtaataactgctttccctcttgccctggaagtaactggtgacgccgcctccagcccttgaggagccggagaaagggtggcccaggcccaacctttggaggatactgccttggctctctctcacaaatgcaacggcccgggacggtgtcgccttccaggaagggcctttgcgtctccctcccccggggacaccgcgaattcccgcctcccggcggaaagcgggagaagcgagagttttctccccgcccctcccccagtaggggcaaacccgcccctcagcaggcctgtgctgtgcgctcctctcccggggaccaccgtcctcagatctccccagggaatgggtcgtcctcttcctgcccccacccgcgagacgcggcagaaaagcccgcggctatcttcccgccagcaacagcctcccgccgagccggccgggacagaggcggcccccacccccactgggcaggggactgcagacggcgctccccgactctcaagacgaccagggagcttcccttttcctcagcggggtgaggggcatctgtcgcccgccgacttggaggtggaggggcagggacattccctcgccatcacctcaggagctagaacgcgcccttctcgcagcagggcgtgggcctcccaatccctccaaggggcggacggcgtgcgcaaccccctggagaagcaacaggcgcccccatccccctccaagccgggtaacgccgaccccctcgtccctcccgctcttcacctccggaagccgggccaaagcctgggcgaacgactgcgcctcactccgccccctgcgccattttatcgccccctccccgacctcccctaccccgagtcagccgggccaacaccagggggagggcaaaccagcagtgattggcaggaaaccgtcccgcctctaggagggttgtgccccgctcaggcgcctcagccccgccctccgcaccgcccaccgtgcccactggctccaccttttcccgtctcatcgacctgctcgactctctgctgctcctcactttttccggccgctgccggaggggtccaggccgagtaagcggagcgccgagcccagctgatgcaacctggctggactcgcgtgacagttcccggcacgcggcggcgacggtgacccaggaaggggctctggtgccgggctgagcgggggaagcaggggtagcggagccatgggggacgctcccagccctgaagagaaactgcaccttatcacccggaacctgcaggtcaggcctgggggttggaaatgcgccgt

SEQ ID NO: 1037 - DNA, 2300 bp, Homo sapien
aatcgctggaacccaggaagcggaggttgcagtgaactgagatcgcaccactgcactccagcctgggtgacagagcgagactccatctcaaaaaaaaaaaaaaaaaaaagcataggaacggtaggaaaaaagagtgctaaactggtagggaatttcccctagaccctgcttgaaattatctaatatactctactcttatctagtttaatccagcactcaaccatattgtcactgaagaccagactaggtagacatctgaaatatccggcaaattatgcaaattaatgttcactgaactatcctttatagaggtactggacctcagcaattcacttcaagtctctgaacttcaatacagatgagaacatgcatctaaaaagggggtaaatactgttaacttcaaacacagattatcatgagaaaaaataggatgtttatgaaagtactctaaacctaaaagttctatactaaaaaaacatggtatttaatgaatgtgcaaggggggaaatcctcatataaaactgaagttcttcagtgaaattccaaagacagccttacttattacttctctgtcaaaagaaggcttgcttacttctctgtctaccatctaccacctttcttagcacttgtctggtaacctccacttaaaatatggggacccctttatttttttattttatttttatttttgagacagggtctcactcaatcacccaggctgaaatgcagtggcgtgatctgggctcactgcaacctctgcctcccagtttcaagcgattctcatgccacagcctcccagtagctgggattacaggcgtccaccatgctaggctaatttttgtatttacagtagagatggggttttgctatgttggccagtctagtcttgaactcctggcctcaagcaatcctccggcctcggcctccccaagtgctgggattacaggcgtgagccaccatgtctggccatatcccttcatttttaagggaagaatatttttccgatcttctaattctatttcttagttcctctacaccccatcctttctgtgaccccattctgtccttccacatctctctcacctgtccacccccttcttcacacttcagtttaccaccccctctctgttctcgaacctcctggttgcaacctcagaaactggttccctttctatttttatctcacctcagaaaacctactgccttcgagcacaaagccttactttattgaggccactaaaactgcaacaccagatgcaagcccacatcctctttcaagctctaaagtcaagaccattaccaagcagggtctgacaggtacagccaagagcagagattatttccagtggacaagacttccccctggcctttgatttccaacctttcccaaatgcaatacatgtgaagcacacagcacgaaacgcactcagcaggctttatcactccataaaaaataggcacaacatttacaaaaaatcaaaaagaactgaaattatctgtaacagttttgcaaattccttcgaagtaactaaaaacactgcaggacggaaaaaacaacccagggctgcaaatctttgctttaggtaacatttcactagatgagggtgccaggattctcctcccacatggacacagagaacagatgcgctaagctgcagcaacaggtttcttttcaaaaagaaaatgtgctttaaaacacttcaggcaggtctggtagagcttggagtccctaataaatacacaaaacaccggagatcaggttagggcaggccgtgggcaattcaaccacttctaggacctttccagggcccactgaggtaataactgctttccctcttgccctggaagtaactggtgacgccgcctccagcccttgaggagccggagaaagggtggcccaggcccaacctttggaggatactgccttggctctctctcacaaatgcaacggcccgggacggtgtcgccttccaggaagggcctttgcgtctccctcccccggggacaccgcgaattcccgcctcccggcggaaagcgggagaagcgagagttttctccccgcccctcccccagtaggggcaaacccgcccctcagcaggcctgtgctgtgcgctcctctcccggggaccaccgtcctcagatctccccagggaatgggtcgtcctcttcctgcccccacccgcgagacgcggcagaaaagcccgcggctatcttcccgccagcaacagcctcccgccgagccggccgggacagaggcggcccccacccccactgggcaggggactgcagacggcgctccc

SEQ ID NO: 1038 - DNA, 2300 bp, Homo sapien
aataattatagattaggtctgtcattagctgtttaaaaactaggttttaattatacaactaactaaatattcaagtagaaaagtaaaatgatacaaagtccaaccttgacctacctttatggtccctgcgagttataatagtcatcaatttttgtttgtatcttttttttttttcttttgagacagggtcttgctctgtcaccctggctggagtgcagcgatatgatgactgctctctgcagccttgacctcccatcctcaagtgatcctctcacctcagccccatgagtagctggaactataggcgtgtgccaccatgcgccgctgatttttctgtttttttgtagagacagcatttcacgttgtgcccaggcttgtgtttgtatctctaatgaccttttttttttttttgcattttttctatacatatatatatatatatataaagatttgtgtgtgtgtgatcatgattaatttttagatttttggtggaaccttagacattgcctagcaccccttttccatccctttcccattttgtaaatgaggaaacaagtctaaatggtcaagtggcatacccaagttattggagctggctagtgatacaaccaggactacaccccaggtctttggactcccatgccagtattcatcctactaaagtagatgatagtcttaagaaagtacaaattgttgggaggaacaaaactagtttgcttagttgcataatttttttttctttgaagatttctttggtgtgcttgactcagaaaatccaactttctggtattacaaaaaaaatcaagattaaaattaatacatcgagcaccttaaagcataatacagttgactttgtaattagcagagttgaaagtgatgagaagatcctctaattttctttttgcctgcaggaaggtgggagtcaatcattttgacaagtctcctgaaaggaacagctagcaggaactgaaacctttttccatttggtctcgtggcaaaggcagagattgctccagcagctccacacagtatggaagacagttatttaccttcttgtgttctcgaattttgttttatttcaaaagtaatacatttttgttttgtgttaaagtgtaaactgaatattcagacattttacataatatacatttgttttgtttgtatgttgtagatatcattccatgatagtacatacagatctacttcattgtgtttttaaataattgaaaagtactccatagcacaaacataccatgatttactgaacagttctcttggtaatagacatttaggttgcctccaggatttggctactttgaacatccatgtatatatatatgaagttctagaagtgaaattgctgggtcaaatggtgtagtcaaattactcttcacaaaatatcgtactgacttaacgcttttactgatagtgtgtgaatgctcgtttctccacatcctcaccaatccagattatcatggcatcttaattatcaccattttgataggcaaaagtatctcattgttctaacgtgtatttccatgtttctggtaaggttaaatatcttaaaattatttcttatgctacaagtcacagtgcaaagattttgaaatactagaacattacccacatatagtggactggagttggtataaggttattttctcttcctcagtgaaattgtctcttatttctccagaaatgatgtgctcacgggtgccctctgaacagtcttctggtacctctctcttgcctaaagacggtgccccattttcttgggattccttggatgaggatggattggatgactccttgctggagctgtcagagggagaagaagatgatggtgatgtaaattacacagaggaagagattgatgcactgttgaaggaagatgacccatcatatgagcagtcttctggggaagatgatggtgggcatgttgagaagggagaaagagggagtcaaattctacttgatactccccgagagaaaaattcatcgtacagcctgggaccagtagctgagactcctgacctcttcaaactacctcagctaagtacatcaagtggtcatggaccagctcatactaaaccattaaacagacgctctgtactagaaaagaatcttataaaagtaactgttgcaccatttaatccaacagtttgtgatgctctgcttgataaggacgagactgattcgtccaaagatactgaaaaactctcttcccttggagaagagatgagagaagatggtcttagcccaaatgaaagcaaactttgtactgaatctgaagggatcag

SEQ ID NO: 1039 - DNA, 2300 bp, Homo sapien
agtgctacaatcatgactaagaagacccctctgcttgcaaagaactatctgggcgaagccaggcccaaacttttcttttttcttttcgtttactcttcttttttctttttcattttcttgggctgaacttaaactataatccagtgtgatgagtgctatgatagtaccatgtaggagagcagaggagagggaataactgtgggttagaaatcaggaaaaacacagagaggagataacatgggaattgagctttgaaggataaataggagttcaccaagcagccaaaagaggaatagtgttcagggcatggtgtgttcaagaaacaaagtaagctcagtctggttcagggcagctgcaatccaagaaagaaggtagaacgtgggggagtaaaggatggtgaggctgcagactggagtcttttgagggatttgaataccatgctaaagctttattaccatggtggttgagaaaggcaggctgtattgtagaagcatttgggaaaaaaatgctccttaggcacacagaaaaacaggcacttggaaaaatgagggaaaaacaaagggttgtacaaaagaggaggtttgcttatggtgcgttattagatttggcacagacagtatttatataatcataacaatataaacatagcgaattaacccaaaattgtgatgtaattttgttaggataatagggagggaagtagaggaagttgttatgctttatctaccatgtttggaagtcaacagacttctaaaatagatcaagaaataacattctaaatatagaggtaaaattgggaaaacacctagaaggactggagttggctgccttaatactgtctgacttttaaaaaacattctgttcatgtattattagtttgataaaactaaacatttaacagactgcaggccctggagttcatgtcctagttccaccactgtgtgaccttgagttaagttagtgaaactctctctgcatcagtgtcctcacttgtaccctgggaattataataataggtatcctcacagagttgtgaggattaagtgagatagaatatgtcagtgcacagcacagggcctggcacgagctcaacaaatgctattattgtttctattttcccctcaaggaaaacaggagctgtcagaggtttttttgtttgtttttctttgagacagagtctctctctgttgcccaggctggagtgcagtggcctgatctcagctcactgcaacctctgcctcccaggttcaagctattctcctgcctcagcctcctgagtagctgggattataggcacctgccaccacgcccagctaatttttgtatttttagtagacagggtttcaccatgttggccaggctggtctctatttcctgacctcgtgatccacccatgttggcctcccaaagtgctgggattgccgggcatggtggctcatacctgtaatcccagcactttgggaggccaatgtgggcggatcacctgaggtcgggagttcgagaccagcctgaccaacatggagaaaccccgtctctactaaaaatacaaaattagccggacgtggtggcgcatacctgtaatcccagctactcgggaggctgaggcaggagaatcacttgaacctgggaggcagaggttgcagtgaaccgagatcgcgccattgcactccagcctgggcaacaagagcgaaactccatctcaaaacaacaaaaaaacaaaaccaaagtgctggaattaacaggcgtgagccaccgtgcctggccactgtcagaggtttaaaggaaaggagaggaggaggtatgatcagacgcatattgtaggaagatcagcctagcagcagtgaaggggtggttggtgagggcacaggtgaaaacaggagccagagggcagagggagggtgctgcagtagtacaggtgaggtacaatctggagagaccattggcaagcactagtgggaaagaagcaggggaggcaggaacccaggctctggcctctgactgctcacttgtcccccctcaggtgtcattgccctcttctgccgccagtatgacatcatcaaggacaatgaacccaataacaacaaggaaaaaaccaagagtgcatcagaaaccagcacaccagagcaccagggcggggggcttctccgcagcaaggtgagggcaagacctgggcctgggtgggccaccctgtgcctcatgctctggtaatccctggactgcagagggggtcagctcggggactggcatggcgacagctgggcagagccagacttggctgctgcctgtgtgacacagggaca

SEQ ID NO: 1040 - DNA, 2300 bp, Homo sapien
tctatctaggttttacccaaagaggccagcagatggcgccaaggttcccctttccccagcgctggactggaggccaagaccccaccaggaccctccctccttttctcccctgcagggacgggagtagattctgtgtcctctaactgaaccctctccttcctgctggttcctgtgctggaggcctgaagaggctccagttgctcctgcgggcctcctggttgtcttcctgtctgatggatggggggtggggggtccctaggggctaagctgcagctggtggggcggggccgggtggggtggggcaggcagcagctgcggggagaaagagagagaagataataaggggagagaaagagaaagagagcaaagagaaaagagagagagaggtgctctggctccggggctcttctcccaaacgggtcgaggtcccagctgaggctctcccaggacaaggtatgtggcgggggaaatgatagggctgggcagtgtcaccctgccgagtggggcaggtctgggggcactgaggggatgggcaggaaaattctgctgctcaacaagagcccctaagctcgcttccatctcaccccttccaaggtgaccaaggaggaacacagggccagcgaaggagtcctgggtgggcataaggagaggagggttgtctatcgctcctcttgacccactgtgtgaatctgcaccaagctcttcccatcggtagacctcacttccttaatgtaaaaccagggggatggagaggaagaccctgaagacgtttctgtggcagaactttgcaagacgtctcctttccaaagaaaattagcccttccagggcttctggaaaacctttaagacccaaaggaatgccccgctagtagtggaatttcggatagtcgtgggagggggctcaggggttcttgctgagacaaaaggccctgagccctggtccatgcctctctcctccaccttgtttctctggctgagatgagggaagggggctggagccactccccttctcagagatgctcttagagattgctgcagactgttttctggctggggaggagctggccccggccaattctagagtctcacgaatctccggatgggtgaagtcactctgggtggggagacagttcagttaagcacagctttgggagtcagatcagcctgtgttcaaatcctggctctgctgcgggtccctggacaagtcaagtagcctgtccaagctgcaggctcctcctgtgcaaagtgtgcagagtatgactttacagggttgccctgagaattaagccacataatgcaaagaaagctcagcatagtatctggcccctggtagacgctcattactgccctcactatggggatgaaaatgaaggaaaaggactggcctggggtcacagagctggactctccagtgagacagagcagcctcttcccaaccccactggaaacacggagccctagtgtccacttagcactctctgctcaccccagccttactgtgatctctcccctctgctcccgtctgccccagccgcaaggcctcgggtctaccgtggaatgaggggatccctaggcccagggaagggaggcgcgcttaggggtgggggcacaaacgggcatctcggtggcacttgtcctctctctaccctgggaaagggcagaaagcggcagccaagtcagggctgtgcacgggagagagagtgaccgcggcgggggcgcggagaaccccgctgggctcccgctcggtgagagggcgggagccgtgggtccgcgaagccccttcctccccggcagaggacctaataggcagcgggggcgggagtgggggcgccctccggtcctcaccccgcccccgcacctctccccgcagcgggggcgccccgccccccgggcgcccgacgtggacgcggccgccgccaccgccgccgcgcgggagtcgctgtccgcggagccgacatgcaggcggctcggggcggcgcagggcggccggagcggccgggccggccgggccgggggccggagcgcgagcgcgagcggccgccgggcgccggagccgcgtccccctgcgccgccccgggcctgccggccggaggagccaccatacaccccgggtcgccgagcgcctggccgccccgcgcccgcgccgcgctccgcctgtggctgggctgcgtctgcttcgcgctggtgcaggcgggtaagggggcccggggcggggggccggcgccggggcaggctcctctcgagcccagctacctgggagtcccctggtcctttctctgccccctagggactcctgtctc

SEQ ID NO: 1041 - DNA, 2300 bp, Homo sapien
ttgtcttggccctgggattagcaactgcctctgtgagcaataagtccccttgagcccttcagggaaggagattgatgtgatgtcctctggtgagccctgagccctggatccttgtcctcagaggtccttagaggtgaggggatacggtaggcagactggatcaagccctcaacttgcagccgcataatttaatttgagacatgtctctatagttcactggctgtgtgacacagggcaagtccccttacctctctgatcctcagcttcctgatatggaatggaagttaatgacacataccagcctaagactcaaaataacatggataaagtccgggcgcggtggctcacgcctgtaatcccagcactttaggaggctgaggtgggtggatcacctgagatcaggagttcgagaccagcctggccaacatgatgaaaccccgtctctactaaaaataaaaaaattagccaggcatggtggtgggcacctgtagtcccagctactcaggaggctgaggcaggacaatcacttgaacctggggagcagagattgcagcaagccaagatcacgccactgcactccagcctgggcaaaagaatgaaactccgtctcaaaataaaataaaacaataacatggataaagtaggtgctcaattattatatccccaaagcaactcctgacctcctgattcttcctgtgatttgcagggcgggtgaggggtgtctagtgaccatccttgactggggccatgaccatcctaggctataaaaaggaaacttcctattctaaatgggtacccggggctggcttgggcacctgcagcctgagttaggtgctgagactctggacacgcaggagggtccaaatgctggtgaccccattaggtgtcaatgtgtaagtgaccggccagccctcaagggggtctctgtggagtcctccaaatgaagcccagtgagtgcagcttgggaggacagaggcgcacccttagtccctacccaggtcctcatggtttcactcattctttcactgctgtgtttccagaatattacacagggcctggtccataataggtgctcaataaacatatgatggaagaatgattttttttccatacagtcaacaatcatttaatgagccccaactgcatcgtaagccttgcgctaagggatggggtacataaagtggctgggtttttttgagatggagtctttctctgtcacccaggctggaatgcagtggtgtgctcagctcactgaaacctctgcatcccaggttcaaatgattctcatgcctcagcctccagagtagctgggattacaggcacacaccaccatgcccggctaattttgtatttttagtagagacggggtttcaccatgttggccaggctggtctcgaactcctgacctcaggtgatccacccacctcggactcccacagtgctgggattacaggcgtgagccagcgccctggcctgcagtggctgcttctgacagctccctcccaagttcacccagggctccactaaatcctcccagccagctctcactggctgccagattccaggcaccagggctttccccagaattaaggcccaagcaccccatgcatcatgaggactgagaaggctgtacccccacagtcacaactctccaaatcctccaagccccctccttcagccgccttctctctcaagccctcaggcactgccatctcctccctcccaatgccctacatctatctaggttttacccaaagaggccagcagatggcgccaaggttcccctttccccagcgctggactggaggccaagaccccaccaggaccctccctccttttctcccctgcagggacgggagtagattctgtgtcctctaactgaaccctctccttcctgctggttcctgtgctggaggcctgaagaggctccagttgctcctgcgggcctcctggttgtcttcctgtctgatggatggggggtggggggtccctaggggctaagctgcagctggtggggcggggccgggtggggtggggcaggcagcagctgcggggagaaagagagagaagataataaggggagagaaagagaaagagagcaaagagaaaagagagagagaggtgctctggctccggggctcttctcccaaacgggtcgaggtcccagctgaggctctcccaggacaaggtatgtggcgggggaaatgatagggctgggcagtgtcaccctgccgagtggggcaggtctgggggcactgaggggatgggcaggaaaattctgctgctcaacaagagcccct

SEQ ID NO: 1042 - DNA, 2300 bp, Homo sapien
ggggtccgaaggcagggcaccagagtcaccctcaaagaagaaaggtggttggtggtgggggtggggagaagtcagcccctgagggggtgagcctgcaggaggctgaactggggaagtggggagaaggcaaagagggagctgagcagcccaagatggggataaactgagtcccccaaggataaagaggaggatccagaccactcaggagagagaggaaggggtgatgggggagggggctgaggaggtgagggagggtgggaccgtctccccgaccccagcacagctggccccccaggcctggtggggaaatgggagggagcttgccactggagggccctggggtgggggctgagcagcgagtctctcccagcccccaggtcctcacgcaggaggcagctgggaaccacccacgctcatctggtgtctctcacgcctccactgggggtcccaacatcagagccaaggcacacagtgaagccggtgttccggagagcccagctgtccccaccccaccccggctcctcagttcctccagccgagacctccccacctgcctccaagcaggagggactaaggctagactctgaggacttgagaggctcagtctgggagcctggaggcggagccctggggtgccaggaggggctgagctgccgatgctgaagaaactctgggctgggaagggccctctgggcagatggcaaatgctgccggctttacctgcgaagtaaatccagaaaccagacccaccccggccatctctcagcctgaaatggccccttctcccaccttgcccccaactcctcaaagtctcttcttgacataataacccaaggaagctgtccacatggaggtcacaccctctcactctgctcaaagccccccaggacttcccatctcatctggaataaaaagcctaaagtcattgtcataggccccaaggccctggatggccccaatggcagttaccattctaactgccacacccaaatcccaacgtttaaaaacacatgtctaatatcgacatgtatattgtgtccattgtttattgtctgcgcctgtagtcccactatctagacagaacaatgctggccgcagaactagtgttttatatgtatttgtggaatgaatggatgagggcgcacacactggaaaaatcacttaacccctttgagcccatttcttcatggggacaataaggaccaacccctagaaatggaaaaaggacaaaatctcagcccagcatgcggagaatgttgctgaggctgggggcaggaggagctgggctaggggtcatcgactctggagaggagctgtgcggtcggcaggcagtgggtaggtgccacaggatccccaggcagatgttctgccctcctgtcatggcctgcacaatcagaggctggggagggaggaagggagggggtttccttgattggaagggggagtgggaggagcagctgacaccaaagttgggaggtgggattaattctgagaggggggtcggggtgaggtctggagtggtgggtttgacatgggggccggctcgccaaggtggaggtggggaagggggcgtgtctggtcccctaccccgaagacctcagtagctggaggaatgggcgctccacgctcccagctccgttagttgggagttgaggcgcaggagcagggagggtgcccagggtgccaattcggccctcgaagcgacgtgcggctcagagcccaggtgggtatggggaaggaagcggggcggagtggcctgggatcgcccccggctcaggagagagacctcttggcactaccgtgtccctccattccggccaccagagccgaggtgccgaggagaggggcgccgcgatcctcctccccgggcagggtgctccctcgagggggaccggggaactgagggcgtccccttctctccggggcgggggtggggggcggagcccagcgcgccgctccccagcccccagggctggcggggacccccccaggggaggggctccgggtgagcgctgcggggcgtctccctcgcagtcccgcccgcccctcctgccgcccctgccgcgcgcgccgcagcagcgccgccttccctgcgcagtcggtgtctccgcgtcgctgggtgagtgggggcagctccagccggggccgggggatgagggcagggggttcccggagctgggggcccacgtccagggcttcccaacaccgccgctcccgggcttcccgggaatccttgccccgggtggcgggggcgctggggactgggaagcgcgcggtgctctccagggtcctgaccgccg

SEQ ID NO: 1043 - DNA, 2300 bp, Homo sapien
taggataaagatctacaaatggaatttctgggccacagttacaagtgtctgaacatttttttttttttttgagacggagtctcactctgtcacccaggctggagtgtaatggcccgatctcggctcactgcaagctccacctcccaggttcacgccattctcctgcctcagcctcctgagtagctgagactacaggcgcccgtcaacacgccggctaatttttttttttttttttttttttttgtatttttagtagagacggggtttcatcgtgttagccaggatggtctcgatctcctgacctcgtgatccgcccaccttggcctcccaaagtgttgggattacaggcatgagccaccgcacccggccacaagtgtctgaacatttataatatgagtaagtactacccaaattgccctactaaaagattgtctgaggacatcaacattccgatgccagcccgatgtcttcataaactgcccccatcttcccttccacctgacaaatatgtctccccacccggaattccctgcacattatcccccttcagacagcaggtgacagggaagcagctctgctggggggttaccagatgggatgccccggggggcttcctaggagaaatggctccacttcctcccatggtgttaatgcgttctccaaactccagaggctctacatctgacccaactgcccaacacacacagcgccgcaggtgtcagcacaggtgtgcagaaagacacacagacagtggacagcccccaggacaggctccaaccaagcacccagagacagccagccagcccctgacctctgggacactgcccagtggggtaagtggggcaagctgtgaacagatgttgcccagttcccatagtaagtgcctccaaggaccgaaagagcccagggaggtggccacggtgtggccactctacagaacttgggcacagagacccaaggggattccaggctcctgcctactccaccacttccagctggtggtcttgggtgagtggtctgtggtctctgagcccaaaggtgcaggaatggtacctatgccaaagggatgctgagactaacaagggacctcactggggtccatcctgacacattaaagggctcagcaacccagagcagtactaataaagctcctactatgtgctcttgctaggtctacactttgtccatacagacagtctggagagtttccaaagcgtgttgttgttgttttgttgttttgagatggagtggcgagatctcagctcactgtaacctctgcctcccgggttcaagcgattctcctgcctcagcctccagagtagctgggattacaggcttgccccaccacatccggctaatttttgtatttttagtagagacggggcgggggggggggtgcgggggtgtttcaccatgatggccaggcaggtctcgaactcctgacctcaggtgatctgcttgcctaggccttccaaagtgctgagattacaggcatgagccgccgcgcccggccgaaagcgctttcttacctaatttttgtatcctattttgtctcaccacgaccttcggggacaggaattatccctgattttccaaggacggaactgaaggccctcccgactaagaaggagacttaaagcgcctttttcagcgtggaagacaagactcgcgggcgctaaaggcaagcgcagagaggggaggcgatttgcctgaggtcacacagcaggcaggggcagaccccaatccccagcagctctttcactgcccctgctgcccctctccgtcccagccttgggcccgggggctttccgcccaagagccacacccaagtcacggtaaccacagctacgccggcaacccccaacttgccgcgggcccgcgcggggcggctcctcagagcctcagtttccctttctagagcgggcccgccgccgccggtgggctgagggagggcggctcggcgccgggcgggccgggcggggcggcgcctgactcagcgggcgggccatgggctgctcagccggtccgaccggccgggaggggcacgagccgcgggggcgctgcggggccgggcggcccggggggtgacgggaagggaggccggtccggcgccgcccagccccgggctccgggcgggaagtgggcgagcgcgacggtgcggggcgcgcgggcgacgggccagcgggatgggagcagggtcccccggcggcccgcagcctcgggagccgcgctgaagccgggggcgggaccagcgcggagccgacatgtgtctgcgcctcggtgagcgactgggggcgcgc

SEQ ID NO: 1044 - DNA, 2300 bp, Homo sapien
ttagtgagttcccaaggaattcattaagtgaattctttttttttttttttttaagacagagtttctctctgtcgcccaggctggagtgcagtggctcgatctcgactcactgcaacctccacctcccaggttcaagtgattgtcctgcctcagcctcctaagtagctgggattacaggcacctgccaccatgcccagctaatttttgtatttttagtggaggcggggtttcaccatgttagccagcctggtctcgaactcgaacctcaggtggtccgcctgcctcggcctcccaaagttctgggattacaagcgcgagccaccgcgcccagcctcattgagtgaatattaaaatgttgtggaggagttaatatttacaaacaaaatgtttgctaatatttacaaataaacaaaatgtgttaatatttacaaacaaacattcattgtgtaaatgaaacacaacaccttcattgccaatttgtcgaacatttgagtacttactgtgtgctagtcattggggacataggggtgagtaagacatgatccctattttcaaaattgtttatcccttctagtggagaagatagcacaaagagaatgggcaaaaatggttgggcacagaagggctgactgtaaaagtagccaaactcagaataccaaactgatagaaaggttatgatgaggtctttttatatcctctcccacgaacatggtttgcagtatctattaggtatggtaggacatatgccaagaaaactacacaaatcagagtgttcattagtgcagggtgcagtgtgtctggatgggatgtcaagtgcataaggctatgcagcatcccaagtattgtcagtcatggaagctagatcagttttggtgggttagggaagacagaattcagcagagaagaatggaaaaggaatttcaagtctggaagcctgtctttacaacaacaaccaaaaaagttaaagagcccagagctctaatagtctggccttgtcctttgctctcccttgtgtaatgtattcatttcccataaactcttctgttaatccttactgaaaagaaggctgttgctgttatcaagccctatgataatactagctgtatttgtaatgttgacattaacttcagtctgtttcccctgcagcccctctggctgtacattctggggcaagaagccatggagccgtaagaagaaaattctttggcagctgggcacgttgattggtgctccagtggggatttctctcattgctggcattgccattcctgccatggtcattggcattcctgtttatgttggaaggaaggtaagaaagacatgctggtttctgtgcttgtttcaactttaggttcgttagtaaaggtttgagggaaatgggaaggagctatgtttcagagctgcctgaaaaccagctggttcttagataaaaataaccttactttcttaaatggattttcataaacccccatgagatctgaaagttcttattaacatcctgggcctggcttgtctcagtgacttaaaggtagaatgctgggccaggcatgatggttcacatttgtaatacgtggcctagcactttgggaagccaaggcaggtagatcagttgagcccaggtgtttgagaccagcctgggcaacatgacaaaacccatctgtacccaaaaaaatagaaaaattagctgggtatggtggcatgtgcctacagtcccagctactagggaggctgaggtgggaggattgcttgagcccagggacgtagaggttgcagtgagccaagatcgcaccactgcactccagcctgcatgacagactccaaaaaaaaaaataaaagaagaaggtaaaatgcttacttcattctgctggagttattttgtctctttttggattaactttgcctgtattactttatatcttccaggtctgagttaggttaaaatttgataaagatgcctatttggggtagaggatatgttttaatatagataacttacaagtgaatattcacctgtcctttttttctctggcaaaagattgatgtcctaacctgctgacctggattttctttttttattcttagattcacagcaggtatgagggaaggaaaacctccaaacacaagaggaatttggctatcactggaggagtgactttgtcggtcattgcatccccagttattgctgcagttagtgttggtaagctagtcaggaccacacctcttctctctcagctttctgaccatagcagtttagccagatggccagatgtttctcaaagactcctacattttatgcgaac

SEQ ID NO: 1045 - DNA, 2300 bp, Homo sapien
ggcgcgatctcggctcactgcaacctccgcctcctgggttcacgccattctcctgcctcagcctctcgagttgctgggattacaggcgcccgccaccacgcccggctaattttttatatttttagtagagacgggatttcactgtgttagccaggatggtctccatctcctgacctcgtgatccgccagcctgggcctcccaaagtgctgggattacaggcgtgagcctccgcgcccagccccaaggcagtcttcttaaaaggaagaggatgcatctttcttccctttttccttcccactgtttggaatatggaccatagtgaggtgaccttaacactggaagccaaatactgaggatggctgaacagccctgaactgcctacttttggacttatatttcatggaaagagagaaatttctggctaggtgcagcggctcatgcctgtaatcccagcactttgagaggccaaggcaggaggatcgcttgagcccaggagctcgagaccagcctgagcaacacagggagatttcatctccatgaaaaaaataaaaataataggcaggcctggtggcgcacctgtgctcccagctactccagaggttggggtgggaggatcgcttaagcttgggaggttgaggcttcagtgagctgtgatcacgccactgcactccaacctgggtgacagagcaaaaccgtctcaggaaaaaaaataaataaatttcaatcgtaagctatttttttcttttgttatttgcaattgaatgtaatcctgatacattcctgttgttgaagctgtttgcctgcctcccactaggaagcctaagggtccagatcctcccccagtcagaggaatggggaactagaaaaagaaaggcaaaggcactgccaggcaagaaaacgctgggtctccttccacaagtttggtaagtaagcaagataccaggaggatagaatggtaagtgagcctagaaatagactattatatacatagggtttattaaatacatagagaacactgaatgctagactaagaaatttggactttattctggaagtcccttgcaataggggaccttgtctgttttattttctaatgcctcgcactttgtagaagctcagtgaatgaatatattctttattaatttatgccgtctgcttaataaacagaaatgttggaaggtgaaccagttgggagtcaccatctgatcaacccctgcctgctttttataaataatgtaactgaaccatcatttactggaagtggcaatcaacctgtgaggaacggcaaaccaaaaagtccaccttgggtgtcatggtgatggaattggaggcggagaccagggagagcagcgggctaggatctctgagagtctccgcaacatggcggccctggaaccacctgaccggcaggaggcggagctccgccccagctcgctcggccccaccccgctcggccctgcccagcgcactcctagaccggggcgcaagggttgtgaggtgtttgagcgaagcgcctgcgcagggcagcggcgcgcggggcggaggctttataatcacttcgtcgttgccgctcggcttctatcgccgggagggcggttgaggcggtggtggcggcgtcggcggcggccgggcgctggctgaggggcgctgaggcgggagctgtggcggcgctgggcgcccctggctcctcggcctctgccggccatgggctccgagaaggactccgagtcgccgcgctccacatcgctacatgcggccgcacccgaccctaagtgccgcagcggcggccggcgccggcgcctcaccttgcacagcgtcttctctgcctcggcccgcggccgccgcgcccgggccaagccgcaggccgagccgccgcccccggctgcgcagccgccgcccgccccggcccctgccgcggcccagggcccgccgcccgaggcgctgcccgccgagccggccgccgaggccgaggcggaggccgcggcggcggcggcggagcctgggttcgacgatgaggaggcggcggagggcggtggcccgggcgcggaggaggtggagtgtccgctgtgcctggtgcggctgccgcctgagcgggccccgcgcctcctcagctgtccgcaccgctcgtgccgggactgcctccgccactacctgcgcctggagataagcgagagcagggtgcccatcagctgccccgagtgcagcgagcgactcaacccgcacgacatccgcttgctgctcgccgacccgccgcttatgcacaagtacgaggagttcatgctgcgccgctacctagcct

SEQ ID NO: 1046 - DNA, 2300 bp, Homo sapien
tttgagacgatgtctttttgtgtcacccaggctggagtgcagtggcataatcacggctcactgcagtctcaacctcccaggctcaagcattcctcccacctcagtctcccaagtagcggggactacaggcacactccatcacacccagataatttttgtattttttgtagagatggggttttgccatgttgctcaagctggtctcaaactcctgggcttaagagattcaccagcctaggtctcccaaagtgttgtaattacaggtgcgagccacagctcctggcccatcttaccattccttattaataacagagcactcattgttagctgggcacattgtacccagttaagagaatgtttcccaggctcccttgcagctgagtatggccatgtgagtgagtatgttttggcaaaaatgtgcgggactttcgaggcagtccttttttctttctttctttttctttttcttttttttttttttttgagacagagtctcgctctgtcgcccaggatggagtgcagcggcgcgatctcggctcactgcaacctccgcctcctgggttcacgccattctcctgcctcagcctctcgagttgctgggattacaggcgcccgccaccacgcccggctaattttttatatttttagtagagacgggatttcactgtgttagccaggatggtctccatctcctgacctcgtgatccgccagcctgggcctcccaaagtgctgggattacaggcgtgagcctccgcgcccagccccaaggcagtcttcttaaaaggaagaggatgcatctttcttccctttttccttcccactgtttggaatatggaccatagtgaggtgaccttaacactggaagccaaatactgaggatggctgaacagccctgaactgcctacttttggacttatatttcatggaaagagagaaatttctggctaggtgcagcggctcatgcctgtaatcccagcactttgagaggccaaggcaggaggatcgcttgagcccaggagctcgagaccagcctgagcaacacagggagatttcatctccatgaaaaaaataaaaataataggcaggcctggtggcgcacctgtgctcccagctactccagaggttggggtgggaggatcgcttaagcttgggaggttgaggcttcagtgagctgtgatcacgccactgcactccaacctgggtgacagagcaaaaccgtctcaggaaaaaaaataaataaatttcaatcgtaagctatttttttcttttgttatttgcaattgaatgtaatcctgatacattcctgttgttgaagctgtttgcctgcctcccactaggaagcctaagggtccagatcctcccccagtcagaggaatggggaactagaaaaagaaaggcaaaggcactgccaggcaagaaaacgctgggtctccttccacaagtttggtaagtaagcaagataccaggaggatagaatggtaagtgagcctagaaatagactattatatacatagggtttattaaatacatagagaacactgaatgctagactaagaaatttggactttattctggaagtcccttgcaataggggaccttgtctgttttattttctaatgcctcgcactttgtagaagctcagtgaatgaatatattctttattaatttatgccgtctgcttaataaacagaaatgttggaaggtgaaccagttgggagtcaccatctgatcaacccctgcctgctttttataaataatgtaactgaaccatcatttactggaagtggcaatcaacctgtgaggaacggcaaaccaaaaagtccaccttgggtgtcatggtgatggaattggaggcggagaccagggagagcagcgggctaggatctctgagagtctccgcaacatggcggccctggaaccacctgaccggcaggaggcggagctccgccccagctcgctcggccccaccccgctcggccctgcccagcgcactcctagaccggggcgcaagggttgtgaggtgtttgagcgaagcgcctgcgcagggcagcggcgcgcggggcggaggctttataatcacttcgtcgttgccgctcggcttctatcgccgggagggcggttgaggcggtggtggcggcgtcggcggcggccgggcgctggctgaggggcgctgaggcgggagctgtggcggcgctgggcgcccctggctcctcggcctctgccggccatgggctccgagaaggactccgagtcgccgcgctccacatcgctacatgcggccgcacccgaccctaagtgc

SEQ ID NO: 1047 - DNA, 2300 bp, Homo sapien
ccagactccatcccaggctcacccttgcagctcagagtctaggaattgtcttcatacccacaaattagcacagccaccacctacttggccaacttttccccatggggaatttcctcagttcctgctgaagtgaagctacccagctttgggtgtttccctggacacccatcagaggaccttctgacagtttgcagagattgcattgatggtaaaccctgaggatggtgtgtttcgcagcaatcagcagagttaacattttctatttcacatccattacaaaatatgacagaagctgccatttgctgggcctggcacagcctcaaatgctttatgtctgtaatctcatttaatcctcatacaatccagggggataggaatgtaggtcctattgtacagatgaggaaatggagcctcagagaggagaagtgatttgcccaaggtcccagtaaatggtgcaggcaggactcccactcagggccacagtctggggtttaaccactacaggacactgcttcctcacagtcccaccagacagcatcagagctggaagggctccacctgctcccaactttacagatggacaaatcgaggcccagagggaagaagtgactggcccaaggtcatgtaacaagtcaatgctagagcagattctaggactgctctgctaaaaggctcaccacaccattccagaaaacaaaaagtgcctcaggcagaagcagtggatataccagaaatctcattttaagaaatccatagcatttcctaggaagtcaaacagtgcatgaggttcacaagacaaggatcttgcagaggttcttgaggttagggcagagtcccagcattcctctaggcagtaaggggcctgtgggtgtcactcttttggtcctacagatgaagctgcaactccagctactggcggaggtgatatgtatgtccagaatgttctcgactgccttgcctagctaatgcctacctgtcttcaagtgttagttagaagtcacttcctctgggaaggcctctgtgaacccctaagcttgccccactgtagattctcatggccctagctcttttccataagagcactgtcctcggtttgccctgtggactcacatcagaggcacatttaactaacaccagctttacaacttatcctccaaccacccaactccaaagatgccaccccagaatttggtattatcctcacaaaaccaaactcaccttttagcatgcgctaagctgataatgctgaatatagaaacagattggagtcacccctgcagataccaggagcactcctgaattctctgctcaatctcaatgcatccctagagatggggtcattttcttaaaggcagagaggcttcaatgtccaggtatctcaagacagcctttccttcagttacttattttagcatacaaaagaatttgaagatggaagaggggaccaccagccaaggaatgcagcccaagaagctcgaaaagttatgaaaaccaattctcattgagcatacaaaataattgagcatacaaaagaattattgtgcagtacaggtaatttaagagctttattttattttattttttgagacggagtctcgctctgttgcccaggctggagtgcaatggcacgatcttggctcactgcaacctctgcttcccaggttcaagcaattctcctgcctcagcctcccgagtagctgggattacaggcgcccatcaccatgcccagctaatttttatatttttaatagagacggggtttcaccgtgttgaccaggctggtctcaaactcctgacttcaggtgatccgcccaccttggcctcccaaagtgctgggattacaggcatgagccactgtgcctggcctagaatctttgtttctgtttattaattgagaaaaggaagtaaccattttagttaaacatgaacttcagagtcagaaagatcttggttcaacttcttccctgagaaaacaccaaagtgcagatgactggtgcagagagaggactcagaggcccttggggccctggaatgggaggtcatagtggtttccacggaggctttggcagtggcattggggcctggatagtggttggggtcagggcctgggccatggagcttgcagaggcaaggatgaagatgaggaatggatgcctgtcaccaagttgggctacctggtcaaggacatgaagatcaagtccctggaggaaatctagcccttctccttgaccatcgaggagtctgagatcattgactttttcctgggggcatctctcaaggatgaggttttgaagaccacg

SEQ ID NO: 1048 - DNA, 2300 bp, Homo sapien
caagcgatactcctgcctcagcctccctaatagctgggattacaggcatgcgccaccacactgggctaatttttttgtaattttagtagagacggggtttcgccatgttggccaggctggtctcgaactcctgacctcaggtgatctgcccccccctcaggctctcaaagtgctgggattacaggcgtgagtcactggacctggctcatcctcagtcttaattgtgagtctgctactgtgtgactttggtcactacgtatcttcaggcctcagcttccattctgaataatagacataacaatcctttcttccttcaatgtcattgggagtatccaacaagattaagcaggtacactgtaaaagtccagcgtggcgatgagaaatgaatgttgacttctgtgtggtaaggaagagaccacagctgggctgggcacagtggctcacgcctgtaatcccagcactttgggaggcccaggcgcgcggatcacgaggtcaggagatcaagaccatcctgactaacacggtgaaatcccgtgtctactaaaagtataaaaaaaattagccaggcgtggtggtgggcacctatagtcccagctacgcaggaggctgaggcaggagaatggcgtgaacccaggaggtggagcttgcagtgagccgagatcgcgccactgcactccagcctgggcaacagagcgagaccacgtctcaaaaaaaaaaaaaaaaagaagagaccacagctgaagggatagcaaattcatcatcaagatgtagaaaatgagttgttaggagcctgtggggaaacataatcgtttcattacacactcttaactaaaggtccaaagaggcccttggagctggatgaaactttcacacaccaaaaagctgtagaaattatttccctatccaagagggtcatctcttttgagaaaaactatcttttcctgactttaaaaggttaacgtttttcttaatataaaggtaaaacttgttttaaacttaagtttttaaacttattaagaatttaccatagaactttaaaaaatctattaaaatatacaaaggagaggtgctcctctaatcacactacacagcggtctacacttgtaataaacaaaatcgggattttttggggggggagtgggacggagtttcactcttgttgcccaggctggagtgtaatggctcaatcttggctcactgtaacctccgcctcctgggttcaagcagttctcctgcctcagcctcccaagtagctgggattacaggcatatgccaccactcccagctaattttgtattttcagtagagatggggtttcatcatgttggtcaggctggtctcgaacttctgacctcaggtaatccgctcgccatggtctcccaaagtgtggggattacaggcgtgagccaccgcgtccggccaaaattcggattttgttgtaactgcaattttgtatctcgctttgctaacattttcccgcatgattaaattatcttatacaacaggggtattccaggatacaaattggttgcaatttatttaaccaatctcttattgttggacatttggagtattgcctttattttatggtttttctcgggcttttgggctaagtgttgcaattaacaactttgttacacgaatctttactcatatccttgattttatccattgaattcgtggaagtggaattgctggaccaaagggtatttgaaacatattactaatttgtcttctaagagtgattttacccatttaaactcccacgcgcaatttaataggatttcaatgttgttgctggtgtcgtcaactgtcaaatgccgaagtataccttccggcctgacctcctgtcctccttcgcgttttcccgcccactccgcacacccgccacccttagtacatgctggcccgccccttccttatcccgcaccaattctgtccaatcaaaagcaaagttcctcagtatcgccgtgcagttggtaaggtgaagagtccgtcgtgctcaggggcgggcggaacgggctgacggacgcggctatgggccagtgtgagcggcgagtgggacgtgcgtggcgtgcgtgcgttgacctgggaagcactggacctgtgaggcgtgcgaactggtggcagtgagagacttcggcggacatggctcccagcgtgccagcggcagaacccgagtatcctaaaggcatccgggccgtgctgctggggcctcccggggccggtaaagggacccaggtgagcggcaggactgggcttggcggcggagcctgctgaactccaaggtcaaggcggcc

SEQ ID NO: 1049 - DNA, 2300 bp, Homo sapien
tacttgttctcatactatgttgcaaatgactattaatctcaaagaaaggtcctgcaaatgactgtcctataaagctgcctcctgaaatactactcctatgcatagaaaacaagatggttccaggcagaagggcccagagaaatcagtctgaaacctctcagttcacagggggaaatcaagccaggcagaagtgacccagatccagttagggtgactcagccaaggacacccagcaattatatgtcccagctgggtagggagcagaaaatggctctcctgcttctggtccctgccccacaccatttgtgtactgagcatgttctaactaggttgtgcagtgtcctagggagatactaaggcgggacaagaagtgcctctgatttaaaaaaaagtctacagcccactgggcatggtggctcacgcctgtaatcccagcactttgggaggctgaggcaggcagattgctagagctcaggagtttgagactagcctgggcaacagggcgaaaccctgtctctacaaaaaatacaaaaatcagcaaggtatggtagcatgcacttgtagtcccagctacttgggaggccgaggttggaggatcacttgagcctgggaggtggaggttgcagtgagctgaggtcatgtcactgcactccagcctgggtgacagagccagatcttgtctcaaaagagaaaaaaaaaaaaaaaagcccacagcctagcaggggacatgaagacatatggtagaccaaaagccctttggcttcattgatttgaaatgctgcctccattgtgtaccaatctccaatgtatatgggactgttgtagaccctgttctgttttaccactgtctcttcctgctccagcaccatactgttttaaagactgtagttttggccgggcgcggtggctcacgcctataatcccagcactttgggaggccggggcgggtagattactggaggtcaggagttcaagaccaccctggccaatatggtgaaaccccatctctactgaaaatacaaaattagctgtgcgtggtggcatgcgcctataatcccagttacttgggaggctgaggcaggagaatcgcttgaacccaggaggcagaggttgcagtgagctgagatcgtgccattgcactccagcctgggcaaaaagagtgtcttgactgttcttgtacacttacttttccagatgaacttttatatcagcttttgagtaacacagctattgaatcttcctcagcattcttgtctatgccaggcaccaggctcttgagcagggtattcagtccttgcccttgggaaatcacaaactagatgcaaagtgtaaccaaacaagaagtgtaaaataacaacaggaatctcacgctatgggtaacaagaaccaaatgagtgaggggtccagacagactaaatgctgtgttccttggggccaggcaagtcatggaaggttcaacagaggtgacattatacaggactttgatgggtgagcagcagctttcggtatagaagaaatgctttgagttgaggaagtccgggaaagcttcttggagaaggagacacatttctattgagagatgagtaagagtttgccgggttcacaggatgggataaagggagggattgccctgaactgggaaagtcacaaaaaggttctctgaagacattttagatgcgttttgagttggagtcggggaagatgcctggaagaggcaattaaataaaaagaattttattacaaaagtaatacaaggacatgtcattggaaccgggtttcgagagatgagtgagcagttcctgacgcagacaagagctggaccacgaagtaagttgaggcagaggcagaaaaggcttcctggtcctgcccactctctaagacctaagatgcagggtctaagtgtctcacctgcgtggcggcggccctgtagttctgacttccagcgtgaggtagccaccgccaggcctccgggggagaagactacagtaagggcgagcagagctgaatgctttatgtcggaatcgaccaatgggatggcggcacccggttgccagggctacggccaagcggaggtagggcctcggcactatgggcggggcctgggcggggttatataagccagcggcgggcggaaggcggggcgtgggggtctgtggctgctgggctggcggggcgcaggccgcgggacccgagcccggggaagcgagagagcggaggcgccgaggatccgattcactccctggggagacctatgggccgaagccgtgtaaatgcgttttaaggcgagtgcggaaagtggc

SEQ ID NO: 1050 - DNA, 2300 bp, Homo sapien
cagttcctgacgcagacaagagctggaccacgaagtaagttgaggcagaggcagaaaaggcttcctggtcctgcccactctctaagacctaagatgcagggtctaagtgtctcacctgcgtggcggcggccctgtagttctgacttccagcgtgaggtagccaccgccaggcctccgggggagaagactacagtaagggcgagcagagctgaatgctttatgtcggaatcgaccaatgggatggcggcacccggttgccagggctacggccaagcggaggtagggcctcggcactatgggcggggcctgggcggggttatataagccagcggcgggcggaaggcggggcgtgggggtctgtggctgctgggctggcggggcgcaggccgcgggacccgagcccggggaagcgagagagcggaggcgccgaggatccgattcactccctggggagacctatgggccgaagccgtgtaaatgcgttttaaggcgagtgcggaaagtggcctggggagcctcggggagcggacgccctccgccctggtgctgacctgcctccctgccccttctgcctcctgtcagcagaggcctcggctccgcaactgccactcctcctcggggtgttgcacaagtttcgaggtcaccggcgaccccccctagcagcgcgcctggctctggcccccgcgaaggaggacggagtttggtaaggggccctgggggttggggggacctcagccctgcactctgtaggagtcactcggacagaaaaaacctcggccttccgttctctcccaggagcttgcggcccccacccaccgcgtggcgtccccaggcacgcctagaattctagcacctcaggatcagtccagcccccatttacaattggggaaactgcggctccgaaagggtcagagggtacccgaggtcaagcagtagagagcggactcgaacttaagctcttgctcttaggctgagacgccttgatgtggccaccggctaccctctaggtgggcgtggtcaagactgggggcgccctggaaacttccccacccaagtttctcagattttctgttccatctctctctcactctttcctgaaatccagaatttcagaactgggaaggctctccaaaacaattcatccattttacagagggagcaactgactcggagaggcagtgacatttgggcatacggtgccttgtctccgtctgaaatccgggattcttgactttctccacccttgcccagtgaaccccgggcttgtgctgggggcgggttgtgacgggattgggatccctggcctcgggaggcgagtggggcagcagagccggccccccagcggttcccttcatctcccctcgccccgcagtgtgttgcatactttctaaggcggcggctgcagcagcggctccatccagcccgtcagctcctcctgcaaggcatggctggctacctgagtgaatcggactttgtgatggtggaggagggcttcagtacccgagacctgctgaaggaactcactctgggggcctcacaggccaccacggtgaggggctgggaatgggggtgggtccccggtcccctgtacagatcagctgcctcctcaggaagggtccctagggccctcatcttatcctttcgcttatttggtacgcaatccttgctatttgcaagagaggggctcaatttatccccaattctttgtccttgcccccaaacctgcccctcctatgttgcctttttacccagccctccaaggtcagaaacgggggattcctttcctgctgccccctctccctcaccgcccacatctaggcattaccaagctctgtgaattctgcctccttaaataagcctccagtgtgcttatgtggaacctcgctttctagttcagtcttcctctctccaaaggccccctgatctcccggtctcatgccaccccctccaaaggtatcatagtcctgttcaaaatctgaatttggcaattctccactgcctacaggatcaagtcagagcttccctgcctccatagccccattcccagctttccccacagtatatattatgctccttcggagctgaatgactcaatttgcatttcccaatgatgctgtgtgcccaatgatgctattaccatgcctttgcccaggctgttccttctgcctgcagcatccttctctcagcctctcccctctttacccctttctagtcattccttgcttctcatcagtgttgcctttcctgatcgccccaggcagattttctattttctttctccatgcccctgcattgcacct

SEQ ID NO: 1051 - DNA, 2300 bp, Homo sapien
agcatagctaatccacaaagcagcccggctgggtaaatggtattatgctcattttacagaggaggaaaattgaggttcagagagaagccaagacttacctggggtcccatatcccatgctggcaagtgccacaccacaaacctgtccaaaaacttaccagccagggaaggctgtcagtctttacctggaggagaggtggtggtagtcttgggagcaggcagcaggcagctcatggggcagtggcaagagcctggtctcgggaaccacacagacctcagctcaaatccaggctccatcactgtgtgactttagaaaaatgaccaccctctctgggactcagttttcccacatggaagatgaggataccaatttcacataatttattggtaagctgtaaagtgcagtgcacttaaggaggccctaccctatccccccagctgcctcccagagtcagtgcctggagctgtatgggtttcctgaacctctgggctggctctgacccaagaagtctgtctttctccttatgggctgtgacgggtatggaaccacctagaccaggaccatcctgaggtccatcccacctctgactgatgaggaagcatcctggctgggagttaggacaggctctgcatgtggacacacaggctgtgcacacttaagtggaaaagactgtcgactaaagaagaaatatcaagcttttaaagaattaaagttcactttacttagaagtcttactgagtactatagacaggcctagagcccagcagcggccctttagagaggttctatcagtcgggcccaggacagtattttagcccactgcttatatacaggtggtggaggtttagtacacgcaaaatcacatcacacttgctcagaagtaacattaaagccaccgggcgcagtggctcatgcctgtaatcccaacactttgggaggccaaggcaggcggatcacctgaggttgggagttcaaaaccgccctgaccaacgtggagaaaccccgtctctactaaaaaatacaaaattagccgggtgtggtggcacatgcctgtaatcccagctgctcgggaggctgaggcaggagaatctcttgaacccgggaggcggaggttgcggtgagctggagatcgcgccattgcactccagcctgggcaaagagcgaaactccgtctcaaaaaaaaaaaaaaaaaaaagaagtaacattaaagcggaatcatatatcaacgtttgcatgtaagagtgtgtctgggctatagattacagaggcataatcatgaatgccatcagacactatcttctgtacaggaaaaggcaaggactaggtttatttatcttttaaggaacgtagtgactcaggcaagagacatgggggccatgcccactattctgtcttgtctccaaagtatccctccacagagccgcacatggtcacagagtcagaggcttgtgaaattatgctggcaaacagaaatgagggaagtagcttcttccatttgctactgtgtctcccaggccactgggtgctctctgcagtgtgcaagggagtacagcacccctgggagcccaggactggtgttggctttctgttaagtcattttcaccctaagccattcttggcctcctcacccacagaatgagggaggttaggctgcaggccacaggtggatcttcatctacagcctggagctggggagagggaaccaccccagtcattgactcgcctgggtttctaggaagaggaatgagaacgaggatgggagaggggctgttggcaggggtgggtggagaggtctctgattgtctgatggagagcagcccagttcacagggaagtgactggggtgattctgagactagagtatcccaagccctcccccatcctctcagatccctgtgactgctctaaaaccacgccctctcattttggctcagtggatctgtctttgctcagccttctccctctggggtcggagcaccccctccatggcgcattccaccttctccccactcagcctcagcagcagctccaagaaatgctggccacttcccaggctttactcacagtttccacgtgtgtggaagtaactatagaggccaaatttgcattatcaactggggactcctggaaatgggggtgtctccaagagatatatttgatacacgtccagagaattcctgaaggaaagaatctggggttgtcaggctgatatcatgaaccccacatttaacacattaagtgaagagaggggacaaaggccaggcttgggaaggaaggagggatcaacaaagcccttaccca

SEQ ID NO: 1052 - DNA, 2300 bp, Homo sapien
tgagaccaccataatggacttggaccaaacaagactcactcctggaaatgggctggggtcagccttccttgggtcacttggggaagggggccacctgaccaaaatcagggctctgcccataagaaaatgttgagaaactgctgttgcatgagcaaccaactatttttctcgcaatgatggagattctgggccagatgagggtgtgatggagaaagtgttaaccatagagaactaaactgagagctttttcataaactgtacctcaataaagtttaacaccaatgaagatatttctggaggaggcagaaactggtagccaccctctatggctcatttccctcacccccgtatccaaccatcaccaaatgtcaccgtgtctgtacttgcaataccctagtcttctctccttacccactgctgaggccccagttcgggtctcacctcctgcaggcacgatgacaacagcaccttaggggtgcccagtctttccttcctcctgcaacccagggcgttgatgcggttattcagctacacacctttactgtgtgctgagtgctgtgcatccgcagacacattggaaaagctccctgtcttcttcaccttgcagatggtataatgattatctccaagacttcctgaaacccaatcggaccaggtcattcccttgcctgaaagccccatgccttcaagaaattctttaccatgacccacaatgccctccagcccacccaggctccttctccaccccacccccaacagtacagaattactagcacttccttcactgcgccctcccctttcacgcctctatgcttttgcacaggctgtctcctctgcctagaaatcccttatcccctctccatctggcacacaagacaagttctcctattactttttctccctctctcctgctccacccctcaccgccttacacacacacacacacacacacacacacacacacaaatacagcactccagaattgtttgccaatggaggcagcctccggggccagatgttagccagggctttccaaacttctccccaagcactccttaagaaagtgaagaggaaatgggaccccagggcttaggagtgtgagggccttgaactcgctctaagcaagcagggcatttcaagagttttatctttatattttatgcagaagttgtattccaaatatattcttgttcgttttaatacaaaatatgattttttctacatcttcaaatcgatgatccagaaagatgctccttgtttatttgttgtgctctcaaattagctgctccgcctcgccgcggggaccctaagcgagacctggatgcagttccaagtacacaccccgaaggaacagctgggcttcgcttccctgggagctggaggatggtgggggtggggcggggtcaaccggctggtggccccgcccctcccccgcccgctgcgggggcggagttgcttgggtcccgcccacgggggcggggaggcagccgcggccaccggcagctcggattcggctggttccgggttgagaggctgcgctggaccgaagcggtggctgctaagctcgcgggggtaaggggtcgcgctgggccagggtttggggccgggatccggcagctgagcgggccggcacccctcctcttctctgccggtcacagccaatgtacggctcggcctggctgccccctcccccaggattccccatccccagcttctcgccctccccgcaccgcccccaccccgggatttcgacccccttaagggctccaccccgctccgggatccccttctcccagctcctatcccttaggactgccccgccccctagaacctccccgtcaggatctccgtccctcagccgctcacagcctcctcccagcgcccatcgccttgagctgcccactacctctagactgccctcccgggctggcgtcccacggagtctcagccgcgcaccccttcctcgcgttaccctccttccggacagcaccccctcccttctccggtagctcctacccctgcctgtgcgggcctcgtccccgcgcccagccctcggtgctgcctccgacagcgccgcgctctctcagccgcccccctgcccctcgggcccccctctctgctgcccctggcgccatggcgtgcagcctcaaggacgagctgctgtgctccatctgcctgagcatctaccaggacccggtgagcctgggctgcgagcattacttctgccgccgctgcatcacggagcactgggtgcggcaggaggcgcagggcgcccgcgactgccccgagtgccggcgcac

SEQ ID NO: 1053 - DNA, 2300 bp, Homo sapien
gcatagtttattccacctcctcacaaagacctgcttggagtcagcatcagtaaatacatgttgaataatgaagtcactgtttcatccatcatcaagcctttttttttttcatttcatttcaaatgcttcaataatttagactctgccctgttcactttccccaccccctcattaggggtgcacgtcagtatatcagttgggattctctgggttgcaaagtgacaatgcactactgttaaactggcttatgcaataagatggaccatctcacatatcctgaagtccagactctgcatcagaataaaagcttctcttccctaggactctcttggccttgccctcccttctgtatttgctgcatcctcagactgggagcaagatggctgttgcaattccaagcattgccaccaaacatatcccagcaaagggggcagactgttttgcaaagtaaagagaccatttcctgaaaacccctctctgccataggcttcccctttagtttttcaggctggacctgcccaaaccgtcactggcaagaggaatgagaccaccataatggacttggaccaaacaagactcactccatgagaccaccataatggacttggaccaaacaagactcactcctggaaatgggctggggtcagccttccttgggtcacttggggaagggggccacctgaccaaaatcagggctctgcccataagaaaatgttgagaaactgctgttgcatgagcaaccaactatttttctcgcaatgatggagattctgggccagatgagggtgtgatggagaaagtgttaaccatagagaactaaactgagagctttttcataaactgtacctcaataaagtttaacaccaatgaagatatttctggaggaggcagaaactggtagccaccctctatggctcatttccctcacccccgtatccaaccatcaccaaatgtcaccgtgtctgtacttgcaataccctagtcttctctccttacccactgctgaggccccagttcgggtctcacctcctgcaggcacgatgacaacagcaccttaggggtgcccagtctttccttcctcctgcaacccagggcgttgatgcggttattcagctacacacctttactgtgtgctgagtgctgtgcatccgcagacacattggaaaagctccctgtcttcttcaccttgcagatggtataatgattatctccaagacttcctgaaacccaatcggaccaggtcattcccttgcctgaaagccccatgccttcaagaaattctttaccatgacccacaatgccctccagcccacccaggctccttctccaccccacccccaacagtacagaattactagcacttccttcactgcgccctcccctttcacgcctctatgcttttgcacaggctgtctcctctgcctagaaatcccttatcccctctccatctggcacacaagacaagttctcctattactttttctccctctctcctgctccacccctcaccgccttacacacacacacacacacacacacacacacacacaaatacagcactccagaattgtttgccaatggaggcagcctccggggccagatgttagccagggctttccaaacttctccccaagcactccttaagaaagtgaagaggaaatgggaccccagggcttaggagtgtgagggccttgaactcgctctaagcaagcagggcatttcaagagttttatctttatattttatgcagaagttgtattccaaatatattcttgttcgttttaatacaaaatatgattttttctacatcttcaaatcgatgatccagaaagatgctccttgtttatttgttgtgctctcaaattagctgctccgcctcgccgcggggaccctaagcgagacctggatgcagttccaagtacacaccccgaaggaacagctgggcttcgcttccctgggagctggaggatggtgggggtggggcggggtcaaccggctggtggccccgcccctcccccgcccgctgcgggggcggagttgcttgggtcccgcccacgggggcggggaggcagccgcggccaccggcagctcggattcggctggttccgggttgagaggctgcgctggaccgaagcggtggctgctaagctcgcgggggtaaggggtcgcgctgggccagggtttggggccgggatccggcagctgagcgggccggcacccctcctcttctctgccggtcacagccaatgtacggctcggcctggctgccccctcccccaggattccccatccccagcttc

SEQ ID NO: 1054 - DNA, 2300 bp, Homo sapien
tggatgaccttgatagttttgaggggtactggtcagccagcaattttgttggatagcccactcttggagtctgtctgtttttctcacaaggctggggttatgggttattgggaggaagaccacaaaggtaaagtgtcattttcatcacatagtatcaagcacatatcaacatgatttgtggctgttgatcttggccttgatcacttgtctgagtagcagtcatcagctctctccctgtaaagttactcctttcctctccctttccatattgtgcgcttggggaggacgtcactatctgcagcctactcctaaagagtagggagtgatgctccccctccctgattgtctacataaattatttggaattcttctgcacagacaatttgtctcttctctcccgtttattaatttattatctcattgaatttctcaacaatgggttggtcctctgattatcgtcatttctggaaactggaaggccttcctttcttccccacctcgctcaccccagagccaatttctgaagccctctccacctctccaggaaagagtggcctcctctgtgctctcccgccatgctttaacattccaactaattcatgccacacagatttcttgtgcccctgctctgtgccaggcactgtgcttggggattgagaacaagcagtccctatgggccctgtcttcgagttgctcacagtgtttgccatcctgtgctggactagaatcttcgtgagggcaggggcattatccagttttttaatagctgtgctccagccaaccagctattaaaaacagtggttgatgtttactaggtcctctatgaatatttactgaatttggaaatgcttcctggaggacaaacgctggcagatgattgtttatctctgtgcccttcccgggggactgtgcgctccctgagggcagggccagccctgatccatcctggcccagcggtcggggggtggtggatgccatagaaatctaagccggtgaagggatcctggaaccggctgcctcctcaggtagaagtgtaagtttggaagctgacacagctcgggaggccgaatcaggaggacttggtgactgattggctggggagggtgaggcgggaggaggagtcacacagatggctctgaggtctggagccgggggacagccggtgccacctctgatagactctgcgagaggagccactgccagcttcgggccgccccatccgtcggggatccggcctagggctagggaggggtggctgggcctgtgcaaacttctactccccacccctatgtcctcgtcttaaaaaaaaaatcggcctggattttgagcaggtcgttatcaggggtgagggtccatcctgggggtcccctccaggcggccgtcttcgagggagacccccaggggcagcctggcaccgcgcgggctcggcctggtcagggccgtggcccgccaggcccaagtccccagcctgccatcacccaggagtggggtggcgaggcggccgccgggcctgggcaggacaatggccacggccgccggggccccgggagcccccgcgctggggaaggggctgtcctagggccgggcgccggtgccctccccgcgcggctcaggcgggcggaggggggcgaggagttcctttgtggctctgcctccggcgcggcgcgggcggggggcgcagcgcaactttgccaggcggtggcggcggcggcggcggcggcgacggcgagcgcgagacgaggccccggggcccgagtgggggccccagcgcgcggcccgcccccgccccccgcccggccccctcccctctcgcgcagtcgccagcgcccggcgctgcccactcgcgggagcccccggggccggacgggctgcgcagccggagaggcgggggcccgacgcggcccccccggagccgggcgcctggcgcgggggctcgccgagcgcactgggggccgcgcggcgctgcagacccagcctcccgccgccgccgccgccgccgcctcggcgcttgcagaacccagaagtgaacagcaggcgacccggaaggtttgcgcgcggctccgcagcgagccagagccggagcccgagcccggagcctgtgccggagccccagcccggccctgctcgggccgccgggcgcggggctgcggccgcgtcccggaggcgccgccagcacagccaggtccgtgcgggcccggggcgcgcggggagcgggcccagcggcggcgggcgcctgcccgcgggaaagttgcgccgagttgcgggcgggggccgggccggggcgcgggcgctgtcagcgc

SEQ ID NO: 1055 - DNA, 2300 bp, Homo sapien
gggaggccttgagagtccagtggggttggctctgtggtgaggaatgtgctctggaagcctgtggggtgagcagttcgctcgggagattccgcagagccccactcgccaacgaatctggaaggatgagctgacatttactgggcaaaagagctggggaggtcccagtgctgaggatgcagacatagcagaggtgtggggagacttatcagacatggctggcagggaagaatcattatctgaccaggacgtagggtgcgtacgagcagggaggggatgctggaccacctggtgaaggcttgaatgacatataaggaatttggactttgtcagtgtttataatggcagccaatgggcttattggtagcagggagtgtttcttactcaaccctgtgtctctaagtctaacactgggcctggccagaggggctttagtttctttgatgagtttgttgatgggctgatggcaaacccagtcagtgagaggggctggggccttggaaggaaggagtggacacccttttgataaaatctggatattcccctccacttctgttcctcaacaaattaggcaaacaaggtgcaggcccagctggcatttcattgctcacctgcttggtacagcagatttgcccaaacagatgcttgaagacacgcccagggagatggtgcaaaggcatgagtgtggaaagcagggaaggccactattagtgcatgccaggctgctgagctccatttgtggacatcatcacccagtccacagctccatcctcacctgggctgttgggcaggtacagggtcatcagccctcaagtcactgccccagtgtcaccttcctcatgaggcccttatctccgtttaaaactgtatccctccttcccgtcactcatggtctccccatcttgttgtttttcccacagaacttactaccttctacatgtgatttacttatttcacgcttgttgcttatttcctccaggcagtggcttttgtctgttttgttcatgatatattccaaatacctagcacagtgcctggggcatgggtacccaatgtaatgaatgtgaatgaataacgataactggcaaacgttgagtgcttactttgtaccaacactaggctaagccctttacatgcattatctgatgttatcttcacaaagcccgatgagataggaactgtatttttatacccattttgcagatgaggaaactgatgctcagtggtttgtccaaggtcacccagctggttaatagccaggatgagaacccaggagtggcagggacagaaggagctctcaggaaggacacagaggggctgagcttcagggccatgctgtcccacattctcccatttactggggtgaccatgcagctgtcacggagatgtgcctgacatggggtagggacaggaaataagtgtctggggccaattagagggagatgtctccttcttcttagggaaggaggctgggtgggcagggaaggtcccgacaaagctgtgcatctgtgttctttgcaatatgtggtccgtagtgtggggttttcaaagagaggggcagccaaatcaggccctctccgaggcctgcactgggttgctgcaagggctctggtggtgggctggggacagctgggacctgtgggaagtaggaggctctggtcagactggcagtggaggccagagaaggaaggaagagccatggccgttgaagtccccagctcttgcctgggctcactcttggtccttggggagcatgggcagggtagggaccgagaggcttaggggccagagtaaggacttgggaactggagcggtcttggggtgtgtgtcagggacttcgaccttactgggctgcccattacagaatccacacaggcgacagaccctacaagtgcccacatcctggctgcgagaaggctttcactcagctctccaacctccaggtgagtgcctgcctgcctcctgcccaccaggtgctctggtgcccccccacccacccccacaaggaagcgtaggaagggggtggggtgagggagccctgttcctctcctgaccccctgctgtgcccctacagtctcaccagcgccagcacaacaaggacaagccctacaagtgtcccaactgctaccgggcctattcggactccgcttctttgcagatccacctctcggcccacgccatcaagcacgccaaggcctactgctgcagcatgtgtgggcgggcctacacctcggtgagtgccggtcggcctgtgccctgccccgggggagccacttcgtcttccaggcctcagttgcttcccc

SEQ ID NO: 1056 - DNA, 2300 bp, Homo sapien
ttcctctctctgtttccccagaggaaccctgagccagcgagtctgtaaacatttcccccagcacctcctcagcctccttccctcaaaaagagggataggggaaatcacgggaaccatgtgtcctctgctcccccaatccccctccagccaaccacaggatcccaagaatggcttttcctgtgggaatcattggcaagttttaggcatgactgtaggagtggccccaggcaagtcctgcccttcgtccctgccttgagactggggccagctctaggtcacagcagagaccaggcaaggctgctctttccacatgaagcactgacagagctgcacagctgcaggagcgtgggctcctgaggtcttttactgggtcagcagccagctgcatagatcaaggtgtgatgatgccagcggagcagctgtgacagcatccagagtatttcctgggggctcctgctttcttccacagtcatttgatgctgattcttccccacctgtgttttgcctcagactcagaccacgtggaagaaaaaaatgtcaagtctacaaggggcatccccagacacccttgagtgcattccaggggtgagaaccactggcattttccatgctagaatgctgctgtatgtcacagctgtgggagcaggaggaccaggcaggatggagtagggaggccccgtggtggggctggccacagtcctgcaggaatttctcattctccaccctacccatttctatacttttcagaatccaaagaggagggtgctcccctcaaactcaagtgtgagctctgtggccgggtggactttgcctataagttcaagcgttccaagcgcttctgttccatggcttgtgcaaagaggtgagtggccccagccccctccatttccccaggactgcactttatgtcccacctcctgccattaatagtctaccccaggaggtccataggggtggcttctccagtttcctagttcctcgacccacctggaagcaggatggcatccctaattcaacaagcacgagaagccagaacccctaagagcaggtgggagagagcagcgggagtccaaggaaaagccgcagtgctttggctcggctggccctcctgggctccactggcacccattcgcctttcctagcattgacagcccctgccttgttagggtaagccttacccagaaccacagctatagtgttcccttggtgagctctcgcccagcatagatcactaatggtcatcataaaaaccactgccatttcctgagaacctgctgtgtgctagtcactgtgccagtcaattgatacgattatctcatcttcaaaataactcccaagacaggtattactattgtcccctttatacaggttaggaagccaaagtacaaaggagtagtagtgcctcagataacatagctaataagccatgggcctggggatttaggcttgtccaattctaaagccatgtgtggtctttgtaccacaatggaagcaacagctgaccttgaagccctgaaatcccagaagagaagaaatctctaggtcccagacagaggtgttctgcatgccaagctagagttcagctatcttcagccctcattcccctcaggctgttggagcagccaggccactccccagcaggacagtggacagtagtttcccgtcacagggtaacatttatagtggaataagtcaggtgtgagctttcgccctggtccaagtccaggtgtctcaaacattttacagacattatctcatgttgtaagaccagacctagaaagtgagtggtattacccccaactccagataaggaaacggaggatcagggcttaagtgacttaaacccaaagtcacacagctagtagttagtgatggagttaggatctgaaccaatagatggactcaaaatttgtcagacagcttggctgtgctcattctgcctacggcccataagcacaatgactactgtgacatcccctgttcccctgtccctgaaggtacaacgtgggatgcaccaaacgggtgggacttttccactcagaccggagcaagctgcagaaggcaggagctgcgacccacaaccgccgtcgggccagcaaagccagtctgccaccacttaccaaggataccaagaagcaggtaagaggcgggcagagcctgaagctccatccccacagtccccacagcttcccttccatggccctcgacaccacggtcccctccagctgccgacttcagcgcactctgctgtgctctcattccttgtagacctgtccagtcgagccttctgcaccccagta

SEQ ID NO: 1057 - DNA, 2300 bp, Homo sapien
ccaagacttaaatatccattctgtgtatgtctttttttttttttttttttttgagatgcattcttactctgtcgcccaggctggagtgcagtggtgtgatctcagctcactgcaatctacacctcccgggttcaagtgactctcctgcctcagcctcccgagtagctgggattacaggtgcacaccaccatgcccagctaatttttgtacttttagtagagacagggtttcgccatgttagccaggctggtctcaaactcctgacctcaggtgatctgcccgcctcggcctcccaagtgctgggattacaggtgtgagccactgcgcccggcccattctgtgtatgtgtgaatgcctgctctgtgcaaagcactgtgggaagggaggtagcacactgagaaacacggtctgtaccccacctcaagagctgaaggtctacttgaaacgatgaaaaatgcacaggaaaaaaattacaatagaaagtaaaatgcgataaatgccatagatggatttgaggtaagtcatttaaaagctacaaaacaggaaaagttactgccaactagagatgttcaggatagatttcagggaggacgaggcattgttctagagcagaggttgacaaactacagcccaatggccaaaaccatcacattgccagtgttcgtacagctcgcaagctaataatgatttctacattttaaatttttttttgaaaaaatcaaaagaattctatttcatgatacatgaaaattatctgaaattccaattctagtgcccataaataaagttctattggaacacaaccacactccttcacgtacatattgtctgtggttgctttcctgcggcaacagcagagatgagttgttgccacagaccgtgtgacctacaaagtctaaaatatttactctctggtccctggcagaaaaagtttgccaactgctgttcttgagtctggaccttgaaggataggtaggacctggacatgcaaagttgaggaaagagcattccaggaagaactggtggaacttaagagagggaggcaggaaagtgtgggcatgttagggaacaggagttgaggatacaatcctgtgttaccctagtttataaaacaaaatataagtgtaagaaatgcagaggcagaggagaaggaaatatgaatattaatgaaaaggggggttgaaaatttgaaaaatagaggagaaagggagctaagtaaatattcggggaatgtaaaataaatgtaaacaaagaagatgggatgaggcctgagagtggaaaggggtggggggagaagaaaggcaggcaacgaatatgaatactaaggaaggcaagaaaatgggaccatgttgggaacagagggaagtcaagaatggagagaagtgcctggcgtgtgtccagcaccttcctgcgcctcgcgctcctgagggtggggactgtgtcacgctgcacgtctctgtacccccgcagcccctcgcgcgcgtgctgaatgagtatgcttcgccacgacagcgcaggttcacccggtgcgcttggggaagataaccaacacttacgggactctgaccgtgtgccaggcacggcgggccgcctgaacccacttcctcaatcagcctcaaccgcgagcccgaggccgctcacggaggtgtgaccggggcactcgggccatgacttccctctgatcctcggttcccagtgggaaggagaatgacttgtagggtcgttgtgaacaataagtcggggacagcgcgagcagggtttggcacgaactgagctctcggtgactggtggtcgttagtcttctgactgacccccaggcccctcagggagtgaacggtccaaggcgggagtcgcgggccgccccgccaaggagcacttgcaccggctatcagggcagcctcctcgtggcgtggcgcccgcctccctaagctgagccccgggcgtccctaacccgccttccggagggcgcgaggcggggctcgccgcacaaaggaagcgcgcggcccgtgtccgccccgcccctcccgcggccccgcccctccccgccccgctccctcgccccgcccccggcggaggcggccgcgggagccgtcccagactcgccgcattgtctccgcggcggctgcagccctcgagcgcccgccgcgcgcgcgcgcgcaaccccggccgccgcccgcgctcccgccccggcctcgcgcccccgtcccggcctcgcgccccggccgccctttgttgacgccggccaggccggtgcggtcggatgcgccgcggcagccccgggccccggctcggaggctccc

SEQ ID NO: 1058 - DNA, 2300 bp, Homo sapien
tcagtttgaaacctgcttactttgcacctgttgcatcacaggatccatttaaaacgtgagctcaggacccagaattcacctttatccttactggcatgaggctttagttgtaaaaatccatttgcgggcctccagctgtggcctgccatgcacttggctagctctccagccgtggaagtctctgtggagggcagtttttaaacaggacagattcagctgagctgcttcatcctaggctggcctggcactagccagagagtgatctgtgcaaagacaatctctgagctgaatttcctgaatccctactccaaacaaggcatgagctagacactgaagggatactaaaaaatataagaattttcgccccgtccgggagggaggtggggggcagcccccgcccggccgccgccccgtctgggaggtgggggggcgcctctgcctggccgccctgtctgggaagtgaggagcctctctgcccggccgccaccccgtctgggaggtgtacccaacagctcattgagaacgggccatgatgacgatggcgattttgtcgaataggaaagggggaaatgtggggaaaagaaagaaaaatcagattgttactgtgtctgtgtagaaagaagtagacatgggagactccattttgttctgtactaagaaaggttcttctgccttgggatgctgttaatctataaccttacccccaaccccgtgctctctgaaacatgtgctgtgtccactcagggttaaatggattaagggcggtgcaagatgtgctttgttaaacagatgcttgaaggcagcatgctcgttaagagtcatcaccgctccctaatctcaagtacccagggacacaaacactgcggaaggccgcagggtcctctgcctaggaaaaccagagacccttgttcacatgtttatctgctgaccttccctccactattgtcctatgaccctgccaaatccccctctccgagaaacacccaagaatgatcaataaatactaaataaataaatatatatatatatatacatatatatatatatatatatatatataagaattttcacctcaaagagtcagcctgcttaaaatagaagagagaaaagctagcatagcaacacatgccaaaaaacaaattcctgtcaggcactgtggtaggttctggaaaaagagatacacaaagtttctgaccgcaaggagttcatgatctggaagacagataagaaacaattacaactcaccttaataagcattattatgatagaggtagaccctggatactttaagaacctaaaccagactgatatagtagttataactagaaatgactgaatatgaccatgtgccaggcactgtgctgtgcacattaagtcatttttctgtcattttcttctcatttcatccttttagcaacttctgtacagaaactatattttcaatttttagattgggaagctgaggcccagagagtagttatttccaggtcccttggtatataacagagggaaccagtaatccagccctggtctgtctgatgccaggatccaagaaccaccgttgtctactggctcttcctggagaaggcctcgcctgagcagagccagaggctggatgaggactagccacacagagctgggttgggtggtggaaaggttgtagctgttgcaggcacagagaacagcaggtgaagggcatggaggagagcgagagcatgtcacacttagaatccagtatttctctgaactgccagaatggccaaagggcatcacagaggaggtgagtttttagttttgaggagttgagctttggggatgggggacagctcaaagagcccagtgttcctccagcaaaggaggaaagcaggaatagagtgaatgtgttaggccatggcaatgagcaggccaggctcagggtgaaaaatgaaagagatgaaaacaagagacattgaatttgggaagccatttttatttggatgcgggaggggcagagttggaagacacagcagaagagaaggtcaagccatgctctctaacctggcctttcccctttcagcctatgctcagctgcagccacaccagctcctcccacagccatcctcaaagcacctgcagccccaatttgtgatccagcagcagccacagccacaacagcagcagccgccgccccagcagtcacggcctgtgctccaagctgagccccacccccagctcgcctcagtctctccaagcgtggccctccagcccagctcagaggcccatgccatgccactaggcccggttacacccgccctgccact

SEQ ID NO: 1059 - DNA, 2300 bp, Homo sapien
tattaaatgggtatactctacaagcagatgactgaatgtgtgtgatggggtgacaaacaaatattatttttccatgtaggaaggaatgggtagaaggaacagcctctacacagaaatgaggatttttaagaaaagcatggaaaaagaaaaaaagaggaacttaaactcagatctgggtgtgcctctcccaccaccctttccttctttcccaacccctctccactgccaagcacacagcctcaagggaaggtagaatttccagttctgtattcagaccataggatgggccctgaaggaatttatggccctccttactgactgggataggagattccagaaggttctgccatttctgtcttaggagagaccctatctattggatctgggcagtgtgaaccaggccacaagagccagtgcttacagagcacacaggatatgcttggcactctgctgagcacctttcatcatcacttttctttatgttcaccacagcccatatcctgtcacatctaattgattaagaaacaggtcagacaggtgtgacatgccaggatttcctggctagaaagtggcagagccaggacaaagccaagtctttctgattccacaacctgagattttaaccagattggtcagtatggtaccctgctaagcgttagatccagagggcactcagtaagtacatacctaataaagatagatacctcaaacacacttgagctcttctggctttgaaaactaaactaaataaacacctcagtttatttgattgccttctggttttgtcaccaggctggagtgcagtggtgtgatctcagctcactgcaacctctgtctcctgggttcaagtgattcttctgcctcagcctcccaggtagctgggaccacaggcgcacaccaccatgcccaactaatttttgtatttatagtaaagatggggtttcaccatgttggccaggatggtctcgatctcttgacctcgtgatctgcccaccttagcctcccaaagtgctgggattacaggcatgagccaccgcacccggccttctctgtagattgttagtcctgcttctttcactaggtggctgtataaatatggacaaatagtaaattctctgatgttcagtgtccccaccccaacgatgaaaaggctgatagggtgagaggtgatccatgagatcactgctagggagaacgttataggaagtctgcctcctttcctagttttgcttcctctggcaaaataaacaggtcataggctttagaatcagccagacctgatctcaaatctcacctagtgaaccaagtctgccctgtccttctgagggcaagtgtgtcttaagacctcagttcccaagtggtcgggcatggcggctcatgcctataatcccagcactttggaaggtcaaggcaggtggatcactcaggggcaggagttcgagaccagcctggccaacatggcgaaaccctgtctctactaaaaatacaaaaattagctgggtgtggtggtggtcgcctgtaatcccagctactcaggaggctgaggcacgagaatcgcttgaacccgggagatggagattgcagtgagccgagattgtgccactgcactccagcctgagtgataaagcaaaactccagtctcaaaaaacagagacctcagttcccaagtggccccaccacagactggaaagctgatgtatatactgcatagtcgtcacctggtatccactgaggactggttccaggaacccccttggatgccaacattcatggaagctcaagtccctaatataaagtagcataacatttgcatataactgacccacatcctcctatatactttaaaccatctctagattacttataatacctcatacaatgtaaatgctatgcaaatagttgttacactgtattggttagggaataatgacacaaaaaaagtttacgtgttcagtacagacaccgtattttttgaatatttttgatcctgtggttggttgaatccatggatgtggaacccacagatacaaaaggctgactttgtgaacattctctagtaagcgtctgtcaaaacattcacttctgcctcttccctcctagcatctgcctgcccttctgccatccgagcgccctgactgcgccacactgcaggccatggagaatgagctgccagtcccacatacatctagcagtgcctgtgccaccagcagtaccagcggggccagtagcagcagtggctgcaacaacagcagcagtggtggaagtggccgccccaccgggccccagatttctgtgtacag

SEQ ID NO: 1060 - DNA, 2300 bp, Homo sapien
gaaattgggttttaaagcagtctaggaaggtgaaatgtacgtatattcaaaattacctttgatgatccctttaaatgtctataaagtttagcacatttagtttgaggcacagagccctgtccagtaatccataaatatattaaagttagagaaccatggccagatgtggtagcttacacctgtgaatcccagagttttgggaagcccaagtaggaagattgcttgaggccagaagttcgagacaaacctgggcaacataacaattacccgggtgttggggtgcatgcctgtagtcacagctactcctcgggaggctgaggcaggaggatcacttgaacccaggagttcaatgttatagtgagctatgatcacaccactgcactccagcctggatgacagagcataattctgtctctaaaaaataaataaataaataaaattagagaatcactgagctaaacaagtctgtacacagatgtttgtgtttttaaactactgtgcctttagctaaactatcaaatccctaaggtaaaaatggaaagacaggcataagccggacgcggtggcttatgcctgtaatcccagcactttgggaggccaaggcgggcagatcacctgaggtcaggagttcgagaccagcctggccaacaaggcgaaaccctgtctctactaaaagtacaaaaattagccgggtgtggtggcagatgcctgtaatcccagctactcaggaggctgagtcaggagaatagcttgaatccagcaggcagaggttgcagtgagccaagatcgcaccattgcactccagtctgggtgacaagagcgagatcggactcaaaaaaaacaaaaaacaaaaaacagacaaacaaaaaaaaacaaaaaacaaaggaaagacagagaattctacagtgccccttacctacctggtgactctattctcttaatatatagcctctgtgaccttaacacatgtcacttgtcacaaggtatatttgctgtgggattaagacgtaacaccatcatatcttgagaggagacaaaattctattagagaagggattctaagtccaatcctaaattaaataaatctgatacaatgagactagctttgggggccagataaacctggatttgaaccctaaatctgctacttactagctgtataacgttgggcaatttgcttaacttcccaaagtctcggtttcttaatccatagaatggtcacagtaattccaccatgttgagaagactgaatttaaaagtttctaaagtaatgagcttcagtataaatcagtgtaactcagcattagctcttaatagctgtttgacctaaattatgtcacatggcctctctgagcctcattttctctcctttgtaatacaggcataactattctgcctattaatctcaaaggtcactgtaaggaaacagtaaaacgctgtacaaattatgtacaaggattttctcaactgcacagcacacctgaaattgtgaggaggtgctaggagacccctgctggatttgaaaaaactggcgattgtcccgggtctgaagtcaaaaatgatcttagatctccacttttgccatttaatgttgttgtatgatcttgagcgaatgatctaacctctctgagcctccactttccctactatctagtggggttaataggacagacatcactttctgcagcaaagtgttaaggcacgtggtaagtgctcaataaatgttggctgaatctggatctctctggctgagacaaatctctccatccgcaaggtgggaaaactgcgcgtggtcgccatgtggcgctcaggtagaggagatgctcccgggggcaccgggctccggcacctccccactcccccgcccacccgcccgttgccatggccaccggttcaggctgggagcagcactaaggcgtgttccgcccaatccccgcccttctagggtgaccattggctggagcggccacgtgacgcgcgctggtatgctaatatatggtaatagcgccctcgcccctcctccgcgggcagcgtccgagcagccagcagggtgcgcggcgccgagccgagggggcgggctgaggggcggcccccgggagagagcggccaggtggaggaggagcgcggaggcgaccgcaggtaacgggcgggcgcgtgcgcgctggggccagctcgcggctgacgggcagcgcgcgggggacaccggccgccgcgctgccggcttaaccctttgggcacccagctgtcacggtcgggccggagcgctcggccgggacgggccgcgcggggcggggcattgc

SEQ ID NO: 1061 - DNA, 2300 bp, Homo sapien
ggcctcttgaggacttcgttagttttttctcttctgtagaatgccaggctttaattagacaaaggctaagggaaaccatagaataattcgaggctgtattgagggcgaggcgcgccctcttgtgtcctaatgatgtcctctcctctctctgcacactcgcctcccttcttcctcttagggcagatgatgctgaagtggacacgtccttacctgaccctgcaaagctgcctctccagcttcagatcctgacactctctcaaatgtttccggctcccttggcaccccacactgttgcactgtccctccccatctcaaaccctcctacttccacatatggtctcttcctcatgcagtgtaggacctttggagtcacatgcctagggggtgacaaatcgcagccctggttcttattggctctgtgatcttgagtaggtcacttcgtttctctaagtctcattccctctttgtaaagtggagcaaacaataccaatctcatagggctactgtgagacttcaacaccaaggagtatttacgggttgttattatgtttactgagtaaaatcacatgagttattactacaaataagttggaacatgtttcacagagaaggaatttaaactgggtcgttaaagctaagaattctcctattttaacactagccaacatgcattgagctcttaccagatgctaggtattgtcaattttccctaagccgcataaccattggtaataataataatagctaatgattatgtatattattgtattttctattttttaaaatagagacgaggtctcacttcgctgcccaggctggtctcaaactcctggactaaagcgatccttccgtctcagcctcccagagggctgggattacaggcatgagcctccgtgcctggactagctaatgattattaaacactttctgtgtgtcagacatgtgtcacgctctttacataccttctcccatttattcctctcaacaactgtctcaggaagaggcaagtattatcattcccattttacagctgggaaaatgcaggcataaagaagctaagtaatttgcccaaggtttcacaacgcgggtggtatgacctgcatccttcatttgaaagtaagaactttcagacacaagcagcttgacttcagagacttttacctaaatagtctcatttaaccttcataacaccctgtgatgtaagttctcttacattacttgcattttatagatgaaaattccaaagacaaaatagatggcagtaatttgttcaaggccacacagctgcgaagtagttgagttgggatttggatccatgtctgactacaaagcccccattctcaacaccacattagattgttcatgccccaaagtattcacagtggtacagagcacccgcatttatatgaggattattttgtaataatgattaacattcttccaacacctaggaagtgccaagctctgtactaactgatttacataataatagctaacaatcgctgtgcattattaggagccaggccctgagctaatcgttttaggtgtattatctcattgaaagttcacaaaactctgtgacatggatgccattactaccctcattttatggttgaagagaacgaggttcagaattcttccaaagtcacacagcttagctgtaagctggaaattaaagctacaactgtccagttctctcctgcctatcgggctggtcacctctagtcattctctcttcttatttcttattgtgtctgctttgatctttcagggtctgaggctctcacttcgacccctcagtagaactgggcccccttctgctcgagtgccctcccattgggcggtgctgttatccggaagcctatggaaaaggccaggatcgcaacaggtcccgcccccatgtgtcgcgcccgttccgatttgttccagtgccagggtccgttagaagatgacatatctattggctgaagacgtctgaaaggcagcaaacggagggggccgcccccggcgctcgcgcggttccttctgggaattgtggtctcagacgttccattcccagggtggcgccgctcggactccgcgtcccagcattccccgcacgagcccgggagcacttccgccctgttgtgaagtgggtgtctcggtgggtgagtccgggtggcggggcgggggcagctgagacgcaggctctgggctggagacttaggaggtggtggtgacacagggggctggggaaggtgagaggggagaaagaagcttatatgtgggggtggagggtgagggacggtcaaaggatgtag

SEQ ID NO: 1062 - DNA, 2300 bp, Homo sapien
gtttctgtaacaaataaattatagaagcagaaataatcatctctgggttcaaagtcttagagacgtgtcaaccaaatgtcatgtgtggaccctatttggatcctgattcaaacaaatcaactgttaaaaaaagagaaaaacaactgaggaaaatcaagcactgattggatatttggtgatattaagcaattgtgtttaaaattttaaggacgataatagaatagatcatcttttttctgtaaaaaactggaatttgctcagaaatttcaaaagattcataggggtctctccttcctgtctaggggcaagataattcgatacaaaagcagcatgagaggcatttctatccacgaggtcccgaggtagcatgtggcttccactctgggcagttatcagtcccctaggtgatacccaccattgttctggtgaataatgtgtatttttgtcttcctagtgatctcttgtgggaaccctgggactccaagtaatgcccgagttgtgttcagtgatggcctggttttctccagctctatcgtctatgagtgccgggaaggatactacgccacaggcctgctcagccgtcactgctcggtcaatggtacctggacaggcagtgaccctgagtgcctcggtgagagctcaggccctacgggttccatggccaacagtggcccagatcctgcatgccagaggagaaggctatccatggaagatggtgcagaatggttgggatggtcggacttgaacctgaacgataatcatatgaatagcctctgttgagcatatgctatgtggcagccactgagcgaagtactttatttcatatgcacatttcatttgatcttcaccataactccgtaactccgtgaagtagctactattatccccattttgtatatgagatggctgaggctcagagaggcagagaatatatgttggccatttctcaggctctagccaattccttgggctttcccttttatctcttagaatcaaaccccagagctcaacctgattctcttttcacttcaaagatgcagctatctgccatctttgttgcttcgttctgtccttgtacccgaccccacccagtacgggttcctgagcacggtgtagcctcacagctccaatttcttgcttctctcaagggtagtcccagttcttttctgggaaaagtgagtcactgtgggatccagatggagggaagagataggatgaggaaatgtgacaagattctccctgtcaaagtcctagtctgtgatttcgactccctctgaaatcccgtgtcaagttcactttggttttgagaccagagctcaccaagccccaccctcaatgatatgatgacataggcatgaccctttcatgggccataagaccctgcttccaggctgttgtccctaggagtcctgtgtaggtgctgttgggcctacagaggcctcgtaggtacaacagcaggtgataagatgtacccctcagcagacaaatcaattgtctcatgtggttcattaatataccttaggttcttcaaacagaaaactccctttccctgggtcctagcctcatttaggaactgagccctctggatacttcctcttagagggggcactttgaataaggtgaatcttcatagcccaagttgcagcggtgcataaggacagtgtgggcaaggacaggactgatgccagggatttgacaaaacaaaatttaaaatgggcaagctgggtgtggtggctcatgcctgtagtcccagctactcagaaggctgaggtgggaggattgcatgagcccaggagttcgaggctgcagtgagccatgactgtgcctctgcactccagcctgggtgacagagtaagaccctgacttaaaaaaaaagaaatttagaatgggtaatgtccaactgggatcctgtgaggagacagggcatccctgatctgacagtttcccttcttggatgcatgcagggagtgatagggatggtattggaggagaagtggggtcctggccaggagtgaacaatgctatatctctcttatcctagtcataaactgtggtgaccctgggattccagccaatggccttcggctgggcaatgacttcaggtacaacaaaactgtgacatatcagtgtgtccctggctatatgatggagtcacatagagtatctgtgctgagctgcaccaaggaccggacatggaatggaaccaagcccgtctgcaaaggtgtgtctggggctgcaaatgtggacagagagccaaagaagatacaaaagtgagatgtaggccctgagcatctctctag

SEQ ID NO: 1063 - DNA, 2300 bp, Homo sapien
atccaggaaagagtgccccagctctaggatcagatcaccccaggctccaactcaaacccctttgcctctctaagcttcaggttcttcctcagtaaagtgggacttctcatctttatttcacaagagctggaggacttcacagatggctcactctcagactcaaactctcagtttaactctcgatggaaagaggaccttgtttgcgaaactgagccgttctggtgttggaatgtaaaaccatgatttctaaaactattatagcctcagttagtttttcagattttcagagctctgctctgcgtaaccagttggtcattccgcaattgttggcccatcacgtgctgtgcaacaagcctcatcctgggctttcttccattctcacaccttgtttgtctttttgtggcatcacaggagagagaaaagagcagcgctttctcagtctgctagcttgagccagaagctgttcttcctcctcagaagccttcttcccttggcttctctgacaccatactctcttgctttctcccatgtccctaatggcaaattttaagccccttaatatagcacacatgacccttaggttagggcctagtccctgctgacctcccatattctccagtcttgcagattttatgttccagcctaagctgaaatactttgttttccaatgtgccatgttttcttgcctctgggtcttagcatatgttgttcctttcccatacagcattcctctctcttaccttgcctacttaaccctagtcatcccttaggtctgagtataaatatgaattctagaaggagtcctttcttactctcacaaaaccagatgcagggctcccccaaacacccccgtggcattcatgatgatgacatggtccagcctgtgctacagatgctggtgtgtttggctgtgtcccagtggtgtgtgtgcctgggacagaactagagtaccttgttccccactgtctcccaggccatggctggcacccaggagatattcagcttatgtagcagggatggcgtgtacctgtgcaccactttcaggatgtacgtgcattcacaggacccctggcctctgcttggaatctgttgggattctctctcctcagtctggtctgccccaaccagatgtctgcttgatgccccatgtcagctacaacactcattattctggaccatggtgtttggggatttttgtccaccatccccatctattttcctccatggtgactgattctgaataccatgaagatgtcaaagtcttttcatcctcctgcctgaggcctaaatcagtgagactaaaattgagtattgcttttggggaacaggaagataaggagagaggatcttatctacatagcaaatgcgtcctcttccagggcctgggctgaacattttgcctgcatcgtttcacctcatcaccaccacaatcctatgggggaggtattcttagttccattttacaggtgaggaaatggagactcagggaggctaaactacttatctaagactatctgctcaatacatcgttcagctatgatttgaacccaaccttagcctcaccccaggaaccctcaactcgaagtctagaccacaagtaccactctagaaagagcagatcaaagaggaagaaagaaagactttcctaatttcttagctcttcccagcaaaagcactgcagctctgaccctaacgtctgctccctcccattcctgggaagggagaggggacagcttcagggcatcctttcttcttggcagttctcttcataagaaagagaaagagggaggctgaggcagacccacagaggggcctgcagtgatgattgagagccagccagggtgttctgtgtggggactggtgggtagaaccaggtgcagccatcctcagcttggcctccccttccgcatcccacccaacctccctgacaggatgattagttctgggagctgggatttcctcaggaaggcatctgaattctcaggtgggtaccgaggccctgcacttacgtttgtgttccctccctggcagtcccttgtggcgggaacatcacttcttccaacggcactgtgtactccccggggttccctagcccgtactccagctcccaggactgtgtctggctgatcaccgtgcccattggccatggcgtccgcctcaacctcagcctgctgcagacagagccctctggagatttcatcaccatctggtaggccaggtgccatgtcaacagccaattagaaaggagcattactggggttctacactgggttaccagtcagttacctattggtttagaa

SEQ ID NO: 1064 - DNA, 2300 bp, Homo sapien
ttttttttttttttttgagacagagtctcactctgtcacccaggctggagtgtagtggtgcaatctcagctcactgcaacctctgcctcccaggctcaagagattctcctgcctcagccttccgagtagctgagactccaggtgtgctccaccatacccggctaatttttgtatgtttagtagagatggattttcaccatgttggtcaggctggtcacaaactcctgacctcaggtgatccgcccgcctcagcctcccaaagtgttgggatcacagatgtgagctacttcaccctgccttaaatgattttttttctccttcaatttctctgtcttctctttctgaaattcctgatacatgcatatggatttttttttcatctttcacgtcacttgtcatttctctcgttattttaatctctttatcctttttctgtggattctgagagaatttcccaaatttcatctcgacttcactgttcagtttttgtggaatccagctgcttgcactagcatttctcatctctttgcagcctttattgatctcagatccttcttcctctgacttcacagatgcaatgctagatttaatctcatgacaaccatgactgaacatctgctgagagttttgcctgttctttgttgtggttcacataaagtatttgctttgacttcttagagtgatctccttcctcaaaactttaacattttttcttatgtccagtgattttactatttgctctcccttgaagatggaggcccgtgtgccttcagggctgcagttgacatgggttctgtgagagctcactagggtcgttatccacatctgtcaggccaaatagaaaagttgagtttcactctgctcacatccatctggaggaggagttggagatggcagtgatatcaaagggatgctttgccttcatgagtttctttctgctttggcagctacatgttagctgggggcaataactgttagctgggacaatgactcctagccaggctcagccttctgggtcacatacacatctaagcctgccttgcaaaagctctctgctcccatattggtggcatcacatgagcttcctggaagtacaggtggacctcccagtagttccgttgtgggtcccaactctagccctcactgtagtggagatagagcctggttctctgtaatccctgcttcgtcctgagaatggggtctggggtcagcagcgcttctcaggggtccctgaggctgcaggggggcagcaggcagagtggccatgctgctgcctccacccatgttctccctgcgcttccccagaatggcaactacactaattggctgcaggtccagttggtgctgtctctcccctggcccatctgtactgcaccaagcagaagatatacctttgtcttctgctacaaaagctgtcagtctaccctggtttcctgtgcccatgcaggttccccccagtttgtgtgttattggccggcaatagtacatcctggtttgcctgggacagtcccaccataactattgatagcactttctttgactctcaaaaatgttctagtatgaacaatacattacaccatcgctctggtaatcatttcacaggatggtgggagagtgtctgggaaagaccagttgctcctagatgatcacatcatcctccttcctagaggccaatgctatttttaaaaactcagattgatgtcagttttccaagtaaaccaccagtcagccggcttggtaacagctgctgtctccatccctgtcgctccacacatccctagcagccttctcctttccggcacaggtcatttaatctttctggacctctctttccttctttattaaatgagggtactgaactctgtcatgccaacctcacagtgaccacaggtcaagttaagaccgtgaatgaaaaagctttctataaactttaaattgtaaagtgcagtaaaaatacgtgagattttatttcaggaaggcctggaatgtggaaggaattgctgcatggggtactggcagcccctccttcctggccaggattttatcttctgggcccacctgctggactcactgttctctcctccttgccccttatctcggcaggagaatcactgcccttggccacctccaatcaagttctcattaagttcagcgccaaaggcctcgcaccagccagaggcttccactttgtctaccaaggtatggaggacatggacgccggaggtaggaaggtgatctcggttcttaagggactcgtgatcgaagggacagggatctttgacctctagtctgagtccctt

SEQ ID NO: 1065 - DNA, 2300 bp, Homo sapien
tctcaggctttctgccagtcccagaatccaggcagttagggttccaaatggaagcaggtaatccatgtagattcacctgggacattggtggagaggctactatgtgctaaccattcccctatgtttacctatcttatatataaaatctcatgcgttgattctacagtcttatgagaatgctattattgtccagatgaaggcagatgaagagattaaatttcagtgagttgacacaatgtatctaactccaaagtccatgatcatcccactgcaccacaggcctctgcctagatggaggggaaaggtagtaatctcagagaaaatggagagatgcttcagaaggctgcccatgtgatatgactgagtaataagtgtttacatatgcatggccctaagcaactccccctccccccgacaaatcctcaccctcaccctcatctgagatcatcaaagaaatgtacacatgctggaaacgtctatgtaaattatcagcagccactgcccccagggagcctgcccaccactgtcccttgagttttatgagccatctcagcacattcatcatgatatttggaagttttgcaaacagactaagtttaaaagtactgtaaagttagatttctcctccaagagaaataaatgaggccatatataaagtcttaggaaactgaagctggtcctgaattgagcaggacacagggaggagggtccattcagaaaagtagggacttggtggtgggacatgtggcccccatcttcaaaggactaatgaggagccttaggacaagataaaacacaagatgtataactaagcccatgagcagcttatgtttccatgttctgaaggtttccatgttctccatctatgctgcctcagcctagtacgctcctggcttagggtaattagggttaactataaggcccaagcaatggccctttggtcaaccccagggcttttctagccacagactgtgcctggactgaaggatactgagggatggtttagagaaagcagatttgctaccagccgcctgaaagattcaaggcatgctccaaattccccatatgtccacacgaataacaggcctgccatctggacttgtatttacatccttccggaacctaattattatttttaggactgtacatcttctgaggtcagtgtactccatatccattcattcattcattcattcattcattcagtaaatatttattttacagacaatccaggctaagccttggaaattcatagattcatccagcatgaccctagccctcaagttactgacagtttaggtgggggacacaggacaggcagcaagcaatcaaggtgcaatatgggaggtgctcagatacaggaaggaacagggaggggccccccaattattaaagatcccattcctctgtgcatgccctaagcctgccctgcctacgcactgtgtgggtgttaaggagacagtaacacgaccaagccccaaaggatccacagtgcagtagaggacatagaaatgttaacaaataagtgaagtaaaatgggatgactactataaataaaggtatgagaacaatggggaaagaatgactaattctggaggaggagaagcagtttccagaggagggtgtgatttcattagctgttgaatgaaacaggctgcaatgagactatgctaaaaactttccccaggacccaggaggttgagttctcagccccctcctcctcgtgaatccacagagaggcttggtctcagtggttgagtacctggttccttatctttaaaccagaaatgatcattgtgcctacattatggggctggctgttgcgactaatgactgaaatggtccttgtaaagtgtcaatcgtgctgttttgcacataagggttagcgattatgatgtgatcttgccccctcttagtttctattctgtgatactgaaaggcttcatctctcctcacttaactgcccccctcttcccctgacctcctcctcggtcatttctgttgctacgctactatatgaataggtatgtggcacggctgctttatagcactgagaaattgtaaaggatgcctggtgggttagcgtctgtttctgtaggagagagacagacaaacagcacaagagacagaaacaaagcaggcagcaccataggtagggaagtattttttttttaagtttgagaggcatttctgtagacagtccaacaactggacagacacgcaggcaccttggcaggtagacaggcaaacgacttgtcatctttgtcaggttcttcagagctgtgagttgctttctggat

SEQ ID NO: 1066 - DNA, 2300 bp, Homo sapien
agtttagggactgagtaccaggcccagatgaaactcttacagttactgattcacaaagtaaataattaacaggaacttatatatattatttttcctttgtggctaaactcatatatatgtatatgcctttgggtggctagaataccaagcttgggacttagagacctaagttaaagttccgactttgttattaaccatgtggcacagggaaaatcactgaaacactatggatctttttcctcatctgtaaaagggcagtaaaacaggagaaatatggcacaaaccagggtgaattaaatgccatgataattacaggtggctgtcttcttggtggatttcattagatcagctttctggttttactccttaaacataattgttatccagagttctattttcagatctcttctcttctttcctctcttctcctctccacttattttccctggatgacacatactgattgtactagagtacatgccccattgctccagccctgagaatgtccctcagtcccttacctatatgtgctaatgataaagctcttatttattaaattatgtatacttgtatatagcattgcactaggcatttttcataatttctttatgagtaaagtggcaataaccatattttatgtttagctgaagcttagagtgggcagccaacttgcccaagggcacaaagctacatctgttgagttgaatttcaaaccctgactccaaaggctgaatcctacttctacttgaaaattgtacctggacatccttcggagtcaatagattggatggaaccatgcagagcaactccccctccactccccactttttttgggtaacttttaattttgatatgattttaaacttgcagaaaagttgcaattaatgtgcaaaaagctcccatgtaccctttcctagatttaaacaactgcttttaaaaagttagtggagaagaagaaagctaagaagaaattcggtcagaaacgtaggagaaaagccaaaaagcgtcactgaagccaaagaatgtgagtttcacaaagagagaaagatcagtagtgtcagatactctagagaggtcaagtataatcacaactgaaaagtaaacattggggttagtgactcaaccaagtgttgaatatttgaacttgtttctgcaaggaattggtgaaggaagacatgggaaatgatagacttgggctgaagtttctattgtgatggcaaaccatgaatctgtcgtgataccacagttctcctggtagccccccagcccccaggattagagatggaaaaggtgagtggtagaattgatggaaagcaggcatttcaccaagcagatatgagagcgatgaggaagatgtaggtattggtgagtggtcttgaggtccagactggatagtgagggaagaggggtcaggcgaggatcaatagatgggatgaaatgtgggagccagaaggctagaggggcctatgatgtaggacaatggtgcattgagacccaagtcattctgctgggaacacaggcagtgggggaaggaatggaatgactgggtttaaaatctgtgagttggactttcctggctcccaggatagcaaggccctgggtgtggctataaacatggttgatcatgagttggaggaagagcagggtgtcagatctcataagagggcaatgccctccaaaacaagggacatctctccattgaaacaggagggaaaaaggaattgagtacacgtgcagatagaattgcattcttagagagtgggacaaaggacccgcctgctatatggcttctgttccctccaaagagaaagccaaagtcatcggctaagagtaaggggagataagaggaagaggaagatgttcaaggaatgtctagaacatgtgaaaaagtctttgagcagaatgagagagtgagctaatagagataaatggtagggtcactgggcaatagctaggatttttttgagatgagtaatcaggagtttataatagacattcatcttcctactagtgatttttttcacagcaaagctcaactgtatggtggcaggtatggagaaggcaggtagagagattcattccaaactgatgtcttctaggcaactgatgaaaggaggaagaagaaagggacttggaacaagcaagaaaatgagcctaatggtggcccatgtgatcaaatttgcataaggacagaagacaagaccgaaggagctgatgggtagagaggagatattgctgtcaacagagtggaggtctcagtggggaaagatgaactctactggaggttcagaaaacaactg

SEQ ID NO: 1067 - DNA, 2300 bp, Homo sapien
ccagttgcttccttaccctagccccagccaagggagttcctagactaccagtagaggctaaacatatgagccaaggggtcaaacaagcttgagttcgaagcctggctctgccacttattgctgtgtggccttggataaattaatctctcttttcacgcttccaggcttccagagatgatgtacccaaagtatgatcatcatttttattaaaatattgtgctcacatctgattgattaacagttcctggcacgaggtcagtgccaaagagccttggactgactgcttatggcctggcctccctatctggtttcttactatgtagcgatccaagtgaattcagatgattccctggactaccaccctccttcctgggacacatccatccctcaaacactgttcatcactggccatcaaagcagcagccacactgctccagcaactcaacagctatttattgagatgggtgtgtgagtacatgagtgagtgaatgaactgaaagaacgtaagagtgaattaactgctaagtgaattagtgaattagtgacttaatgagtcagcgagtgaagaagagtgtgcaggattgaatatatcatgttcttttccctcaacaaattgaatatgccgtggtataaaactttcaccctcaaatgtgtcttcttcattaacacaagcaggggttaagaatggcagaagaaaagttacagaccagcagccagaggagaaagatactgtgctagtttcctattgctgccttaacaaataactgtacatttaagggcttaaagaacacaaatttattgtgttataattctggaggttagaatccaaaatgggtttcagcaggccaagatcaaggtgtggggaggactgagcccctctggtggcactaggggacaatccttttgcttgccttttccagctgctagtagccacctgcatttcttggcttgtggcctctttcccttgtcttcaatatcagcagtgtagcatcttcaaatctctctccacctctgatcctctgcttctctcatcacatctcctctgactgtgacactcctgccttcctcttacaaaggccatgtgattctatcaggcccacctgataatccaggatcatctccctagctctaaatccttagagtaatcttatctacaaagtcccttttaccaagtaaggaacaaattcacaggtttcagggcttaggacgccagcatctttggagaggcattcttctgccacttgcagatgccttgttcagagggtaaatgcaaccagtgagtcccactccacagaggaaggggcaggagggggatgaaggaagtttcaaagcatttgacatacacatgcttatgccaggtatgtttgctgttgttgctgtggcctgagcactgagggttttggaaagcttaggtgattccatcatgctgcaaaatctgagagatactttgacagagatatgctaagagcatatgctgctgtaattgagggtaaaatctggccctgtgattcctggagatgatggatcaagagcagggtgtctttaccctggctgcacattgctatcaactggaaagatttttctttaaaaaaatgttattttgaaataagagtgcaaagatcatacagaaatgtcctgtatacccttcaccccgattccctaatgttggcatcttacataaccctgggtcatgcataaaaactaagaaatcagcaatggtacagtactattaactaaatgaaacattttattcagatttccccagatttccaccagtggcccactttttgtctgtcacaggattcagtctagcatctctcattgcatttgtcctgtcttcttggtttcttccaatctgcatcagtttcttagccttgccctggttttttaaaatcttgacattattgaagggtactgatcaggtatttggtagaatgttctttatttcagtttgtctaatgttttttcatagaccttggctatggatttttgggaagaatatcatggcggtgagatgctgttattatggcaacacagaaaggggttctgtgatctcaacatgacctgttattgatgatgcttacttcgatcacttggttaaagtggtgtctgccagatttccccgctgtaaagttactatttgtccctttccatgttctattcattagtagtgggtggctaagtccagcccacactggagagggggagtgccatctgtttttattcctatcatttcaatttgtttaatcctcatggctttattatcacctcactactttttagagatatggttgtaatga

SEQ ID NO: 1068 - DNA, 2300 bp, Homo sapien
ttatctgtgcaaggaggataatgcctgccttacaggttgttttagcaattaactgaggtaatacatgtaaaagtatttggcacagtcctaaatctaataggtaatatagcggatatactctagggtggctgttccataatcctttcctcctttcttggtgttcacacccttgtataatcccctcctattaagtgtgggctggacaggtgactttcttctaacccatagaatgtggcaaaggagatgggatgtcacttctgtgattatgtgatgataaataatactatatattgctagccactttgctctagggattctccttgctgcttgatgaagtaagtggtcaagtttgagaagcccatgtggcaaggaatgacaaggaactgtgggaaatgtctagaagctgagggtggcctcagaccattagccagtgagaaacagaagttctcagtccaccaaccacaaggaacttaatattgcagcagccacacaagtgggtaggtgaatccttccccagtcaagccagcagatgagaacttggccctggctgaccaaggcctgaagcaatgcacacagctaagctgttactggactcctgaccccacagaaactgtataaatgtaagtttaaaactataaatgtttaaaccatatgagtgtattttgttttaagccactaagtctgtggtaatttgttacacagcaatagagaatacattactcaataaatgccctcttccttataattctagaagagactgtctttaatcttgtttctatctccagcctctaccttccccatttaatttcctttcctttgttaccaatctcttgttaccaacatcttgaaggtggagggccacctcccaccgtccagtgctaattagatcctgatttgtattacccagtagtagttccagttgggttgtcttgtttccagcctgaaatgtgggctcttggtgggcagcagctgtgtgatgtaccacactcctctctgggaagagggcccccacacagctaggccccagctctcatgccacccctttctggtttcctgtgtgattaattatgtgaatgtgggtggccaagtcagagttttgacaagagtttgcagttcccctgctgaaaactaactccattaacagtcctttatgaaaaagacaataggagggtctgaatctgctggcttctaatgactgtaatgtaatgacaatggagagagagggagggaaggaggaggagaagttgggggagcctggacctaagataatgggtgagagaaaaagtagatggacaatctggtgtggtgccagcattccaggcccactcagctggcctcaggtgctcctgtccttgagaagaggaaggcaggcccatcaccatcttgatgactgaatcactcaactctgatccttctctcctcaaccgtttttctgtgttcatgtagtcattaatttacttactcattcattcaacagatatttacataaatcttatgcctgcaatataacagcaactattctggtgctgggaatacaacaaggttcctcatctctcacgttccggtgaggagagacagacaattaaaaaaacaacaaataggccaggcgcggtggctcatacctgtaatcccagcactttgggaggccgaggtgggtgtttcatgaggtcaggaatttgagaccagcctgatcaacatggtgaaaccccatgtctactaaaaatacaaaaattagccaggtgtggtggcacgtgcctgtaatctcagctactcaggaggctgaggcaggagaattgcttgaacccaggaggtggaggttgcagcgagcccagattgcaccattgcactccagcctgggtgacagagtgagactccatcttaacaaacaaacaaacaaacaaacaacacaaatacatatatcgaatcagtttttgatagggtaaagtactcactagaaaataaacgtgggtaatgagataaatgatgatagataggatagagggcacttgaaatggatggtcagaagttttctgcggagctggcatttgggtttggatttaaagggcaagaaggagccagacaagccaaggtgtaagagaagagtcctccaagcagcagggaagcaagtgcaaaggtccttgcagaagcgagcttggcatattagagggacagagggaggccggagcaactggaggtgtgaacaaatgggcgagatgtgtttggaagggtgaaggccttggcaaggggtttatgtggaaatctaagtgcaactgagagccacagagagatttcagtagtgg

SEQ ID NO: 1069 - DNA, 2300 bp, Homo sapien
tctacattgtacttaaggtgaaacacctgattaagattgggaacaagacagaggtgccaccatcacctctgggatttcacggcttattggaagagttaacccatgtgacacaagaaaaagaaatgagaaaagaggaagcaaaattatggtttgtagatgatacattaatatacctagaaaacccaggagaattcattataaagctattatagataatatgaaattttaataaactagccaaatgcaaaataatatacaaaaatcagtaacattcctatatgtcaatgacagataaaaatataaagaaaaaagatcttgtttatggtaactacaaaatgcatatagtacatataaacttaacaagaagtgtgcaggcacgatatgaaaatgacttttacagagggataaaaaatttgaataactggagagacatagcataatcttgagtggatacagaaaggttaatttatgatattaacctcttgacaagttacagaaaagttaatttataagtttaatgcaattcggatgaaaagcccaatgacccgttttaagtttggtaaaatgatacctaagtttaactggaaaaatagattgtcggggggaggagccaagatggccgaataggaacagctcccgtccacagctcccagcgtgagcgaggcagaagaggggtgatttctgcatttccatctgaggtaccaggttcatctcactagggagagccagacagtgggcgcaggtcagtgggtgcgcgcaccgtgcacgagccgaagcagggcgaggcattgcctcactcgggacgtgcaagggggcagggagttccctttcctaatcaaagaaaggggtgacggacggcacctggagaatcgggtcactcccacccgaatactgcgcttttccgacgggcttaaaaaacggcgcaccacgagattatatcccgcacctggctcggagggtcctaccccacggagtctcgctgattgctagcacagcagtctgagatcaaactgcaaggcagcagcgaggctgggggaggggcgcccaccattgcccaggcttgcttaggtaaacaaagcagccggaaagctcgaactgggtggagcccaccacagctcaaggaggcctgcctgcctctgtaggctccacctctgggggcagggcacagacaaacaaaaagacagcagtaacctctgcagacttaaatgtccctgtctgacagctttgaagagagcagtggttctcccagtacgcagctggagatctgagaactggcagactgcctcctcaagtgggtccctgacccctgacccccgagcagcctaactgggaggcaccccccagcaggggcacactgacacctcacactgcagggtactccaacagacctgcagctgaggatcctgtctgttagaaggaaaactaacaaacagaaaggacattcacaacaaaaacccatctgtacatcgccatcatcaaagaccaaaagtagataaaaccacaaagatggggaaaaaacagaacagaaaaactggaaactctaaaaagcagagcgcctctcctcctccaaaggaacgcagctcctcaccagcaacggaacaaagctggacggagaatgactttgacgagctgagagaagaaggcttcagacgatcaaattactctgagctacaggaggacattcaaaccaaaggcaaaggagttgaaaactttgaaaaaaatttagaagaatgtataactagaataaccaatacagagaagtgcttaaaggagctgatggagctgaaaaccaaggctcgagaactacatgaagaatgcagaagcctcaggagccgatgcgatcaactggaagaaagggtatcagcaatggaagatgaaatgaatgaaatgaagtgagaagggaagtttagagaaaaaagaataaaaagaaatgagcaaagccttcaagaaatatgggactatgtgaaaagaccaaatctacgtccgattggtgtatctgaaagtgatggggagaatggaaccaagttggaaaacactctgcaggatattatcccggagaatttccccaatctagcaaggcaggccaacgttcagattcaggaaatacagagaacgccacaaagatactcctcgagaagagcaactccaagacacataattgtcagattcaccaaagttgaaatgaaggaaaaaatgttaagggcagccagagagaaaggtcaggttaccctcaaagggaagtccatcagactaacagcagatctctcggcagaaaccctacaagccagaagagagtgggg

SEQ ID NO: 1070 - DNA, 2300 bp, Homo sapien
gggagggtgggagattcaggcagggatagaggcggggggagggactgggaccgggtcgaggatgggtgggctcggggctcgggtggggcgcgcggcggccgctggctcctcggcgcggctggactcacccgcggcggccgagacgctgagcaacccacagcccagcaacagcagcagaggcggcggcgttggcggcggcgggcggccccagcggctcccggcgcccggcacaagcgccgaaatcccggtttcgccgcgagccctccccgcggggcagccgcagcgccccagctcccgtccccgcgagcgcggcatggcgcggccggcagcgccgagggagaggctccgctcgccgccgaggagaaaggaggtcaggagagctctggagcttttttctgctcggaaaaaatcccggtacgcgggagccctgagcttctgcggctggaatgaaccaagtgtccgcccggccggggagaggcgcgctgcgctctcggaaatgactcgctccaatcccgcttcgcggggttcgcgccggggggcgggagggggtgaattatccccggattaatcactccggagccgcttctccgccgctccaaatgctgggggtggaggcgcagctaaggataaaatattggggggcgggggttcctcttcagcgccacctccacctccagataaaccacaaattacatctaaagggttgtttatccgtgtctgttttgcaattgaccagtttcttttaagttcagtcctcctgttttcatttataacatcacccattaatacacccccctctccacacacacacacacaaacacacacacacacacacagtgacagagacacacgcactcacacacacaggcacatacacgcacacctcttccacgtttggaaattggaatcctgtctgggaaaaggtaaccaaagaaggacgcgttccccaagtcttggctcttaccagctgatcttgggtggtggctttgaacttgccatctagggccgggggcgatgcttatgagcctcattcacaatagcctcctaccccatcccaggagaggggcgtgtgtgcgtagacagaggcagggttaagaattggagggcggtggaggggggttgtgtgtggggtggggaggggggggaaccggttcatttgacccagtgcggtcccactcctaccctaagacaaaaatctcagggtggcagaggcggtccctgtgtgcacgcgagttgggggtggggagtgaggttggtggaaggacggtgcaagagttactagtacaatttatccccaaatttaaataatcggatcctacttcttcttctccccttcctcctcccagccaaggccccaaaccaagagagttcttcccaaggacgtgagctgctccccacctctccccagtagcggctgcctctaggccccaagggcttagtgtcggtccccaccccatcccccacccgactcggtcgccgtctctgtctcgtctactccaggcttctccgccagtcacgatggctccttcgctgtctacgccaaactctcggcgagagggaagagacgcttcatggggggaggctggaggaaactgggaggggcaaggtccagagaggaggcttctgctggcgcgtgcagtggaaaggcacctgcgatgggcacccccgccccctttgccgacacaccccagagaagctgtgctccgggcttagggcagcctgatttggccaaaacggagcgttggcatctgtgtggccaagggggcagtggccggcgggcggtggggcctgagaatttccggggaagggtgtggagagggactgtagggatggcgagccaggctgggggtggctggcgacccaggttggccggctgtcagcgtggccaggaatttccatccaaggaagggtgtgaagaggggctgtggagttgacgatatgaattggggggcgggggcagggctggaggagtggaggcttgtccctactccccatgaaaaacttcctccccagagccacgctttcgcagcctcctagatgccactcttcctccctccccccaccccaagttgttccggtttccctgcatgagctcatcccacagctggggagccagcccggtggccctgggcgggcgaatctcctcagaatcgcgggcctggtccccacccccaacacgcttgtatgcccgcccctcccgacgccgccttgctgggtgccaagaaccaaccgaagcagccagaactcctcagtgaaaggcctgctttatgttcccggggcagtgaggagggggcttctcc

SEQ ID NO: 1071 - DNA, 2300 bp, Homo sapien
ctgcagccccagaattacagagcagcccagactctcttctgcccagctgtgggctgcacaggaggcctgggcatctctgccagttcctttctctggaggagaaccccgcctccaagagaggggtaaagtcggagcttagaagccaggagcccacccccaggcaagcccagctaacagcccccaaggccaccaccaccactcactgctggcgtagtcagtcccttcctcctctccagggctggtgggaaggctgagccctctctttcgggggctgagtctggacaatgggaagggagaagccccctcctcactgccccgggaacataaagcaggcctttcactgaggagttctggctgcttcggttggttcttggcacccagcaaggcggcgtcgggaggggcgggcatacaagcgtgttgggggtggggaccaggcccgcgattctgaggagattcgcccgcccagggccaccgggctggctccccagctgtgggatgagctcatgcagggaaaccggaacaacttggggtggggggagggaggaagagtggcatctaggaggctgcgaaagcgtggctctggggaggaagtttttcatggggagtagggacaagcctccactcctccagccctgcccccgccccccaattcatatcgtcaactccacagcccctcttcacacccttccttggatggaaattcctggccacgctgacagccggccaacctgggtcgccagccacccccagcctggctcgccatccctacagtccctctccacacccttccccggaaattctcaggccccaccgcccgccggccactgcccccttggccacacagatgccaacgctccgttttggccaaatcaggctgccctaagcccggagcacagcttctctggggtgtgtcggcaaagggggcgggggtgcccatcgcaggtgcctttccactgcacgcgccagcagaagcctcctctctggaccttgcccctcccagtttcctccagcctccccccatgaagcgtctcttccctctcgccgagagtttggcgtagacagcgaaggagccatcgtgactggcggagaagcctggagtagacgagacagagacggcgaccgagtcgggtgggggatggggtggggaccgacactaagcccttggggcctagaggcagccgctactggggagaggtggggagcagctcacgtccttgggaagaactctcttggtttggggccttggctgggaggaggaaggggagaagaagaagtaggatccgattatttaaatttggggataaattgtactagtaactcttgcaccgtccttccaccaacctcactccccacccccaactcgcgtgcacacagggaccgcctctgccaccctgagatttttgtcttagggtaggagtgggaccgcactgggtcaaatgaaccggttcccccccctccccaccccacacacaacccccctccaccgccctccaattcttaaccctgcctctgtctacgcacacacgcccctctcctgggatggggtaggaggctattgtgaatgaggctcataagcatcgcccccggccctagatggcaagttcaaagccaccacccaagatcagctggtaagagccaagacttggggaacgcgtccttctttggttaccttttcccagacaggattccaatttccaaacgtggaagaggtgtgcgtgtatgtgcctgtgtgtgtgagtgcgtgtgtctctgtcactgtgtgtgtgtgtgtgtgtttgtgtgtgtgtgtgtggagaggggggtgtattaatgggtgatgttataaatgaaaacaggaggactgaacttaaaagaaactggtcaattgcaaaacagacacggataaacaaccctttagatgtaatttgtggtttatctggaggtggaggtggcgctgaagaggaacccccgccccccaatattttatccttagctgcgcctccacccccagcatttggagcggcggagaagcggctccggagtgattaatccggggataattcaccccctcccgccccccggcgcgaaccccgcgaagcgggattggagcgagtcatttccgagagcgcagcgcgcctctccccggccgggcggacacttggttcattccagccgcagaagctcagggctcccgcgtaccgggattttttccgagcagaaaaaagctccagagctctcctgacctcctttctcctcggcggcgagcggagcctctccctcggcgctgccggccgcgccatgccgcgctcgcggggacggga

SEQ ID NO: 1072 - DNA, 2300 bp, Homo sapien
ccaggcacataatgatgctcaataaatatttgttgagtaaatgaatcttcatcttttcaaggtctttatccatgtctcaggttccagaccaaatcctactttccttcttaaattagccttctgatcccccaagtccaggaaaagctcactgtcttgacatgcctctcggtagcatgccggttcttcagtcatggtgattatcgctgtctgacggtatcagttacgtgtgggtttccacctctggcctgcatcctcccaaagcaggaccacacactgtgcatctctgcagggcccagagcacagcctcgctcagggcccccgagcacaggaggcgctcagtgaaagcacgtggacccaaatagatcagagagcaggaatggcggaggatgtgagtaactgggccttttgcagggataaaataggtgccctgccctccacagcccccagggagaaggatgacaaacgctccttttgcccgggaaagttctgggggtaaatctcatctgcccgttgcagccacagagcaaagttctggagctgagaagagggtaagagaaagcccattggcctgcagccccagaattacagagcagcccagactctcttctgcccagctgtgggctgcacaggaggcctgggcatctctgccagttcctttctctggaggagaaccccgcctccaagagaggggtaaagtcggagcttagaagccaggagcccacccccaggcaagcccagctaacagcccccaaggccaccaccaccactcactgctggcgtagtcagtcccttcctcctctccagggctggtgggaaggctgagccctctctttcgggggctgagtctggacaatgggaagggagaagccccctcctcactgccccgggaacataaagcaggcctttcactgaggagttctggctgcttcggttggttcttggcacccagcaaggcggcgtcgggaggggcgggcatacaagcgtgttgggggtggggaccaggcccgcgattctgaggagattcgcccgcccagggccaccgggctggctccccagctgtgggatgagctcatgcagggaaaccggaacaacttggggtggggggagggaggaagagtggcatctaggaggctgcgaaagcgtggctctggggaggaagtttttcatggggagtagggacaagcctccactcctccagccctgcccccgccccccaattcatatcgtcaactccacagcccctcttcacacccttccttggatggaaattcctggccacgctgacagccggccaacctgggtcgccagccacccccagcctggctcgccatccctacagtccctctccacacccttccccggaaattctcaggccccaccgcccgccggccactgcccccttggccacacagatgccaacgctccgttttggccaaatcaggctgccctaagcccggagcacagcttctctggggtgtgtcggcaaagggggcgggggtgcccatcgcaggtgcctttccactgcacgcgccagcagaagcctcctctctggaccttgcccctcccagtttcctccagcctccccccatgaagcgtctcttccctctcgccgagagtttggcgtagacagcgaaggagccatcgtgactggcggagaagcctggagtagacgagacagagacggcgaccgagtcgggtgggggatggggtggggaccgacactaagcccttggggcctagaggcagccgctactggggagaggtggggagcagctcacgtccttgggaagaactctcttggtttggggccttggctgggaggaggaaggggagaagaagaagtaggatccgattatttaaatttggggataaattgtactagtaactcttgcaccgtccttccaccaacctcactccccacccccaactcgcgtgcacacagggaccgcctctgccaccctgagatttttgtcttagggtaggagtgggaccgcactgggtcaaatgaaccggttcccccccctccccaccccacacacaacccccctccaccgccctccaattcttaaccctgcctctgtctacgcacacacgcccctctcctgggatggggtaggaggctattgtgaatgaggctcataagcatcgcccccggccctagatggcaagttcaaagccaccacccaagatcagctggtaagagccaagacttggggaacgcgtccttctttggttaccttttcccagacaggattccaatttccaaacgtggaagaggtgtgcgtgtatgtgcctgtgtg

SEQ ID NO: 1073 - DNA, 2300 bp, Homo sapien
gatttcaaaatttagagtaaacatttccaggaactcagcccctctgtaaagagcaaggttgcgtattgggcacctactgtataccaggcactttacatacagtataccattaattcatccaacacatattttttgagtgcctactatgtgccagaaacatgatcctcataatttattaacaccattttacagaaaaggaattcctctcatccttctcaaatttttctcctcaaagaagtcggcctggaccaccatggaatattgcctcccctcttctccccagtgcctcactttgttactaggttggtacaaaagtaattgtggtttttgccattgcaagtgatggcaaaaaccgcaattacttttgcaccaacctaatagttattttccatcagagtcccattgcatctgtaattattgctgctttactcgcttggctggtttgcatcgatctctcctcgctagtatacaggctccaggagagcagggaccatgccatttttgcccacccttatgcttcttcagtgcccagcaactcatcgggcacagaggaggggttgcatcagtactgggggaattatgaatggggatgggagaagttcagaaagttcttaaggtcacacagctcggaaatgagtgtcaggattcaacccagccctgcatttatagactgccatcttcctctatttgtgtccattcttctttcttccgtctccaccctcttgcttttccttttcaggggaattgctagagaagcaaccccctgactctcggaaccagaaagtctccctcagcagaggtactgtgtcagtgcccaattgaatgaagccgcttcagtgagggtaggggcctgttgatcagcaaacagctaacttagcccttctccctgcacctcggacctcctactcctgctcctacccacctactgaagctgtctcagtggtcaagggctagatcaggcctagagtgctggggtctgagtctcagcttcccttttctcagggggccttggacgcaatcccttatgactttgagattcgctttcctcccgtgtagaacgataataaaaagtggtactaatttcacgagctttaataggattgaatgtgagcccagcgcttggcacagggcaagcgccccataaaatggcagttaggattaaaatcgaggttgccgggggacccccaggcaggagctgagatttgtgtggagcggcgaagtggggcggcggcgcgtttggctttgacttctgatcccccgaagcgctctggggtcctttgggccccacccccacccaccccaccggcgggtcttgggctccgaacccagggcgccccgcgcaccgagccgttgcgtttgaaacccacagaaagaattcccccgctcgacgacggcgagggtgtgggagctactggcaggcaaattggtgggagccgcccggcccagcctgccttgccgagtcagcgcgctcttgagccgctgggcccttcccggtgcccgcctggcagcgcggcgcggctggggcaggggtctgctgggggccggggactaagggctgtgggcccatccacacacgcctcatcccttctttccgggggcagcagagcagcagcgggagaccgggagcaggaggggtagggcgagagaaaagcaggacctgggccgggggtgggagtcgggccgttgacgctcgctctgcgaggggctccctgggaacgcccaggcgagcgcctcctgcggggccccgccccccgagtgcctacaatggtgccaggcccgcacccagtcctccgcgtggcttagcgggacagcatgggctgagcccaggcgccgaaagttgtcacggcggcgtcgcaagggggcagtgccagggactgtggggagagccagccctccccttccagctgttcccagatgtcattctgcccgcccaggcgcctggttcctgagctccgcagcattccactgttcctaagctactggtttttgttgacttttaaatattttcttctaagggagagggggagggaggcaaaagtcaggaaagagcaaataaaaacaaatcaaaataagccctcccctccccaaaagaaagctgtcctccacccacccctcccacacaaatagaaggcctctgaacctaaccaccttgctggagcgaaagccagacagaactgacccacttctgccaagccccatcctcatctccctttctggtgaatgaggggtggtggtggttgtgttctagccctgggtggacagaggggcttccagaaagagaggaggaggatggccagcgg

SEQ ID NO: 1074 - DNA, 2300 bp, Homo sapien
cattctccagctcaccacaatttattcctaagccaaaatctacacttaagacactttcatggccatttataacatgcacagagtggcaaaaatttgagtctcccaatgcacgtgttcccagctgtggctgaacaaggtgacattctgccttcccctttcagctctaatgctataaacatgttctattggaggtctacttggtgccatgtttttctcatttcttgctttttgctggggatttgctgtttgaaatggccccgagtacagtgctgaagtgccatctagtgtttctaagcacacgaaggctacgatgagccttatggaaaaaatatgtgtgttagacaagcttcattcagtcatgagttatagtggtgttggctatgagtccaatattaatgagtcaacaatatatattaaacaaggtgtcttcagaaacacacataaaacagacttctgtattgatcagttgataaccacattgtaaacagaagcttgcaggaacctaacctcatatgtcctctaggaagaatgcttcaatattcactaacttggtgctcatggtgactcatagactataactaccttgaataatgagaatcaaatgtaccaatctgaccatgtctcttcctttttcctgcctcagcacaatacaaaatgtaaaaatagaaaaaagaaaagaattccctcatgcctccctctgcacccaagataaattcaaactccttagcatgacattccaggtccttcatggtctggaaggtctttgctgaccttccaggctccttgccatgtggtgtccccaccactacccagcccactctccaatgctcttccattatttttcacaaaggtcctctgcacgctatgtgcccactgcctcaaaggcccctcctcagcatctcttcttggtaaactcctatacatccttcaagacccagcttaaatgttaccttctccggctctccctctggcagaacttaaaactcccttctctctctgtgtcttttctaggacttctcacaatgttgtaactgatctctttatatgcctcctctctcctgtacttggcaacagctttttggaaagagcatggagtatagaaatgtgtgactctctgcagggtgtgtgcatttcacacatcattcattcaataaatataaattgaagcctaactggacaagacaccaggcaccatactaggcacaagggatagagcagtgaataaaataaagccactgctgcatgtgtgtgcaacactgtgcccataattgtggcctgtgtgtaagagtatgctcatgtgaagctacattgtgtttgcttgtggacatgaggtgtttgtggctcctggatgctttgtctgttgaatcctgaccccaagtgacctgctgatacagggcaccttggaagtcaattaggccaaaagaccgtgtctgtgcactaatgagaagctttccccaggtgcccctgcccaccttctccacctctcctgtggttcctgcctggcttgggtttggcctttttaacccaaagacaacatgcatccaaatgagattttctctagtgcatacgtctctctctccctcccttctcctctgccttccctgtatctcagaaagaaaaggcctaggaataaggaaaaggaggaggaagaaacatttttttgaggacataccatgcggcaggcctgtgctgggcagtatacacgcattataggcaattgtagacagggcttcccttgtgtcaggcactgttctaagcacttcacccctaaggctgggttaatccacgtatccaccctatgaggtaggtgttgttcttttcccactttcacagagaaggcaagaaatcacacagtgagaaagtggcagagctgggattcaggcctcagcttctcccacacaagcccacagatgggaggatgaacaaggagtcagagtggacctgtggctctcccctgagaggataccaggattcgaggctcagcgccctgggaggagtgaacccctcagtttcctgagcctcatcagaagcagtctggggaggctggggcccagccaatggcagtgcaggtcccagctcctcctcctcccaggctgggccagcacacccggcaggctctgtcctggaaacaggcttcaacgggcttccccgaaaaccttccccgcttctggatatgaaattcaagctgcttgctgagtcctattgccggctgctgggagccaggagagccctgaggagtagtcactcaggtaagggcatctgtgtccgcatgtgccctgccccttggcatacgtggcagg

SEQ ID NO: 1075 - DNA, 2300 bp, Homo sapien
ggcaccgagaagcccatggggagaacagtgggcgcctctacctgaaccccggcaagaagcggggtgggctctggtggacatatgtctgcagcctagtgttcaaggcgagcgtggacatcgcctttctctatgtgttccactcattctaccccaaatatatcctccctcctgtggtcaagtgccacgcagatccatgtcccaatatagtggactgcttcatctccaagccctcagagaagaacattttcaccctcttcatggtggccacagctgccatctgcatcctgctcaacctcgtggagctcatctacctggtgagcaagagatgccacgagtgcctggcagcaaggaaagctcaagccatgtgcacaggtcatcacccccacggtaccacctcttcctgcaaacaagacgacctcctttcgggtgacctcatctttctgggctcagacagtcatcctcctctcttaccagaccgcccccgagaccatgtgaagaaaaccatcttgtgaggggctgcctggactggtctggcaggttgggcctggatggggaggctctagcatctctcataggtgcaacctgagagtgggggagctaagccatgaggtaggggcaggcaagagagaggattcagacgctctgggagccagttcctagtcctcaactccagccacctgccccagctcgacggcactgggccagttccccctctgctctgcagctcggtttccttttctagaatggaaatagtgagggccaatgcccagggttggagggaggagggcgttcatagaagaacacacatgcgggcaccttcatcgtgtgtggcccactgtcagaacttaataaaagtcaactcatttgctggttccaggtgccctctggttgtgcggccttcgtgaccctcacacgttcatggtgtcaatctctctgcccccgtgaagagctgcacttgatccagcctgtgaggggcatcctctcttccagaaagggggcccccagtactccaggggacgtgctacttgctcatgctcccatctagcctttatcccccatggcaagtttagtcctgtgggttgtctgcagagagaatggagcttagtccatgttgcagtgggaagttcatgaacttagaatgcctgtgtcgaatccaagttccaccgggactctgggaaagtaacttaagcttctctccaaaatgggttaataatacctagcctgtggggttgtgctgaggactgatgagctcatggctgtggacagggctagccagctgtaaaaggacacataaatgttaatcattggtattaggaagtgcttgataatgcctgtgagaaacgaggcagaaggcccctccctagctgcacattaaccttcatcatcccagccagaacacaggtcccaggccccccaccagcatatgtgaggtcacactccagcctccctggaggccttccccaggacccacagaggatggacagcgatgctgtgcctggccctgtgctaactggggcatttcatgctgctgacctgcattccttgcctccaccaaggctatgggtgccctggtctagaaaagtcatagttgacccctcccatttcctacacaatccaagagcttccagactccagtcccagaaatatcccaccaccagaatgggatgcgttcctgcactaaattaaggttgcccctttccgtagatgtcagctgctgagacctcagtatcaggcttcccaggaaaagggcaggagagagggcaaggaggcagggtaaggaggcaatgggaaggggacagggtcaatcccactggtgctgtcctaggcctaggcataatgatatcaggctcctgaaccccacacagcagtctcacccacatacctgcctgcctgggagccaggctcagccatacccagccaggctagagaggaggcgtgggccaggagagaagagccgcaggtgtttgctctgagtatgtgcccggggaagtccgccctcctgcctgcccacccaatcactctcgcttggctcattggcccagaaagccccacccagcaagggagagaggaacaaaagctgcctccgggaggtcctgaggcaaacagacaagcccaaggacaaggaagcagctactggacccaagaagggtgaggaccgaatagggcaggaggctggccaggaagcaagcaaccagctgagctgaggatatccaagggacctcaggctgtgggctgggcttcagggagggagccagagggtcagtgtccctagaggatccccagggaagtgccaaggagga

SEQ ID NO: 1076 - DNA, 2300 bp, Homo sapien
caaagatcataaagcttgataacgctctctattggtacgtatatggggatacaggcactcccttgtcccttggagtgcaaactgaaacatctgtgaagacgattgggcaatatgtatcaaaattttaaatacacatacaactttaaagcaaacatttcacatgtaggaatatgtcctgtagacacaattttcaaatgtgttcaataatgattatccaaggatagtcacgcaatggtatttgtaatagaatgaaataaaaaagtggaaacagccttttcatcagaataggactgattaaatagagtacatatactattcagctgtttttaaaatgagagagcaaggcagctccatatccactgatggggggaatgtctcatattttgttaaatgaagaaagcaaagtgcaaaagagtgcagatagcatagcacacttccataggttaaatgtaaaaagaatatatagttgaatatgaacaggtgatttgggagtaagaacaagaaactagggaccctggtgttcaggtaggcagctccggttacagtctggtgttcagggagaagtcacgtccggtgttggaaatgtgtgaatcatcagtgagtggatggtatctagagccccaggactgggtgagctcacctgggaaggaagagactgggccctgggacatgcccaccttagaggccaggatgtgaggcctgtggtgtcaaggaagcacggggaagaaagtgtttctagaaggaaggagtgccccattgtcccaggtgcttctgaaggtcaagggtcatggggacagagctgtgattgctggatttagcattatggagatccacggagactctgataagccgtttttagtgacatggtagggacaggaacattgttcaaatgtgtcaaaaaatgactaggaggggaggtagcggggagcaagtcttgctctgacagggagcagagcagcaggcggcagagtccagggccccacaccctcatgctcacttccccgctgcccatgcacagagcatagcacatgcacctgagccacctggcactcctcaatctcagcaaagattttcaagggccacgaccccagtgagtacaagggagcctctgccctgcggcttttctgtatctggaaacaacactgctgaggcctccagagctgggtctgctgcttattatctgtgtgaccctgagcaagtcacctcacccctgtgtgcctcagctttctcattcataaaagtaggagggattggaccttcctcatctggatgctgccatgatgaaataaagcatgtgggacagtgtcgggtgcaaagatgccgctgggctcccaactcagtgctcattctctaccaaaatgaataggaggagggtgaccataattgatgctcctaactttggggcatttttgaaagtaaaagggggcattgttaatgatgccagcactgcaaacataaaccagtacagtcctgggcaaacaccatgtggagccaccatagtgccagcaatatcatctctgtggagacaggactcgggccccaccctaagatccagggactcccaagggaggctggaaaccctggggttttccaaaagaggctggggcactgcaggcttttattagttcctagtcaggacacactagtaaataagacaatgtgtccttatccccagggcacagcccagccccaccccagccgcagacccacctgctttggcagaggctatttactgcaatggtatttgtaatagaatgaaataaaaaactagaaacagccttaatttttatcagagtaggactgataaaatatattacagtacatatactattcagctgtttttaaaatgagagagcaaggcagctctatatcgactgatgggagaaatgtcgtattttgctaagtgaaaaaaagcaacgtgcagaagagtgtagatagcatacttccacaggttaagactatatagttgaatatgaacagacgattcaggaaggaaaacaagaaactagggaccctggtgttcaggtaggcagctccggttgcagtctgcccctctgagtcactccaggcggtgacctcccccaacccgccctcattcctgaacttctttcctggcacaggactcactgtgccccttcccgctgtgggtacaaggtctgccccccaccccagctctccaaagcccaccggcctccctggaggccgaggtcgacggcccgtcgcaccgggagggggggctcccaggggtgccccacgcacggtcaaggtcccgcgccaagcggggaccgggctgggccgga

SEQ ID NO: 1077 - DNA, 2300 bp, Homo sapien
tttctgtatctggaaacaacactgctgaggcctccagagctgggtctgctgcttattatctgtgtgaccctgagcaagtcacctcacccctgtgtgcctcagctttctcattcataaaagtaggagggattggaccttcctcatctggatgctgccatgatgaaataaagcatgtgggacagtgtcgggtgcaaagatgccgctgggctcccaactcagtgctcattctctaccaaaatgaataggaggagggtgaccataattgatgctcctaactttggggcatttttgaaagtaaaagggggcattgttaatgatgccagcactgcaaacataaaccagtacagtcctgggcaaacaccatgtggagccaccatagtgccagcaatatcatctctgtggagacaggactcgggccccaccctaagatccagggactcccaagggaggctggaaaccctggggttttccaaaagaggctggggcactgcaggcttttattagttcctagtcaggacacactagtaaataagacaatgtgtccttatccccagggcacagcccagccccaccccagccgcagacccacctgctttggcagaggctatttactgcaatggtatttgtaatagaatgaaataaaaaactagaaacagccttaatttttatcagagtaggactgataaaatatattacagtacatatactattcagctgtttttaaaatgagagagcaaggcagctctatatcgactgatgggagaaatgtcgtattttgctaagtgaaaaaaagcaacgtgcagaagagtgtagatagcatacttccacaggttaagactatatagttgaatatgaacagacgattcaggaaggaaaacaagaaactagggaccctggtgttcaggtaggcagctccggttgcagtctgcccctctgagtcactccaggcggtgacctcccccaacccgccctcattcctgaacttctttcctggcacaggactcactgtgccccttcccgctgtgggtacaaggtctgccccccaccccagctctccaaagcccaccggcctccctggaggccgaggtcgacggcccgtcgcaccgggagggggggctcccaggggtgccccacgcacggtcaaggtcccgcgccaagcggggaccgggctgggccggaagcgggcacggtactcgcggcaaactagcgtgggcgagtcctgattgcagtcggacctgccgccgcggcacttaacagtttgcagagtgcttcccgcccctgatctcattggagccttcggacagcccagcccatggccaccgatgcccccatttcacgcctgaggaagcggaggctcagacgggccaccagcccctccggaggctggcccgggagcgcctggcagcgtcgggtctaggagccggctccctcctgctccctcctccgcgccgcccggggtgtgcccgccgtctgtgtgcaccactgctgagcccagctccggcgccctcgcctctgctgtgggccccggggacgcggggtcaggccaccgcgttggccaggccgctgcaggtaagtgctggacggggcggggcgaggctgggcgggaccctcaggggcgccaagcgctcctggcgaccccctgcggcagggctggggcttgagcctgccagtgcgctgggatggggcgcgaagcgggggtgcggggagcccgccaccccgtacctctcaatcctccctctcgcctctcaattctgggcccattaggggtcccggctgcgggaaggttccgagacaccccctccccaagtccgcaagctcccaagctgcctaggatggagggaaactgggaaggaaagggagctttatccttcagggacattgtggggcgggaggtagggctgggcacagtacagtctgggggtcagggaaaaaacggttgcgctgggagctggctttggagggcagctgggggaaccagaaccggctccaccagtccccagcctagacttgggaaggaaattctttgccagtgaagctcctccctggggtgtgtcaggagggactgggcagacagcacccaagggtagaagatgggggcccaggagggagctgcaccctggtgggcagccatgggagtgtgtcaggtggaagcagccgtcagggtccctctctgctctctgtccggacagacagggctccaaccttcacttcagttcttgtgaactcccaccaggtgagtagcagcctgggagggaagagtctcaggattctaccagaaagtaggaattatttccctttag

SEQ ID NO: 1078 - DNA, 2300 bp, Homo sapien
ctgaggtggcagcagcctgaacaggaccagggcaaagggaatgcagggaagcatgtggttccagggacatttccaggtggaatgaccaggttgtggtaactgttgtcttagttgatcccagcttcttcatcctctggggaggaggccgagttattcaaacctccaaagcccttgaggaaggagtcagagcagggtgagggcagccttgacgtcactccccagccctccactggctcttccctctttcccagtatactgaatcagaaaggctttgggagagctgggcccagccccaagagaggaaaactcggtagtgagcagaggctgcagtgggggcgtggtgagaaccagcctccaggggcctcggttctcatgccctcaagggtcagaattaagtggggcagttgttagcttcagaaatccaggagactcagttcagcctggccctgagggagaggcctagaggggaagccagcccagccggatccctcagggcagctagccctgaagttctcaggtctgcgtgtccccaaagatgtcctcctgctggtcctgaagacagaaccctcagggacccggccctggggcccagggaatccaaggactaaatcttgctgtggaggaacagggacttctgtgccaccagccccaggcctcaacagccccctgccaccttccctttcctcagctgcgccagcccctaccaccctctaagaacaacccacagaccctttttgttacagtatcacaatgtttttagccaccactcacttgaaaaactttatgtaccactattacactatgtgctttgatcacactgtatgccatcaaccccacaaagtagatactatcactattctcattctgtagaggaagaaattgaggcacagggatttgagtaacttgcctaagggtacaggagtcaacagcaaagtctcagctcctgggctcagccaccaacaacgtctcagcactccgagggcagtggccacagtctcagaaccccacagctccaggccctcgagccacactcatgccgcccctctacctagaatgctcttcccttccacttggctaatggagggggaaaagcatttcctctcctccaggaaatgttcctaaccaagtcccctgggaatcacccagtacctctcaggagaactttccacatttattatcttaccgttatccaagggctgatatgctcaatccctgcaccagccagtgagggaggaggccagagaccaagtttggctggttcctcagggtatccccaggtccccaagcagcgtctgcagcacagcagatgctcactgatgctcatccacctgtgatgcctgaatgcatgaaggcaggctccgcatagccctttcattcctatggatgtcccccacaccacccagccaccatttagaggcataagaacggggtccaagctaaaggtcaggtggttcccccacccccagtctcaaggagtccatgggaattgcttaatggcctctgattgtgtagcctgcccagacatggggatgtttgagaattctggaagaacgtgggctgggcgtggatagagacgcctgctccaccatgtatgctggaggtgtggattacaacccctgtcccccattggagcttcccgcgccgtaattagccttgatcgcctcatcctggcacactagggccagccacctagcaaatgagtggtccccacactccatccccatccgcccacccctcacagccccgcaggccagttgcccagatccacagcccttactgcaaccccttcaaatccagccaccctgagagatcctggcctgggagaactctccttccctggccaaagaaacgacaggagagtttactgtctggaatacctggtggagagagaacagaggagaggaagggtaggtcagcccctcttgcccctccccaccgcaaatcacacaggcccacctccccggagtgggtttagggagtctgcacctcccagtccccgcccccgccctctctccagcgcccgccgccctccccgtcgcgtttcctgcccccaccccgcccctctgcgctatttaaggcgcccccgccgctcgtgcggtccagcagggctcccgcgggcgtcactccggccatcgtccccacctccacctgggccgcccggcaggcaggcggtgagtcgggggctaggaagggaccaggggcgccacctgctcgcgggaggccgggaggagtcttgggtcctccgatgccgggacgggggttgctgcggaacgcccgccgcgacagagccgcgctcaccc

SEQ ID NO: 1079 - DNA, 2300 bp, Homo sapien
caggcacggtggctcatgcctgtaatcccagcactttgggaggctgaggcgggcggattgcttgagctcaggagttcgagaccagccctagcaacatggtgaaacccagtctctacaaaaagtacaaaaattagccaggcctggtggtgtgcatctgtggtcccagctactcggaaggctgaagtgggaggatcacttgagcccaggaggttgaggctgcagtgagctatgattgtgccactgcactctagcctgggcaacagagcgagagtcctgttaaaaaaaaaaaaaaaagcggccaggcgcagtggctcacgcctgtaatcccagcactttgggaggccgatgcgggcagatcacctgaggtcgggagttcgagaccagcttccccaacatggagaaaccccttctctattaaaaatacaaaattagccgggcgtggtggtgcatgcctgtgatcccagctactcaggaggctgaggcaggggaatcacttgaacctgggaggcggaggttgcggtgagccgagatcacgccattgcactccagcccaggcaacaagagtgaaattgaacaacaacaacaaaaaaggtgggaaggtagatgaaaaagcatcaataaggcactgaggtgtgaaacagtgtggtctgccgggtttagtatgtgcgagcaaaataaatatgcaggctgagattagtgggatgagggtgggaagggccttgtgggagcattaacaagcttgagctttgggacttttctgtatatgataaaattgatgtctgtatagggtacagtggggacacagaggaggaagtgaatacttgtacccaagaggtcatgtaagacttaggttttactatatttgaattatttttacactaacaatagccacatttatttccctgctggctgtgtgcctgccacagtactttacaaatattatctcttccaaccctcacaccatccttgcgaaatgggtgttattacctctacacagaaggggaagggaggctcagacaggttaataatgttcccaaggtcactagaaagctagcccggatcccaagaggtcttaaagcactaaaatatactcttctaagaagagcttcttgaggtcagggatcatgtcttttgtttttgcgtgcccagacctaggtcttagaagacgcctaataaacatcagttgaaaaaaatgactggatgatctttcactttttccacgcagaaaacacgtggcgacatcactgagaaacctcccggccaacagagggcgcgacgtccatttcagcgcagtggggcccagttgcggacgcctagcttccttccgtcctttggctgaagttcagccaatccctgcgctccgagagagccggcggccagtgggcagggtcacagggcaaggtcccgcgggccgctgggtgcggcgacttccgtgctcccggcgagcgggcggagagcgggggccgcactggggagtgtgggctgggccgcaggtgagcgcgcggtcccggcgagcaggtcgggtcagcccaggccagtaacctctgagttacgggaggagtgatcgctagggtccaccccggtcccggccagatctgccagctcccctctctggcgggtgttctggtgccaagtctgggagcccaggtagccctccgcagacagggcttctcggcacctcaatgaggacggacgttgatgaggccatgaatgaggtgggctagggacaggggaccgggagactcacagaagggagaagggtagccatttggatggaccttcgccttacttgcgctcccattcctggactgcgctctagtgactgtcagggctaattcttccgccttctcaggcctcctgtgtccttgttagtagttcttgaatttgggactacggcttctggcctcgttgggcctccgggccctcgcactggggcaggtttcccagcagcccagttgacctttaccggatgcttttggcagacgtcctccatgccgggctggaaatatgcgtcacagtgtttttcagacacttttgcctctttcattgtgataccctgcctggggacgactatgatggagtctttaggtttttgtaatcagcaaaggcatctgttatgctcctgccaccttttgggggagagtgggtggaggatgttgtgattttacactagggagtttgggctgtcattcattcgttcagcagaccttttttgggcactctgccaggcagggtaggagaggtgcctggatggatagggcataattgggccagacagacacggttcttagccttttgga

SEQ ID NO: 1080 - DNA, 2300 bp, Homo sapien
ctgcctcagaatcaaggtccctctaaccttctctcccaagtatagggaggcactctctctagaatttcctaatctgatcgagaaaacgtctttccaaaagaaacaaaattgccttcctcccctctccgaaatctcatctagctcagaaaagaagactgaggaaggcaactacgcctggatggatttttcacaagatgatgcctgtttctcgggctcattcaaattctaaagagaatcatttacaagttaatttctgtccattttttcgccctaagaatcacttgctgccctcagaagaattgtctatattctccatctctccccttcccctatgaaaaagagtgtatacgcttctgtaccccattgggttattgggtaatcattctcctgtgacccttcccttcccaccccctcgcctccccgccccgtgctatgcacgttaaaataaaattttgtatgtcttttctcctattaatctgccttttgtcagttgattttcagtgaaccttggcccctacaatactgttcccttttctccatcttcactgccagagcttagctttgagctgtttgagataatagaggaagggtgtctaatgtgataagcagtctatgtatgaggcttcctctggaggtgacccttaagcttgaaaattgtgccagagcacaatctggcatagtaaagaaaggtgggaagggcactacatggccaggcacggtggctcatgcctgtaatcccagcactttgggaggctgaggcgggcggattgcttgagctcaggagttcgagaccagccctagcaacatggtgaaacccagtctctacaaaaagtacaaaaattagccaggcctggtggtgtgcatctgtggtcccagctactcggaaggctgaagtgggaggatcacttgagcccaggaggttgaggctgcagtgagctatgattgtgccactgcactctagcctgggcaacagagcgagagtcctgttaaaaaaaaaaaaaaaagcggccaggcgcagtggctcacgcctgtaatcccagcactttgggaggccgatgcgggcagatcacctgaggtcgggagttcgagaccagcttccccaacatggagaaaccccttctctattaaaaatacaaaattagccgggcgtggtggtgcatgcctgtgatcccagctactcaggaggctgaggcaggggaatcacttgaacctgggaggcggaggttgcggtgagccgagatcacgccattgcactccagcccaggcaacaagagtgaaattgaacaacaacaacaaaaaaggtgggaaggtagatgaaaaagcatcaataaggcactgaggtgtgaaacagtgtggtctgccgggtttagtatgtgcgagcaaaataaatatgcaggctgagattagtgggatgagggtgggaagggccttgtgggagcattaacaagcttgagctttgggacttttctgtatatgataaaattgatgtctgtatagggtacagtggggacacagaggaggaagtgaatacttgtacccaagaggtcatgtaagacttaggttttactatatttgaattatttttacactaacaatagccacatttatttccctgctggctgtgtgcctgccacagtactttacaaatattatctcttccaaccctcacaccatccttgcgaaatgggtgttattacctctacacagaaggggaagggaggctcagacaggttaataatgttcccaaggtcactagaaagctagcccggatcccaagaggtcttaaagcactaaaatatactcttctaagaagagcttcttgaggtcagggatcatgtcttttgtttttgcgtgcccagacctaggtcttagaagacgcctaataaacatcagttgaaaaaaatgactggatgatctttcactttttccacgcagaaaacacgtggcgacatcactgagaaacctcccggccaacagagggcgcgacgtccatttcagcgcagtggggcccagttgcggacgcctagcttccttccgtcctttggctgaagttcagccaatccctgcgctccgagagagccggcggccagtgggcagggtcacagggcaaggtcccgcgggccgctgggtgcggcgacttccgtgctcccggcgagcgggcggagagcgggggccgcactggggagtgtgggctgggccgcaggtgagcgcgcggtcccggcgagcaggtcgggtcagcccaggccagtaacctctgagttacgggaggagtgatcgctagggtccaccccggtcccggc

SEQ ID NO: 1081 - DNA, 2300 bp, Homo sapien
cgggcgtcgtggcaggcacctgtagtcccagctacttgggaggctgaggcaggaaaatggggtgaacccgggaggcagagcttgcagtgagccgagatcgcgccactgcactccagcctgggcaactgagcgagactctgtctcaaaaaaaaaaaaaaaaaaaaaaaaaaaaagaaggtgggggaaggcttgggacactggtaggttaataactttgctccatcacttacgcattagtttccatcctgccagttggtattttatatatatatagcatatatacatgtagtgtatatatatagtatatatgtagtatatatatagtacatgtatgtagtgtatatatatacacagagctttcaatcaattttgtaatgtaatggattataaataataaaagatgtcctccatgaagtccccacccccatactgggcaggagggtgcatgccaggtccctggtcctctctgttggggtcaggtgagagaaacgtcaggggatgggactaggtggagagaaaaacatggtggtctgcagtctggagtgcagccagccagacacctggaagaggcataggtggggtggaggtgggggtgggggtgggatatttagaggaaagactgggccccaagacaagccttgggagcagagtggggcagagatgcccccatctttctttgcaaagagttagagtttcttttagttcaaatgcggaagagtcgcctacagcctctgcagatatagagaggtcttcccctaaggcagagcaccccagggacttccaccccctcccggcaccttataactgtcctcccgaccccctgccccccagctcagcgatgagttgaaccagcagctggaggccgtgtgcgggtcggtgtttggggagctggagtcccaggccgtggacgccctggacctgcccggctgtttccgcatgcggagccacagctacctccgggccatccaggccggctgctctcaagacgacgactgcctgcccctcctcgctacccctgccgctgtctcagggaggcccggctcctgtgagtacaccttcctgcccctggcccggccctaggcaggagagcgccctgggtccgggttctggcctccccctcgactgtgctgtgacccgcgcagatcgctcgctcccggggtcggatgacggggagagcgtccgttggcgtgtgtgcagcagcatgtggagtgcgcgccgctgcagggtcccgtagggcctcttgagggtgggagtcgggcgcgggcccaggacccaggcagggccgcgagcctcacccactgcgtctctgcgctcgccggccacagccttcaacttcagaaaggccccgccccccatcccgccgggaagccaggccccgccccgcatctccatcaccgcccagagcagcaccgactccgcgcacgagagcttcacggcggccgagggccccgcccggcgctgcagctccgccgacgggctggacggccccgccatgggtgcgcgcacactggagttggcgccggtgccgccccgggccagccccaagccccccacactcatcatcaagaccatccctggcagggaggagctgcggagcctggcgcggcagcggaagtggcggccgtccattggggtgcaggtatggaacggggaggcgcccacgagggctctgaccctggtcggtcggggctggggtgaggggctggaagcggccttctggatatatcgacattctttctggcttgccctgagctgcaagtgaaccccgtgcctggacatcgacggggctgctccagccagcccccgcccactccctcgtccctcgtcctggcaccatcgcccctcctgactaatggagggctggagggctgtgcccagtggttgccactttgaggcctgtgaccgaccgcctgggtctctcatcttgttcaggcagatggtctttgcaggacctgccagctggcttggggcgcagccattgctagccgttctccccgggaagggctttcaccttggctcgccacagccactgactcctccaccctgccaccaggtggagacgatctcagattcggacaccgagaacaggagccggagggagttccactctattggcgtgcaggtggaagaggacaagaggtaaagtcacggtgggagtgcccaggcttcgctgggagacaggaggagagagggctgcatagtgtccccactagcccagtctccctgcacatcctcttttcctggaagtgagaccaagcctttttatagagggtggtcagagcagccacaggggctgttcc

SEQ ID NO: 1082 - DNA, 2300 bp, Homo sapien
agggtggaaaagaagtctctattactccatttcatgttcactacaaaatgctaattcccattctgactagtgtgaacctcaggcaaggtgacactctcagttggatttttttcttctgagtctgaaagcatagtggtgtagtctgcctatagtaaggatagatagattacactaaataaatggtagtgtcaaaacaataaggaaaccttttctctcatgtaagaggtccagagataaccacttcagtttcaatgttggtcagtttgcctaatgatggcatcaagaatcaacattctttaaactttctgctctgctgctttcagtgtattggctattgccctcagaattgcgaaatagctgcagcagctccagacagtgcatttgctataatattgaaaggtgaaaagagaggaagggtgccttagaagaccctagatttggctgggcgcggtggctcacgcctgtaatcccagcactttgggaggccgaggcgggtggatcatgaggtcaggagatcgagaccatcctggctaacaaggtgaaaccccgtctctactaaaaatacaaaaaattagccgggcgctgtggcgggcgcctgtagtcccagctactcgggaggctgaggcaggagaatggcgtgaacccgggaagcggagcttgcagtgagccgagattgcgccactgcagtccgcagtccggcctgggcgacagagcgagactccgtctcaaaaaaaaaaaaaaaaaaaaaaaaaaaaagaagaccctagattttcgcatggatctcactgggcagagctatgtcccatttccattcctagactaatgactggcaggagaatggaattcccatgatggacttagactaagatttacccacactggtcagcaaggaagaagagggggtagacaatggtttctgtcacttactagcttatttgaaaactatggataatgatagtaactatttcatagcctggcacatagtaaatgttcagtaaatgctagtcattattaaatattgatttgttttacagatgagaaaatgcatttggaaagcttgagtgcctatatatcagacctggaactagaactaagtcctaattgattccagaactcaaacttttcactgcaccagctgccaaagctgaaaatggacaggcatggcaccccagctctcttcaatctgagggtagatgggatgacctgtctggggtgatgaaatctgctctgctttcccagcatttcccctctgattggaatttttttttttttgagatggggtttcaccatgttggccaggctggtctcgaacttctgacctcaggtgatccacctgccttggcctcccaaagtgctggggttacaggcattagccactgtgcccatcttgcttgaaaattttgaagcccctgaaagtagagcctggagccccgaggatcctggccttattctttctccaccccttccaggatgccaccgccagcccgtctcctgccaggatggactttgagtaaaacctctcgcagctagcattagattgagggctcctgtttaccaagtctgggtctgtaggctgataagcagctactgggccccccaagcttggctgtaggactgcccagcagctgcaggaaagtcagggtgctagaggagtaggctgggcagctggtgtgtacgagcagttgggattgacagcagcaggaggatcttgagcccaagcagtgcctccttagcagcccaaggagaagccaggcctcaggaaacgtgccccccaaactacagcctaaatctaggtcagctcagcacgatgacgttcagctgcctgcccttcctaatacatttttatctccctccctgtgctgaaggctttcttgtcctccgatgacactcccttcccttggggccctactgcagccccaaaaacccagctcatagctgccacaggtgggctccagcccttccagctgtcggacccattcttcatgtcgtttcttgggattagctggcgataggagggtctgggatgtgtgggtgggaggggattctcccctgtctcagatccttaaagtcaggaccccagagagaactccagcagccattatagcaagaggcaagaaaggaacagtctggtaggatggcaggggatgggtcagggtggggctacaggcatggagaacagaatagaggaaggtgggaaaggaaatacagttacccagggtctcagaaaggattggagcctgagatgctcaaaggcaaaaatgcagattttggaagaactgagttttaggacatcctaggag

SEQ ID NO: 1083 - DNA, 2300 bp, Homo sapien
tatgaatcaccaaaataataatctcaccgacttcgaagaagaaaagctaacagagctatcttcagatttaggattacaagcactatttaaatcagtgtctgtaactcagttttggataaatgcaaagacaagttacccagaactccatgaaagggcaatgaaatttttattacccttttcaactgtttatttatgtgatgctgccttttcagctttgactgagtcaaaacaaaaaaatctgttgggttctggccctgccctaagacttgcagtcacatctttaattccaaggatagaaaaattagtgaaggagaaagagtagcaatatgcacattgcttaacagtgaagtcaataatcctgtgttaagttttgtataagtatcctaaaagataatttcctaatgtggatttgtgttttcagtgattaaatgttttaataatttttccctttttgttgaggaatttaataattatgattgttataaataattatgtataattataatctagggtagaaaatttagttatttcattaaatttggactagtgacaaagactgcaggtaatgagaagcccagtttataatgtaacagcacaacctggatgttgaaacagcttggcctttagaagcaagtggaacatttcagtcttctagccaaccagctacttacccctgcaaggttgtgagtaggtggaaaagatagatcttttttttgagatggagttttgctcttgttgcccaggctggagtgcaatggcgtgatcttggctcactggaacctctgcctcctaggttcaaacaattctcctgcctcagccttccaagtagctggggttacaggcatgtgccaccatgcccgtctattgtattttttttagtagagacggggtttcaccatattggtcaggctggtctctatctcctgacctcaagtgatccacctgcctcggcctcccaaagtgctgggattacaagtgtgagccaacgtgcccagctggaaaaagatagatctaagcagcttgggtaactataaatggaagcagcagggggatttgagacccctgcttggggcctttctggcccaatataccagggcttagcaaactttttaaataaagagccagatagtaaatattttcagctttgcaggccatactgtcacaactactcaattctgcagttgcagtgcaaaagcagccatagacaatatgcagataagtgtggctgtttttaaataaaacttattcatgaacactgaaatatgaatttcatataattttcctatgtcacacaagcttctttaaaaaatgtttttatcataaaaaatgtaaacaaacattattagcttgggggaaggggagaagcatggaaaaaaatcagacatctggccaaatttggcccatggtttgcccatcccagctttagacagatttccaggtaagagcaaatgggccaggagtggactgtagggcttggttcagtgaaagcctctctatccatgcaagtatctgaattttcaaacacctttcacatttcattgtcagccgagataaattagagggaaaagatatctcaggcaaagagacttatttaataattaatggttattgatttattacaattttataaattaatttactaatttacaaataactttctgagctcttacatgtgcaggcactgtgctaggcctgttacaaactctggagaactgagttatccccatatacagatgcagatactgaggccctttggggtgggtgacagctcagatcccacagctagtgtggcacaggcaggaacgaagcccggggtcttttgatggtagctgaaccgcacccagacacccacccgtgtctgccagcactccgtattggctgggaaacactccctgaatccaaaggtgcctgtttagtcagttaccagccagtggtcctcaagtgtccccacctgtaagatgggggcgccctgccccagtactgcagcctcgcgaccccctggagggtgggggacggtagctcaggcgagagtcttccggctgccccggggagggaggaaatgagccggcggcaggggcgggttttcggcggggccaacccacggtggggggagcgcggccatggcgctcctgctttcggtgctgcgtgtactgctgggcggcttcttcgcgctcgtggggttggccaagctctcggaggagatctcggctccagtttcggagcggatggtgagcggcgcgggcgggcggcaggggatcgggcccgcggcggcgtgtgctccgccctgccgctcctcgccc

SEQ ID NO: 1084 - DNA, 2300 bp, Homo sapien
ttgtgaagggcatgaatgccctcttttgtaagggcatgaatcccattcatgaggatggagtcctcatagcctaacccctcccaaaggctccacttcttataccatcgccttaatgtttaagttccaatatatgaattttgaagggacacatacattcaaaccatagcaggattcatatctaaaatatatgcccataagaaaatgtcaatccaatacaaaaatgagcaagagacttgaacaggcacttatgggggatatccagatacccaaggaacaagaaaatgggctcatcctcattaataatctgggaaatgcaaattaaaaccacagtgagataccactatgcccccatcagaatggttataattaaaaagatatgcagcagtaattattggcaaggatgttgggaaactgaaactctcatacatggctgaagggagtataaactgaaaccaccattttctaaaattgcctgagattatctacctaaattttacatatacataacaagcaatttcacttttaggtatgaacccaacagaaatgtgtgcatatgtatcactgttaaataaaacttgtaggccattgtttcgggctaagctcctgcagtaggtctcaatgaaccagactaaaaatcaaaatggagtcactcacactgaggttccatgtcatcaaatggaaactacgttgttatttgaagttctgaaaagtcaggaaaaagagataataagagtctaatttcccctgagtgccagtttcaattagcataataatgaaatttcttctgctttaatcgttaccaaaaaaagataaactgaagttacctgatgttaaccaatcagttatttctctattgttttgtttcttggttctgctttacaaggaaattaacttatttatttattttttggaaagttactttgaaatgaaccaatctgttttttgttctttacttctgctttctccagcccttctctgtctataaaacctacctcttctgctcagctcattggaacacttgttctattttatggaatgaagtgctgccagattctagaatcacaaataaagctaattgagatatttaaattaaatttgttgtaattttgtcttttaacatcaccaatgacaagaatgttcacagaagcattattcctaatagccacaaattggaaacaactcaaatgtccatcagtagtagatgattaaaattgtatcatattcataaaatagaatactatacagcagtcaaaatgaatgaacagtcacaaatcatacacgtatctgtgaaacaatgttgaattaaaaaaaccaaatctcaattttgagcaagttttttcatttatatctcaagagattaaaaaattatacctcttagggttaaatggtgaggattaagtgggatggtgcatgtgaagtgctcagcaagccaagtattatttaatatcatgctctctcagtaggccacctttcaggaaatgggcactaaaggatgctacagattagctaggtgtggtggcacgtgcctgtaagcccagctactcgggaggctgaggcaggagaatcgcttcaacccaggaggcggaggttgcagttagccgagattgtgccactgcaccccagcctgggcaacacagtgatactctgtctccaaaaaaaaaaaaaaaaaaaaaaaaaaaaaaaaaaaaaaaaaagaatgctatagagcacttacagcgccttctaacgccatctccaccttttcactattgagcctcggtctctttaagaagtgaaccataattgaggaaagaggaatgctgggaagttctactcagctcaggtccggagcctgacgggaaaagagggcggagaccaaggctgcgcaggcgtggttggccggtcgttgcgttgggatggatcaggcggaattccagaagagaaaataatccctgtctagatgcagaggacttggttcctattccagtgctcctccggtagcagggaggcgacagaaggtgggtgcggccgcagtggtagtgggcgggacggcggggcggaggccacaccacgtgacgaggcgttgcggcgggggcggtgccaggtgggctacgcggctggggcggctgcggatatcgccttagggacgcgttgacattcactggctagtccaccgctctcagtcggagaccacattgcctcgttagtcctcaatgatgggagtgggaattcttggtgggaaggagaatttcggaaagcgtgcggttctcagaggagggatgagcgcccgtagatattttgtggcgagtgcgcaaaagttc

SEQ ID NO: 1085 - DNA, 2300 bp, Homo sapien
gtgtatattcaaaaaagacttatcttagtgtattcctgattgccaaaagaaaatgccacagactgtgtaatttataaatagtagaaatttatttctcacagttctggaggttggcaagtccaagatcaaggcactggcagatttgttgtcttggaattactctctaattccaagatgaaactttgttgttgtcctcttgctgggaggaacattgttatcatacagtgaggggttaaaagggcaaaaggaatgaatctttgtgaagggcatgaatgccctcttttgtaagggcatgaatcccattcatgaggatggagtcctcatagcctaacccctcccaaaggctccacttcttataccatcgccttaatgtttaagttccaatatatgaattttgaagggacacatacattcaaaccatagcaggattcatatctaaaatatatgcccataagaaaatgtcaatccaatacaaaaatgagcaagagacttgaacaggcacttatgggggatatccagatacccaaggaacaagaaaatgggctcatcctcattaataatctgggaaatgcaaattaaaaccacagtgagataccactatgcccccatcagaatggttataattaaaaagatatgcagcagtaattattggcaaggatgttgggaaactgaaactctcatacatggctgaagggagtataaactgaaaccaccattttctaaaattgcctgagattatctacctaaattttacatatacataacaagcaatttcacttttaggtatgaacccaacagaaatgtgtgcatatgtatcactgttaaataaaacttgtaggccattgtttcgggctaagctcctgcagtaggtctcaatgaaccagactaaaaatcaaaatggagtcactcacactgaggttccatgtcatcaaatggaaactacgttgttatttgaagttctgaaaagtcaggaaaaagagataataagagtctaatttcccctgagtgccagtttcaattagcataataatgaaatttcttctgctttaatcgttaccaaaaaaagataaactgaagttacctgatgttaaccaatcagttatttctctattgttttgtttcttggttctgctttacaaggaaattaacttatttatttattttttggaaagttactttgaaatgaaccaatctgttttttgttctttacttctgctttctccagcccttctctgtctataaaacctacctcttctgctcagctcattggaacacttgttctattttatggaatgaagtgctgccagattctagaatcacaaataaagctaattgagatatttaaattaaatttgttgtaattttgtcttttaacatcaccaatgacaagaatgttcacagaagcattattcctaatagccacaaattggaaacaactcaaatgtccatcagtagtagatgattaaaattgtatcatattcataaaatagaatactatacagcagtcaaaatgaatgaacagtcacaaatcatacacgtatctgtgaaacaatgttgaattaaaaaaaccaaatctcaattttgagcaagttttttcatttatatctcaagagattaaaaaattatacctcttagggttaaatggtgaggattaagtgggatggtgcatgtgaagtgctcagcaagccaagtattatttaatatcatgctctctcagtaggccacctttcaggaaatgggcactaaaggatgctacagattagctaggtgtggtggcacgtgcctgtaagcccagctactcgggaggctgaggcaggagaatcgcttcaacccaggaggcggaggttgcagttagccgagattgtgccactgcaccccagcctgggcaacacagtgatactctgtctccaaaaaaaaaaaaaaaaaaaaaaaaaaaaaaaaaaaaaaaaaagaatgctatagagcacttacagcgccttctaacgccatctccaccttttcactattgagcctcggtctctttaagaagtgaaccataattgaggaaagaggaatgctgggaagttctactcagctcaggtccggagcctgacgggaaaagagggcggagaccaaggctgcgcaggcgtggttggccggtcgttgcgttgggatggatcaggcggaattccagaagagaaaataatccctgtctagatgcagaggacttggttcctattccagtgctcctccggtagcagggaggcgacagaaggtgggtgcggccgcagtggtagtgggcgggacggcggggcggaggc

SEQ ID NO: 1086 - DNA, 2300 bp, Homo sapien
cttaactttctgtctcattgatctgtctaatgttgacagtggggtgttaaagtctcccattattattgtgtgggagtctaagtctctttgtaaggacttgctttatgaatctgggtgctcctgtattgggtgcatatatatttaggatagttgatcttttcaaaaaaccagctcctggattcattgattttttgaagggttttttgtgtctctatctccttcatttctgctctgatcttagttatttcttgccttctgctaggttttgaatgtgtttgctcttgtgtctgtagttctcttaattgtgatgttagggtgtcaattttagatctctcctgctttctcttgtgggcatttagtgctataaatttccctctacacactgctttaaatgtgaccctccgagccatgtgcaggatataatctcctggtgtgccatttgctaaggccgttggaaaagtgcagtatcagggtgggagtgtcccgattttccaggtgacgtctttcatggcttccctttgttaggaaagggaattccccgaccccttgtgcttcccgggtgagtcgatgccctgccctgctccgtgggctgcacctacttgtctggcaagccccactgagatgaacccggtacctcagttagaaatgcagaaatcacccatcttctgcgtcgttcactctgggagccacagactggagctgttcctatttggccattttggtgccacccccctgccttctacttttaaacttaacttccttgtaaagcaaccttttccgattacctgctccaccctgactcattccaatcacctgctccaccgtgcattccaatcacctgctccacccgcactgattacctgctacctgctctgccctgactcctaccaaagcactcaccctgtcattctctttaaattagccaatcggaattagtttagcctgtgcagtctaaccctagccaataggggaacaacacagcagcaggggccacatgtgtcagggataagaaccccttccgctcccttgtccaggtgtgcgctcaccattgttccatctgtaagggcacacccttgacttgctgagaattaaaaagaaatttttatattcgagtgctatttcttttgcagcaccaaaactttataacacttttcttcctttccttgctgttccaaagctttttaagaaagtttcactcctgctctgaaaccttgtctcggtctctccttctgccttatgcccctcagttgaattctttcttctgaggaggcaaggactgaagttgctgcagacctgtacggatttgctgctggcataactcggatacctgccaccagtaacactgatcctttaagccctcaaggaacctccaagagatagaaacaaaaatattaaacacagtggaaatgtcacttttgatgagataatcaacattgcccaacaggtgtggcaccagtctttggccagaaccattaaagagatcttggggattgcccaggctgtgggctgcaatgttgattgtcacccgccctcatgacatcatagatgacatcaacaatggtgcagcagaatgttccactagttaaaatgcacaaaaaagatgttcaataaaagataatttgacagcccaaaaaaatttattgcaacatgtatatacaggcaggtgattatgtaagttttatgtgactttttttttttttttttttttttagagacttaaagactttagagactttagagtcctactatgttgcccaggctggtcttgaactcctggcctcaagcaatcctcacaccttggcctcccaaagtaccggaattataagcatgagccactatacccagccagtttttttgttatttaaattgttgtgaatatgtatttgcatgcaagggatagaaggagtagaggctgattagcctgtgacattatcctgagtgtcctcccagcaaccttaaccttgacaaaacagatacataatcttctgagtctttgcatctctgggactagtcttgtattcagactagtgtattcagagttgcaatgcaccttggtggttacatgatctcaggtttgtgtcgtacttgaatccccacggcagcattcttataggagtctccagcctctctttgcagttttcaagacaggaagttgacttcttccttgcagctccttccacagtgaacaacttggctgtcagagaggttctgattacaaaacccagtccagccacaaaaaggtatttcgtttctctctcttgccctcacccttacttatataattcatctctagggtgcca

SEQ ID NO: 1087 - DNA, 2300 bp, Homo sapien
gatctaacctaatggactccatcttggttctaactttaaactgtccttgttccttcctgggcataggctaaactaactttgggaggaatttagtttatagtttaaaacaaagacaataacagccctttcccaaaacaaacctcctccttgcctggggactagactgcctttataagattaacaaattagccacaagattagaaattatggtttaggagtcatgcagctggaggccaagattctgaccctccctaaactgctcctgagaccagtgcttgagatattttgcagaccctgcacttgatggatcagctggtaccacccagatagataaacaggctcatctgatcttgtggcccccaccagggaactaactcagcgcatgaggacagacagcttcaacttcccattatttcatctcctacctaaccaatcagcgcttctggctcactggcttccccccacccaccagttgtccttaaaaactctgattcccaaatgctcgaggagactgatttaaataataataaaatttcagtctcccgcacagctggctctgcgtgaattactctttctctattgcaattccccgtcttgataaatggactgtgtttaggtagcgggcaaggtgaacccacggggcatttacaatgacatcacttgcctttggatgcccactgaaccaggactcatttctgggttccaatctaatcccagtcactgagttgctgtgtaacttggggcaaattacctttatcctcttgccttcagcttttcctttggtaggaagggagcattagaggagagatcatttcagtaaggtcctttctaatcctaacagtctaaacagattattatgaatattagaaggtaataataaatgttggagaaattaacttcagttactcgtataatatttcaaattaccaaagggtttatattagatttgaggctaattccaaaggatatttaaggaccatagcagcaaggattaggaggcccttttggtctggacctcaccttcacaagggcctcaaatttagatttttgagaatatctcctttaaaagtaattgtcaaatatgattataataagttcatcattcaaccttatatatatattttagaatcctcttatgcctttaggaatagcacagttagttcgtcctatacttttttaggtgttgaaagtattgtcaaaaaacatttaaaatatgccattatttttgacatgcagtttggggttattttaatttttttttttttttttttttttttttttgagacgcagtctctctctgtcgctcaggctgaagtgcagtggtacaatctcagctcactgcaacctctgcctcctggcttcaagcgattctcctgcctcagactcccaagtagctgggattacaggcgcccgcctccatgcccggctaatttctgtatttttaatagagacggggtttcaccatgttggtcaggatggtcttgaattcctgaactcaagcagtccacccgcctcggcctcccaaagtgctggaattataggtgtgacccaccacacccagcctggggtcattttaattttaacgtactaatgaaagaagtctgaactccctccctacctctgaggataatttccttttactaggaatttactctgcaactggcactttgctaacattgcctgtcatattttttttttttgagtccagcttctgcagaagcctgcctaatgtttacaaacctacgatgcagccactacaattatccccatttcaaggtcgaagaaatggagatttatagaagttgtcaaatcgcttactagcacacagctaataagtagtaaagccatctctcaaatccaggaaatctaactgccctgcctgagctctgagtcaagggtcctactttggctgccagccagcgacgacttcaagggtaagatcctatgcgggccgtaaggactcttcccctccccctctcccacttcttctatcccaaagtcgctcttcccaattcagggagctgggaccaccctgagccagcggccctgcgcatgctcaaccgcagagcacgacgggagaggggcggggtcggcggggccgtttcgcttcgaagattgtttcagaagcgttgggcggggcgtccctgagagaaattagtaagcctcctcatgcggctctggtttcggtctttactcctgcgccttactcgaaaggggcagggtttctgctgtcggtcggagggaggatgacgcgccgggtcggggttttagagacggagctttgagtgcggattccgcca

SEQ ID NO: 1088 - DNA, 2300 bp, Homo sapien
agaaacagtctgtgtaggacagagccctgaggatcaagatgtctgtttcagtcttgatactgttactaatcctgtgtgtgatctcaagcaaatcatatcttctctaagcctcagaggcttcatcttgaaaatgtggagttagactaaactaataagtttaaactgtgatctgagaaactcaacatttctgtaatgatgggagggggcatgaaaggagagagagtgcaagggtgaagctgggtgaatagactagtgggttccccacttacactcccaacttagcagctccacattttaaaccaccagattttattagaagggagtattccactgccaataaaacaggtggaaaccactacaagttttatgtagccacattccctggaattatcttttcttggctcctcttttctttcttgtcctggacatggaactaaagggaacatgtttttaaaattctggctgaaatgaacatatttctttgtccttctttcttctctcctaccgaggagtgaaattaaagacagtgctaaaggcataagcaaggccagtatggaaacttccagcaatttcaccaaaagttttcagcaaaatattacagattagaaaacatctgtttcagaatagctaccaagtgctaaataaaacagaaaacagaagttacatctcattatcctgtgacttcaggagttatcattcccacttgaatatgtcttgtcatgggaaatgaccttcaggaggcatcttctttgtatttcttactatatgtctccccactgtccctgaactatcattataaacttaattttttctgcacccaaagcttgtgggaactagaatgaacagaagaggaatgaatgaagccctcattcttttcagcgattttcagcttaggacccagttttggaacaagatagacccaaatctacttcctggtttcctgcttagaaataagatgcttatcctttaaggcagattgtcaagctccttcaatagaggtgaatgaggacacccatcatctgcaaatcattacatcttcacaagagaattatgatattctccaaataccatgaaacttcaatttttaatcttctagggatatcaaattaaaccaaatttatctctcgcctgaagacagcctggaggactgagactgtaatcttgattccaactccacaccagccattagttacattgggacaaattccttcccatgatcaggctgcaattttatcattgggagcactggagtaaatggttccctaagatccttctccattttgatgttctaaggataaattactattgaagaaattatttccagttgttggttcaatcttcaaaatcaccaaaagctttgattttaaggtgaggttataggagttggctcttgatattctatgccttgtgcttcagaacaggcagtcgaaagggaggaaagttggttttccttgagatgactgtcttgttccctcattggtttgggattcttcatgttcagaggtccactgagaacttcagcttaccatgactttccctcttcaatggtaccactgtagtcaggtgtaagatggtgatgtggaacccttcactgacattgcacccaattctccagattgtctttccagtaatttctttcatttctccttcatccctgcgtcatggtccctttaagggagcggccatagttgagtggtgggagcagctgctggcagcaaagagacttgcaggatttggcctacccatggccacttaccgcgcacgctcaggaccgggggcttggtgggaaaggaaggagggacttagggtgcgcctgcgcatcaggggcgcgcgcaaggggctgatttggtgatccctttaagaaaccgcaggcggaggaatttctctgagagaaaataatcctactcacggggccccttggaggccattaaccccccgagtcccggcccccaccccgtccccgggcaggccctcccgcccacgcgcggacccgtgggatctcagaagctgcggcccggcgcgcggcatccgccccctccccactctcggcgcaaggcccggccgggtccggggaagctgccgcgaggcggccgtgcctgcagtgtgggcgggggccggggggccgagaggtaccgccgccaccgcgcggggagccgcagcggttccgagcggggcccaacatggcggagagagaggtggagtccggcccccgaaagagggtaggtgaggtgaggcagaactcgggcggcggggggcggggcgcggcccggggccgggaatgggccatactcaggttcgtg

SEQ ID NO: 1089 - DNA, 2300 bp, Homo sapien
gcttttgctatgttgcccaggctggtcttgaactcctggcctcaaacaatcctctggcctcagcctcccaaagtgctaagattataggtgtgagccactgtgcctggtccaggaaagctttcctttgggttctgtatcagttgggacctgattacagataatccaactcaaatcaacttaacaaaaggaatttattggattccataatccagagaagggttgaagaaccagccacatgaaggatgtaactgggcttcaggaacaaataagagcaaggatgccagtgccactaatatttttagtcttcgcctcactctatttttatcagttccagtttgtttgctgatgtatcaattaaatgtggtttaggcatagagtttataagggtatggttgcttcctgagtatccatgtggactgaattagtatacctttgaaggtattgtagaatccaggaggagacgtggagtattagaactaggtgctaagtggaaaagatggatttgagagagataagtaataaagttgacagaatttgtccagggggaaatcttgagcaactgctggtttggtgaatctgttaaccatctgagggaaatataagaagcatatgcttggaatgggagggaacatgatgagttttgattttagagatgctaagttggagaacgtgtaggagctagttgaatatagacatccgaaatcttataagaaaggtctaagcttaagtgcttaggaagtcagtagcaaaggtaagtgttatggaggtgaacaaaatagctcagtctgagtgtaaaagtaaagagaacaggaatcttgcagaaaagctaacattgaagccatgtgaacagaagaagagtataaaataaattataaggcaattaaggaaagtaagaaataagagtaccaaagaatccaaaggaattttatccatgagggatatgccatttaggaattgaaaaaagtcaatttgctttgaccattaggagatcattgatgatgttaatgagaaaagttccagtggaaagttgggagctgattgtattaagctcaaagggttaatgatagagatgaagtagaagcaaactaggtagaatttttttcctacaagtttgtgaagggaagatgaatgagggcattgtagggttagggcatgaatgagggcattgctttgttttgttttggaatgggagagattagtatatattagtagttttaaacagtaaatagtcttttattctaggttggataaaatttatttttatgtgtaagtattaactgccgtcagtgtttattagtgttagtgcagagaaaatgggactcagaccaaagacctgagtgctaatctcagttttccctgaataatcgccataataattataattaccattttatattcccttctatttgtcagtcattgtgttagtaggtcttttgtacatactatcactaatcctcaccacaaatttatctccaaggtgagtattatgctgttgtatagatagactctgagagtttactttttaggattacatagattttcaggatcatgctttgatttcaacacagatatgtctgattctgaagttggtgctcttttctctatatcacgtagctttcttttctaacctaaagtagtttctcaagttttggctccttgtttccttaactgtcagataggaatagttatatctgtcacacctatatcaaagtgttaaatgaatactatggtaatatctgtattttgtttgaaaaaatatttatttggttaaataccagactgaccttatcattgtggtcatctttagcactatcatttgtctaaacagtattttactttttaaggtggtggtatcatggatacagaaatgtctgaagatatagaccacaacttaactcctacccttgacagcatgtcttatggaatgccgaatcaaacaggatctgaaaattcattgctggatgaagatgattattttttgaactctggggatcttgcaggaattccagtcgttggtagtgacaatgaggatgaacaggattttagttcaaaggacaatcttgtttcttcaattcatactgatgatagcttggaagtagagagaagagtcacacagcatgaatcagacaatgaaaatgaaatacaaattcaaaataagttaaaaaaagactttcctaaacaatttgatcaggtttctgtctttaaatcaatacggaaagattttagtctagtaagagaaaacagcaaagagacattttctggaaaggagaaaaatagagacctaacttatgaacgtgaaa

SEQ ID NO: 1090 - DNA, 2300 bp, Homo sapien
cttattacagtcataagatcataccccttttttgttattaaacattccaatggacacaatgtggtagttcagagacattgagaaaataaaaatataggccaagcgcggtagctcacacctgtaatcccagcactttgggaggctgaggcaggcagatcacgaggtcaggagatcgagaccatcctggctaacacagagaaagcccgtctctactaaaacatagaaaaaattagctgggcatggtggcgggcacctgtagtcccagctactcaggaggccgaggcaggagaatggcatgaacccgggaggcggagcttgcagtgagccgagatcacaccactgcactccagcctgggcaacagagcgagactccgtctcaaaataaataaataaataaatgtgcgcacacacacacacacacacacacacacacacacacacacacacactggaagccatttaaggttaagaagaaaagtattaaagaaattcaaattacataacaggaaatataacttaaaatatttgttggatttaaatatctattgcctatagttataaaatactgctgtaatacaatatccctaaatgtgcactttttgttatatcaggcacttcaactaacaaggatgggagagctggtttcaaaaacaatacataaaagtaacattattgaaagctaaaaaacaagctgagcacctagcacctggaagactgaaaagcaacaactgaaagcagacagaaaataatgtggtatttctcaaaaaaaaaaaaaaaaaaaaaaggaataaatgtagaatatcaaatgtaatacatgacctaagaacaaagtatgttaagagaaaggaaagaaacaaaaaagataatttagaattctgctatactttgagcaacttgaacaagttttcttggtgagaggaggcggtgggcgggcaggtggaactgtatatccagtgaggcacagtgtggagcagaatagctgagtagaccctttcctctgataagcagtttgccccttctggaggatttttttacaaccagaacaggaaactcgaacagctgtggctggaactgaaggaagcattttattcatgccagatgacgccagtgagggctgaaagccagtagtcaactgtggagctttaaaaaaaaaaaaaaaaaaaaaaaaaaaaattgaaagaaaaaaatgttttactttttaccatgaattttaagtagacattctttctttctcttctagaactagtcttgaaacccaacagtaattatgcaatatacaatttaaaggcatcctaagtgggtagagagagctgcctggtttattaatacaagcagaatttcttctcattcatattggtcagaacatacacaatccatttattcaggtctgtttcttaccaagagggctgccactgactgaaaacacagcactaattttcagttccccctcttgagttttttgctgttggccatgactatactcctttaaagaagaaaaaaataaataaatacatagagaaaagaataaatacctaaagacatccagacattcaagacattttactaccactatatagaggtggaaaatgtttaaaacattagtaagaaataataaagtacaaaacagcaagcaaactataattaaatataggtaaaatatgtatatgctaggagtgtaagacagaaaaaaatgaaagtatctacttagtctgtgacactaagtatttattatttttgaaaaatctttaattttatttttattaaagtattataagttactgtttattataaaagtaatacacaatcactatagaaaatttagataaataaaaataagaaaaaatttaatcatattttaatcaccccaaaacaatcactgttattctttgggtatatttctttccagtcttttcccctcctcaatgcagaggttttatttcttaataagttgtaattatattaaatataccattcttataaactgattttttgctcatttgaatcatttgaacgtttgtatattagtatatattactccaaaattacttctaatggctaaatataccagtgtttctaaaactgaagtccaagaatccctgaggtctacatagtctgaaaattctaaaagaatgctgtttaaattttgtttttatttcaatgatttctatgtgcatatacacgtattttaagtcatgagtaaccaccatataactgagttctactacaacctttcagtgctgtttgctttttacaattatacaattgcattctaaaatcattacataatagatttaactttt

SEQ ID NO: 1091 - DNA, 2300 bp, Homo sapien
gaatatttttttattacactcaagttagtgagtttgtcttactatacattttggggtcaaagttctctcctttagcacttcctttcttttttcatctgatactgttaaaaagcctgatgtccatctgatttgatctgttatttctctgagagctttcagaatttctgcttttcttattggtcttaaatgtctttcactacaatgtttctgtttgtacagttttcttactaattattctatgagtcctttgatctttctttaattctgggaaatgtattctcattatttttccaaatattttctccatttttttttctctttccttctgcgactcccattattcagatttggcacttctgctctgtccctggactgctctgtatgtgtgtgggggggtgttcccacgtttttattttcctgctttgttttggcagaggccctcagtatgatgccccacctcatggatttgttgtgagatatatctgtcctatcccatttgttaattttttcacccttaatatttctatctggagccgggtgcggtggctcacacctgtaatcccagcactgtgggaggccgaagtgggtggatcacctgaggtcaggagtttgagaccagaatggccaacatggtgaagccccgtctctactaaaaatacaaaaattagccaggtgtggtggtgggcacctgtaatcccaggtactcaggaggctgaggcaggagtatctcttgaacctgggaggcagaggttgcggtgagctgagatcacaccattgcactccagcctgggtgacagagtgagactccgtctcttaaaaaaaaaaaaaaaaaatctgcttggtccttgttcctgtttcagattgccaacatttcccggtttgttttgaattctagttcagtttgctgtctttgtgggcaggggcttgggctcctcaggtggcatctggttattttggcctgtgagctcatgttccttcacagcaccagcttctctgtagtatttgttggtgaaaggccaaagccaggctctaccctgtccctcccagtgagttgaagaagggaagttcatgacctccaggtccctcacagttgctgttgaccactccaccaggagtgttccaagattcaccttcagacctgtaggaagcagcactgcgaggaggcacaatttccagtcatcctctgccagctcttgaggctttggagggaacaagggcttggaatttcaaacctaagagcagctgcccagcccacccctctttctcctcagcagagctttgggctgccctgatagtgtcccactgacatcagtgacttgactggcagtcccatgtccagcaagagcagacatctccctgatgccctacctcccctcccactttatcacctgcatctttggggattttttttttttttttttttttgagacggagtttcgctctgttgcccaggctggagtgcagtggcgcgatctcgactcactgcaagctccgcctcccgggttcacgccattctcctgcctcagcctcccatgtagctgggactacaggcgcgcgccaccatgcccggctaatttttgtatttttagtagagacggggtttcaccgtgttagccaggatggtctcgatctcctgacctcgtgatccgcccgtctcggcctcccaaagtgctgggattacaggcgtgagccaccgcgcccggccatctttggggattcttacaggatttgtggggagttttcagtttggtttgatttgtggtagtggtgcctcagttgatgatgttgtttttctagggttgatttttggggaagggaacctgtagcatacgctagttcactgtcttaataggatccaaagccccagtgtatcttgtctttttattttcagtctatgtgatgctttagttgtctgtcctgtaaatagagatttacaattaaacccagtctgttaagttctgtttggtggtagtggttttgtcgttaacatccaatctgaaaactaatgcctattaagtggtcacatttttcatgctgattttttttccctcccttcctgctgatgggttggttgaaatcttttaatttttttctttccttgtctggtttagatgttctacattctagttctgaattttcagtggctttctcaatgtttttaagatgaatgcctgactttctcaaatgagtatttctaccatcgtcctatggaaagactaggttacagtcatcaccccatccccatcttatatgttacagttcagtattttcattccatctctttattctctccccaagta

SEQ ID NO: 1092 - DNA, 2300 bp, Homo sapien
gtttgtgagcatttgtatagactgagaggaaaaggagatggtggagataggggatgggtaataaatggaggcagatctgggggaccagccaagttggaaacatgaggtgagagcagtggttcccaactccagccacacaatagaatcttgcggaggttgtctgaacataacactgcccaagccttagccccagagattatagttcagttggtctggagtggggtctgggtacctagaatggaaaagctccccaggtgaatttaatctacagtcagggctcactaggtcagagatagcacgattagggataagtatactcagcagcctgggagtaggaacagggcaaatggctgcttgattgatccaagctggcgggaattggctggcaagcagtggaaagatgttagcaagagtgctggtaagagcactgttgacaggttgctcagattcaccagcactgcatagggggcatgagcaagagagaagcttctgggtttccctgagcttctggcttgtactggattgacttagttaaggaattcaggaagaacatgtgattggaagaaaatagtattttacagtaggaaagaacatggcccttatattagacccagcttctgagccctgccctactagtgttagctctgtgggaaagttacttcacctctctgaacctgttttactatctgtgaaaatactagtacctatttataggattgttatgaggattaaataagttaatgtttgtatagtccctcacacatagtgtgcaattaatggttatgagttgattttgagacttgttggatttgaggtatctgttgaagctctggggtagatattcacacaagtatttgcagatatagactggtcactcaggagagatgtggggaaaggagataaagatctgagggttattgatatatagaccgaaattgaaactgtaagcatgaattaggtaactgggagaagataatgggcaacggaccacacatcctttatggcaaaagtttttttttgtttgtttgtttctggaattgataatgccccattgttaatcccactgtgcagcaagcttttagaaagtctgtggcagtacttctcagattttatgtcatgcatgcctggaaaatgataccatttatagggcaccttgggataaacagagaaggctgcttgtattggaagcaactggtccagggcctctaggatgcccaggtcccacccagccacactgcatgatgaggggatcaatatcttggtcacacctgtaaaccagtgtgactcactgatttagaaggttctaattgtaaaactcacatggagctcaaggggcaggctactaaaaattaaggctaaggcatagaacagacttggtactacccagatgtgagttcacatgtggcctatcttggacaggaattgacaatcagcaaacagattctgggcatggagtaatataagttcatagcagccatactacagtgtaagatctttttgttgtcatcataattgttttggctatgttgtgatgctgtccaacaatttacattaacaaagcattgtggtttgtctttcaagtaaactagtcacaaacccagcagtcttagctggaaaaaggtggacagcaggaatgtagccataccaaatccccatttgtctcatcctccagttagatggagagtatgggtcttcttgctggaggaatgggttcttttgttagctggggcagcttagggcattttaaaaagaacagactttgtagtcagacataacagggttgggatctggctctgccataatcaactgtgtgaccttgggcaagttacttaacccctcttacaaagccccagtgttgttctctgtaaaatggagatgaccctgataacacctttctcactggcttgtagtaacagaatgcatgtaacacttagcacagtgtctgtcacaaacagaaggtacttagtaaatgttagctgttgctgcaggtatggaccgcttcagctcattagtactgttgcatgtctctgcagcaccaaaatggtattttttgttcaaaacgagcctccccaccagatcttcaaaggccatgaggtggcagcgatgctcaagagtgagctgcggaagcaaaaggcagactttttgatattcagagccttggaagtcaacactgtcagtgagtaattctgggaatttgggagcaagagcctacctagtgcctgcagctcacccattggtcctttctgtccttggccttcatcttcttttctctgggaagatggagataatcattctcttgc

SEQ ID NO: 1093 - DNA, 2300 bp, Homo sapien
ttcttgaaggagactgtgcttcaggaggagctaccaggatcagaggctgtaactttaaaaggcaaaacaaagtaaatcctggatgtctgcagatttctctggctttcctgtagttaaaagctctggggcattttgatccttgagcagagggctctctggctgtgtgcagcctgaatgttggcacagagctcccttggctgctgcaggcaagtctctgaggccacaagggggaagaagggttgtagggtgtcctaggtgcttgatggcccctgtccaggagctggagggaactttgcttatagagttgctacaaacaagatgattttgtcctgagagttcctctgcagtcttgccccatttccttttctttcatcaggaaggatttgggcacgtgattaagaaatgcattttgcttccttgctggcaagagccaaaccaactactgggccagaaatgctttttagaaacatcactcttaaatcattcttttgatcagagacttgctcagagaactttcttccttttacaaactagaatggtaaagcgttcaagtgttctagaagctcatataaaggataaggctagaggtgtttgaaagctatttgaattttctgaccagcaggcagcctgtattttgaggccaaatgacactttgtccaattgaaatatttttaaacatgtcttgtcaaggtctgggtaacagtagttcgtgtctttgctgagggagtcattgtctcctcctgctaagttagggacaggacagcagcagacaggtacaactctaccctctagtttctttttttgcaggggacctgatggggtgcagctcgagaatgctaacagcagtgttgctactgtgactgggctgcaagtggggacctatgtgttcaccttgactgtcaaagatgagaggaacctgcaaagccagagctctgtgaatgtcattgtcaaagaaggtacctctctgcctccagtttgtgtagcagcctcttagggtcagatagctgaagaatttatcctgtcatgtttgcctgcagaaattgattagagatagcaagaggtgggtaagagggttggggtgagggcaattgttattttcttttctaaaacagcctttaattggactgtaaggtgaattttaacttccctccctcctcctgcttacatcttcccttccctctcatccccttactttcttttcagtcctccctccttccctccttactttatttctcagttgaatagggaaagaattaagggttctattctttgcatttttattttgcccctctgcattgctgagacctgggccgtgactcctgttagctacagtgacacctgctgtcaggcttgagaatgacggccgcactacagctgactatgcttgccctgagcctttgagctgaggccagccagaggccttgctctagtttacaggcacagtgaccagtgagagctgtgggagagggccttaagttgagggccttaagttgatagcaggaaaaaccatcagatatgcagacctccagacataagataccaagctgagtaaatactgcacagacatctgaatatacagagcttcacgtggggctccgaataagagaggtagctctttgttttctcttgtgaagttccaaggaaggggtccaaaaagatattcagagaataacattttaagatattttgaaggagaatttgcaagatcagctaggtgaaacctaaactccaaggttttaagccagtttgggccgttatttctgatcatcacatacctccaaagcagagaaatggattccatttgggaaggctgctgggagaatatgagaggaaagcacactcgtcccctctgttgtacagtgttaggagaacatttctctgggtaggactggaacctcaggactgcagcgctggtagctttcatctacactgttggttggtggcagggacaggcacttaaaaaggttctccagttaaggtactcttgatgttttaatttccccataagcatcatgaagaaacatttcttcttttccagaatgtcacattatgtcaatgatttctttttgattagaaataaacaaaccacctatagccaagataactgggaatgtggtgattaccctacccacgagcacagcagagctggatggctctaagtcctcagatgacaagggaatagtcagctacctctggactcgagatgaggggagcccagcagcaggggtaagtgtgctaggagctggagagctacacaggagtggggaggaggaggagccacgcgttccagtatatgcttt

SEQ ID NO: 1094 - DNA, 2300 bp, Homo sapien
cgggttcaagaaattctcttgcctcagcctcccaagtagctggattataggcctgcaccaccatgcctggctaatttttgtatttttagtagagatggggtttcaccatgttggccaggctggtctcaaacttccaacctcaggtgatccgcacgccttggcctcccaaagtgctgggattacaggtgtgtgccaacgcacctggcctctctgtctttctcctcatatatgtgaggagtaaaatgaggatgatactttatagaattgttgtgaggatttaatgagatataaagaacttggagcagtgcctagcacatcataaaacttcagtcagtgttagcttctagtagtactttctgcttctccaatagaagtgggtaagaataggtaaccttgccacattggtatttcttagccttaattttcagtcttctagtgtttattcctctttccttaaacccgtccctgatcacactcctctctctgccctgatagcttgactgtagtagactctgatggagctaccaactctactactgcaaacctgacagtgaacaaagctgtggattacccccctgtggccaacgcaggccccaaccaagtgatcaccctgccccaaaactccatcaccctctttgggaaccagagcactgatgatcatggcatcaccagctatgagtggtcactcagcccaagcagcaaagggaaagtggtggagatgcaggtaggagggaatggttcctattttttcttgcccaagagaagtagagctgctggactgcatttttagaaacctccaaacaaactgagaaagctttaggggcctttgattaacgtggtagcaaaaatctttatcttggccgggtatggtggctcacgcctgtaatcccagcactttgggaagctgaggcgggcggatcatgaggtcaggagttcgagaccagcctggccaacattgtgaaaccccgtctctactaaagataaaaaaattagccgggcgtagtggcgtgcgcctgtaatcccagctacttgggaggctgaggcaggagaatcccttgaacctaggaggcggaggttgcagtgagccgagatcacgccattgcactccagcctgggtgacagagcaagactccatctcaaaaaaaaaaaaaaaaaaaaaaaaattatcttaaatgtttagtattagaggaaaaggctgagaaatgttagttgttctggatgactccagagagtcaaactatttagaagctacaagggtgcaaatcttagtgagctctataacaagttagagtagattggctagatggtgagtatcttctctctagagatgcttaagaagagagactagatctgtcaccaggcaggtaacataaagaaagaaaactggatggtggctgtgctgaacttaagccctgactaaaggagtcatctactcttcaggtccagctggttgttgccacatggaaggatggtcctaacattgcttgataacccagcttttcaagagaagaaagaaattgagacctttatgtgaaaatttccaatatgagagacaccacaggccaaaaaaaatatttgcaagctggattcagcccatgggctactagtttttgcctactgctctacaggaagttcctgcattggaagtttgcccaaaattatttataatgtccctcaagattctatatttctcagttttaaggcctcccttaaagcctccattttacctgacttttgtttaaatgttatgttaggttgttgcagaacctgtacagacctgaaggagacagtatggtgttatacagcatcttgagctgctgccatgtttcactgagacagctttgttaggagcactgtgtagcttcagtaggaagaggatctttttaaacagtgtttttaaaactgggtcatttattgtttgttcacggtattctttctggtttgagtcatagagactggccttggtaatctctgcacatttcccaatactgccctctcttatgagagttctggctttatttgaaactgctgctgtgtcagagagggttgtttccttgaagggggaaacccttagcaaggtgcctcatgatatctgactccatattcactcacatgctgaactggtacgtaatagcccagtaccatcttaggtctttggtttagaaaactaaatcgtttttaccagagtcggaattattgtgtgatgtgattcctggagtccacttttccacttctgtatttgtatttgtagggtgttagaacaccaaccttacagctctctgcgatgcaagaaggagact

SEQ ID NO: 1095 - DNA, 2300 bp, Homo sapien
gggcagatcacctgaggtcaggagttcaagaccagcctggccagcatggtgaaaccccatctctactaaaagtaagccaggcgtgatggtgggcgcctgtaatcccagccactggggaggttgaggcttgagaattgcttgaacccaggaggcggaggttgcagtgagccaagattatgccactgcactccagcctgggtggcagagagagactccatctcattaaaaaaaaaaaaaaaaagggaaatagattattttctcctgtcctctctccaggttcttccacctttattagatatgtgagatggatggtttcaaacttccaaaggttgggggtgatgaggcaggaccaattctgcatgctctttatccttctcctgccctatggcagcccattaggatccctccaggtccattttcaaaaccactgtccggctgggcgtggtggctcatgcctgtaatcctagcactttgggaggctgaggcaggcagatcctgacttgaggtcagaagtttgagaccagcttggccaacatggtgaaactctgtttatactaaaaatacaaaaattagccagacgtggtggtacgtgcctgtaatcctagccacttgggaggctgaggcaggaggatcacttgaacctgggaggcagaggttgcagtgagctgagattgcaccactgcactccagcctgggcaacagcaagacttcatctcaatcagtcagtcagtcaatagaacaaacgaacgactgtcctcagtcactgcaaccagcactctttctaacagagttacactcagttgttcctacctttgaacatatttctgcctgcgaggcataattcatcccctgagcttttctgtcctaggaatattgtcctgttttgaaatttatgttgctagccttagctattataaaattatctgttcccaaactgttttctacatggaaaagaatttccagctacagttggaagaaatgtctctgagtacaagtcctgcttgtgctgcttctttccgtctcctctcgtaacataactactacatactatatacgtttgtgagagctgttggcgctgacaactggccaaaaaaattcttgttttggaggaggaaggaaggaaggaagaagaccttgtctcccaggattataaaataaaattggtcttcagatgaaggatatcttggaattaggttctgtgtactgattttaacatttgaactcatgaaataagaaaaagatgaccactctctgctaagtgtttcaggtttttttttccccctttttcttttttacttttggttagtaacttaaactaaaccttcctaccaaagtcctcccttccctaatcagaaatgcattttgatccaaaaaaatttaagactactttttctggggagggatgccatttagataggatcctaccattgccttacctagtgatatagtctgacctgcaagtgggtaccatttaatgcttcatttgattttaattaatttcactgggcctgttttaaatgggccatctcctaccatcttctgcagtgtgttatttagctcagcaggaatgaagtagctcttttaactcaccagggtgtgatgacctcagtgagacgagcattgttagcactctgtaaaaagctatttttgaaccatgttatttagaagtcattgctgttctttgttgcaaaagaagttttgcaagaaaatggcctttgttcccaatgagttcatctataatggttggtcggacatgtattttcagtggtatgccacaccatgagcaacctggtattttttagggaggattggccctgagagggtcggtatagggcaggaataagcattgttgggagagagttggaagaagccctaactgtagctgagtcagcagcattcgctctttctttcagcagatggtttggtttccctacaggctttggggtgaaatcttaaaaactaaagccttgtcaagatcagaagagatttgttattggcaggctatgtggctgtcctctttgtgtgttggtgtgtgttttcatgatttttgtaactgcccttctataggagaaacctacacctacgactggcagctgattactcatcctagagactacagtggagaaatggaagggaaacattcccagatcctcaaactatcgaaggtgaatttgcctcctttcacttgcagggcaaaggtagaggagttgactgttttctaaaatgaatatcatataattttctgtctacacttaagttgtaaacagtcttttagaaatgaatcctccaaaaatctgact

SEQ ID NO: 1096 - DNA, 2300 bp, Homo sapien
aatctgtgcttcacaggtgctgttctaaggtattaggaagaattggttaatcaagaaactaagttggtctttatcccctgaaaaagtcaagagggtaaaagcaaagtcagtgataatgaatttttgccaatttttaatttttcagggtgtcctttggtagtaatagaacatgaaattttaggggttcaatcatgaggcaccaaagtaatttttgtatccagtcaagatgcctgtaatttttggtgtaattgtgaagggtttgggttgaactgttttgaatagccattttttggttcattatactttctctgagtatcatgtttctttcttttctttttttgaaagtcacttcagagagttcttattccatctcctggggcatccaaatgctgaagcttccattaaggatggtttcatttctcctcaagtgcaatgttcccatgcagaggcggataaatctcaagtttcatatttgtctaggaagcccttctcgcctcccaggcttgaaatatgagtggactagcctattgtttgctttaagctctcctagttttgaagtctcatagcaaatgaacatttattgtcagagaaataagatttatataatcggtggctttcagtggtctgcaaacatttttagttgggggaggggagtgatgctactgacgtctggtgagtatgggtcagtgatactgttaaacaccttacagtgctcaggacatttccctccatgacaaagaattacctggtccaaaatatcaggagtgctgagcttgagaaactctgacatatgtgaaatagctggtgaatagtataaagacagtatatagctctttgctgacttgagtgttccaaaaatgctagcatacttcaagattagatcagtttgaactgaaatggtctgggaagatttcttggagaggagacagactttaagctagaaacaaaatgctgtatttagaataaagcaaggcaaacaccgcagttgaaagaaataactttagcaaagtccctgagagtagaccgtggctttgtggaacacaagagggaaaatcaatgtaactagaggcaaaattagataggaaggataagacagtgagatcagatgatggttctctaatggcaggttggaagtttgtccttaaatatgatatgggagcaggagtcttaaatagaagagtaacatagtgggtgagtattttggaaagactaatggtgttggttgttttaggaagacagaatagattggagtagagagagctagcagagggaagataaaataagattcttgggataagcaagctgggcgtggtggtgcatgcctgtagtcccagctacttgggaggttgaggtgggaagatcgcttgagcccaggaatttgaggctgcagtgagctatgattacacaactgcactctatcctgagcaacagagtgaggccctgactcaaaaagaaaaaaaaaattcttggaataatctagtgtgaacaatgaatcttgtagcaattggaatggaaagaaagtaaggcagatttgtaaccatttgccttcccttctagaaactttatatatgtatcttattagaaagttatttgttagcataaaggtgatacttgaaacaggatttgaactctgtggaatgtagtatatagggagggcttagggacagactgtagtaaaaatacagtggaggaaaagagagaaaggaggaaaaatagaataatatggtgtcatgatatccaagagttttaagatggaggcagttagcaatagtagaagccactgagatgtgagatgaagaatgagggtattagggtacagctgttagatttactaagaagtagttttgaaagatccttttcaatggaaaagtggggacagaatcaaatttcaagcaattagagagtagaaaaaagttagtaattgatggcagtagctgaatattgatcatgaaaggagtttgatcacaaaagaaagagagaaataagacagtctggatctatttcttatctctggtatatttactttgtttccagttataaaggaactggtggtatctgctggagagagtgtccagataaccctgcctaagaatgaagttcaattaaatgcatatgttctccaagaaccacctaaaggtaaacatccccttacatttggataaccgttttttgtttttgaaagagatggagtcttgctgtgttgtccaggctggtctcaaactcctgggctcaggagatcctcccaccttagtcttcctagtagctggaactactggcatacactaccactcctggccctt

SEQ ID NO: 1097 - DNA, 2300 bp, Homo sapien
ctggctcggccagggcagccagctgcttctgtccttgcaggtgcgcagcttgggtcccaggctgaaccccgcttctctcgggcctgggcctagtcatgcagctccctccatcccctgagagccaggcagacagccggggttcggggcgctgccgtccttcttccaccttcgacctctgcagcctagtctttagttgctgtctctgatgtttggtctctccaccgagatagaaagttggtgcagaatgaagaggggatggggttgagcacgatgtgtccattataatgtgaaacctgcctcatccacgattttgaaaattatgccccacagagggtcctgtagtggctgcagtgagcacaaaggtgaaatgaaggaagtcaaaattgataacctctggcgggattccaggaactctttggcttctggtctcatagtggttgtgtccaactgacagtagttgcagttagtgaagagcattagctgactctccttgtgctctctcctgtgattaacagactgaaaactaggaacaaattggaaagacgacctcccagaacaatctgttcatttttccagctatttggaaaacagtgtctgcaaatataagcaaagctattcatggcagtctgttctgtaactttcccaaatatctgagactttttaaaaaagagctttattctcgattactcataccaactgaatagattgtttcagacgtgctccatcgttgttcaaacatatcttatcgctgtgtacataaatggagttccacgtatgtagttgacagactgaactgtgatacatcccccatcaacctgaagtattaagtaaacattaccccctgctctgtctgaacagctgctgcaacagagagtgcttttattttgggtgtacttgtaacgccctaaatgccagaactattgtgagcttctctagattttcatttgtcaagtattgtgggggtgtgtgttctctccctgggttgttaccctttgattcagtaacaaactattcggatcttggtgatgtgttgttgttcttgcgtttggtcagcaagcctttaactggaccctagcagtgatttgtgcccttaggcaattataggtttcagaggaatgactggttaggagttcaaatgaaattaactctgcctttctcttagacgcaagatttattagacatggcacttctaatcagcttgttagtccagtggtgtttattactccatttttcaaaagctattcatttcttttctgcttctcccacccacctgtcaggctattgatgacagctgttgagtcaccttgagttttaaatccttttgtggtaggcagaaatgtgttgggtaagattcatacacacccatacatgcacacatgcatactcactcgttccctcttgggaggctagagaaattgctggatgtactttctaacttaggctccatttcataatctcttgaacatgtctctggcccacacacctcctttctgccccctgctccctgaaatacaactacaaaacaactagaaataggaatggatggaagtgaatgagaacgatgaagtccttcagatgcatgtggttctgcaaaagccttttcttgggtgggctgcaccttagttttgcagctgtgtgtatgtctgtggctgtttcttggtattagtcagtattggtatccagcccaggcaatgctgatctccctgtatgctggccgtggataggagttaggggttggcagcctgtgtcgtttgctggatgtagatgacaggtacatagttggacagaagtttttgaattgcttcttcagaactcagtcaaccctcataatgttgccaatatttacgtactaatttagacaatatagcaaagttttatatgaggggagaaatttatggtaaatgagtttttctgctggaagagacctaaataatccagcccctagattctggagtagccagcatagtgcctgacgtaagtatctgttgaatgcagggattggggtgggtagcattgaggtgtaaattgaatagattttcatgataatagtggtgggcggagacagtagcagactggagagtgcatgccctgcctaaagacatttgcattcagaaatttaaaaaatactgggccagacataaccctcaggttactttacctctgagggtgcaacctcttctcctcaaaagtaagaaagtgtgtttggtcaaagtcacaaagctgttagtagcagaactgcaactaaaactcagagatcttcttgtctgcgggctggtactctttccattctaccacatagg

SEQ ID NO: 1098 - DNA, 2300 bp, Homo sapien
gggaacgagtgagtatgcatgtgtgcatgtatgggtgtgtatgaatcttacccaacacatttctgcctaccacaaaaggatttaaaactcaaggtgactcaacagctgtcatcaatagcctgacaggtgggtgggagaagcagaaaagaaatgaatagcttttgaaaaatggagtaataaacaccactggactaacaagctgattagaagtgccatgtctaataaatcttgcgtctaagagaaaggcagagttaatttcatttgaactcctaaccagtcattcctctgaaacctataattgcctaagggcacaaatcactgctagggtccagttaaaggcttgctgaccaaacgcaagaacaacaacacatcaccaagatccgaatagtttgttactgaatcaaagggtaacaacccagggagagaacacacacccccacaatacttgacaaatgaaaatctagagaagctcacaatagttctggcatttagggcgttacaagtacacccaaaataaaagcactctctgttgcagcagctgttcagacagagcagggggtaatgtttacttaatacttcaggttgatgggggatgtatcacagttcagtctgtcaactacatacgtggaactccatttatgtacacagcgataagatatgtttgaacaacgatggagcacgtctgaaacaatctattcagttggtatgagtaatcgagaataaagctcttttttaaaaagtctcagatatttgggaaagttacagaacagactgccatgaatagctttgcttatatttgcagacactgttttccaaatagctggaaaaatgaacagattgttctgggaggtcgtctttccaatttgttcctagttttcagtctgttaatcacaggagagagcacaaggagagtcagctaatgctcttcactaactgcaactactgtcagttggacacaaccactatgagaccagaagccaaagagttcctggaatcccgccagaggttatcaattttgacttccttcatttcacctttgtgctcactgcagccactacaggaccctctgtggggcataattttcaaaatcgtggatgaggcaggtttcacattataatggacacatcgtgctcaaccccatcccctcttcattctgcaccaactttctatctcggtggagagaccaaacatcagagacagcaactaaagactaggctgcagaggtcgaaggtggaagaaggacggcagcgccccgaaccccggctgtctgcctggctctcaggggatggagggagctgcatgactaggcccaggcccgagagaagcggggttcagcctgggacccaagctgcgcacctgcaaggacagaagcagctggctgccctggccgagccaggggcgccacctccggacccaacatccggccagcgcagccgctgacatcgcccgtcccgcttgcccctcccctgagcccatggtcctcggcctggcagccagccgcccccggccacctaccggggctcagggccacatagcggggccccggctctcggcggcctccgcctcctcctggtccatgggctcggggacccccaaccttcgctcccctcacccggaggaggaggaggaagaggaagaaggtagtgcgggctccccacccggacagctacctctcgcctcagcctccctggacagcgacggcggccggaaacaccgcctcctcccacctccccgggaccgacccggaaacacactctccatgctaaccaagccctcccgcccctcccccgggaagggcaatgccggccgcgagaccaagggggaggaggggcagtgctgggcgggtaaaactacgcacaagcgaaggaatctgggcccccagcctctcgccgcccgctctccagaggcagtctgcaccttgcctccttcgctcgagccccagcccccagactcgggcaatacccacaagcaagatggcggcaacggcggcaccccctactgcttagcaccctgacttgccattggccagagcccggagtgaagcagccgcggattcgtcaagagcggtgcgggggtgggggtggagctgcagcagcctggagccaggagtgggcaacgcggcgtgagcagcggcccgaggctcccggagcatcgcgctgggagaagacttcgccgctcggggccgcagcctggtgagctcagcccccttcgggccctcccctgcatcccagccggggcctctccgagccggcgctgatcgatgccgacacaccccggggaccctatcgcgactccatcgc

SEQ ID NO: 1099 - DNA, 2300 bp, Homo sapien
ccatctgctctgggacgccccagaaaacagacccaggcagcccctagtgccacagccttattcagtcccattctcctctttgcccccattctcagggggagcaaaaaagagcacaaaggtaggggtcttgggccttcgttggtgcctccagggttgctagcactacgtacatatccttggggactcactgaccccattccttgggggcccaaccacccagcccttcccacctcccaattttcagccagttccttactagcagcagggctgcaaactgctcgctgtcattcttggcctcacggagggctcccaggtagcgctccagggtggggtttcggccctctgcctggttcagagctggctcgcaatccgaggccatgatgctcgccttgcccaactgtgaacacaagagggactgagcatccctctgcagaggagggacgggggtggggtgggggtgagagtggaggatggagggagggagggattagcacagagggaggggaggagagaatctggaggggtggactcctcaggactgacctccccccagaagcccctttaaggggctggatctgcaaatccttagggataaagaagggaccctggtccaaggtcacctccagaaagcgggaaagaaggaccatgcatgctgctgctcagccggacagctctcctcaccagtctcctgggggtgggcgggagctggccccactgctcagctgtccccctggcaccggaggctgggttttatctccctccacagggacacagagggagtgagtggtgaggacagacagggagaaatggagacatacatgggtgaagttcgattatccggactcaggctgacatgggagaaaaggacaccccaggcttcctttcccctcccttcttcagaggcagagatacgcttcagaagtgagaatacaagacgctcaacagggaaggcttggaggcccctttggggaccccacccctccagccagggctctcagtcgcccccgcaggctccttgcctcctctcctttccctccctcgggtagaggctgcagcagcagcagcagcggcggcggcagcagcagaattaaccccttgcgctccctcttctcgccctccccgtcccgctaccagcctgtggatgccggcaggggctggagaagcaagagggggtcccggatagttcccaggacaacggagaatccaaaagccggataatcgaagcagggctgctgagatggggagatgagaaggggaggagggttcctggcggtcaccacctgtcccgccgcagccaggtcacaacacgacattgatgaagtcacgacagggcggcgatgagatcacacttcacgatggcgcggtgatgtcacggagagatcacgtcaaaatcacgacatgggagacagcccccaaagatgacagggcaaattaaaaaaaaaaaagatatatattgaaaagggctgtgacaaaatggagtctcgacagggcacgatggtgtcgcgatatggcgcgatggagtcgcgatagggtccccggggtgtgtcggcatcgatcagcgccggctcggagaggccccggctgggatgcaggggagggcccgaagggggctgagctcaccaggctgcggccccgagcggcgaagtcttctcccagcgcgatgctccgggagcctcgggccgctgctcacgccgcgttgcccactcctggctccaggctgctgcagctccacccccacccccgcaccgctcttgacgaatccgcggctgcttcactccgggctctggccaatggcaagtcagggtgctaagcagtagggggtgccgccgttgccgccatcttgcttgtgggtattgcccgagtctgggggctggggctcgagcgaaggaggcaaggtgcagactgcctctggagagcgggcggcgagaggctgggggcccagattccttcgcttgtgcgtagttttacccgcccagcactgcccctcctcccccttggtctcgcggccggcattgcccttcccgggggaggggcgggagggcttggttagcatggagagtgtgtttccgggtcggtcccggggaggtgggaggaggcggtgtttccggccgccgtcgctgtccagggaggctgaggcgagaggtagctgtccgggtggggagcccgcactaccttcttcctcttcctcctcctcctccgggtgaggggagcgaaggttgggggtccccgagcccatggaccaggaggaggcggaggccgccgagagccggggccccgctatgtggccctgagccccggta

SEQ ID NO: 1100 - DNA, 2300 bp, Homo sapien
aatgaggcaaaaaggggctatcaaaggtgtaggaagtagattgagaaaacccaaggaagccacagacaggcagcacatcccgccactctggccttcccaagctgctggagagagcaggggcatccccgcagctgggcacaggcatcatctcctttgcggctcctagacttctcccagaggagttcatcaatttctattcacgcactgacacctgtcctggagcttgacttctgatgccctgtggctggggttgagggagggaggaacagggcattgccacagactccctcatatatagatacacacaaacacaatcctgatctctgacccatctcgagcaggaaagttgcaaagcttcccaattccgcttcatcctctggaacctcgctggcggttccagacttcagaaagttcttaatgatgaatccttggcttctagcctccttctttccccaccactccccaggctgagatcatccagccctgagctctgcacctgccatgtgccttctgggatacccacttggaaccatatattccatgagttaatggtgtcactatcacctcctcttctatatcaataattttaccttaatcttctcatttactacttcactaaaaagggacctaaaaaaacaactagtcttctctgccttcccctacttttttattggtgttgtcgaagttgcagaaactgagatcacagaggaaacgggatgtagctaggatcacacagttaggcagagtcaggactaaatccaagcccctgagtctgaggcagtagagaatagtgattctgagcagagaggggccaggggcagatcaccccagctctgccacttagctgcttgaccttgggcaagccatttaacctctccatgcctcacccctcccctgaaaatggggatgatatgggtatctctttcatagagctgctgtgagggttaaagaacccaatattcgtgaagcactttgcacagaggctggcacattctgtaataagtctgctgtgattatttctactttgccctggtctgcacatcttgcttttaaaaaacatctttcttctgctttcttaattcctgttctccttagcattcctctcatttgtccatctttaatccctgtctctgcttgtcaggaggggagggttgggtttggggagaaagagagagtgactacagagactggaacttgcttgacagccagggagtgcctgccatggtaacacaggaacatgtagcctgcgcatgttagtgtaacaatcacacggcatccatgctagtcagttacacacagtcactcaacagtctctgggtatctcatgcccacactcaatcagcccaggaccctgtggcttcagaaatatcttggccccttgtcaggtggagctcatacccaaacccatcccaggcaagtctctctctctgtctggccagcttctgtctccaactccctcagagcctggcttggcttggaagttttcagcccaggaagcctgagagcgaagtgggcaccttcgagggattttgatccagaaccattcaggaaagactgtgatggtagaccccctaaacacacgcactgacactgtgtgcgcatgagcagataggctggagtcttcagctcacaaacttcttccacgttcccgattacccacctcatccaaagtctcttgaggtgcttagagaaaggattgatacctattttaccgaggaagctgaggccagcgaagaatagtgctttgcttaaaggcaaggatgtgatagagccaggcaaatgtagggcccttgcgtcccagcctcgaatatttctgtttcactgcagctgcgagctgcgagcccagaaggcggctctgatcaatgtgggctgaattcacgccccctacccaccctacccgatcccgccaaagccactgcctcccctgtggcagccgctggggaaaagggagagaactgccatagcttgtctctttaatgcgcgcccccggaggcccggcgcgcccccgccactataactggagtgcatggagcaggctacgctcagaggaggaagggcgggcgctgggcacccgttgaccgacttttccaagtgcgatcagtgcccgtccgtcctgcctccatggacccgcccgggaacggccaccgctgaggaccccacgcccactaggatcccggctgggtcgcacccagctaccgcaccgtgacctccgcgggctgtgccggctcccggcgcctctgcccgcagcgctcgccgtcgggctagggctccgccgccgccacgcctcgcgcccggcactc

SEQ ID NO: 1101 - DNA, 2300 bp, Homo sapien
cacctcgcccggctaattttttgtatttagtagagaccgggtttcaccatgttggtcaggctggtctcgaactcctcacctcacgtgatccacctaccttggccttccaaagtgatgggattacaggcatgagccaccacacccggcccaacaatgtctccacttttagacacgtaagttggtcctcttttgtgttgtagtgctgcaacactaaatatctctctctcttttttttttttttttgagagagagtcttgctctgttgcccaggctggagtgtaatggtgtgatcttggctcactgcaacctctgcctcccgggttcaagcgattctcttgccttggcctccccagtagctgggattacaggtgccgcaccaccacgcccagctaattttggtatttttagtagagacggggtttcatcatgttggccaggctggtctcgaactcctgaactcgtgatccgctcgtcttggcctcccaaagtgctaggattactggcgtgagccactgcccctggcaacactgagtatctcggtacacaaatatttggactgtgtgtccaaacatttcttttggacatattcaaaaggttatgcatatttaacagatattaaaattgttctctataaaaaggttgtacaacttagaaccttacccccaatttatactttctcattgtttcttatttcccattttcctaattaccatcaaggttgaggatcttttcatgtttattggccattcgtgttgcttcttttgtgaattgtttttcttagtctttggtctttttttattttttatttttttttttgagatggagtctctctgttgcacaggctggagtggaggggcgctatctcggctcactgcaatctccgcctcctaggttcaagcaattctcctgcttcagcctccggagtagtacaggcgcctgccaccacgcccaactaattttttgtatttttagtagggacggggtttcaccatattggccaggctgttctcgaactcccgacctcttgatccgcccccgtgccctgccgggtcttttaaaaatggtattgtctcacccggctcccctcccattggtttgtaggaatatcttttaagttatagatattaactttttcctttcttctgtctataaggtccaaaatagtaactatttctacaattgaaacattcccaatttacatttactgttgagcatgataatgactttcaccacatagagacgtgtaattttaggtagtcaaatctgtcaagtcttttctcatattgcttctgggttccctgtcaagcttagaaacacatctcttccaaaaattacagaaatatttttctactttttcttccatgtttgtatctctctccctctcttttttttttttttttttttttttttttttttttttttttttttgagacggagtttcgcttttgttgcccaggctggagtgctcaccgcaacctccgcctccagggatcaagcgattctctgtctcagcctccagagtagctgggattacaggcatgcgccaccacgcccagctaattttgtatttttagtagagacggggtttctccatattggtcaggctggtctcgaactcccaagctcaggtgatccgcctgccttggcctcccaaagtgctgggattacaggcgtgagccactgcgcccggccatgcttatatctttaatccaaccatatactatttttgtgaaggatggaagtaaggctcccctcaagttaatttttctccaatctggcttgcaggaaaggggtttctggggagattttaccgagcaacgtagggaaacggctgcctggctacctacccctttttgacacccacacgtgctcggcaccttacatacactgcgtgattttatcctaaagccacttttaaaatcttagtgtgtaaacagagaaactgggcgtcacataaggcaagtgacctgcacagcctgctccggaggagacccgtacgatcccagagacaagcactgaacataaggcacccggcgccgcgcccgctttgcaacctctcgcgacagttgtacgtcatccgagagcgccgtggaagtcgtgctgcaggcgtcgcgccaatcttcgctctgaggtgctgtctcaccggtgagacctggaagcgggcgagtctcgtgctgtgtcggacctgcagcccctggccttccgccaccatggagtacctcatcggtatccaaggccccgactatgttcttgtcgcctccgaccgggtggccgccagcaatattgtccagatgaaggac

SEQ ID NO: 1102 - DNA, 2300 bp, Homo sapien
gaagggggtggtctcagtgtagactggactgatcatggctaccaaggagaaagggagttactgttacctaataagtgttgagaggtgcgtgaatggaacccagagaccctggggtcaccaccttgtgctattgtagtaatcagcattctttcaattgtcggtgaaagaaattccactcaagttaggcttggcaaaataaggcatacaaaactataagtttagatgcaggaaacagggtctgcaacattatcagaactatctctcatctctgtttcttccctgcctcgtcttcctttaatttcgtttcagaagatcccagagaaggactctgactggctcacctggagtggagctcctatccctggattcttcaggctttcatttgacccacatggttaagctgggagagacagagtccaaagagaggcggagaagggctattctgggcagaacaaacaattgatgactttatggctctgtggtctgggcagaactgcataaccctagatcaccaaagctgagagcctttaggagtgaggatttgggccaggcatggtggctcacgcctgtaatcccagcactttgggaggccgaggtgggtggatcacaaggtcaggagatcaagaccaacctgaccaacatggtgaaaccccatctctactaaaaatacaaaaattagctgacgtgatgcatgcacctgtaatcccagctactcaggaggctgaggcaggagaatcgcttgaacccgggaggtggaggttgcggtgagccgagattgcgccactgcactccagcctaggcgacagagcgagactccatctcaaaaaaaaaaaaaaaaaaaaaaaaagtgaggatttgggtcaccccaggctgaaggccaggggaacctgaagtggataagggaagggagaagacttaggccacaggatctgatgtagaaatggggctgacgtctccacctgtattttcttagctggaggagtgtgcaaagtttgaattacttctgccttctccttcttatttccttttcccttttaaaatagtcatcataatcataaaaatttcttttccattttccctgtttttgcatataggatttcttggtgtgatttaatttgccaattagtctctaggttgcagaatggtgacttggaatcaaattgaaactggaagagggcacctcatatattagggtcagcaattactgaactctgttctcttttattccaaacagggcccccaacttcacatttccccagggtgcaaaagagtgaggggggtcaagcttcagtagagtggagctctgagaagaatccactggagtttggaacccaagacccttttttatcacgctgttcctcctcacctgggcaaaagcactggtacccacttcacaggcatcatgggtgggctctgtgtcctgcggagagcccccgtcccgggtacaggacatcagccctgagccctgtcccaggcttggatcttctttctctctctctctttttttttttttttttttttttttttttgagacggagtcccactctgttgcccagactggagtgcagtggtgcagtcttggctcactgcaacctccacctcccaggttcaagcgattctcctgcctcagcctcccaagtagctgggattacaggcgcccgccaccaagcccggctaatttttgtatttttagtagagatggggtttcaccatgttggccaggctggtctcaaactcctgacctcaggttatctgcccgcctcggcctcccaaagtgctggggttacaggcgtgagccaccgcacccggcctcagtgactttagtcaagtaagcacaaaaaggaatatataattccaaattgtgataaatgctatgaagaaaaggaatgtgctctgacataaaggggggaacgaacgtgatctagggagtcagagatctctccgagaagagatctgaaataggagtaagtcgagagggggaagagaatgctagaccgagggaacagtgcgtgccaaagccgcgtggcggaaaggggcgtgtgggagggtaactgcggagagggagggtagaggacgaagccggagaggcagacgaagggcaggacgcacagagccccgcggctaccgccttaggggttgtcccggcggtggggaagccattgaggagtttaacgccggaaggtggtgactaatcagatttcacttgaaaatggcacggtgtctgcagcgaggctaactgatgggaagggcccagcgaatgccaataggagagagcaccggacctggaaggcctgggtcaa

SEQ ID NO: 1103 - DNA, 2300 bp, Homo sapien
tgaaaaggtggataaaccaagacacaaaaagagaagaggatggatgatgggctcttgttggtggggacagaagtggattgagagatggtggggaagtaaagaaatgaagatgtggagagggagcttttttctgaacccagctaaaggtggaaacttggaagaggaggccagtggattgggtgaagaaccaaccatttggtatacctgtgactgaggaggttctcaggatgcaggacttttagtgctaaaactaggaaagtcctgggcaagctgggccaagctggccacactggcagtggatatgaccatggagggtgaagtgagcaataaatactctgacctttctttcctggtggcctctcatctccttacagtaaccttataaggtgtctttacaggggcctgacccaaccagaagggcaagggagctgggataatacagtctagagaggtcagccttgccttgacacacaccagggtaaaggaaggacagagaattgacctggagaggcaaaaaataatggccagcacagtggcaaaactgggattagaattgtctgggataggccaggtgcggtgactcacacctgtaatcccagcactttgggaggctgagacgggcggatcacgaggtcaggagttcaagatcagcctggccaaaatggtgaaatcttgtctctactaaagttacaaaaaattatctgagcgtggtggcacatgcctataatcctagctactcaggaggctgaggcaggagaatcgcttgaacccgggaggcggaggttgcagtgagccgagatcacgccattgcacccagccatggtgacagggagagactctgtctcaacaaaaaaaaaaaaaaaaaaaaaagaactgtgtctgggataaacctgatttcagagcttcaattctttttccagccttgtttaaaggtagaatgccctctaggagtgatgagtgctttctacatcctcaaattaactctacagagaattataaagattatccaaccatattctttggtatctgagcagcccacaaaacttttttctttagagacaaggtctccctctatcgcctacgctgaagtgcagtggtgcgatcataactcactctaacctcaaactcctggactcaagccatcctcccacctcggcctcccaaagcgttgagattacaagcgtgagccatggagcccggccctctttaaaaaataaaagtgggccgggcacagtggctcacgcctgtgaggggtatgaggcctcccagcactttgggaggccgaggcgaggatcatttgagatcaggagttcgagaccagcctggccaacatggtgaaaccccgtctctactaaaaatacaaaaattagccaggggttggtggcgggtgcctgtaatcctagctactcaggaggctgaggcacgagaatcgcttgaacccgggaggcggaggttgcagtgagccgagatcgcgccactgcatttcatcctggctaacagagggagactccatctcaaaaaaaaaaaaagtgtgtgtgtatacacatacatgtgtatgtgtatatatgtgtatgtatatatgtgtgtacatatgtgtgtgtgtgtgtatatatatatatatatatatatatatatatatatatatatattcagtggtaagtgtcatgtacaagaggcacacaggatctagctgctccagaaatgaagtcagtggagaaaatccccacgggaaccttggaattcctctaaaaagttcaggtacaggacactcccaggtgcccaggaaccgtttcccagctcacttccccccgaaagactcacccctccaatcgcactcgatgctttggcaagtgtcaaaggtcaaagaccacggctcgcctggtaccgactgccccgcccccgtgcacctccagctcccccaggctccgctaccagcagctgcgacccgccaactcagcctgggtaataggagattgggcggccagaggcgctgcgtgattggtgggtcggaagggggcggggactcgctggaaagccccctctggattggtgcaaaccatctgggtgggacctccactctggctgggcgggaaagcaagaacagcactgctgggctggagacggcgggagccgctgctctccggctgagggaatcagagacagctccgtccctagtggagcgcaggggaggcagaagtcatgacaggcgaggtgggttctgaggtgagtttatgcacacgccccccacgggggcttagaaggccgggcaccgagaggttaggtggggccggggtagaccc

SEQ ID NO: 1104 - DNA, 2300 bp, Homo sapien
acttgggaggctgaggcaggagaatggcgtgaacccgggaggcggagcttgcagtgagccgagatggcgccactgcactccagcctgggcgacagagcgagactccgtctcaaaaaataaaaaataaaaaaataaaagtcctagttccatagccaatcagggagagaattagccaggacttaaatgcaagatttgaactccaatttttcccatgcttcacttcagcatcatgtaatgcaaagcccgacttacttaacttccctgagcttcggtgtcatcatctgtacaaatacctttcttaacaatatctaccttactggtggttgtaaagattgagtgacaatgagaagcccatagcagagtgcatggccaggatgtgatgctaatattttttatcattacataaaaaaactacctggctctgtgacagcacatggcaggtgctcaaatgaatatcccaccacacatgctaggggcctaaattatcccccaccccaataatttgtatattgaagtcctaactctagcaccccaggatgtgactgtaattggaaacagggtctctgaagaggtaattaaattaaaacgaggtcactagagtgagccctactctaataggactgctgtccttataagaagaggaaatttggacacagacgtgcacagagggaagaccacgtgaagtcactgggagaaggccactatctaccaagtgaaggagataggcctcagaaggaaccaaccctgcctacatcgtatctctgactgccagcctccagaattgtgagaaaataaatttctgttgtttaagccacccagtctgtggtactttgttacgttatgccgtagcaaaggaatacaacacacacacacaaactcatcgtaccttttcaattggtggacaaggggctccttccttctgctgactagaaactgcttcttggcctgttgtccagtgttctcccactcaaagtccttactgaaagccctaaagatgctgtgcctgctgggctgaccatgctgccttggaggtggtgctgctcccttggcttttgtctgctaaggggaaggcatccaagaaagcaagacctttctctctctctctctcttttatttttattttttttttttcagacagtcttgctctgtcgcccaggctggagtgcagtggcccgatttcggctcactgaaacctctgcctcccgggttcaagcgattctcctgcctcagcctcccaagtagctgggattacaggcgcctgcctccacgcccggctaattttttgtgtttttagtagagatgggcttccgccatgttggccaggatggtctcaaactcctgaccccaggtgatccacccgcctccgcctcccaaagtgctggtattacaggcgtgagccaccacgcccggccaagacctttctcttctaaagtgactggtgatttgctgaccagaggcgcttgtcatgggaccagggagggaatgcatcattcatcagggtccattcccgtggtgccttccggctatacggagagggacgcgcagttgggtgtgtggtgctgaatgaagggatgaaggaggactgctagcgtctaaggtgaccctaaaagacgagatgacagaagcgatctggggtgggaggagggaggagggaggcgaggtggctcctgtgaatctcagtacactttccactcacagaagtggaaaactgaatctgtgggtcagcggaactggaatccagatcttttgcaggacgccctggggggatggcacgtagcccccagagccgttggccaccggacggcctcctcgggtggacggggcagagcgggccagcgggcgcgtgcccgacacgtccaccgggctctgcaccctccgggcgcgcgctcgttccccgacccgcctcgccgcctgccgggctctgtggaccccgcgcccggggccgcgcacgccccctccgcccgccgggaccctgggtccgcgcaccccgcgcccccttccctcccggcgggcgcgcgcgctggctcccgctcccgctcccgttggcggcggcggcggcggcggcggcggggattgtttttgttgtcgctgaggccggaagagccggagccgggtccctgtccccgggccgggcgccgccgccgccccctgcccagcgcccgcgtctccgcggcgccaccccagcgccaatattccggagatcaagcgttacgcggcggcggcggcggcggcggcggggcccggagcgggaggcgccggggaccggggcgaggcggcccccgccgccgccatggaggcgc

SEQ ID NO: 1105 - DNA, 2300 bp, Homo sapien
aatagtagtagaagtggtggtaatggataacattgatccatccaacgaatattttattgaatgtttattttgtgccaggtattgccctgtgctctgggaattcaccatgaacaaaacaggcaaaagtttctacctttgaggagcgtatattctaatggggaagaccaacaataaatgaagaagcaaacaaaacatgtattttattagttggtaataaatgcaataaagaaaaagaaaatagagatggaagataggaaatggggataggatgagcactgagatttatatatgaatgaatatatatgtttatatatacatatacatgcatatgtagatatacacacacgtatgtatatgtatatacgtatgcaaatacctagagaaagtctcactgaaaagtgatatttgacctagaggaggtgagggatatctgcatgaagagtgtcccaggcaaagtcagaagcttggtgagttcaagaaacagcaggccgggcgtgatggctcatgcctgtaatcccagcactttgggaggctgaggcgggcagatcacttgaggtcaggagttcgagaccagcctggccaacatggtgaaaccctgtctctattaaaaatacaaaaattagctgggcatagtggcacgtgcctgtaatcccagctacttgggaggctgaggcaggagaatcacttgaatctgggagacggaggttgcagtgagtggagatcatgccgctgcattccagcctgggcaacagagggagactctgtctcaaaaagaaagaaagaaagaaagaaagaaagaaagaaaggaagaaaggaaggaaggaaggaaggaaggaaggaaggaaggaaagaaacaaacagcagataattctggattgctggagtgagtgagtgggggagagtgataggagatgaggttggagaaatttcagaaggcctctatcatgcagaacttgtaggcattcataacactttgtcatttattctggttaggtgagttttaaatactaaacccacaacgtgactaaataaatctaagacatgacaaacttatatttttaatggattgccctggatgctgtgctgaaattagaccctagcaggtaagggtgaaaagcatggaaattaattaagaggcacttggaatgattcaggtgaaaagtaatggtggtttagacttgagtagtataattgatagtgatgagaagtggtcagatcctgcaaatattttcatactactgtcaataagatttactgatggattgaacatgtggtgtgaaagaaagaaattagtcatgatcaattccagggtttatgtcctgagctactggaaaaaaaggagttgtcatttatcagatggggaaaactgcaagagaagcagaagcagggagtagcagatcaggagacctgtgcgttttggacatcagggttgagatgactattagacatgctagtggagatcggctgtggtagctcgtacctgtaatcccagcactttaggaggctgaggtgggaggattgcttgaagccaggagtttgcagcaagcttaggcaacatggctagactctgtctatattaaaaaaaacaaaaggccgcgcgcggtggctcacatctttggatgtgagcactttgggaggccgaggtgggtggatcacgaggtcagaagattgagaccagcctggctaatatggtgaaaccctgtctctactaatgatacaaaaattagctggtcatggtatggtggtgtgtgcctgtagtcccagctactcgggaggctgaggcagaagaatcacttgaacccgggagacggaggttgcagtgagctgagatcgtgctactgcacgtcagcctattcgacagagtgagactctgtctcaaaaaaaaaaaaaaaaaatagcaccactgcactccagcccaggtgacagagtgagactctgagtcttaaaaaaaaaaaaaaaaggaggttgaatacagtattaaggttggattcagggaacagttcgaggctggagacaaacatttgagaatcatgagcttattgatgataaagccatgagactggatgagattatgttgaaagtgagtgtgtgtggagaaaataaggctcctacactgggtcttgaagcactccaatatttaaagatttaactgaaagattaaaggcgatgaggaagtatcagcaggaagattggcatggagagaccactgggataggagaaaaccaagggagtggtgctctggaggcaaaggaagaagatgttttaagttggaaggatggattatctaatgttcaaggagc

SEQ ID NO: 1106 - DNA, 2300 bp, Homo sapien
acatggattactccaaatctttatgttaatttgaagccagcaagaggttgtatttgtacctgtaggtgttacctgacctcaagtgagtctatgtatgttctggttctgcagtatcttcttgttttaagttatttttttaaaattcttcttaaattttaatttaaaaaaatttctcatccaagctttaaccaacatggaaaatttcaatggaatcattgttctggttaaatactaaacttacttaagtgaaaatgctcaaataaagattaacttttgttttttggctgggcatgtggctcacacctgtgatcccagcactttgggaggatgaggcaggtggatcacctgaagtcgggagttctagatcagcctggccaatgcggtgaaaccccatctctactaaaaatacaaaaattataggtggtggcgcgcacttgtaatcccagctactcgggagcctgaggcaggagaaccgcttgaacccgggagatggagattgcagtgaaccaagatggtgccactgcactcccgcctgggcaacagagtgagtctctgtctcacaaaaaaaaaaaaaaaaaaagattgacctttgtttttttaagtgactgatgaaggtaggaattattagtgggctttgtttgtttattgtttagaaaagaaagaatttggccagtcacagtggctcacgcctgtaatcccagcactttgggaggccgaggtgggcggatcacttgaggtcaggagttcgagaccagcctgaccaacgtggtgaaaccctgtctctactaaaaatacaaaaattagctgggcatggtggcacacgcctataatcccaactgcttgggaagatgaggcatgagaatccattgaacccgggaggcggaggttgagatcacgccatgcactccagcctgggcgacagagtgagacactgtctcaaaaaaaaagaaaaaagaaaaagaagaaaagaaagaacttgaagaaatattctaaaaaagacattctctcctatagttttcctttgcagctagaaaacggtcaagctatggaatgtacagtagctcaatattttaagcaaaagtatagtctgcaactgaaatacccccatcttccctgtctccaagtgggacaagaacaaaagcatacatacttgccactcgaggtaagttaaattttcttttgccaatttgctgatctcttgaatgagtatatatttttaagtagagttctaaactagtggtgaaatttagtgttaatttctaaaatatttttggcagatgatttcactatataaccaaattttaatttttctggaaatagaggatataagatatggtttggcaaaggtttaagatgtggaaccctttacacaaaccaatttctctttgtctcttggcaggtctgtaatatagtggcaggacagcgatgtatcaagaagctcacagacaatcagacttccacaatgatcaaagctacagcaagatctgctcctgacagacaggaagagatcagtagactggtcagtaaggcatggtcttcaagatgagctagctttgagatgacaaaaaacaaaagaatagaaaactcctcctgggacacagttactctctggtttttatatatgcaggctttcctgttctttaggtgaagagcaacagtatggtgggtggacctgatccataccttaaagaatttggtattgttgtccacaatgaaatgacagagctcacaggcagggtacttccagcaccaatgctgcaatatggaggccgggtaagctttttattttattcagcaagcttcttccacaaccagtcaaaaagagaataatccagggtttctctactctgccactgctgaatttacccatagttttgttcattattgccttttgtgttctggctcatacctaatagaattttgtttattcactagtcaatagtaaaatggccttagattgtaatgtcttttctcttttcttttgtttcttcttcttcttcttcttctttttttttttttcaaagaataaaacagtagccacacccaaccagggtgtctgggacatgcgaggaaagcagttttatgctggcattgaaattaaagtttgggcagttgcttgttttgcacctcagaaacaatgtagggaagatttactaaagtgagtatcttcatattttcagcttagtaatatcccttccagatatgaaaatactgtctttatgtgaatgtgctgtgtacactggcactaaatccctgactcccatagtgacaccatctggctatatgaaaaagaccttgta

SEQ ID NO: 1107 - DNA, 2300 bp, Homo sapien
tcactctgtcacccaggctggagtgcagtggtgcaatctcggcttactgcaagctccgcctcccaggttcaagcgattcttctgcctcagcctcccaagtagctgggactacaggcatgtgccaccatgcccggctaatttttatatttatttatttatttttttaagtcaggataacgtttcaccatattggccaggctggtctcgaactcctgacctcgtgatctgtctgcttctgcctcccaaagtgctgggattacaggcgtgagccactgtgcctggctaatttttgtatttttagtagagacggggtttctccatgttggccaggctggtctcaaactcctgacctcgagtgatccacccgcctcagcctcccaaagtgctgggattacaggtgtgagcaaccacacctggccaagcctctaaatttgtagtaatttgttatgcatcaatagataactaattacactatctgatgtcaagatttattatatagccacagtaatcaagacagtatggtatttggcataaagagacacgcggaacagaatagagagtccagaaataggcccagacatacataaccagttgattttcaacacaagtgctaaggcaatttaatggaggcaatgctttccacaaatgatgctggaacaattggatagccatgagcaaaaaattgaatgttgatctttacctttcaccatacacaaaaatttgctggaaatggattagggacttgctgggcatggtggctcacatctgtaatcccagcgctttgggaagccgatgcttgagaccaggagttcaagaccagcctgggcaacatagcaagactccatctgtacggaaaaaaaaaaaaaaaaattagccgggagtggtggtgtgatcccagccactctggaggctgaggtgggaggatggcttgagactggaagggcgaggctgcaagctgcagtgagctatgatggcaccactgcactccactctagcctgggtgacagagtgagccatttctccaaaaaaaaaaaaaaaaaaaggaaatgtttaaaagacttttatagacaaatggtcatagcaatttcatttgtaatggcaccaagctgaaaacaaccccccaaatgtccatcaacatgtgaatgaatatacaaattgtcatatatccatacaatggagcacactcagcagtaaaatggaacaaactttttttttctcctttcttgttgggaaaagtgatggtcaggtccagggagacgaactattgatttacacaacaacataggtgaatctcaaaatacttgtagtgagtggaacaagccagaccccctctcccccaaattattccagttatataaaatactataaaatgaaaacttatctatggcgacagaaaagagattagcagttgcagagggaagggcagagggggacgagaggcaggaaacaaagaggcaggattaaagtttggcggggaatgaatagggtcgttatattgattgttgtgaaggtttcatgtgtgtatatttgtttcaaaactcatcagaccgcacactttaaacgtgtgtagttttttttttttttttttttttttagtttcactcttgttgcccaggctggagtgtagtggtgcgatctcggctcactgcaacctccgcctcccgggttcaagcgattctcctgcctcagtctcccgagtagctgggactacaggtgtctgccaccacgcccggctaattttgtatttttactagagacagggtttcgccatgttggtcaggctggcctccaactcctgacctcaggtgatccacctgcctccgcctcccaaagtgttgggattacaggcgagagccactgcgcccggccatgtgcagtttatcgaatgtcagttatgccttaatagaagttggggccttgggaagcggaagaactcaaacttccggcagactcgcggatctaaatttacggacggagggaggagctagatcgtgcatgctcagtccttcctctacgttcaccaatcagatgccagttgcgtgatggcgtgggtggagccaaatgtggacctgtgaggacgccacgtgagagggaagcccgtgaggcaagcgcctcaggagtgcgtgaggcccacgcagaactcggggagccttttatcctgaggacacaggggaagaattggaggactatattcaggcaagtaatttaatccggtgtgcattttaaagcagcagtttgtagctgtgttgaaaatgggctcaagagcgtggggaacgacctgttgttggcaggctgtggag

SEQ ID NO: 1108 - DNA, 2300 bp, Homo sapien
gccaatattgaaaccgagacagtctggctccagagtctttgttcttcacctctacttcgtatgtaaagcagtaattctcatagtccccagatcggcagcatcatcagccttatctggaaacttgttagaaatgcacatttttgggtcccacccaacacctactgaatcgaaaactctagaggcagggcttaccaatccaagttttgttttttggtttttgtttttttttgagacggagtttcactcttgttgcccaggctgaagtacaatggcgtgatctcagctcactgcaacctccccctccccggttcaagctattctcctgccttagcctcctgagtagctgggattacaggtgtctgccacaacacctggctaattttttgtatttttagtagagacgagacttcactatgttggctaggctggtcttgaactcctgacctcaggtgatccacccgccttggcctcccaaagtgctgggattacaggcgtgagccactgcgcccagccaccaatccaagttttaacaagctttccaggtgattctgatggttgctgtttgagaacctctagaagcaaggcatggtataagtgtcagaaattaatctcctcatgagtaaggaccggttatggtccatcccttaagttcccagcctctgcatggcatctagtgtaaagcaggcatcaaaaatttgtgagtttatgggaaagtgatgtttgagctgggtctcttaccccgcctatcactgcaccagaccgaataggagggagaatgggagttcccagaaactttgagactagcaaggaagtggttgtgatacgtctagcaagatatgataagggtctgcaccagcataagaaaccatcagaatggcagtgaatcatgtgagagcagttcagaaggtaaacatgtcaagacgtggtgaacagctgaatagatggaaagaacaagggatagaggaactgtcatttctgacatgaaggtgctgttcgctgagataggaagcacagggcaagtatgtttgtgagtgaaagataaagtgtttggtttggacttcttaaatttgaagtgctggtaggatatccaggtggagctgtccagcaaacacttggaaatgtgagtatgagacatggttggaaacagagatttggaaggatagttgggccgtaagagtggatgagacctttaaggggagagtggaatgagaagagagctgggtttggaaccacagtgaacagttaatgaggcaaaagcaaaaggggccctttagaaagactgaaaaggacttaggcaataggagactgcagaagatgccgcagccaagtagaaggctcagaagggaagtagaggcacagtgacagatgctgcagagaaataattgaaaagtatcctttggatgtcaaccccaaaagtcatttaagtgacgtgatgagggcagaagctgattgacagttcaggcatgaactgtagatgagaaagtggaggcaggtgcttcccaggtccggcggatagagctctgtagctgcacttaagttcaaactgtgacatcttccagggtaggccgcgtctctacttatctgtggtctcagcgtccagcacatggcgtggaagagggggtggcgtcagtgagttcagtgactagggacggagaaagacttcgtggaggcagtcgctttgcagccaaggcttgaaggatgagggtgattgggaggagaggtgggaggcagggcccctgggcgctggagtgccagggggtctgggaatgaagtggggttcccataatgtgtgcgcgcagctcggtgcgacaggcgggggctgtgtgtaggtttggagggacctatttggggaaaagacacagggctgaaggctgctgtggcgggatgtcccttcgccctgccccacttataccactgcgcggttccaaggcacctctactggcgccctcccgccgggctgcatggcgacgggtgaccgccaggggccgctgccttgggtccccggtgcccccgcccctctccattggcctttgttgccgtcggagcgccccgcttgactcgttccggtccgccccctgggcccggcggtcgcgcctgcgcactggcagctggccgggcgctcgcagtgggagctgctgcaggctccgcggcggcggcaacggaggctgcgggggcggcggcgcgagcggccgggcttggtaggggagccgagcccggcccgggatcccgagcagcgagagtgtggggtacctaggcccctcacgctggacttcacagtctccgggccgcctgacctccgc

SEQ ID NO: 1109 - DNA, 2300 bp, Homo sapien
agtctaatgaccacattctttccttacaacatgctccccttgctcttctttttagctgctatggcctttctgtttctcaaacacatcttgctgtcttctagcagggtgcatttttgcatgttgttccctctgcctggaatgctctctctcaaactccccctctcctctaagtcctttgctgtcatcagatttcatttcaatcattacctactcaagaatcctttcctgactaggtttttatttcccattttatgctgttattgttccatgaagttttctgttgtgtcatttatcagcgttgtaattttcacgatttttaaaattagtccctatttagtaagcactttgagagtaaggaccttatgtgtttcctgtcattattgtgttccctagcacctcatacactgcctggcatctagtaggcattcagtaaatatttgttgaatgcactaatcatttctctccctgcccttagctgaggtgaaacgtgtcggagatacactcttgggaatggctacgcagtgtgtgcaggtgaagaacgtggtcaagacctcacctcagactctgtccaacctctgcctcaagatcaatgtcaaacttggtggcattaacaacatcctagtcccacaccagcggtatgaactctgttgtccacttgcccttgtcaaggtaccatgctgggaattgatgaagagataggaccctggccaggcagactgaatcagacataagggggagaagagcagagtgggtactggatggtgccagctagagaagacccagcgcctcaccattttgttttctcttccttgctcagctctgccgtttttcaacagccagtgatattcctgggagcagatgttacacaccccccagcaggggatgggaaaaaaccttctatcacagcagtgagtgatattctgtagctgcctcataaggttctcctcttcgctctgagtcctcaaaactgcccatgatttccttccctcagctctggctcttgagccttcataagatgtccatttagctcgctattcccaattcccattcccttgatatctcataaaggtagctctgtatggtgtcttttttcagggagagtaatgagagtgtagccagagacttgactcattctgcatcactcttgctctgcatttgaatgtctttctttccccatgcctgcttttgggatgtaggggagggactatatcttctctgaaatccctttaaagggagttacttagttgcgaggactatcctttgctctgcccatcctcaccccgatctgtataatagattagatgtttctcttatctctctcctgacttttctgctctttgtctcttaggggcttccaaattgctagggattagaccttctttcccacttatatttcctaaaccctcacatttctgtaagcacactggtcttaacctcagtaagtgcagggaaaccctataatatgcttatccctgttttccttgtggccatccctcctaggctttggctgctgtctcctttgtaaatggcatttcttccatcaaccacaagaacactgttactatggtcatgattcctgggtagattagcatttgaatgggaaaaaggataaacttgggactggatgaggccattgtttgatttagtagtgctaaaccttcacatgctcctctgcaaaggggagagaaatcagtttatcaagtacctactgtgggctacgtcctgtgtaaggtgcttaatatggaccccagtagcgctgcaagcaggtgttcttatcaccatctgagaagaggaaaaaagatcagagagattgagtaacttctgcttgtgtgatagaatagagattgaaaccagggctcactgagtctcaagccctagtcattcagttgtagttttcttgctaagaagcctttccacaaacccatagcctgacagtgaaggtgaaggttctaggagctaatcctttctctctgactgtcaggtggtaggcagtatggatgcccaccccagccgatactgtgctactgtgcgggtacagcgaccacggcaagagatcattgaagacttgtcctacatggtgcgtgagctcctcatccaattctacaagtccacccgtttcaagcctacccgcatcatcttctaccgagatggggtgcctgaaggccagctaccccaggtagggcccacagtaggtggagaaaaccttcacatcatggctggaaagctaggtgctactaccttttctaagctattggcactgagaggtgtgtcacttcttagtgagctttgctaaatggagt

SEQ ID NO: 1110 - DNA, 2300 bp, Homo sapien
catactgacttagagcctctggctgctgtttgggcatccaagaaagggaggggaaggaatgagctaaaaacaaaacagaatgaggtgggaaagggagattttcttctttacagaggaaaataggaaaccctccaagaattgtgcaagtaaagacatttgttgaatgcactgagtcccttggtgtagtagcaataaggaaaaatgaaattactttcctgtgcacacagtccagcctaattggtatgtgatgttgcacttagcagccatgtggtgggcatgtgtgactactctggttttcactttagtttctaaactttttatccctctcaagtccagcatggatggggaaatgtctctggatccccacagctgtgtacttgtttgcatttgtttccctttgagatttgtgtttgtgtcctgctttgagctgtaccttgtccagtccattgtgaaattatcccagcagctgtaatgtacagttccttctgaagcaagcaacatcagcagcagcagcagcagcagcacaattctgtgttttataaagacaacagtggcttctatttctaaagtgcggtctttctctttttttttcctaccagcaaaacaaacttttgggactgattacatctctaatagattttaggtgagaataatactgtagattgttatgcaggaatacttcacagagccttcatttattcttcattcaacaaacatgcaaagcactgtgccagcagtattgtggggaggggaggcacaattcaaaatgaggaaaatagtgtccgtctcattaagggaattaagtttggtgggggatatgattagccaaatagtcccctggcataggaggaagataatgagggagtggaataaggctacaacaacgaatatagggaggaagggacagatttgagagacgaggtagaattaataggactcgatggctggtgggaggagaagacaggagtagaggttagctcccaggtttctccttgaccataggagtgtgttgggacattctgccagtcaagatgggggtgacggggagactgtagaaggaaggtggggagtttttgaagaaacagaatgttgtatagactgagttttgaggtgtttgtggggcagtaagggtaaggtgtccagtaaacacaggttggtgctcaggtaagactgtaaaactgcatttatagatacaggagtcttatagatggtagttaaagccataggcatgaatgagatagcttagaaaaagagaagagaaactagtatacagccccctaagaaactcaatttaaaggttcgggggaggaagcagatcttaaggtgacagatcactggtagacagtttgtgggttttttgtttctttgtttagccagtttggtgaggtaggagaagaaatcagagtagaagaaggttcatgaagggagtgattaacaacatgaactgctgcagagagggagttctttttttttctgtgtgttttacctttctactccccatcttttggggatcttgtaactctatgacttacttacgttattctccagtatttcttgaaaatgagcattggaaaaaccaattctaaaatggctaaaactaggactttcaagttcaccacaactaccaccaattaggagataattgtaaaagaataaacaaaacctaattttgttcctagccaatattataaaccatgttccagcatactagataatagtagcatactatatttatttccataatttgtcttctttagagcctatgaactcctaggagcagaagctatattctcttcatttttgtcatctcagggtcatggcatataccaacagatcagtatgtgcaaatataattgaaataggctagtagtctgtggtttatgagtatgggctgggtgggcagtggatcaagaagtgataggagtacacaggatgaactcagaattcctgaatcttcaggtaagcagatacttaactacattatcattgtcttttcccactcaccccaagttggaggttctatggttttgtactttaagctggtggtataattgtcaagcatgtaaattctggcattcttcctggtactgctagagcattgttatttctatgcatgggggtaagaaggctcagagaaggatcctggcggataccccagtgagaaatcgtcagtggcagccagtgtgtacatacgtggacctagcattcctctggaggccaagtgttgtaaattggcctgtggctatcatctggcagactcccttgggaaagagccagccagccccatgcttcttttcagc

SEQ ID NO: 1111 - DNA, 2300 bp, Homo sapien
tattgagttgtaagagttctttattcattttaaacacaagtcctttgttggatatatcttttacatctatttttcccagtctgtggcttgccttttcattttgaagagcaaaagtttaaaattttgtgaatttattaaagctccgtttgttgcttttttctgttctagtttatacttttgtatcatattttaggaaattttgcactgggtatttgatggctcctgaggaggttcaactttcagagcgcactgatttctctgcacctgagattttgtactatttctgtatttctttcttctcagaacaaccagtgtcaccaggtatgagggcagagttttagcttgtttgctgagccccattcttgaagctcatttatttattcacctatctgtccatcaatccaacaaatatactgaatgctgctatgtgccaggtactggcactgttctaggtactggggcaatgacagttaagataatacccaatgaccctgctctgtacccttaagagcagactcagttgggaatgagttatccaaatatagggtgtacatgtagtcaggagagagcctcatacagctttgcctttggcagaatccttcaaacctctttgtcttcctacttcttgatattacaaatcatgagcctttcacatgcattgactctaaagaggtgggttcctggatagcagaagtagataggaaggcatcattgacatttactgagatggattgaatcagagggtgtaaattctgctccatcaatgttgaaaaagactagcccaccccaaaggtttatcactgtcaccatgtctaatgtctattctggaagaagctgaagaagtctgcctttgtttagggaaccggttccagaatcagaggggttgaggatataaaagacccttgcacaagagttggtatttaccctgtcagatgctgctaccaagatttggattgtgtacagtcgaggattaaaaatgacttttaagatgcagtgtttcatctggtgacatttaatttgatattttaaaattggggagggtattttcagccatgggggtagggatgtgaaagaagaagaaagtaagaattggagtcagatgtggttttgagtcccatacatttattgtttaatattatatggtaagtactttaaaatggtaaatagtaaatacttgtgttattcactaacatttggggaggattttctctgtgctttatgtatattacctaaccttacaaactgtgtaaggtacatgctgttctctcaatttttcagataagaaaattgaagcccagagagatcaagtgactgatccaaagtcccacagtgaggggaactgaagataggatattctttctccttttcctctttaaaaaattattttgattaaaaaaaaccgtattactgaagcatagggacatggggagaaattatgaatgattcctcagcctgaataaaatagtatgtttcattaaggcaacaaatatttattaaggacctaatatttgcctgacattcaagtgaggtggggggcacacaagtagtaaataaataacagactgggcaaagggctaccaaggcaatactgtagtagactaacaggtgccccaccatagatgggtggtccggaaaaggcgtctcagatgtctttcgttgagacgcaaaaaaaagctgtggggtagggcgtaaggggagggtggagaagagagagagggttcctggccaagggaaccaaaagcagagaagctccaagtcagaaaaaagcagcggttggcccgttgggagaattggaagccaaccagtatagctgtagcacaggcggggcccatttacgccgtgcgttttcaccctggaaaggagtttgggttttcaagtgtgacgaggcgctattaaagagttttaaacatggaaattactcgatctgatgtttgtgtagtgtcctgtttgttagtcatcttttccaaactataatacattttttttttcctaaaaatggtcgttaaagcagcctaggacttaggtcaattgcggtggtcacttgaccgcctgtgaggaggcggcgcgtggggtggatcggactgggcgtggcgggggctcaggaaggagggtggccctaccccagcgggctcggctcggggcctccgcggcagttcggggtccttcacccgccggctccaggtaggctactcctcaggtaagccccgccgccagccgcgacgtcgtcgcagacaggcaccgcccccactcgtgcggcgcgagtagtcctgcccctccgcgttgtctccggccggcacggc

SEQ ID NO: 1112 - DNA, 2300 bp, Homo sapien
tatagggtgtacatgtagtcaggagagagcctcatacagctttgcctttggcagaatccttcaaacctctttgtcttcctacttcttgatattacaaatcatgagcctttcacatgcattgactctaaagaggtgggttcctggatagcagaagtagataggaaggcatcattgacatttactgagatggattgaatcagagggtgtaaattctgctccatcaatgttgaaaaagactagcccaccccaaaggtttatcactgtcaccatgtctaatgtctattctggaagaagctgaagaagtctgcctttgtttagggaaccggttccagaatcagaggggttgaggatataaaagacccttgcacaagagttggtatttaccctgtcagatgctgctaccaagatttggattgtgtacagtcgaggattaaaaatgacttttaagatgcagtgtttcatctggtgacatttaatttgatattttaaaattggggagggtattttcagccatgggggtagggatgtgaaagaagaagaaagtaagaattggagtcagatgtggttttgagtcccatacatttattgtttaatattatatggtaagtactttaaaatggtaaatagtaaatacttgtgttattcactaacatttggggaggattttctctgtgctttatgtatattacctaaccttacaaactgtgtaaggtacatgctgttctctcaatttttcagataagaaaattgaagcccagagagatcaagtgactgatccaaagtcccacagtgaggggaactgaagataggatattctttctccttttcctctttaaaaaattattttgattaaaaaaaaccgtattactgaagcatagggacatggggagaaattatgaatgattcctcagcctgaataaaatagtatgtttcattaaggcaacaaatatttattaaggacctaatatttgcctgacattcaagtgaggtggggggcacacaagtagtaaataaataacagactgggcaaagggctaccaaggcaatactgtagtagactaacaggtgccccaccatagatgggtggtccggaaaaggcgtctcagatgtctttcgttgagacgcaaaaaaaagctgtggggtagggcgtaaggggagggtggagaagagagagagggttcctggccaagggaaccaaaagcagagaagctccaagtcagaaaaaagcagcggttggcccgttgggagaattggaagccaaccagtatagctgtagcacaggcggggcccatttacgccgtgcgttttcaccctggaaaggagtttgggttttcaagtgtgacgaggcgctattaaagagttttaaacatggaaattactcgatctgatgtttgtgtagtgtcctgtttgttagtcatcttttccaaactataatacattttttttttcctaaaaatggtcgttaaagcagcctaggacttaggtcaattgcggtggtcacttgaccgcctgtgaggaggcggcgcgtggggtggatcggactgggcgtggcgggggctcaggaaggagggtggccctaccccagcgggctcggctcggggcctccgcggcagttcggggtccttcacccgccggctccaggtaggctactcctcaggtaagccccgccgccagccgcgacgtcgtcgcagacaggcaccgcccccactcgtgcggcgcgagtagtcctgcccctccgcgttgtctccggccggcacggcccggcggggtacggccgagcccgccgcatgtggcccggctcccggacacctccccggcgtcctccgcgccggccgctcctgccccgacgtcgctccggcacggctcggggcccagaggcgaggcgaggacgccgggcaagccaggcagcggaactgacgccggcgagcttccggggcggccccgggcaggtcggcggcggcggcccgcagtcgtggaggagcggtgggagcgtcggcggccgcgggcgatgcaacttccggacgggactcccctctgtccgcgcctcacatctccccttcctctcgcctagtcctgtgccgttttccgtccgcgactcttccggcccagagctttcggagtgcggttgctcaggggaagccgtcgccgcccccgcctcggggccgagtgagagtgcccgtcgcgtcgcgccgcgtcgccccccgggccgcctccttgccgccagtggcgggctccgttctccctcgaagcactccccccagctccatgaatggaaatcggctccgcaggtgagtcagagt

SEQ ID NO: 1113 - DNA, 2300 bp, Homo sapien
tcaaaaactgctcaaaagccaacctcatcccccaattgcctaccaagcccttgcttctctactgttcttcccatccccccagtgacgttttacaactgaaggacccttctgggacttctttccccctgggcccaactgcctgggtttcaatccaggctgtaccacttgttagtgatgtgacctgggcacgtcctcactggcctatgcctcagtctccctgcctataaagtgaagatggtaacagtacccacctcataggatccggttcagcagagtcctcagaacaggaccaggcctgcacacctgtcttcctctctatcccagccccccatgagaggcagtgtggagcacagcagagtgtcctctgggtggggccagaacacctgggtttccctccctgctttttagcagtgtgtctcttttgttacctaagaaagtggggacaatgcccacctcacctattagttgtgaagattaaatgttaatatttttccaacccctagaaatactaggcaataccagacaatacagtactagacaataagacaaacatgattttttttcccttctttttttaaagaaatggttgaatattgagcattgcttctctggtttttttgtgttttgttttgtttcattttgttttttgagacagagtctcgttctgttccccaggctggagttcagaggcgtgttatcagctcactgcaacctccgcctcccagggtcaagtaattctcctgcctcagcctcccgagtagctgggattataggcgtgtgccaccagagcattgcttctcataccccagttacctctctcagggttgtgccctctccaaacatgattatcatccctttatcattccttgtatgaccttcaagatgggcaaagttgttgggcaagacagaatagaagaaatgttgtaaacaacattaactatccatccattgctggaggggacctgctggggagtgcacctgattttaattttaattaattaatctattttttgagatggagtctcactctgtcacccaggctggagtgcagtggcaccacctcagctcactgcaacctctgcctccaggctcaagtgattctcctgccttagcctcccaagtagctgggattacaggcacctgccaccacacctggctaatttttgtgtttttagtagaaacagcgttttaccacgttggccaggctggtctccaactcttgacctcaggtgatccacctgcctcagcctcccaaagtgttggtattacaggcgtgagccaccttgcctggccaaattttgtattttttgtagagatggggtttcgccatgttgcccaggctggtctccaactcctggactcaagcgatccacctggtctcggcctcccagagtgctgggatctcaggcctgagtcgctgcgcccagcctactttttctatgtactgttcgtttgctggcaactactatgtttctgaggctgacctcgaaatcctagcctcaagcgctcctcccgcctgggtctctggagtagctgggattacaagcgtgagccactgcacttggtttcgtattttctatcatgtctatgcatacctttatcaaaataaaattgtttaggccggggcagtgacacatctgtaatcccagcattttgggaggttgtgatgggtggatcgcctgaggccaggagtttgagaccagcccgggcaaaatggtgaaaccctgtctctactaaaaattttttttttaatttagccaggtgtggtggcacgcgcctgtggtcccagctaactcgggaggctgaagtgggagaatcgcttcagtcggggaggttcaggctgcagtgagccgagactgagccacagcactccagcctgggcgacagagcgagatcctgtctgaaaagacaacaaatgttcatttaatttgtaaatcaagtgaaagcgctgccctgatgccccccacctctcccaggctcggccggccgcccctcgcctaccctaaaggcctccggggacgccgcccgacgccgccgcggttgccaagcgaagcgcccaggccgcgttggccgcggggggttgggggggtaggggaggggtggttgcctagcaaccggtggtgccaaacactggagctcagagcggggggcgcggagagcgaagcgggaaaggaggtaagggagctagggaagcgggggcgcccccttcctccgcgctggaccggggtactgatctaaaccaaaggcgatcatcctgcggaggggaagaaaggggtttgacggggaaccggactgacccc

SEQ ID NO: 1114 - DNA, 2300 bp, Homo sapien
gcagagtcctcagaacaggaccaggcctgcacacctgtcttcctctctatcccagccccccatgagaggcagtgtggagcacagcagagtgtcctctgggtggggccagaacacctgggtttccctccctgctttttagcagtgtgtctcttttgttacctaagaaagtggggacaatgcccacctcacctattagttgtgaagattaaatgttaatatttttccaacccctagaaatactaggcaataccagacaatacagtactagacaataagacaaacatgattttttttcccttctttttttaaagaaatggttgaatattgagcattgcttctctggtttttttgtgttttgttttgtttcattttgttttttgagacagagtctcgttctgttccccaggctggagttcagaggcgtgttatcagctcactgcaacctccgcctcccagggtcaagtaattctcctgcctcagcctcccgagtagctgggattataggcgtgtgccaccagagcattgcttctcataccccagttacctctctcagggttgtgccctctccaaacatgattatcatccctttatcattccttgtatgaccttcaagatgggcaaagttgttgggcaagacagaatagaagaaatgttgtaaacaacattaactatccatccattgctggaggggacctgctggggagtgcacctgattttaattttaattaattaatctattttttgagatggagtctcactctgtcacccaggctggagtgcagtggcaccacctcagctcactgcaacctctgcctccaggctcaagtgattctcctgccttagcctcccaagtagctgggattacaggcacctgccaccacacctggctaatttttgtgtttttagtagaaacagcgttttaccacgttggccaggctggtctccaactcttgacctcaggtgatccacctgcctcagcctcccaaagtgttggtattacaggcgtgagccaccttgcctggccaaattttgtattttttgtagagatggggtttcgccatgttgcccaggctggtctccaactcctggactcaagcgatccacctggtctcggcctcccagagtgctgggatctcaggcctgagtcgctgcgcccagcctactttttctatgtactgttcgtttgctggcaactactatgtttctgaggctgacctcgaaatcctagcctcaagcgctcctcccgcctgggtctctggagtagctgggattacaagcgtgagccactgcacttggtttcgtattttctatcatgtctatgcatacctttatcaaaataaaattgtttaggccggggcagtgacacatctgtaatcccagcattttgggaggttgtgatgggtggatcgcctgaggccaggagtttgagaccagcccgggcaaaatggtgaaaccctgtctctactaaaaattttttttttaatttagccaggtgtggtggcacgcgcctgtggtcccagctaactcgggaggctgaagtgggagaatcgcttcagtcggggaggttcaggctgcagtgagccgagactgagccacagcactccagcctgggcgacagagcgagatcctgtctgaaaagacaacaaatgttcatttaatttgtaaatcaagtgaaagcgctgccctgatgccccccacctctcccaggctcggccggccgcccctcgcctaccctaaaggcctccggggacgccgcccgacgccgccgcggttgccaagcgaagcgcccaggccgcgttggccgcggggggttgggggggtaggggaggggtggttgcctagcaaccggtggtgccaaacactggagctcagagcggggggcgcggagagcgaagcgggaaaggaggtaagggagctagggaagcgggggcgcccccttcctccgcgctggaccggggtactgatctaaaccaaaggcgatcatcctgcggaggggaagaaaggggtttgacggggaaccggactgaccccagctcttcccacggggctctccctgtccggccttcccctccaacagtaggcgagggcggaggggcgggagggcgtggcggctaccagacggggagggggccgccccgggggccgccccccagctccccagtgccaacaggcacgcgtccctggagacagaacagggctcctgcccttagatcccccacggggactggcccgcagcctggggaagaaaggaaaggaagatcaacaaggcatggttggctgggggcaggtgtggaaaatgc

SEQ ID NO: 1115 - DNA, 2300 bp, Homo sapien
tggagacactagagatcgacagaggctgtctctctctcaacctcagatccccaaacatctcgctgaaggttgaccccacacgtgtacctgatgggtaagaagagtgtttcagccagtctcttctcctcccctcccaggccacaccctcatgacccccattttccctgccacctgcagctccaccacactccagcagtgggatgacttcagtcggttcaacaaggaccgagcggaggctgagatgaaggcagccacagagctgagggaggccactgctctaactattgctgaggtgacaggccacccacagctaatggatggtcccagtgtgcgctcagcccttatcttctgttccctgctgtgcatgtggccccctgcccctcgcttgagtaatatcctcaggcagccctgagtgtagaccctccccttgccctgtgttttctccttcagaccaacaacgagcttgaagcccagagagttgcaacggaatttgccttcaggaagcggctgcgggagatggagaaagtgtacagtgagctcaagtggcaagagaagaatgtgagcatctccaggggcctggacttcctgctgtgggatgagaagccgcatgcccccgccaggaggcactggaccaggcatgcacgtgagtccagcaggtggaaaccagtcactctgtcccctgcagaccttggaggagatcgctgagctgcaggaggacatccggcacctggaggaggatctgcgcacaaagctcctgagcctgaagctgtcccatacccggctagaggccagaacctaccggcccaacgtggaactctgccgggaccaggtgagagggtgtcccagtggcgcacgggccccctagccaaggttttctcatattcctgatggagcaagggcactgctgtcaaggggcagcactcaggtaaaggacagtgtggctgacttggaactcccaacccctctgcctccaggcacagtacggcctcaccgacgaggttcaccagctagaggcaaccatcgctgccctgaagcagaagctggcgcaagcacagtaggtctcgggagtgggcggaaggagcagtgagacgctgcccacaaatggggcctcttgctggctgctggctccctggggctgtcttcctgactgaaggctatgcacgcagcccaggcctcccagcctcatgggggctggggggttgtcaatgtccttccctagggacgcactggacgccctgtgcaagcacctggcccggctgcaggctgacattgcctgcaaggccaactccatgctgctggacaccaagtgcatggacacacggcgcaagctgaccgtgcctgctgagaggttcgtgcctgaggtggacaccttcacacgtaccacaaatagcaccctgagtccactcaaaagctgccagctggagctggcctagccttggaggactgcaggaggagggcagggttgggtgggcaatggaaggagggaggagagaaatgaatggaataaatgcagaggatctcaggccggctgttctctgccccactgtatgtagccagcagggagagggttcttgaacaccctcctgtctatggaggagcaaagatggggaacactattcctccgaactccatgtaccaaatccagttctttccctcccctcagggcacccctctctgggctgggtcagcactcctgggctgcagcagcgcggcctctacctggctgtgtcccagttggcccctggtccgccctcctgatgcttaagggaggcccacagggggcaagggcccggtgggagggcttgggggtggtcccggcctcggtggggagggccggctgggggtgcggagttagggttgctcgcctgcggaaggcagtgtgggctgcagtgatccaatggtctggctcagtgcccatcccccggagaccccatagtggccttcccacccagttagcccagtggtgaggagcggaaaaccgagactcaaagcacaggctggcgggaagtgcgcggcgccgcgactccgggccgctgggcggcgctgtgggcctggcggcggagtggaaactctaggccccagggagcgctgcggacggaagtagggaaactgtgagggcggcaccggaagtggcgagcagtctgcgcgcggatggccgcagcggcgatggcggcagcggcaggtggaggggctggcgcggcccgctccctctcgcgcttccgaggctgcctggctggcgcgctgctcggggactgcgtgggctccttctacgaggcccacgacaccgtcgacctgacgtc

SEQ ID NO: 1116 - DNA, 2300 bp, Homo sapien
ccccaccccagccttaggcaaccactgatccactttctgtctctatggatttgcctattctggccatttcatataaatggaatcacacaacatgtacattccatatctcacttttcactgttttcaagattcatctgtgttgtagcaggtgtcaggacttccttccttttatatatatatattttgagaccaggtctccctctgtcacccaggctggagtgcagctcactgcaacctccacctcctgagctcaagtgatcctccctcttcagcctcctgagtagctgggaccacagcacgcccacacccagctaattttttgtttgtttgttttgtagagatggggtttcaccaggttgcccaggctggtctcaaactcctgggctcagacaattcacccacctctgcctcccaaagtactgagattacaggcgtgagctgctgtgcttagcctatttatagatatatttttaaatttggggttttgctatgttgcccaggctggttttaaactcagggctcaagtgatcctcccacctcagcctcctgagtagctgggactacaggtatacaccaccatgcccagcctgtacttcattcattttcattgccgagtaatattccattgtatggcgataccacattttatttgtccatggacatttgcgttgtctctacttttggctgctgtgaatatcgctattatgaacattcacatataggttattgtgtggacatcctctctcatttcatggatgaggagacctcctgcccaggctcccacagctgggaaggggaaggggaaggctgcctggctggttccagagcctgtgcttcttcctcacccaggctttgttctctgagttgagccaaatgctgtgacaggcataggtcagggcacaaagaaatgaggctttatagaggaagggatgacagcctcccagggccataaaagatgagtagaggaggaaaataacattgcaggcagagaaatagcaggcgcaaaggccagaagtgttaaggtgcccggtgcctgggaacttcaagttctggtttactgggtggaggtgtggggaggtgaggggcagagaaagggatagcaggcaatagagttggagacacaggcacagagtaggttagaaaggccttgaatgcaggccgggcgcggtggctcatgcctgtaatcctaacactttgggaggctgaggcagccggatcacctgaggtcaggagttcgagaccagcctggccaacatggcgaaactccatctctactaaaaatacaagaattagccaggcgtggtggcacacacctataattccagctacttgggaggctaaggcacgagaatcgcttgaacccgggaggcagattttgcagtgagccaggatggcgccattgcacattgcactgggcgagcaaaactgtctcaaaaaaaaaaaaaaaaaaaaaaaaaaaaaagccttgaatgctatgctaagcgccatagacttgatcccaaaggcgagtggcagggagtccagaagggcatcagcagaaggtgcagtcagacagacctaagacaaatcccatctctggcttcctcaagacttttgctttagttttatcatctggaaaatggagatgacaataataataacttgttaaagtgttctgagcattaagtgaattcatgtccctaaagagctcagcctagtgcctggcagagagctggcccagcaatggaaatgggtgttgacatccaagagtttttagcaggggaggtcagactgctctaaaaggcacgcccggctgcagagagtgactggctggttttgaggaggctgctgtcctggggaggctgggctctcggagatggtgggggtgatgaacagccacaggcagggtctgaagaagtttaggaggtggcttatgcagacccccgcgactttgaaaattgcttgtgaataatatctaaattcggaattgcttctcagccttttgactgaaatctccagtgtaatctctaaattctgatcttttggtgaccccgggcctagtgccaaaccacccagggctggcttgatgactttctctgttcttctttgcagcacgtccacggacgccatgctggggactctgacacccctgtcttcgctgctgctgctgctactggtgctggtgctggggtgtgggccgcgggcgtcctctggtggcggggccggtggggcggcgggctatgccccagtgaagtacatccagcccatgcagaaaggacctgtgggaccgcccttccgtgagggcaaaggccagtacctgg

SEQ ID NO: 1117 - DNA, 2300 bp, Homo sapien
ttgttttcattatactatagcccattcctattttatttgtttatatttatatttatttgtattttttgagacagagtctcactcttctacctaggcgggagtacagtggtacaattacagttcactgcaggcttgacatcccaggctcaagccatcctcccgcctcagcctcccaagtagctgggactataggcatccaccaccatgcctggctgatttttaaaatttttttgtaaagttgggggtctcagtgtttgcccaggctggtctcaaattcctgggctcgagtgatccttctgcctcagcctcccaaagtgccgggattaccagtatgagccactgcacctggccatcccttctatttttaaagcataaaggcctttaagttatacatttatgtcactcacagttccacagaggcttggttcgtaattgaagatgaagatagacttgcaaatcaagagagggtatggagagcctaactcagggatcccattccgagatcccaggtatatggattccatgaccaccaacagatctgtccaggaccttgattgttcttattggtaaataggaggtagctgcatgtataaggtgcttgataacatcatgatttgcttgttacttggcatcatggtggcctgaggctcttggagtctccatccaagggctcattaataatggaatgaaagctctcctgatttaatgcagtggtgccaattctctggactggtaactgctggattgtttccatccattcatgctcaaaccattctagtgccaagcccttgactttactaaaaaaatcgttcccctccttaacagcttccccttaattgccatatttggtaaatagtctcttggagacactgatctgactgtttatttgagttcaaagggcctcctgatcctgaaactgactttctttgactctagtgcagctaagttttttgggtattttttttcttctgtttttgtttttattgaggagggcttattaatactacagttgtggggaagagtggataggttgaccattggcttggaaacctttgattttttttctccccaaattacttttgtcaataattagctgtttgtccttgggcacgttctttttttttttttttttttttttttggagacggaatcttgctctgttgcccaggctggagtgcagtggcgtgatcttggctcactgcaacctcctcctcccgggttctagcgattctcctgccttagcctcctgagtagctgggattacaggcacgcgccaccacacccagctaatttttgtatttttagtagagacggggtttcaccgtgttagccaggatggtctcaatctcttgaccttgtgatccgcccgcctcggacttccaaagtgctgggattacaggcgtgagccaccgcgcccagcctccttgggcacattctttaaccattctgggtctcagtttcctcatctctaaagtggggttaattcctgcctttcctggattactgtgttatcatgggatagataatgagatacaagtagaacgcagtatttaagcaaaaggcattcaaattattattcttgtagtgcccccatcatcaggccatggggatggcgtgaggagcattgggtcctcagagcctgggcttttacatttcttagactttcttccccagaaaacttgaagagaggaaggttctttgcttcaaatctgacaaatctccattcagaaggaagagtgtgggtggttatcctgatttttcagccttatttctgagttaattcattggtccagatgtgctgttaatatgtttctcactttaaccctgataatgcctttccccctgcctgctgctttcattcttcagtcttggtatttgtcactcatttcaccttttacatcaatttcttggtagataagtgacagaattcttcttttttttttgacagagtcttgctctgtcgcccaggctggagtgcagtggcacgatctcggctcactgcaagctccgcctcccgggttcatgccattctcctgcctcagcctcctgagtagctgggactacaggcacccgccaccatgcccagcaaattttttgtatttttagtagagacagggttttgccatgttggccaggttggtctcaaacccctgacctcaggtgatccacccgccttgccctcccaaagtgctgggattacaggcatgagtcactgctcctggccccagaattctttatgtgagaaggagtttctgtgattttaactgctattgtaatagaaaccagttgattctgaagag

SEQ ID NO: 1118 - DNA, 2300 bp, Homo sapien
gttctgtcacccaggctggagtgcagtagtgcaaacatggctcactgcaccctccacctcctgggctcaagcaatcttcccaccttaaccttcctagtagctgggggccagaggtgcacaccacaatgctcagctggttgttgttttttttaatttttatttatttttgttaaaaaagtaaataaacaaaagagtggctatttcataacagaacagcctttttaaaaattattttttatggagatgggggtctcactatgttgcccaggctggtctcaaactcctgggctaaagtgttcctcctgcctttgcctcccaatgtgctggggttactggcatgagccactgtgctcggcctaagaagcctttaagaacctatctgagtgaggaggggatcatatagatcaacctgagatggcccccacccccactgttcattcaggactaatgacactgcaagtcccaaagagaaagagacgccaagaggaggaatcccaggcagagagaggcaaaatctcggaggctgttggacaggcagggaaaggctccacctccactctctctagaaccgccctgcttgacagcaggcagggtggggttgggtggctggctgtgagtgtgactcaggtttctgtgggcagccaagggcagccggcagggaggagcccagaccgacagaccggctggccaactgcagctttcacctcagctgtcctctgtcctgggaatgcagagggctcttgtctagctgagctggcccttgggggctagttgactcctgctttcctcccccaaccccaaccaaccctcaagttccttcccagagccctcggcccttggctccctcccctgtggcattacacaggatggagagtgaggggtcactgcctctagggaggaaacagaatgtctggggaaaagggtataataatgattggtcctgcaccctgagggagggactgggggaaccctgggcaccagcttgcagcctcagcggccccccagccctccctagcctggctggctcgtgtctggacaggctggttgtcatggtgagggctaggggccagaatgcagctgctacagtcaggctaccaggcctaagtgaacagagagtgctcagggaccccccagcccagcttcctcagagttgaccagctgagagaccgcgggagctgaaaccaaagagctgtggtcagggactatagacttccccttggtgatgggtgagagttcagccagcacattcccttcgtgtttctggtgcctgtttgttggcttgtttttggagggtggctggaagggaatacacgtttcttttatgccttttatgcgcccaagtgctgggcatgcgtggctcaccagtctttacaacaactgagagagatttagcaacttgcctaaaatggcaaagctgggattagaactcagaactgacggccacgacagttagtgatctttgttttctgggaaccaggcagtgtagctgttctagggggagggagggggagaaagtgacttgaactttacctaaaagactggatattccatcacgaggccacaggtggtagaaggcaggtgctggcatcatttggggtttggcagtctgaagagaaagacactagcgaaatgcttggcacatagtaggtcattaaatatttttctaatgaagaagccaattctgtgtgagtcattgctagttttctgggacatcttgggagcttctggagctgaatcgcaacagcggaagacgctagctcgaaagagggactttccaagaccaaccccggcgagagaggaatttgtggagcatcatctctgagccgggcgcggggggagggggacaaggaggaagcgtgtgtgtgacccaggattaccgaaggctgcggacgccacccagcggccaggatgctgcccagcgcaagctgggctctaccaggcaggcgcgcgcggagcactccgggagttgtagttgactgtgttaagaggcggtgctgccaaaggggctgttgggtgttgtagtctgacgtttgttgggcgggagttgcccacgtcggccggaccactagtcccgtggtgccccgcgggaggccgcgcaggcgcagtgagtcagtgccggtcggtcttgtgggctgaggggcagcggcttaggctccggcgtctgcaggggtcgccgagctaacccgtggctaggcgagtggggcggggcggccggcaccatgtcgaggcaggcgaaccgtggcaccgagagcaagaaaatggtaacttggagcgcgtgacctcggcgggcggggcgaaat

SEQ ID NO: 1119 - DNA, 2300 bp, Homo sapien
aaaaccccataatcttcaacagctccccatgcttgtttccaagcatttggcattcaagtcctcctacgtgggctgtccctggcctatctgttcatttttagctgccatttccacctccactattccttttgtttgtttggctgtttgtttgttttgttgtggcagggtctcattctgttgctcaggctgaagtgcagtggcatgatcttggctcactgcaacctccgcctctggggttcaaacgattctcctgcctcagcctctggagtagctgggattacaggcacccaccaccacacctggctaacttttgtatttttggcagagacagggtttcaccatgttggccaggctgatctcgaactcctgacttcaaggatcctcccaccttggcctcccaaattgctgggattacagtgtgagccaccacagccagccactagtcttgagccgtagccaatgtgggtatctcgcgactcccatccatccatccatccatctccatccctgcagtaatctcaagacaaggggtgggaggtgggagaagaaccattccagagggctctctccccatacgtgttcctgaattctcctgagtctggtcactgcctgagtcaggtctggcctgtccagctctggaagaggcaggctgtgaggcccctgacctcacaaaggactgtcatgaactccgtcatccccgcagtccccccaccctgcagataagatgactgacacaaagatgggggatctgctcctcgtccttccacttttactcatcaatgccttcatcaccattatacttgtttactgagcacttcctagatgccaggttctgtgctcagcacttcatttccattgccttatttaatctttacaaagaccccaagatacctcatggcactactatttttctgattttgtaggagagcaaattagattttagaaaagttaagtcactagctcaaggttactggctccagttgccgcccttctatcatcatccttttctaatgtttttgggccagaggggacactattcccttcccaggccttcccaagagtgtccaagcccccagatacgcacacatcccaggacaggctgctcccaggttgcctgagcccctgacccttttgtttcccactctatccctccaaatggccgctttctggagctgcttaaaggaaggagaaactggagggaaggggggcaagggggacagtatctcactgggcctaatctctggacaatgaagaactagagaactgaccttctagaagtcaggacaaagggcagggccagggtgggcagggcacagctgcccctcctcctcccccgcaacccaagtccctgcagcagcaccaccatcatccatccaccttcccagcaagctccccactctgccccgggctgggcctggcttggcttgaagccctcacctcagctggcaccaacaagggggctgggagtccattctggagggctgggaagcagggctactttggggagtggattctggagggggtcaccaccccctcatcgacagaccactgggagaaaatccttctggggtgattggcggggtcgtctggtgggggtgggggaggtccagggctaggaccacccagtttggagccgggagggacccagcagattagagacctgggtaaggcagctgcgcagggctgtaattacccccagaggagcagggaagacacaagcgcagaatgccggagcaagggcggcagcaaggctcccagacctgtccccagcccagccatcagcaggggagagaaagcgaaaccctttcaggggtctccttgtgactctccttcatgcctcccgacgtcccccgggccgctttggtttaggtgggtttgagcgagaatttggactcgaagctgccctctcagccccagtgccagagcccccaaactccagggtgggaaaggggagtcccagccctgctccccctctcccccagtccccgcggcgggtgagtcacccgagcgctccctacttagtcctcaggcgctgcggcgcgtaccaagacgcggacgcagggggaggcagctagcgcggcgaactcctggagccgtggagcccgctcggccgtggccgtgggagaggcgccgggaggctgcgggcgcggggctccggggcgggggcggcgcgaacggcgcggacggcgcgggcgcggggggctgggtcccggggcgctgctggggtggacccccccgcctcgaacttggtacgcgccagcgagaggccaggcccagcccgggcggtacaatagggttgg

SEQ ID NO: 1120 - DNA, 2300 bp, Homo sapien
accagcctggccaacatggtgaaacgccgtctctactaaaaatacaaaaattagctgggcgtggtggcaggtgcctgtaatcccagctacttgggaggctgaggcaggataatcacttgaacttggaaggcagaggttgcagtgagccgagatcgtgccaatgcactccagcctgggcaacagagcaaggctctgtcttgaaaaaaaaaaaaaaaggccgggcgcggtgggcagtggctcacgcctgtaatcccagcacttcgggaggctgaggcgggcggatcatgaggtcaggaaattgagaccatcctggctaacaccgtgaaaccccgtctctactaaaaatacaaaaaattagccaggcgtggtggcgggcgcctgtagtcccagttactcgggaagctgaggcaggagaatggggtgaacccaggaggcggagcttgcggtgagcccagattgcgccactgcactccagccggggtgacagagcgagactccgtctcaaaaaaaaaaaaaaagaaaaatgtttccttagatgaagcttcccacagatgccggccctgctccctaagcaagttggtagctgtgttcccattgatctcctcagtgcctggatggtagcagcagatggcaccagggctcaacatacagaagcttctgtttgggagaccaggaggcttcataagaccaacagggagtgctgtttgctggctggcatgtggatagtgccaggcaccttgctgacattccctactagcttgggcttgttatccccattttacaggtatcaaaactgaggctgagccaggcatgggcctgtaatcccagctacttgggagactgaggcagaaggatctcttgaactcaggagtttgaatccagcctgggccacatagcaagaccctatctcttaaaaaataaaaatttaaaaaaagagacttaaaggaactaactagacccttgaaaaattcactagcagcaagtagacttggggggaaacaaaacaaaacaaaacaaaaaaacctgaggctgagagaggttgactggcttgtccatggttgtctgctggggaaacaagccctctcttcccatcttcctcatctgactgactctgaagcctgtctctcaattgccccacatgtgtatatgtcaaatcgtgtggctcccttacttcacttcgatgtcttttacaggattcctacaatagtcatgtcttaaaagcagaaatttcggtgtggcttggggaaaaaagattataaagtggacgtagcttgttgccaatggaatcttcacagcaaagcattccactagagcccatacttacgtccttcctcttggtcagtcccatgtgcccagcactggcaccctctgtgaacagaccttgggttgggcacagtcacccagaagtaaagcagaaaggagagggaggcagacatggaaacaatcagtgcatttggtgcacgaataagtgctacaagcttgttctcagcttttccaacacaccctgctccattctgccccttcgcatatactcttctctgccaacacctctcctccttgctttgctgactccagcttatccttcggatctcagcttggttgttacttcttcagcaagccctccccatataggttaactatctctgctttgctgccccagacatagtatttattctctactgtagttgcctagctatttgtctgtctgccctgctagagggtaagcgccacagaggcagggatcatggctattttctcaccattatatcatgagtatctggaacagggcccggcacatagaaataactcaaacataagtgaatgaagaagtcggttgaacaagggagagggccacatatggggctgatggcacagatgagcaatctgacctctctcctctcttgtgttggtctttcagctgtggtcgccaggacccccccagagccaagaccttctccagaaggtgacccttcccccccaccaccaccaatgtcagccctggtccccgacactcccccggacacccctcctgccatgaagaatgccactagctctaagcagctcccactggaaccagagagcccctcagggcaggtcgggcctaggccagcccccccgcaggaagagtccccttcctctgaagcaaagagcagaggacccaccccaccagccatgggcccacgggatgccagacctcctcgaaggagcagccagccatctccaacagcagtgccagcctccgacagccctcccaccaagcaaggtgtgtgtaatgaccccggcctgggcctaaacctctt

SEQ ID NO: 1121 - DNA, 2300 bp, Homo sapien
gtgcccagcactggcaccctctgtgaacagaccttgggttgggcacagtcacccagaagtaaagcagaaaggagagggaggcagacatggaaacaatcagtgcatttggtgcacgaataagtgctacaagcttgttctcagcttttccaacacaccctgctccattctgccccttcgcatatactcttctctgccaacacctctcctccttgctttgctgactccagcttatccttcggatctcagcttggttgttacttcttcagcaagccctccccatataggttaactatctctgctttgctgccccagacatagtatttattctctactgtagttgcctagctatttgtctgtctgccctgctagagggtaagcgccacagaggcagggatcatggctattttctcaccattatatcatgagtatctggaacagggcccggcacatagaaataactcaaacataagtgaatgaagaagtcggttgaacaagggagagggccacatatggggctgatggcacagatgagcaatctgacctctctcctctcttgtgttggtctttcagctgtggtcgccaggacccccccagagccaagaccttctccagaaggtgacccttcccccccaccaccaccaatgtcagccctggtccccgacactcccccggacacccctcctgccatgaagaatgccactagctctaagcagctcccactggaaccagagagcccctcagggcaggtcgggcctaggccagcccccccgcaggaagagtccccttcctctgaagcaaagagcagaggacccaccccaccagccatgggcccacgggatgccagacctcctcgaaggagcagccagccatctccaacagcagtgccagcctccgacagccctcccaccaagcaaggtgtgtgtaatgaccccggcctgggcctaaacctcttggctcagggtcctggccctggatcatgccaactgaaagagtcctgtttgccctagaggagataaagaaaggatggggtgaggcccggagggagggatctgaggctgactcctctttggggacagccttttgacctgtctgttcttgttccctctgctcagaggtgaagaaggcaggagagagacacaagctggcaaaggagcggcgagaagagcgggccaagtacctgggtgagtgagcaggaagcctcatcatcttcttcatcgtcatcatcagcatcctattaataacaccaacaggctggggcgcagtggctcacgcctgtaatcccagcactttgggaggccgaggcgggcgaatcacctgaggtcaggagtttgagactagcctgaccaatgtggagaaaccctgtctctactaaaaatacaaaaaattagccaggcatggtggcacatccctgtaatcccagctactcgggagactgagataggagaactgcttgaacctgggaggcggaggttgtggtgagccgagattgtgccattgcactccagtctgggcaacaagagcaaaactccgtctcaaaaaaaaaaaaaaaaaaaaaaaaccaacacttctgcaacacttaattatgtgcactgtgctaagagcaggacacacatctaatttaatcctcaacccattttgaggaggaaacagaggctcagagagatgaaatcatttgcttaagccacacagctagtagagtagctgacattcagacccagaagcctcctgccaccccaaatcccatgctcttaatcacagtatgtggacatctgtctggtaggccccccaggtcagatggggatcttgcactcaagcattcatttctccttcagccctgagagcccataaggccaatggaggagaaataggcctctcctgagtcctgtcttcagtaagcctctcaatttgagggggttgtctcagactgaaagctccacctaagcaggcgggagaaagacccacccagggcatgggtagcagggctggccacttggaggaaatgtccttggcccaggccttctgcagaacccttcacacacgccactgggctcctttgtccacagcggccaagaaggcagtgtggctggagaaggaggagaaggccaaggcgctgcgggagaagcagctccaggagcgccggcgccggctggaggagcaacgtcttaaagccgagcaacgccgtgcagccctggaggaacggcagcggcagaagctcgagaaaaacaaggtgcgggatgggtctccgtgaatccatgtacacgtgtgctcaccgtctgcatactggtgcagtgtgtacacac

SEQ ID NO: 1122 - DNA, 2300 bp, Homo sapien
tgcacacatgtgtgcatgccgaagtatctgccactctatatgcctgtgtctgcatgtctttttgtgattctggatgaacacgtggatttgtgcaagtgactgtgactgtgtaggtcctgtttaggagggtttttgcatttatcccagtacgggggtgttgtatccaaacgtcttggctgggcagtgtcagcaagtgctaatgctgggtggttatggggaggggttgcagtactcagccgtaaggaatggcttccttggtctggccaggaaagctgtagtttctctagttttactcatctcctccctttgttccttctccgtcggctcccccaacccaggttgtctctggtcacctacccccccaccctccctctcccagggccaaggctgcctcctgctcctcatcctagcctgcccactcctccctctcccaccccgccctcggagcatcctgcatggaaggcctcggtgccccccactggctcctgccgggcccggccctaatgccgtgtcttttccccctccaggtgggagcaggtgctccgtgtcggcagttaacctgcccaaacacgtggactctataatcaacaagcggctctcaaagtcctctgccacgctctggaactcccccagtagaagtaagagaaggcccagcccttccccctccagagccccttgtagctcccaccaagcctcctccagagctcagcaagaacaccaggtccctggagccctcacatactccaggtccccatccccactctaccttacccagggctctgtgcccctcgggggagccggcatatgggtctggaccctgaggacagaggttgccctgtaggagaggagaacagagacaaagcacaatgccgcagagggcaggaagcctggcaggagcctcaagagcaagttggaggtggtggctgggggtggggacaggcaggcagccttttctgcaaccacagccagctggtctgggccaaccttagccaggtggcattgtccccatgtgtcagactggcctgggtgctgtggggtggaggggtccctcattctggctccaccctagagggcccatgcaatcctgccctctctgtcttcagagccccagtcatggccttggctggtcccagagttgagccaaccaaggtggcatagcccctgcattcccaccatgccctggtgctcatatgtgaaggagccatggtgggagttatttataagtttctcttgcatttgtttggctgctttgttgcctagcaaccaaatcagctgctgtaccaaccccacctgactgaggcttaaaaatagcccagcagctgaggggacagagcagggtggcctagggcaggcaggcaccctagcagcctctccctggcacaggactgctaaaagctgggtcagaggagcacaaggaccctcactgtcctgaatccatgggacagcctcggctgggtcagccctctgacagcaggaggggcaagaccttacactgggacatggcagagggcaattgggttttcttccaatcctggatggctccttcctatatgcgccgttcagggccccttcacctggggagcgttgtaggcggggaccctcatccgatgcaggatgttgccctgggaagtgtctggttgcctgggtctgtagtggaagtccagatcatagggaggacaagtgtggccccggtgtgattgtggggagaggactcccgggtgagaagccttggccttggcatggggatggtgcctggtctgctcccttgcctcttcctgcctcctacggcccccacggtgaccggcttcgcctggccttctacccccagatcgcagcctgcagctgagcgcatgggagagcagcatcgtggatcgtctgatgacgcccactctctccttccttgctcggagtcgcagcgcggtcacactgccccgcaacggccgggaccagggtaggggctgcgaccctgggagaggccccacgtggggccgggcaggggccagcctggcgcgcgggccgcaacccgaccgcactcatccctctgcagccgtgccggtgtgcccgcgctcggcctccgccagccccctgacgccgtgcagcgtcacccgaagcgtgcaccgctgcgcccccgccggtgagcgcggggagcgccgcaagcccaacgccgggggcagccccgctccggtgcgccgccggccggaggcctcgccggtgagtggctctactggctcgagtggccgcgcaggtggggacaggcagcctggaactggggtacgcgggcgctgctgacctctactctc

SEQ ID NO: 1123 - DNA, 2300 bp, Homo sapien
attgtccccatgtgtcagactggcctgggtgctgtggggtggaggggtccctcattctggctccaccctagagggcccatgcaatcctgccctctctgtcttcagagccccagtcatggccttggctggtcccagagttgagccaaccaaggtggcatagcccctgcattcccaccatgccctggtgctcatatgtgaaggagccatggtgggagttatttataagtttctcttgcatttgtttggctgctttgttgcctagcaaccaaatcagctgctgtaccaaccccacctgactgaggcttaaaaatagcccagcagctgaggggacagagcagggtggcctagggcaggcaggcaccctagcagcctctccctggcacaggactgctaaaagctgggtcagaggagcacaaggaccctcactgtcctgaatccatgggacagcctcggctgggtcagccctctgacagcaggaggggcaagaccttacactgggacatggcagagggcaattgggttttcttccaatcctggatggctccttcctatatgcgccgttcagggccccttcacctggggagcgttgtaggcggggaccctcatccgatgcaggatgttgccctgggaagtgtctggttgcctgggtctgtagtggaagtccagatcatagggaggacaagtgtggccccggtgtgattgtggggagaggactcccgggtgagaagccttggccttggcatggggatggtgcctggtctgctcccttgcctcttcctgcctcctacggcccccacggtgaccggcttcgcctggccttctacccccagatcgcagcctgcagctgagcgcatgggagagcagcatcgtggatcgtctgatgacgcccactctctccttccttgctcggagtcgcagcgcggtcacactgccccgcaacggccgggaccagggtaggggctgcgaccctgggagaggccccacgtggggccgggcaggggccagcctggcgcgcgggccgcaacccgaccgcactcatccctctgcagccgtgccggtgtgcccgcgctcggcctccgccagccccctgacgccgtgcagcgtcacccgaagcgtgcaccgctgcgcccccgccggtgagcgcggggagcgccgcaagcccaacgccgggggcagccccgctccggtgcgccgccggccggaggcctcgccggtgagtggctctactggctcgagtggccgcgcaggtggggacaggcagcctggaactggggtacgcgggcgctgctgacctctactctcctcttccgttcctccttccctgccaggtgcagaaaaaggagaagaaggacaaggagcgggaaaacgagaaggagaagagtgccctagcccgggagcgcagcctcaagaagcgccagtcgctgcccgcctccccacgtgcccgcctctctgccagcaccgcctctgagctcaggtgggcgcgggcggtgcgagggaccctgcccctcaccgggtcatttattcatcacccacaaatatttgttgggcaaccacctctagaatgcaacttccctgagggcagattctctctgttttgtttgagacaggatctccctctgtcacccaggctggagtgcagtggcacaatctcggctcactgcagccttgacctcccaggctcaggctatcctcccacctcagccttccaagtggctggggctacaggcgcgccaccacgctcggctaattttttgtatttttggtagagtgggggtttcgctacgttgtccaggctgatcttgaactcttgagcttaggtgatccacccgccttggcctcccaaagtgctgggattacatgtgtgagtgtaagccaccccgcccagcctccatttttctttttgttcgtttttgtttttgtttttttaagtgttttggttactgaagtaccccaacacctaaaatagtgcctggcacctggtaaccactcagtgaatacctactgaagggccagggtagtgcctcacgcccgtaatcccagcactttgggaggccaaggggaggattgcttgagcccaggaggtcgaggctgtagtgagctatgtatgatgatgccactgcactccagcctgggggtcagccagattctgtcttaaaaacaacaacaacaacaacaacaaaacctgctgaatgaatggacctgtcaggtagcactcagggtgctgaggacacgttgctgagctaacccaagcatggttttttctcttattaagcttacaggctattggcgggggacataca

SEQ ID NO: 1124 - DNA, 2300 bp, Homo sapien
gtgcaccgctgcgcccccgccggtgagcgcggggagcgccgcaagcccaacgccgggggcagccccgctccggtgcgccgccggccggaggcctcgccggtgagtggctctactggctcgagtggccgcgcaggtggggacaggcagcctggaactggggtacgcgggcgctgctgacctctactctcctcttccgttcctccttccctgccaggtgcagaaaaaggagaagaaggacaaggagcgggaaaacgagaaggagaagagtgccctagcccgggagcgcagcctcaagaagcgccagtcgctgcccgcctccccacgtgcccgcctctctgccagcaccgcctctgagctcaggtgggcgcgggcggtgcgagggaccctgcccctcaccgggtcatttattcatcacccacaaatatttgttgggcaaccacctctagaatgcaacttccctgagggcagattctctctgttttgtttgagacaggatctccctctgtcacccaggctggagtgcagtggcacaatctcggctcactgcagccttgacctcccaggctcaggctatcctcccacctcagccttccaagtggctggggctacaggcgcgccaccacgctcggctaattttttgtatttttggtagagtgggggtttcgctacgttgtccaggctgatcttgaactcttgagcttaggtgatccacccgccttggcctcccaaagtgctgggattacatgtgtgagtgtaagccaccccgcccagcctccatttttctttttgttcgtttttgtttttgtttttttaagtgttttggttactgaagtaccccaacacctaaaatagtgcctggcacctggtaaccactcagtgaatacctactgaagggccagggtagtgcctcacgcccgtaatcccagcactttgggaggccaaggggaggattgcttgagcccaggaggtcgaggctgtagtgagctatgtatgatgatgccactgcactccagcctgggggtcagccagattctgtcttaaaaacaacaacaacaacaacaacaaaacctgctgaatgaatggacctgtcaggtagcactcagggtgctgaggacacgttgctgagctaacccaagcatggttttttctcttattaagcttacaggctattggcgggggacatacaataatcaaagaatcccacagaaacatgtcattacaaactggggtgtatgctctaaaagggaatggtgtgtttctgtgagagcaagggggcggggggcggcgctgatgtagcctgggggagggggcacctcccagaggaaggaacaagttctcagcgtgtgggtgtgtgtgtctcctaacccttcccttttcccttttctcttagccccaaatccaaggccaggccatcctctccctccacatcctggcacaggcctgcctccccctgccccagcccagggccaggccacactctgcctccaaagccaccgtccccccgaggcaccactgcatcccccaaggggcgggttcggaggaaggaggaggcaaaggagagccccagcgccgcagggcccgaggacaagagccagagcaagcgcagggccagtaacgagaaggagtcagcagccccagcctcaccggcaccttcgccggcgccctcgcccaccccagccccgccccagaaggagcagccccccgcggagacccctacaggtaggaatgaagagaggggaggggtgggccgagcgagagaagccagcttctcctgtgtgggggtgtgggccgccagagatgcctgaggactgggagtgggacatggaaagaggagactcctgccctcagcagtcccaggcccagaacacaggccgctgggagatgacggcggtgtctgcgtgggtgtgctgacgcctgatcccggatccccctccagacgctgctgtcttgacctcacccccagcccctgctcccccggtgacccctagcaaaccaatggccggcaccacagaccgagaagaagccactcggctcttggctgagaagcggcgccaggcccgggagcagcgggagcgcgaggagcaggagcggaggctgcaggcagaaagggacaagtgagtgcgcctcggggactgagggggccctcgtgggcgctggagaagaagcagaggccgagcctgagccgtttgctccgtcccccaggcgaatgcgagaggagcagctggcacgggaggccgaggcccgggcggagcgggaggcggaggcccggaggcgggaggagcaggaggcacgagagaagg

SEQ ID NO: 1125 - DNA, 2300 bp, Homo sapien
atctttgctttattgtggtgttctggaactgaacctgcaatatttgagatatgcctgtatttctttttttcttttctttttttttgagacggagtcttgctctgtcgcccaggctggagtgcagtggcatgatctcggctcactgcaacctccacctcctgggttcaagcgattctcctgtctcagcctcctgagtagctgggattacaggtgcccaccaccacgcccggctaatctgtagtatttttagtagagaacgggtttcgccatgttggctgggctgatcacgaactcctgacctcaggtgagctgcccgcctcggttctcccaaagcgttgggattaccggcgtgagccaccgcgcccggcctatgcctgtatttcttaaaaggggagccaaaattatgtattttggtatccatctagtttactaccgtgttcccagtattttacactgggcattgtatacagtagacacccagaaaatctttgaatttaaaattacattggttcagccccgtggctcacgcctgtaatcccagcactttggaaggccgaggcaggtggatcacttgaggtcaggagtctgataccagcttggccaacgtggcgaaaccccgtctccacaaaaagtagaaaaattagccgggtggtggcatatgcccgtaaaatcagctactcaggaggcttaggcaggagaatcgcttgaacctgggaggcagatgttgcagtgacccaaaatcgcaccactgccctccagcctgggcgacatagggagaatctcaataaataaataaataaataaataaaaataaaatcaattaaattagaacgttttaagaagcactgcgcagtacgtcgaccacaagaagtgctcaaagaaggaagaaagagtaagccgtgtgcaaggaatgctgccgaagccactaagggcaagggctgatgtggcgtggtctgctacttgagttgagccttgcagcttttctcttaggaagagcattagatttctttattaattgatgtgtactgtgtctacttttctctggaggtgcagaaatccatcaaaactgatctcggctctcaaagagctcacagtcttgtcggggaaggccccgatacttacagagtaagatgcaaacttactgtgggaacacaggcatagggaggagctagtcaactttgaaagcatcacagatgacctatgagatgggtcttaaatgttcagagacactagagcagaaattccggaggaaaccagcctgtgcaaaactgataaacgcagagattctcaaatttgtaggtgggtaagaatcacccgagagatcggtttaaaatgtagactgcagggagacactccccggtaaacttttggttcaataccccagtagcacccattttaacaaacttcccaggacgacagtcagaaaatcatagttacagaaggcaggctggggagaggcggtttctgggtctccgaatgaggtcacacaattaaaattaaaaaaacgaaaccaaaccaacccctccatttgcgttgcgctttcagggtgcttgaggctttcctgtgccttactttgtcggagcctggcaacatcgctgtggggtagaaattacaagtctcatttcacaggggaggaaacaagtttagagaggagggatgaatttgctcaaggtcacaaagcggaagggagcgcagcagagaccaaaaacagggagactcgacttccaactcggaagcttttcaacaaggcaagctggcccggagtgggtggggctcagactctccctccaggctggttccaaaatggtgggggcagtggcgtcagcaacgcccccgccccttccgtccaccgccctcctccatctccaggccacccaggcggggggaggggacggccccgagcaacccacgtgaccgccgacaaccgagcgcgtgacgcaaagcggcgggcccaacgctcgccttgtcttttgggaaacgtagttctgatggcagccaagtcggccaggagaggagggcgtaggactacatttcccaggaggcagcgggtctacgccgtcgccgtcgtcggagagcggagacgctgggcgcgctgtggggcgggggcgaggttcgggctggttgttccgttgcgagctgcagctgcgatctctgtggtaggcccaggtgagtgagcgcctctgatggaagttagggcagcttaaccggctctagtggtttcgtctcttatcttttttccccagctgctggtcaggggctcggggaaggcctggcgtggagtcgctccccccagcttacac

SEQ ID NO: 1126 - DNA, 2300 bp, Homo sapien
gtacatgcagttttccatccttagatttcacagaagagtttccgaatttcctttgtcatttatgtatcaccattttcatattaactaattaaactctacctctcagcccacaatggacatgttcagaatgcagagagaatgctgttacctctatgctgaaagtaaacaatttggggacaattttactgaacctcttagctctggagtatgcatatatataactttgagtttctgttctttaaaaacaatgctgggtgtggtggctcacagctgtaatcccagcactttgggaggccgaggcgggcaaatcacctgaggttaggagaccaagaccagcctgaccaacatggagaaaccctgtctctactaaaaacacaaaattagccaggcgtggtggcgcatccctgtaatcccagatactggggaggctgaggcaggagaatcgcttgaacctgggaggtggaggttgcgtgccattgcactccagcttgggcaataagagtgaaactccatctcaaaacaaaaagcagctaggtaggggccgggcatggtggctcatacctgtaattccaacacttcaggaggctgaggcaggtggatcatctgaggtcaggagttcaagaccatcctagccagcatggtgaaatcctgtctctacgtaaaatacaaaaatcagctgggcgtgttggcaagcacctgtaatcgcagctacttggaaggctgaggcaggagaatcgcttgaacccaggaggcagaggttgcagttagccaaaattgctccactgcactccaggctgggtggcaggagtgaaacttcatctcaaaaaaaaaaaaaaaaaaaaggctgggcgcgatggctcatgcctgtaatcccagcactttgggaggccaaggcaggcagatcacttgaggtcaggagttcaagatcagcctggccaacatggtgaaaccccctctctactaaaaatacaaaagttagccaggcattgtggcgggcgcctgtaatcccagctacttgggagtctgaggccggagaattgcttgaacctgggaggtagaggttgcagtgacccaagatcatgccactgcacttcagcctgggtgacaaaatgagactgtctgaaaacaaaacaaacaaacaaaaaaaaacaactaggtaggaaataggttttttttgtgtgtgtgtgtgtttttggagacaaccttgctttgtcacccaggcctcagtacagtggcatgaacatagctgactgtagcctcaaactcctgagcttaagtgatcttcctacatcagactcctgagtaactgggactgcaggtgtgtaccaccatgcctggtgatttagcaaaatttttttttcttttttttaatagagacgggtttcaccgtgttagccaggatggtctggatctcctgacctcgtgatccactcatctcggcctcccaaagtgctgggattacaggtgtgagccaccgcgcccggcgatttagcaaattttttgtagagacagggtctcgttttgttgcccagggtagtcttaaactcctgacctccagccatctgcccacctcagcttcctcagagtgctaggattatatgggtaaaacatcgtgctcagcctgaactagaatttagattaagtaccacatttgatgttacttgatttttctgtttgtgggaaatttggaaattaggcattaagtacttgcctatgagtgctaggcatttattggaatggaaatatgtggtatgaaaaatcttttttgattcgtatcattttcagatttaattcctatccagattatttttttaggggtagactaatttattgcttagattggggcttcaagtgttgccttcaggatactggatatttatgatgagtgagctaaagcttgtttagtgtctattttggggctatggtaggcagatctcttcccactggttagtgttattacagctgttgtgatgatctcattgaatgtagctaaaatggacttttagtcagcaacacttttagaagatttagtgtaatgagtgagcttttcgggcttttgttttgtttcgtttttttggagacaaggtcttatttcattgcccaggctggagtgcagtggtgcagtcatagcttactactgcccctcaaactcctgggcttgaaaggtgactcctgatcctgagaggatcgagtgatccttccacctcagcttcacaagtaagtagctgggactgtaggtgcatgccaccatgcccgactgttctttctttctttctttattgtttaattattattattat

SEQ ID NO: 1127 - DNA, 2300 bp, Homo sapien
actcctccaggtgccctcatctgctcactagaatgtcagttccaggcatgaagggacttttaaattattgaacctccagtgtttagaatagtgcctggcatgtagtcagtacttaataaattatttgttgaataagtggacaattagtaatgtgtagaagggaagagggtctattgtggagtctccttgctaatacactgctgtttggccaaaggaggttcaggagatagaggctgacaagtatgcctgtggctggccagatgacatgcaggacaggctaggcaggaggagggcaactgtggtggcagggggtgactcagggtttcaggtgtctcttcgctgtcacagagtaactaaaggccagagcctcagatttgcttattcactcatcgcaacaatggggaattgaagacttgttggaatgataaaattcttgccaatatccaagaagaggttaattaataggaaatatgatggagtaataaaatgggagatttatgtgtgtgtacttttgccatctggttagaattagagggaaagatggatgtattggaatagattgtgtttttttgttgttttgagacagagtctcgctctgtcacccacgctggagtgcaatggcacgatctcggcacactgcaacctctgcttcccgagttcaagggattctcctgcctcagcctcccgaatagctgggattacagccatgtgccaccatgcccggctactttttgtatttttagtagagacatggtttcaccatgttgtccaggctggtcttgaactctggacctcgtgatccgcccgcctcggcctcccaaagtgctgggattacaggcatgagccaccacgcccggcttggaataggttgttttttaaattcaacatgttacagcataagagcagtttgcagtcctgtagcagacatgggatttccctcactagctaggcagagctgactgatgtgagccctctgtgcctctggagtgaggaatcaggggaagaagttttggctgatgtaacctaggctgaattagaagaatacatagcgagaagacatgaaaaagtattttgagtgagttttttaaagtgctatatttgtacttacattaataaagaaacacataccgacattgttatttggtaaaggatctgaatactaagcctcatctggataaaacagtattatcctgttagtaatttttttttttcttgaggcgaagtctcactctgtcccccaggctggagtacagtggcgcgatctcggctcaccgcaagctccacctcctgggttcacgccactctcccacctcagcctcctgagtagctgagactacaggtgcctgctgccacgcctggctaattttgtttttgtatttttactagagacgggattccaccatattagccaggatgatctcgatctcctgacctcgtgatccgcccgccttggcctcccaaagtgctgggattataggcgtgagccactgcccctgtaataagaataacaacaaagttttgataaggcaggagtgaggacatctaattacctacatgagcttgctggtcttggaacttgtttttcctgtttgttttggaaaacgctggacatagctttgatgtatgaccatgttcatagatctgggaatagacaactggagcagaagggaatttttgtgcttttatgggtaggtacggagagttactttaccttgaaatgcatttgttaaattcattttaatatacttctgttcattgctttcttattttaaacatctgatttttgtcaggttcaccaggttgagttttgtggagcttgtgaattagtcttgcataatgaaaaccttagcacctgaaatattgccagtgaaagtatcaggttacagtaaggaaggcttttgctttccatactgtaggaggttagatgaatgaaaacctgtcagacagaggcagaccatctcatactttgagagaaaagcttgggtccttttggagtaaagctgagggctaaagtagggtttgtgtttatagattttgagcatcagtaacagaatctgcatttgggtagccattttatcactacttattttctctcatttcagaagtgtatgctgacttgtaaagtgaagaagccagtggtgctgcgggtgttcttttggggtagtgtctgggatccagtacgagttgaatcattgttcaaataaggtaaaagcatggtggtaaaagaaactaataacttcactaatttgtaaaaccaatcttacgttaagaattgattatttcgagaccagcctatgcaa

SEQ ID NO: 1128 - DNA, 2300 bp, Homo sapien
ctcagtgcactgtaactatggaaaagtatatacaaaatctctctcttctctttcttactggaatcttcaagtggagtgaagtgttaaaccttagtcactgctggttttaacacacccaacaaatgagaaagtattttaaaagataaactacagctgggtgcagtggctcacacttgtaatctcaacactttgggaggcagagacaggagcatcacttgagcccaggagttcaagactccatttcaatcaatcaatcaataaaaagatcagctagcatgaccagccaaggccattcagggaggtgatgtcatgaagcgggagtggggtgtggctggaatgctgttcacatagacttccagctgcctgagtagtttacaccaagtaaaaaaccagtcagccttggcctcccaactctttcctaaagttcaggggacaaggggtagatgtattgccttccttaaccctaaaattgtggccaggcacggtggctcatgcctgtaatcccagcactttgggaggctaaggcaggcagatcacctgaagtcaggggttcaagatcagcctggccaacatggtgtaacccagactctactaacaatacaaaaattagccaggtgtggtggcaggtgcgtgtaatcccaactactggggaggctaaggcaggagaatcgcttgaacctgagaagcagaggttgcagtgagttgagagtgcaccactgcacgccagcctgggtgacagagagagattctgggctgggtgcggtgctcacgcctgtaatcccagcactttgggaggccaaggtgggcggatcacgaggtcaggagatcgagaccatcctggctaacacggtgaaaccccatctctactaaaaatacaagaaattagctgggcgtggaggcctgtggtcccagctactcgggaggctgaggcaggagaatggcgtgaacccaggaggcggagcttgcggtgagtggagatcgcgccactgcactccagcctgggtgacagagggagaccccgtctcaaaaaaaaaaagaagagagagagagagactatctcaaaaatacaatacaatacaataaaattgctacgttatttgatggggaagggccgtactatagactttggcaacccagctaggaacgaagaagtggatccaggatggcttcacaggcaaagctatcttaaatacaagaaacagcattggacttgggggtgcagtgatgaacagagagtgagccagtcactaaggactgaagagatacttcatcaccccagggatactgccccccttcaaaagcacacaatcactctgtgacacatactctccagtgaacacaggtggacatgaaagtatcaccactgaagcttaagacagaagggggaatacagcagaatgtccccagggagaaaggctaggcgacaccacttaggccactaaagcactgaggatcaagaaggagcatatctcaccgtgcgaggtcctcatcaaaagagtccatccggacattgacctgtgcctctcgagtaatggaaaaggaagactttcctgtgggaaaatctcctttcgctcccagcttgtctcggctctcagaggtctttcttgggggaggtgatgagcttttctcctggactgctttataagcagtcactcggaaattcttctcaggcacaaagcccctgtgcccaccttcgcttctcttgccccgatcttcctttttggatctctctgggaaagactcctcctccagctcctctgtttttctctgcttttccttccctggaggtgcatataccaggccctcccatttgcctgacttctcctcctcctggtttttgtttgcacctatgactttagacataaatttgggttcatcatcaaactcagattcctttcttcccttagctttgtccttatcttgatcatccatctcctccttgtggaagtcagccatcttcttctcaaagtcatctcggagcttataccttttgggagactgactgccccgaaaaggcttctcagaatcagttttgggagcaaaagaatcagatttcatttttccatcacccaagcctgtgtcagagaagctccctttctcttttattttttctttatcggtatttgtttgtttctgttccttatcttttccattctctgtcttctgctcttctagatacctatttataaaaacacaagagagagacacaagaggcttcttaacagcatgctctaaaatagtgccttaccgtttttggtttttgattctctgaaaaaaacatgtcttatggattcctgtat

SEQ ID NO: 1129 - DNA, 2300 bp, Homo sapien
agaacaggtgaaatccttaacacaaagatttaaaatggttgaaaactgagaagccaatagcaaaatgacttttctagcatctctgtcttctcccctctaagtgatctcttatggaccttctggtgtgaatttcttccccaaagtattctatcatccccctgggcaaatggggttgggcaagttagggaatgactaagagaagtgatggagaagctgggttgggccagttgcaggttccatctgaatataaactcaagcaagagttggtgctgtgcttctgaggagaataagcttcaagtttctctgtcctaagacatgggagctacagtggaaatctagtgcccaatatgggaccgtgtttgaaccagccatttttccttcctcttctcagtatgtttgttgtgtggatttaactactttaggtgcatctctgtggttacgggttcctgcaaaagagttaaaacattgtgtctgcctttggtaacataatgtgtttctttgtttctttttttttttttttttttttttttgagacggagtcttgctctgttgcccaggctggagtgcagtggcgggatctcagctcactgcaaattcggcctcctgggttcacgacattcttctgcctcagcctccggagtagctgggactacaggcgcccgccaccatgcccactagttttttgtatttttagtagagacggggtttcaccgtgttagccaggatggtctcgatctcttgacctcgtgatctgcccacctcggcctccgaaagtggtgggattataggcttgagccaccatgcctggcccataatgtgtttcttttaatcccaacagagcatcactttgggtcctcaggaatgacattacatgaacgctttactaaatacctaaagagaggaactgagcaggaggcagccaaaaacaagaaaagcccagagatacacaggtaaggaccatggccttatactggaggttgtaataaaagactttgtatcagacattaaactcaccttgttaaattctgctgctaatgcacctttaatacaaaatttacagtaacatccttcagactctaagagagctataggcatttatatttgagagtgtacaggacatgctttgggacaacagtctctcacattgggcctgaggaaaacagctctcttgacatagattaactcctatattcttggaagctggcaaatgttgcctgaaattactgtgagtttctgtaggtagagtaaatgctagtttcttttcttgtcttttttttttttttttttgagatggagtgttgctctgccacccaggctggagtgcagtgatgcaatctcggctcactgcaacctctgcctcccaggttcaagcaattctcatgccttagcctcccaagtacctgggattacaaacgtgtgccaccatgcccagctgatttttgtatttttagtagagacagggtttcaccatgttggccagtctggtcttgaactctcaacctcaggtgacctgcccgcctcagcctcccaaagtgctgggattacaggcgtgagccactgcgcccagcctaatgctagtttctttaggtaagcctgtatattaatatttcatggtagtttaatcatgggtagttggattcttctggaagaatttgcctgggggctagaggcgggagcttgtaggattatctcacagaattttaaagcccagcaggtttaaagactattacatttggttgtgggagtcagttcagtggatagggactagaaacaaagttggccttatctttgaggctatgggtgagtccatctttctgtgtgtagcaaaaccaggagagaacaaaaacctctaacttctgttacactgtgggaacctgggactgtgtgtgtgtgtgtgtgtgtgtgtgtgtgtgtgtgtgtctgcctatgggagagtataagtatataagagtaaaagtaatagatacataagtcatgaaacgtaaggaaaaataatgcctgtgaatctattagccaacttaagagctagaatattaccagtatcatattcacacaatggaatactatatcgttttgtattttcaattttaggagaatagacatttcccccagtacattcagaaaacatggtttggctcatgatgaaatgaaaagtccccgggaacctggctacaaggtgaactgttgatttgatcagtaattccaacaaaatgagtgcgttgggcatgaacttgacagaaatgtgtttgtttaaattactctctacttaagtttgtgtttttcttttaaggatgggcata

SEQ ID NO: 1130 - DNA, 2300 bp, Homo sapien
tttgtctttttaaccttaagctgtttaagttgaagcattctcagatgtttggggggaaacatcctcttaaaatgggtccttgtgcttgccttctggggaggcggtcctgagcaggtgaatcataaggcatttatgcatatgttatatgcggactgcacccacctctcccccccagcctttgcctcttgcgttgttgtgctgctttccccttactttgctacatttctatagttaagttggttttacttgaatgattcatgtttagggggaaaatgaaaatctcccttaaaatttgtttcaactcctcctgcaaataaaataaatgaagtggcagatgtaaacgggttctgttcattgtcatcctgagtgtgtgtgtgtgttgagggtggtagataacttcccacggcagtttcagaaaacctgaaagacaaagggcctgtggggccttgcgcaggctgctggagtcccagacagacacagtccttcctgggaggagcattgtgtaccttggacaccccaggagaaacagattttttccactggtgtcataggcaaggactttggcttccttcatcatggtggtggggcagggatcaagggatgtggttagtaggctcagccttctacctgaaagagcctatcccacatggactggccatagggtgggccctaaccttcagactcctgccggctggggactcaactgtgagcagaaatcttggaagctggtaaaattcattctcccggcctaactcccagggaaaacctggaggtgttttctgaaaccaaactagacctctggccccaaagcaggggtctttgctgtgtccttcctatatgggggtagagagtgggtacggggccagagaggagtacgccttgaaggaaagcagactggaagtgtccactcaaagctattgctggtacaagggcagccacttcattcactcaaggccggtttagagcggttgctacttgctggggggccccaccctggtatgtgcctctccccaccttttcccctcaagccaaaagcttgtgagctggggaagggtgggcctggaaaggctctgtgcaaattgtagctgggagcctccgggcaaaagctgagggaaagggagaggcggctggcctaaaatttaggtgggcggaagaacctgtgacggagctgtgaccgctgcacaggccagagaccctggagtcctcctcaccccggggttgggggccggacctgctgagccgggccgccccctctccacacccactcccagcacctggcccgacctatcggctggcggctacgcctcctttaccctactgtcttgcctcaggtcgcaccctgcgcgggcccagtactcggccgtcagagggagctgccaggctctggagggcgccccggaaaccatgggtaagtgcggaggctttgaggtggcctctctctgcaaccgtggacatagcaagagcccacaccaccccccgacccccgctgccctctacggtgcttggggacacgcccgccctagccaggctgcccggctgggcctttctgagccgcacgccggccccgtcttccgcccgcagaagtcctcgtcctggccggataccgcgcgcagaaggaggacgagctgagtctggcgcccggggacgtggtccggcaggtgcgctgggtgcccgcgcggggctggcttcgcggagagtttgggggccgctatggcctcttccccgagcgcctggtgcaggtgaggccgagccaggggcgggctgtggggtctcagcgcgcgccccccgggagctgagagcgccttccccgtgccctgattcccaggagatcccagagaccctgcggggctccggagaggcgcggaggccgcgctgtgcgcgccgccgaggtgagcgcaagggcggggacgggcgccggtgggcgggtgcacggagccagtgcgaccccggcgtctccggctcttagtgacgggcgcggctctgggcgggacctcggggccgccctgcggtctgtgattggttctcgagtgcaatgctccgccctggggcggggctggagggaccaaaggctacgtgcgcgccttgcgcttcccccagctcctctgactggggcgtccgactggagctcagccgcgcttgtccggtgctaggtcatcctgccaaacacccgaggccccaaagatggtgcaaagtgaacttcagctacagcccagagcaggcggacgagctgaagctgcaagctggggagatcgtggaaatgataaaggaggtgaggggtgaggtgatgggaccgtttgggg

SEQ ID NO: 1131 - DNA, 2300 bp, Homo sapien
ctgttggaatgtccaggtgaaggtggtggtgacttgatctagagcacttagtggtggaggtggtgacaagtgattgacttcaggaaatatttggacagtagtgtggacaggatttgctgatggtttggatgtgtctcataaggaaataaaaggagtcatttgtcatccaaacaagtgggtaaatgagccagatggggactgtggggaaaggggtaggttcaaggggcatgggtttgggaagcaagagattggtttgggatatgttaagagtgtgatgcccatcagctctccaagtgtaaatattgagagggaagtcagatatgagtctggagtcagagaggaaggagctagagatgaaaatttgggagtcattgacttattgatgaaaattaaacccataagactgggtgagatctcttagagagtaaatgagagagaatataaagaattctgagagtgggctgggcgcgatggctcacacctgtaatgccagcactttgggaggcctgaggcaggctgggtcacttgaggtcaggagttcgagaccagcctggccaacatggtgaaaccccgtctctactaaaaatacaaaaattggccgggcgcagtggctcacacctgtaatcccagcactttgggaggccaaggcaggtggatcacgagatcaggagatgagaccatcatggctaacacggtgaaaccccatctctactaaaaatacaaaaagaaattagccgggtgtggtggagggcacctgtagtctcagctattcgggaggctgaggcagaagaatggcgtgaaccagggaggcagagcttgcagtgagccgagatcgcaccactgggcgacagaagcaagactccatctcaaataataataataataataataataataataataataataatacaaaaattagccgggtgcagtggcgcatagtcaaacaagattaacctcctgcccatagtcccctgcacacagcacaagacagggctagcgactgtcagatggatgagtgctccactcctctcttcccagctcctattaaggaaccaaaaaagttgatgcccaaaacatccctccccacagtcaagaagctagcaacagccaccactgggcccagcaaagccaagtaaggagcaggatggggttgggggaaggaggagggtaggaggcaacgcccctccctgtgccccaccctgagggcctgatgaagatatgttccaggacatctcggacacccagcagggacagtcagaagctcacctcccgagactcaggcaagggctgccttcctccagtgcggggaggactggaggacagggatggggtggctgtgcggagggacagaggtgggaagagactgagggtcagagtaggcttgggtccctgaggttctgctctcttaggccccaatggtggcttccaaagtgggggttcgtatcaccctggccgaaagcgatccaaaacccagactccccagcaacgctctgtgtccagtcaggtgaggggcgggagacatgggagagtggggatgctgggcagaggctggttcccagctgtggtgtgcacgggtgaagtctcccaggccaaggggaaccagactcaacctcagctgagacttcacctcccatcacggcaggaggaagagcacagcagcccggtaaaggccccctctgtgaagagaacccccatgccggacaagactgccaccccagagaggcccccagctccagagaacgcccccagctccaagaagatcccggctcctgacaaagtcccctccccagagaagaccctcactctaggggacaaggcctctatcccagggaactccacctcggggaagatcccagctcctgacaaagtccccaccccagagaagatggtgactccggaggacaaggcttctatcccagagaactccatcatcccagaggagaccctgactgtggacaaaccctccactccagagagggtcttttcagtggaagagtcccctgccctagaagccccacctatggataaagtccctaatccaaagatggcccctctgggggatgaggcccccactctagaaaaggtcttgaccccagagctttctgaagaagaggtgtccaccagagatgacattcaattccatcacttctcttcggaggaagccctgcagaaggtcaagtactttgtagccaaagaggatccatcatcccaggaggaggcccacacgccagaggcacccccaccccagcctccttcctcagagaggtgcctgggagagatgaaatgtaccctagtta

SEQ ID NO: 1132 - DNA, 2300 bp, Homo sapien
ctatgaaaatacactattggccggcatgatggctcacacttgtaatcccagcactttgggaggctgaggtgggtggatcacttgagcccaggagttcaagaccagcctgggcaacatggcaaaaccccatctctacaaaaattagccaggcatggtggtgcacgcctgtggtccctcccagctacttgggagaatgagatgggaggctcacttgagcccaggaggtaaaggttgtgaatgagctgagatagcacctctgtactccagcctgggtgacagagtgagaccctgtctcaaagaaaaaaaattaaatatatctattgtttaggaaataatgataagaaaaaaagtctgtacatgttcagcacagatgcaattttggttttgaatatttttgatgcaaagttggttaaacccacagatgctgtggactagactaggaagtgctaggcatacacagtatttgttgactagtggctgcacagatttatatacagacatacccgcccccacaacaatactcaaatacatcacattaatagacaaatatacagatgtgggcaaaaatacctgcccgcacattcacagaacacactaaacagtcacaaagacacccaggagtcccttttccatccccataggagtcagtcctagtcctcccccatctagatctgccctctacttgaacccagtctcgggactgggggagtaggggtctgcagcccggacagggagagggtcgctggcccacaggcctcaggcagcgccttcagctatgtctgcaatttcctctccccctttcctcctcctctctaaggctcccgccaaggcggcctccccctcattctagctccagcaagggaggggaggtccatgatgggggggccccgtggagacagggcagaaggaagccccccgccacacacactgatcacacaccacattgcatgcacaagcccaggtgggaaatgcgtgtgtgagcacaggcaggtttagccttggggtgggggacgggatggggtgggatctgccacaagccgccacaagctgcttggtgcacaagagcgcaggagctcgcaggcacagaggccccacgctggggtctgcgagactgctggccgggccctggctcaaagctggagtccaacaatcattaaccctgcgtgactagaccagagctcggccaggggacacattcaagcctgggccctggaaggaggggtggacagtcccctcccttccagtccagcatgggtctggggaagagaagcagctttgcctggaaggggcctcctaggagggggagcggtggtttctagctcaggctttaggatcagagagcagcagattcaaatcctgacggttttggtaaagtcaattcaatctctccaagactccgtttatttgatctgcgaagtggggataatggtatcacgtcgcagggttgtcaggcggagtaagtgaaagaacctgtccaaggtttagcccttggcccgcacgcaggcagagctccagcctctctgttgttgctgttagtggcctgggggcgggtccctgccgcggcctccccggcggtttcctgtgggggacggacggcccgcgggccgggctctccctcctcccggctgcccgctcctctccccttcctctcccagcccttttcctccccgcctccccgcccgccccgccccgccccgtccctcctctttcctcggaggaaactttccgccggctggtccctcggtccgtgtcccgcccgtgctgccgcggcctgggagcccagcggggccggaggggcggcgggacccgagcgggcgggggcggccggacccagtgtatgcggccgcgggacgcgctggggccgggcagccgggaagcggggcgctgacggtgagtgggcctggccccgggccggtgggtccccgcggggcggccgggcgaggagagaggcagcttcccttcccggagcccgcctggggcgtggaggctcagcgtccctatcctccatcccgccccgggacggcggaaccgggcctcagctggggacctcaccagggggcggggcctcccgcggtccccggcgctgctcccaggactggaggggcgtccgcgcccgggagaggggttccccccgacagggccccgggccgccacgaagttagggaagcgctctctccagggtggaacctgggcccgcggctcccgggagaggagctgcccgcggaaggggtcggggtgggctccaggctgggagaaggatctgactttgctgacctcgcaggctggtaggggagctgccc

SEQ ID NO: 1133 - DNA, 2300 bp, Homo sapien
cgtctcaaaaaaaaaaaaaagaaagaaagaaagaaaaagctcatcaacaaggccatcgagtccctgcacgggcagcccctgccactctcccctgcacccacacaccatctgcgtggctttcttcccttggagggaggtatcccaagcatgttcttactcctgcccagacactctccccagatcctggcacagctgcctcctccttaggattcaggtctcactgtggatgtccctgtgagagccactcccaggtgttgtccatcgcattaccctatcctgtcatgccccccagcacttagaagcatctgagattatcttctattgtttctccaatttagtgtcagctccatgagggcaaggatttgtgtctgttctgtttattgttaaatccccattaaaactattcctcagggctgggcgcggtggctcacgcccgtaatccctgcactttgggaggtcaaggcaggtggatcacgaggtcagcagatcgagaccatcctggctaacatggtgaaacccggtctctactaaaaatacaaaaaattagccaggcgtggtggcaggcgcctgtagtcccagctacttgggaagctgaggcaggagaatggcatgaacctgggaggcagagcttgcagtgagccgagatcgcgccactgcactccagcctgggtgacagagcgagactccgtctcaaaaacaaaaacaaacaacaaaaaaaaaactgtccctcagtattctcaggggattggctccatgacctccctcccatagacaccaaaatccaaggatcctcaagtccttgatgtaaaataaattggttcagtatttgcatttaacctatacacatcctcctgtatactttaaatcatctcttgattacttataatatctaatataatgtaaccgctatgaaaatacactattggccggcatgatggctcacacttgtaatcccagcactttgggaggctgaggtgggtggatcacttgagcccaggagttcaagaccagcctgggcaacatggcaaaaccccatctctacaaaaattagccaggcatggtggtgcacgcctgtggtccctcccagctacttgggagaatgagatgggaggctcacttgagcccaggaggtaaaggttgtgaatgagctgagatagcacctctgtactccagcctgggtgacagagtgagaccctgtctcaaagaaaaaaaattaaatatatctattgtttaggaaataatgataagaaaaaaagtctgtacatgttcagcacagatgcaattttggttttgaatatttttgatgcaaagttggttaaacccacagatgctgtggactagactaggaagtgctaggcatacacagtatttgttgactagtggctgcacagatttatatacagacatacccgcccccacaacaatactcaaatacatcacattaatagacaaatatacagatgtgggcaaaaatacctgcccgcacattcacagaacacactaaacagtcacaaagacacccaggagtcccttttccatccccataggagtcagtcctagtcctcccccatctagatctgccctctacttgaacccagtctcgggactgggggagtaggggtctgcagcccggacagggagagggtcgctggcccacaggcctcaggcagcgccttcagctatgtctgcaatttcctctccccctttcctcctcctctctaaggctcccgccaaggcggcctccccctcattctagctccagcaagggaggggaggtccatgatgggggggccccgtggagacagggcagaaggaagccccccgccacacacactgatcacacaccacattgcatgcacaagcccaggtgggaaatgcgtgtgtgagcacaggcaggtttagccttggggtgggggacgggatggggtgggatctgccacaagccgccacaagctgcttggtgcacaagagcgcaggagctcgcaggcacagaggccccacgctggggtctgcgagactgctggccgggccctggctcaaagctggagtccaacaatcattaaccctgcgtgactagaccagagctcggccaggggacacattcaagcctgggccctggaaggaggggtggacagtcccctcccttccagtccagcatgggtctggggaagagaagcagctttgcctggaaggggcctcctaggagggggagcggtggtttctagctcaggctttaggatcagagagcagcagattcaaatcctgacggttttggtaaagtcaattcaatctctccaaga

SEQ ID NO: 1134 - DNA, 2300 bp, Homo sapien
gcaacagagcgagactccatctcaaaaaaaaaaaaagaaaaaaaaaaactcataaagttactgcccactgatctgatttccaagttccagacactgtgctgagcgtgactcgcgttatctgtttaaaccacacagctaccctgtgaggccaatatctatcttaagtccttttttcacagatgaggaaattgaggctcagagagatgacatctcttgtccaaagtcgtagctaataaatagtaaactggaaaatggaggcgcagccccagggctgcctcccactaaagcccattctcgcaactctttcactgtcgactctgttgctttctctttcccccttgtccttggcccaaatcctttagggaaccggggcttacaccagctcccatccctccaacatggagaacttggggttgtctccaagatccttcatccccaccccacacatgagtgcgccctttccgtgcagtggccgagccagcctcgtcccagctcttcacacacatcctggtgagcaggctgctgtaatacaagcacttacaactccctcggaggctcccccagctgccgcttctgctggagagccaggcctgtccccagggctgcccgtgtgcaaagacagtagcaccattccccagacctgggggttttggttagagtcactacagcctctgctagagggaactgggtgccaggggtataccctaactcctggggcaccacccccatggcccagcacagtctggcaccctctacagtaatccccaaagcatccccataggagatagagccaggctcctccttccacccagcctgtgagtggggctgtgcctgtttgcagggctcaggctgtgggctagccctggatgggactcctctcttgcagcaccagcctagagtggccttcatttgcagtctgaggctctgtggccctccctgctgttgccagcagcctatccttctggttcttccagactcgtgccagtcttggaggatgaaacaaaggaatctgactgaatcagagagaatcctcgactgggagaccagagacctgggttctcattctggccttgctgttgaaccagctgtgtgatcacggcctccaatctccttctgacttcagcctcctccctcctgggttagaagctgaagtaccagccctaccatgtgggtttccgacccaggtctgccctttcatttattctccatgtgcccagcatgggcatggggcatggagctgtgaaaaggcaggcctggtctggccctcatggaggtgatagtctggctaataaccatgtgaatttgggggaagttacagacctctctgagcctccattttctcatctgtaaaatagggatggcagtagtagtacttgagggattaaataatgcccttaaccagccaggcgcggtggctcatgcctgtaatcccaacattttgggaggccgaggcgggcaaatcacgaggtcaggagatcgagaccatcctcgttaactcagtgaaaccctgtttctactaaaaataaaaaaaattagccgggcgtggtggcgggtgcctatagtcccagctactcgggaggctgaggcaggagaatggcgtgaacctgggaggcggagcttgcagtgagccgagatctcaccactgcactccagcctgggcaacagagcaagactctgtctcaggaaaaaaaaaaaaaaaaaatatatatatatatatatatatatgtaatgcccttaacctagtgtttggcatgatcgttgctgaaagggaagcttgtgggtacagtgtcccctcagaagccaaagcccagggaaggtcgcctgcccaggtcaggctcccagcgagtttgtctggggaggggccattcatacctccaggtcaggacagaggctcgggctgagggaaccctacacaggtcctggaagcagatccttcctgcctaagccagcaggacagctcaacaggaagcatcttccagccacgggaggagaggcagcaccttttttggaaccatacagagctaagaatggtggtacaagtaatagattctgtactggcaaccccacttggtggagcaagttctaggaaaagggggctgtccttgagtcagccatggggtcagccacacagtcaccgcagctgctctttggcaccgggcgctggaaagagcctaggatgacacagcctggaaagagcttgggagaagctcatcttccacagaactacctgctataccagccagggcaggtgcttattccccacaacagccctctgttgtaggcggcagtgccatcctgaa

SEQ ID NO: 1135 - DNA, 2300 bp, Homo sapien
agccgagagcgtgacactgcactccagcctgggcaacagagtgagactccgtctcacaaaaaaaaaaaaaaaaaaaaaaagaaaaagaagaaatgtggatattcagtccttcaggagttccccagaggggacagtcagtctaccccgcatgacaccaaggacttcctcaagctggtcagatgaagtccccctgttttttgtcttactcgaaatacctttcagcaaggaaaatgggtctagagtttgctaccattgtgtccatctcgcagccacaacattggtggcagtacccacttactgagccctggcagtgcatgacctaagcacaggacatggattgtcttatttacttctcttgggctgtgggggaaagattactagctcccttttaccgatgaggaactagagacctggagagggtaagcagactgccccaggtcccacagctaagacaaggtggctggggcctgaacccagcagtctgaggtcagagtcactcttagccatcatgtgactgtcgggagtactgcatcccgacagtcctcttttctgagaaaagaggaaagcaggaaggcacttgaggaaaacaggtgtcctggatacacagaacctgtatggcctctggagcctgccaagattgacctctttctaacttccgccatcttagatatcaaaagggggttctgttggtgattactggaatctgggtgccatggattcccatttttgctgcttgagcactgggctaagagggcccttgggctctaaatgcccagacctgatctgaatcctttgcattatgatcaaagcattaagccttcacctgagatgttttagcttcagcctcttgctggtcctggcatttggcacacaagaggctgcacagtgctgacctgccccatggtctaggctgcccaggcctcagtcctctctggcccgcacatgcaggctaattccaggctccctcactggtttgagtgtcccactccagaggagagtcccaggccctggccttggccctgccaagttcacagccaagccctgcgctacccccttgcctcccaggaccgcacctgtgaaatcgttgaggacacagaatccagccggatggttaagaagatgaagaagcgcatctgcctcgtcctggactgcctctgtgctcatgacttcagcgataagaccgctgacctcatcaacctgcagcactacgtcatcaaggagaagaggctcagcgagagggagactgtggtaatcttctacgacgtggtccgcgtggtggaggccctgcaccaggtgaggccacaccctgctgctgcgccttctggccacagaaagccacctttcttgctgctgctgagcagaaggcagctctgtcctgtgcacccaggtgtgctttgcagctgggagtgtccaaaagaagagtgactgaatggcaggtgcacagggtgaggcacagtgccaccctgcaggccaccttcctggtgagggctgacctgcagcccagctgtggtaattaccacagccaactgtgttaattccccatcagttaagaggcctggtgtccacccccatgtagtgatgacagtgagatacccacccaagcaactacagcacatctgagctttttgtaggattagaggtgtcaggcacgctgggacaaaggataggagagcctgagcctcttcccggtgtgccgcttctgtgggccgagcctgtggtacttagtcacaaagccatgacagctcctccccgacccccagatccatcctgtccatggaatgtctaatggaggggaaaaaatgagtgactttcgccaccagccactgccctgaggggagaaagagctaaagaagctgccacagatggggagacactgactaggtgcacattcattccccatccagacgcgcaggtcacgcgaacttagaactgtcctgatctgcctgtgcttggagcctaaagagacacatcatagaatttttcctgccttctcgaacacctggagagcccccatcttacagggtgggccctgaccccacctctcacattgacaatgtaaaccatacgcctgttgttttacagaaaaatatcgtgcacagagacctgaagctggggaacatggtgctcaacaagaggtaagatccctgtctctacatccatacagttaccccggggctggggcaggctacacattgcaactctccagtgccctgaagtgtcctcatgaggattccgactcaaaacaacccacttcctccaggaatcccagggctcgggatgggatgaacatgggaattggg

SEQ ID NO: 1136 - DNA, 2300 bp, Homo sapien
ggcacagaaatcctggcacaggtgttggcagttggccagaggagcagcaaagcatttctgcatgatgcataaggaccagcagtccaaattgcttatagtcagggttgcagccagagactgggcgtgagttttactttgggacagcattttggacttacaggctcaggatagttccagctccagtcattcagtacatacttaatggtgtgtacctactacgtgccaggcctgtgctgtttgccaggcctgtgctgtttgccaggcatgcagcagtgaataagacaagttcctgccctcacagagaaacagagtaaacaactcaccagtcatcaccggtggtgcaagtgccttgaaggaagttccacgatgacgtgagatgagaagggcccgtaggtagggcaggcaagaaaggcctgtttatgaggaaacaccatatgagctgacacctgaggaggagaagcagcaactgtggggaaagctggggaagaacattgcagacagaagaaacagcactgcagaggcccagcagcaggaaagggcttaccatgttgggaactaggagcccaacattaggagctggagtgtggcatgggacagggaatggaacatcctgttagaaaggtgggcgggaactgaatcatgcaaggccttgggggccagacaaaggagtttgggtggtatgttaagagcagtgggtctgtgaacattgcactggtaaaaaggaaaaccaagagcagcggagcttcgttaagagtttttcacgcagcagtggcactgtgacatcagatttccactctcaaagcttgggcaaggtgctgtcacgggacagtgagcactgtgcatctccagaagtacagaaagtccccaaagctggcacttggacaggggccagatggctgtatcagaatctccagggaacctgttgcggctctagtttcctggatcctcaccctgaagttgctcttcaggggatccaggatctcttgggttttgttgatttttttgaggcagggctttgttctgttgccctggctggagtgcagtggcacaaacacagttcactgcagcctcagcctcctgggctcaaacgatcctcccacctcagccttccaagtagctgggtctacaggtatgctccaccatgctcagccaatattttattttttgtagagaagaagtctcactgtgttgcccaggctggtctcaaactcctgggctcaagcagtcctcccacctcagcctcccaaagtgttgggattacaggtgtgagccaccacacccagcctggatctcttgtttttaatagatgctcactagacattccagcgtgcacccagggttgaaaacctctctttgggaaatgtgtttgcaaaagctggatgtgctccaggcagagcacacatacccctctatttttggaggggagaccttgaaaactctccaccaggagaccttggagggtcagtccagtacacatgagctatggtgccctcctgaatagaaggtctagtaaaagaccacgtggtgacctggcgtcgtgacagccagggcttctgaaaagtagaccagcagctctctgtgccgtaggtccccgtctgggcaactcaccggtgccaagcatagtgcagtgtttggcgaggaaagatggcacggatgacttctatcagctgaaggtaagtgagacatgggggtgagggtgcctcaggaacagggcctgtcatgccaacccactcctccctcctccaccttcacacctgcgtcattgtgaacaagagtagcgccatttcttcccgagaagcaatcaagttcacagtctccctcagaacaacttctgatttaaagagttttgtctgtgcataaattacatcaccatcatattaagaaaaacgatttcacttggtgtgtttgtgtgtgcattgtgcacaaatgtcatgtggtaaaaagccccctgcttcccccgttctggttgttctgctgtgtaaagtgaggtgttctggttttggttttatttttatgctttcctaaagatcctgaccctggaggagaggggggaccaaggcatagagagccaggaagagcggcagggcaagatgctgctgcacaccgagtactcactgctgtctctcctgcacacgcaggatggcgtggtgcaccaccacggcctcttccaggtgagcggccttccccctcacccttcgcgctcacctctggctggctctgtgggctgccacttgctggggccacagccatacgagcagctcacgtgacccttgggtgtccctgccatgctaggtacatca

SEQ ID NO: 1137 - DNA, 2300 bp, Homo sapien
gtgtagctatctcaagtgatgttgcaaaagaatattgtgatgcagggatgttaatgggtttttgttttgttttttacagctttattgagatgtatttcacatactatacaatttatccttaatggtttttgtttgttttaagatggagtcttgctgtgtcccctaggctggagtacaatggcgccatctcagctcatgcaacctccgcctccccagttcaagcgattttcctgcctcagcctcccgagacaggcgcccaccatcatgcccagctaattttttttttgagacagagtcttactctgttgcccaggctgaagtgcagtggcgtgatctcagctcactgtagactccgtgtcctgggttcaagcgattctcgtgcctcagccaccaagtaggtgggattacaggtgtgcaccaccaggaccagctaatttctgtatttttagtagagacggggtttcaccatgttggccaggctggccttgaactcctgacttcaggtgatccacccacctcggcctccctaagtgttgggattaaaagcatggagtcaatgcgccagacctcccttaatgtattttaggtgggaaaaaaggaaacataaaatagcattacagtgtggtccacatgtttgtaataataaaactttatataagcatacacacagtcacacacaggaaaaacatgcttgaatgttaacagcagttatatctgggaggtaaggtcatgggtaccttattttcttatttttgcacatgcgtattttctaatgtttctgcagagaacatcagttacttttatatgaagaaaaatacaggaacaggctggagttctgtgtttttgagtccattatggaagggtaaaggctacactcctaaggtgggtgtcaggcctctatcctgggccacctctcaccactccctgcctcgcgttggatgcttcagcaacacaaactacctggcgttggtggcttgcatgccatttcttacctgggcatgtttgctcactgaggccctcctaccatgaaggtccttgccccttgcctggcccactcctgtatccttagggaaattttcccggagccctgcacccacactgggcatcctgtgaccctgaccttccccatgtggaactcgtctgtacacatctgtttccttgtcccccccggatcctgctttgccaaggtgtttgactttggagagctggaagagacaactcctcttttgtgtttttatctgttatttttaaatctgtgtccagaggtgtcttttagcctctggccccaatgtccgcctttcatttttacgcaggaggatctcgggattatcaggcaaatcagagtgctcagtgatcttcagtagtgttctttaactgactcttaaatacacaatgaattttctttttctgaaaagtaattcaggaaaagtttgagtttatgagggaagagaaagtaaaccctgccattgacaactttggggggttctttcatctgagaggaccagagagtcaaggaaagatggggagaggggttctcagggctgtagtcatcaaactccgtgggcataagaagcccccaggcctcgtgtaacaagcatcccattcctggggcccactgtccagatacgggccaggaatgggcacctcgggtcattaggctgtaggtatttggagggcaggtctcactttgggaacagttgctcacctcagggctggggttcagctggatggggctggctctcctctctgtctctgtggtagtctcttggggctctgtttggcattagcatctgcacaaagcccagttttctcctctctgaatttaactggccacttggtggtggtgtgttggctccccgcctctgtaccctgtatatgctgccttaaaggatgtccacctttagcatctaattaatcccaagtaaaggagctgtggttctttgtcacttggagccttggatgctcccctggtagcaggaggagttggaggcagcagcggcagctgtgtgatgcatcccaagtcaaaggcctgcaggctgggttagcataaggaaactcgctgacttactcagtgagaaggggtctttctgtcttgtctagagctgagaatgaagcggagagcatcagacagaggagctggggaaacgtcggccagggccaaggctctaggaagtgggatttctggaaataatgcaaagagagctggaccattcatccttggtaagcctctgacctttgggaaaaatgggtgggctgggaggcaggggcagggcacattggctcgcatgatctgacctaca

SEQ ID NO: 1138 - DNA, 2300 bp, Homo sapien
gacaaagagaagccagagccaaccagtaatggagacgagggttcagaagcctgaggaagcccctgggggttgaaggtctctttccctccttctgtgataggcagatctgcctataccttgtcaagccaccatctcatgctgttgtgacaggcgtcactttgttatggcagcaccgtctgccgtaagcctagagttggagagccagcaagagtatgtcagcgtgagtgtgagtgtgtgtgtgtgtgtgtgtgtgtgtcccagcgttctcctcatggtagtgtcctgatgacagtttctcatttcctctggctggcacctttggtttctattcattacttcttctcctcctagctttctgttcctcctcctctcctttgttaaaatcctggattttcaatcagctgagagtctcctgggggtaggaatggtggtgtcagcgcagagtgattcatctagctgataattagagctctggaaaacccagaactcatttttgtcagagtcagggcttccggaatccctaggctttttgttttgtcagagagtggagcttgctgggctggggccttctttatgcctgtcttttggtcacccacctcattgaagcccttcaactgagatgagtatgagtgctcgctgggtcttgcaaaaagctgtttctataactccgagtcctcacagtgatcccccaagcgttatccctgtttggacagaaggggaagattgggcaatttgcacatagtcacccagcttgtaagtgatgcagcagggattcaaagccaagttttttggaatccatcagacttgatttgaatcctagccctgccattattagctgtgtgtgtttgggcacattaatttccttctctgagcactggcttcctcagctgtaaacagcctcctacctaatactgtctcaagtgctccatgcagagtgtggcacaacggtgggagctgtcctgattactcttgttagtcagccctatcagcagctcagtgggcaccaggcattcagagacaaaggacacaggtagaggcagccagacttcactcatatcagctcttgtgtcctggcactgcctatgtggagatgacaaatgcacatacacacaagtggccacacaccctaggaaaacccagcagtgcacacaagcttagacacgtgtgcccacacatggatatagagtgacccaggggacagctggaaagacagccaagagttagacatcataagcagcaaacaccctgactcacacctctgggacaagggagtggggctacggccgctggtgctgctgccactgagcccttctagctgcttctgcatgccaagggagggaagccaggctcttagagggccccagtgagtcacttgcctgatgcaatccctttaaagggctcatctgctggtgcaagaagctgattcatggagggcgtggttgctggaggaggaggagaaagggaccgaaactgcagcaggaggaactgaggttagatagctgtagtcgctaataggaacgcttcactgtaaacctccctggtcaaggcttcagggatctccaggttgaaggttgccatcctcggggtttctacaaaggcgacagacctagagggaaatgaattatgagcgctgcgacaggaatttctgtcttttattgagcctaactgcagggctttcctcacagagttccacaaaccgggaaatgaggatcaaggatgagtcacttttctgataaatacactacaattggccgatcttccaaccgctggggacttcaacctcggcagggggagtgtagggcccgcgaggttctgtggggtcgggcggggcggtgcctccgtcccagcctcgccgcagatatagatcagcagtaagtaccgccccattagagcctcggcctccaatcgtgtaacaggtttcgcccagaccccaccctgaaccaatcctcaatcggactctggcctcttgcctgaagtcttccgcccatcgtcaagatggcgccccaatccgaaagccgtggggctggagacgcaggcggagggcggggcccgggggggcggggccgcggctaaggctggggaggaggggggcggtgcgtcacttccgttgtcaggtggcggcgccgcagccatggagggaggcggcggcggcggcggcggcggctcgggtggctgcgctgggaggcggcggtgagaggctcgcacgcctccagcccggccccggccccccgggagggagagccgagcagccccggctctgggctacggactatgggcgaatagctctgaccacccggcga

SEQ ID NO: 1139 - DNA, 2300 bp, Homo sapien
ttgcttcaacccgggaggcggaggttgtaagccgagatcaggccattgcactccagcctgggcaacaagagtgaaactccatctcaaaaacaaaaaaaaatttagagatggggtctcactatgttgcccaggctggtctcaaactcctgagcttaaacagtcctcttgccttggcctcccaaagtgttgggattacaggtgtgagccaccacccccagccaagaagcctaatttactgagcttcttctctgtgccagatgctttcacacattaatgaaggtcacttaaatcttacagttctctgagaaaggcctaattttttgttttcataacaagcaaattgaggctgaggaagaaagtaatttttccaaggctatacagagtgacttttaaaaaatgtaaatcaggtggggcacagtggcgtgtgcctgtagtcccagctattcttgaggcttgggtaggaggatcacttgagcccaggtagttgaggctgcagtgagctatgatcacaccactgcactccagcctggatgacagggtgagaacctgtctctacaagtaaatcaaatcacttcgctccctttcaatagcctgtcatagcacttctagtactagatgagaagactgaggcacagagaagatactaacttgcccaaagtcacaattagccaggagtagatttgaacctaggcactgtatccggaggctgcactcctaaccatgaaatctaaactccttaccttggctcacaaagccctatatgctctggttcctgcttcctctctggcctcttgttataccactctccccagcttccctggcctttcctgtgttcctaaattgtcaaggtcatttcccccaggttctttgcatgaactgtgaaaagaaaaaatttaacttttaattggtgatttgacttttttttgccaaatttgttaaatctgacttttatttgcaactctagaatcgggcaacacttcattctataaaatggaatgagtgttcaaatgagctgagcagaggagattggttttacagccagaaaagggctgaggaaagcagaaacagaaaacaaaaagattggttgtttcaaagttactttccttgtaactttgaaggctaaagcagaggggacttccttatcctgccagctaaaacaggatggtttggagatctagctatctctcactcttctgatttatcggaatatcagataaacaacttagtttccacttggtgatgtagaactttagcatgagtgactccattttggttctgttgggcttggtgcaggagccctgttcaaaccaatggcctccaatttttttttttttttgagacggagtcttgctctgttgcccaggctggaatgaagtgttactttctgagctcactgcagcctccacttcctggattcaagcaattctcctgcctcagcctcccaagtaggtgggaccagaggtgtacgccaccacggtgggctaattttttctattttttgtagagacagggtctccccattgttgcccagactggtctcgaactcctgggctccagtgatccttccgccttgtcctccaaagtgctgggattacaggtgtgggcctctgcacccggccctgcctcctataaattttacttaacaaactgttcccgctaattgcaatgctcctcccatagttttcacaagcttggcttcatgtcactaatctcaactcaaatgtcaccttctcagggcacccctgacaatccaataaaagaccaccttgtcaccatcacatcacacctttaatcttctgaagaaatttttccctatttttcttctttgttttcttaagactctctcccctgcagcgccatcagctcagggagccacttgatcttggtcactgctccatgccggagcctgggaaggagcctggcccaggtcgccggttcaatgaatgcgtgcggaatgaatgaacgactctagtgaaagagactccaatgacgcaggccgggatttgcggagcacgagccccgcgccgcgaagcattctggggattgtagtttctccgtgacgcggtgacttgcagagcactgacgcactctgcgcccggaggacagagcggcccggtcgccggcatggtttctccgtcctgctgcagccggcgggaggcagccagtccaggcgcccgctagcttcggcggcgacccagacggggaaagcggaaggaatgtcgcgtggtgggtccgggtcggcggtgcagggagccccggggcggaatgcgggggatgccaggacctccggaaggaggtgc

SEQ ID NO: 1140 - DNA, 2300 bp, Homo sapien
aggagaatcacttgaacctgggaggcagaggttgcagtgagccgagatcttgccactgcactccagcctgggcgacagagcgagactccacttcaaaaataataataataataataatatttaaaagcacaggcattaaatcaaacagacctaattctaatttcagctccatcaccagctgtgtgaccttggactttaaactctctgattcagttttcctccttaatagaatgaggataatataaaacgataagtggtctggcaggaaaaaaaaatgaggataataattcagagttgtcttggagtttaaatgagataatgcatataaagttctaagcccagtgcctgggacatagaaaggattgaaacatggtaactattcaggagggtttcctagcctctctctaaattcttggctccaaatttcatattcccataaacaagtcaatttagagcagaggtaattggtaaaaacttgattgctttcatcaagataattatttcatcagaccagtctcgaaaaaaagcccaattgaagtacttggtacactttattacatttcacaaccatcgtttgacacttcttgagcaatttttgacccgtccctcccttgatgcatagcagaatttcaggtatgaagtgtggattttgagagcttttcatatacataattgaatcattgaaatttattttaacataaatgttcaaaaataatgaacagaaactggcttcataatctgaacccaggactagaagcttgctatgttgagaacccaattaccaactttctgaggctcctgtgaaaaatcccttccctcccctgccttagcctccttttttttttttttgagacggagtttcgctcttgttgcccaggctggagtgcaatggagcgatcccagctcactacaacctccgctcccaggttcaagcaattctcctgcctcagcctcctgagtagctgagattacaggcatgagccaccacgcctggctaattttgtatttttagtagagatggggtttctccatgttggtcaggctggtcttgaactcccgacctcaggtgatccacccacctcggcctcccaaactgctgggattacaggcgtgagccactgcgcccggccccccttagcctcttcctattgaaatccggctcctagtatattccggcctcgtgaaaagtatgcagaactcatttgcatgccaaaaaccaacacttagactaatgggcgggtctgattaaaactatttcttcagggatgttaggatgaagggaaaaaaataaaaaacaaattacttttttttttttttttttttttgagctggagtctcgctctgttacccaggctggagttcagtggcgcgatctcggttcaccgcaagctccgcctcccgggttcacgccattctcctgcctcagcctcccggtagctgggactgcaggcgcccgccatcacgcccggctaattttttgtatttttttttagtggagacggggtttcacagcgttagccaggatggtctcgatctcctgacttcgtgatccgcccgcctcggcctcccaaagtgctgggattacaggcgtgagccaccgcgcccgtacgctaattaaattttttaaaaaaactatttctcaggtttaacctaaagatgatgtgctgcttctctagggccaggataacatctccttcctctttgtgcctgtggtgtttatttcactgtctggtacctaataggtctgcctcaaccaagggctgggtgaagcaaattgtaagacaaaaacatgttaacgtgtgcctccatcttatttccaaagagtgaaacgagaagagggagccctaggtgtcgtggcccaaccattaaactgccatttcctctttgggggcatttgtactcactgctctgcccacaaggacagaccccgccgtcctcttcccagcaggtgaactgtctggatgctggcgccaggagccatggtgctccagagcttcttcacttcccacggggaaagacttcattttgcttttcactttgcccgagtagctaacaatcaccttggggtattctttcgtccagaactgatttatctgggtgtaagctatttccctagctcctaataagggctcaaagaccccagagaaatgactcagcacctaggtgaatagcagccctttgtaagcattaacctaaccagagttgatgtgatgcttcaacttgaattcttctttggcactcctcctccctggcttacgtaagtctgtggaaaattcttcatattctctcttttgaggact

SEQ ID NO: 1141 - DNA, 2300 bp, Homo sapien
ttatggcaggacaagacttttcagtggtgtggtaatgaggaagaggcagcctgctgacaagttcaactggactgggggagaggaggtggccaggtgcaggagatggctttaaaaaggtagttggccgggtatggtggctctcacctgaaatcccaacaactaaggagtctgaggtggaagaatcacttgaggctaggagttctaggctgcagtgagccaccagggtgccactgcattccaaccttgggcaacaaagtaagacccctatctctttaaaaaaaaaaaaaaaaaaaaggtagctggagcctgtggagagcctggaatgccatgccaaggcatctagactgtgatctggcaaagagtaggaaaccactgaagggatgtgtcatgttgacagtgatgctggccgggcgcagtggctcatgcctgtaatcccaacactttgggaggccgaggcgggcagatcacctgaggtcaggagttcgagaccagcctggccaacatggtgaaaccccatctctactaaaaatacaaaattagccgggcatggtgccctggtccatgcctgtaatcccagcttactcaggaggctgaggcagaagaatcgcttgaaaccaggaggcggaggttgcagtaagccgagatcgtgccattgcacaccagcctgcgcgacaagagtgaaactccatctcaaaaaaaaaaaagtgatgtcttctgacatttagcttagcagccagtgcaaggtagaagagagaaaagaacagtgatacagaggaacatagcaatgcagacagaaaaacaaatgaagggatgaatgtaagaaaggtgttggaggaaaaagcataatatgatgactgataaaagaccctgggaaacagatttggaagccaaggcccaagtttcaagtttgagtagctggagggaaagataattagtaggttttggaagtactgaaatttacagaaatggttgttcatcagagtaaaaatatacagcagatggcaaaaagtaatcctggagcttaagatggaggtaaggaagggagtcgctgccctcaaagagaaatggttggggccgggcgtgatagctcacgcctgtaatctcagcactttgggaggcccaggcgggcagatcacctgaggtcaggagttccagaccagcctggccaacatggtgaaaccccgtctctactaaaaatacaaaaattagccgggcatggtggcgggcgcctgtaatcccagctactcgggaggctgaggcaggagaatcgcttgaaccctgaaggcggaagttgcaatgagccgagatggcgccactgcactccagcctgagcgacaagggcaaaatccgtctcaaaaaaaaaaaaaaaagaaaaaagaaatggttgggaggccttcggaacagcgtcgaggagggaacttcccagagcccccaggcgcatcctctgggaactggacacacggggacggacgggactggtttgcttcatggagtatgaaaccaggaggggcttcacttcaagtaaacttttgggaggcgatgcaaacgactcaggacttctgatccttccctcgtctaaaagaaaagtcagttaccatttttattgagtgctttcggggcctttccatgatctgactgattcctctcagccgccctgtgatgtgagtgccagctccatgttacgtaagaggaagccaaggctcaaaccctgcccgaagtcacacagcaagaaatcacgagccgtgattccaacccaggtccgtctgacccgagcctgctctaatgccgttctgcctgggctttcctctgttataggaacctgaggccccgcgccagcggccggggtcccaagcgccgggctggctgtgtcgagaccacccccagccctggcccggccctcgccctttcgagggaaacctactctcagaagcacagctccccagccgcgcccaacgccgcgccggcctctggctcggaccaatccccccgggacggtccaccacccagaccaattagctcccgtcttcagggcacctcccaccaaaccgccttctgattggctcgctcttcccgtcacggcgttgccccagcaaccggactattgggacgctgcggcctggccttcaggccactggctaccgaaccccggggctcttcaccagtccagctcgtttccagcaccatgtcggtgcggacgctaccgctgctcttcttgaacttgggcggggagatgctttacatcctcgaccaacggctgcgggcccagaacatcccgggagacaaggcccgcaaaggtgaga

SEQ ID NO: 1142 - DNA, 2300 bp, Homo sapien
atctcttgttcctcacaaaagctgtatgtccccattttatagattttcaagctgtccagtgtcatacagttctaaagggcagagctagagtttgaatccagggctgactgacaccaaagccagaggccctctgctcagctcctatgcagtgtggtgggagctggtcagtccctcccactgtgcaatttaacttgaaatgtctcaaaacagattgaaccatgttgtagctaaaatggaaatcctctccttgccctccctgtgatgagaccggaacagtcgagctgacagccccagtttctgtagtttcagcccagcaagccagatccacactgacttttaatccctgggaaatggctccccacctccagggagattcatttgctacagaaggaatttttcaatcatctttgcttttcaaactaaaatgaaaccagcattgctttcctctcttctcccccaatgtctgtctcattgctgtggtttatccacagggttgatgatgtcgtgaaaagactcttgtctttggaaatggccaacaaggtgagcagcctctgccaagcctcagcctcccgcagtcttctcctctgggactcccttctaccctgattagcaccccgcatctcatgcttctccagtcacagcacttagcccactgtcattctgcctccatttgtcaatatccctagacagagcatcttcagggcagggacacttttgttcccccaccatacccctagcacctgacaaacaggtgctcagtgaatgaatgaatgagcataaatgaatgagcaagctttggggacattcatgcaacaagtcatttcctctgtcagtggctttggctttgggctcacctggatgtggatagccatgtggttggtcaaggccacagtgagcagagtgaagtcaggccctgagccttatggccctagttgctataactgtagccagggcccttggggggaggagggctagttcttagagggtggcagactccacagattttctctgtctctgtcttcaacagaaggagatgctaaaaatcaagcaagaacagtttatgaagaagattgttgcaaacccagaggacaccagatccctggaggctcgaagttggtcggggacccttggggagtgggggtgtagggaagcctgctagctgggacctgatctagggctcttgtctacaagcacatgcacatgggctggggaaagggagagacatgaaggacctagggcaatgaaaattggaccctgtatcccaagctctgatgctggagtcaacacccagttggaccttgtaccactgtgtgagcttgggtaagtcaccaaccctctcttggagcccctgcttcctcatctggaaatgggggaataagggagagcagagcagaggtaatgttacccacctcatggcagcattgtgagaggcagctaggggatgtaaacacaccttggaaactaaagctcacgatgtgtgataataatagtaagactaggccaggcgcggtggctcacgcctgtaatcccagcactttgggaggccaagcaggtggatcacaaggtcaggagatcaagaccatcctggctaacacggtgaaaccccgtctctactaaaaatacaaaaaattagccgggcatggtggcgggcgcctgtagtcctagctactggggctgaggcaggagaatggcgtgaacctgggaggcggagcttgcagtgagccgagatcgcgccactgcactctcgcctgggcaacagagcgagactccgtctcgaaaataaaaaaataagaccaacattttgaaccctcttgtgccagacagacaccatggtgcattcccaagggaataatgttgctactttggttcaggctagaactggcagtagtcctcattagatgtgagtgaaaagcaccaccatttccccctctctctgggtgcagtttctcttcattgcccactgagagcaagtgaggtagactagtggacctgcagaggatctgcacactttctctcctttgccattggcctatattatagcctcctcctcctcttccaccctcctgccttcattcttctcccttcattcttttcttctccctctgccagggattaaagtctggtgagttcatcttggatactaaaaccccattgagaactggactcaagggtcctccatagcctcttttgagaagatgagtttcagcttcccttgccctgctaaagccctgggctagggaccagctcagccacaaaaggcctgcttatctttcctcacctgtttctgcattatcactact

SEQ ID NO: 1143 - DNA, 2300 bp, Homo sapien
ggtaaccccagccccaagccaggaggacgactgtgtctttgggccactgctcaacttccccctcctgcaggggatccgggtccatgggatggaggcgctggggagcttctagggcttcctggggttcccttcttgggcctgcctcttaaaggcctgagctagctggagaagaggggagggtccataagcccatgactaaaaactaccccagcccaggctctcaccatctccagtcaccagcatctccctctcctcccaatctccataggctgggcctcccaggcgatctgcatactttaaggaccagatcatgctccatccagccccacccaatggccttttgtgcttgtttcctataacttcagtattgtaaactagtttttggtttgcagtttttgttgttgtttatagacactcttgggtgtacctgagtctctgttatttatttttcagggcccagcagtcagggggaaacttctcagagttggtcctttcttcctccctcccttccttcctccctcccttccttccccccttccttcctcccttccttcctttcccttccttccttccctccttccttcccttgcttccttctgctagctctcagtatctaggccctatgcaaacgactcagctcagttcaccctcagagagctgcattctagtggtggagacttgaaaactgatccttagggcacagtggcatgggttacacggggggagtgacagtgcggtgggacacggtgaagagactttggaaaaactaacccctgttggggaaataaaattaaagacaaaatcccctgccaacgcagaaaacctcttcacaagggtagaaaagaaagaaaacagtgttattattgaataagcattaaaccggaatgtgatacactggtgatccactaaagagactgcaaagagacaaaaatcttactcttttatgtagcaaagtgaatacaacttactgtatccattttctcaagataaacaataactggtcctcaagcaagaggacttggctgcacctcactctaaatttacctggtaagtgggaagccacctgtgtctgctaattgcctttatccaaaggaaaaatcgatttcccctatctttataacaaagggtaggttgcaactaagagctaggcaccaactgaagttaggctcctaccctcccacaggaactgagagagagcactatcttccttaattattacatttcaaagggttggcccccaggtccttgagaaaaacattccggggttgtaaaactggcaagaggtttatttaccttttaagaagatttacattcatcgcaaagcagtagagaaagtattcacaattacaagttttctaaagtaaatgctctcagaaaagtgaggggaaggagtcttttccctttttgcgccagggaaaattaaattttctttttcttctaatttgtatccacccttacaccactcatttcacaaataacgtcaccgtaaagatttactaaatgctcactatataccaggtggtctgcatacaactcagttaatcctctcaacaacctaaaagagagatattgttattactatccctacagggcccacataggttaagtgacttgcccacaagatcacatgttgagtaaatggctgagttaggattccagaccaggactgtgcgattccaaactcagcgactttagtctccaggctacgaggctgccagagacatggctgaaacccagtagtagttcttacacggtcccatccttgtctaagggaggggtgaggtggggtggagaggggattgggttgggggtagaaggctaccgcaggcgccatggacctcccaaaataaccctggcccgagggccaggaatgagattaaggacggaacgcatgccctccaaaaagtggcattttagaatttatacagcaccccagcacgctgctaaacgtgggcacacaaccaccacggcccgatcacgcgcagcgggaacccggtctctgagctccgccccgtgcgttgcgtcatcagagtcacgccacctaatccattctctcggtcttcgtctgctccggtattgcaactgcctcgattggtcgatcctgggccagcatggcggcgcccatgtaacccggtccgtgccgcaaagcgaacggcggccgcggcgcgggccccgcgggggttagaggtcaccatgctgagggtcgcgtggaggacgctgagtttgattcggacccgggcagttacccaggtcctagtacccgggctgccgggcggtgggagcgccaagtttcctttcaa

SEQ ID NO: 1144 - DNA, 2300 bp, Homo sapien
ggcaggcatttgtaattccagctacttgggaggctgaggcaggagaatcacttgaacctgggagtcagaggttgcagtgatccaaaatcgcgccactgcattccagcctgggtgacaaagtgagactctgtctcaaaaaaaaaaaaagaaagaaagaaaaaaaagaactaaaagaactgactggacatgggaatgtggagaaagggttgtaaggaatgactcctgagtccctgagctgcatgactagggagaggaggggatggtggttaattcaccatgacaaggtacgtggggattagagacagatttggtgaagtgggggaagattcatccagttgatcattcattcaacaaacacgcatggaggccttactgtgtggcaagcagtgttatagacactggagataaagttttgaacaaaacagataaaaactgttgctcttatggaactttcagtctagtggggattgagacagccaatatcagatggtgaaaagggatttgggggagagagagatagggagtgggagggaaggggcttgcaaattttgaaaagggtgctcagagaaggcctcaatgagaaagtgacatttgagcaaagacctgaagaaggggagggaccagcccatgtagctatttgcgggggaaagagtccaggcaaatgaaacagcaagtgcaaaggccctgaggcaagagacagcataacaagttcaagaagcaaagaacacagagtagctggagcaaggcagcaagggggagaataacaggagagggatccaggaggtaacagggataccaggttttgtagggccttgtagaccatccaaagggctttgactttgactctgaatgagacaggagccattggaaaggttgggacgaggatgggctgatcagacttctgtttgattgatatcgcactggctgctgaaggaattacagacaggtgcgggaacaaggatgaaatagaagcaggagagcaggcagggggctattgcgattatctaggcaatagatgagggtagcttggagctggctagtattggtttcagttatatttatattttccaaatattatcataaaaatattcaaacgtagagccaagttgaactttacagtgaatacccaggattctggttatatttggaaagaagagagtccatgggactcactgagcgagcagagcctgtgggatatcttgggagggttgcagcaggcagtcaggtcatttgacttggaactagaactacagccctggtctgcagcatcacaccagacccagatgcctcaaaaggattatatgttaaggacagtctgctggtctgttggcacctaaccttttttgggttatgaatccaataaactatgagcagtttgaacctttctcagaaaatgcaaagaaaattatttgtagttttagaagaatcatgaatacagacaataaaagacataaaatgtagtctatttcactcaattacaaaatattcagtgttgcagaaccattgtgggtaaacattcctaatttttagtgaacatataaagaccccgtgcctcaccaagacgtcctcctgtcttgcccccagaattcctgtttctccatctgcctggtctatgggcaatgcacagaatacgtaatgaagaggggagcagtgagtattgggttacacaattccctggaacctggaacacacccttctgagtactgtgaagatgtggtccccaaggctagagctgaaaagaggcttagggccgggtgagccttccagccagggcctgcctccaagtgatgctcccccagggcagggggcataaggatggcacccagccaggtgggagcctgggccctgcccagcctcaaagctttgagctcaggaaatccggaggcaggggagggggacatcgttgccacattccccagccctttaagacccccaaggcaggaaggctgcccgggcctcaccagcttccctcacaggctccttcctgggaggaaggggctgcctgtgccctcgaaggcgcaagggagggcaggagggaggctcggaaggtgttgcaatccccagcccccgggcctgtcagaggctgagccattaacgacagagctcggggagagaagctggactgcagctggtttcaggaacttctcttgacgagaagagagaccaaggaggccaagcaggggctgggccagaggtgccaacgtgagtaggggatccctagagaggggctgagccttgggcttgatggagagctggaatcctggggccactccccacagctctgccaagtgttcatgtcc

SEQ ID NO: 1145 - DNA, 2300 bp, Homo sapien
taggccttttggttccttggggcaaccaaacctgttgcggaagctgataggcaggcgatggggaggggtgtgcgtccccaaggaaggggctcccccagctatatccgggaggccgcgccctctgctgccctctcctgcacttcctccttactggcgcccactggagcccttactttttatcaagaggtggcagctgctgcttccctagctttggtctgcgtgtccttccctccgatccctcgggcaacattttccagtggctgcttgggaaaccagccgctcctgctccagggcgagggaggcccaactttggcagagacagacactcaataacctcagtttgtttgctggatttttgaggatgtcctcaggacgggcgcacccctctgtgttcttttgtgaggagcccagggagtctctcctcctcccacagccacagtggcctccacctcaggtgggagggcgtcccttcctaattggcaggattggccacactgagatattcacatccccacacaatgccacgggcctctgcacccagacagggaggggaaaaaagagggaaattaacaggcgggtgagagctcggctcatagaatatttgtaagaaaattaaagatttgctcttcagatgttgggggccatgctcttaccagacagctggcaaatgggaaagattggaaatgatagaatagatcaaattatttaaatgagaaaaataaattcacacacagcctagccgctgcccggtgacagatccgtttatttatctactgtatcggcaccgctttgtctctgtcaaaaaggtcattaaactcgcctaactgagtaattcgcagcctcctgctccagcctcgctccacagcctttcccttccctcacacccagcgccacttgaaaaaaaattattattgctaataaacaacgttgtttttctttttaacccctttagcttgctcccccacggatcctactccatcccacgacaaattacagtttctctttattctttctcaggagaatgagggagggggcaccagcccttcctgcacagttacgggagagggctgagagggagcgggcccggcgcccacgcccccctacatctaaggcgtgagcggtcttcctcctccgcagccccaggacctgtgcgcggtcaagtccagcttcccacagcagggggtctgacttgggctctcccacctctaccaactccctcagctcccctggcccagcgtagacaattcgctttgaattctgcctctccgaacccccagccccaactctgctgccaggaggaatggggttggggagggaagccggttcccgggtcagtctcccgctgccaccgccgtccagccagcgcccgccgcgtgggagccgcgaggccaggctccgcagacggcgggctcccggtctcgctgctcccggcgggcgcgtctcctccagctggtccggccgctgggctgccgccgtctcccagctcgcggtgccagctctcgcgctccacgcctggctcccgggctccgtgccctcgcagtagaagggactggggccggcggggcgggtggggacgtctgggaagcgaggagagtcctcgttctccgggcgtccccctacaatggggccagggtccccttccccgccccccgcgcaggtgtgagcgcgcgagtgtgcgcctcggcaagtgtgagtgtgaagtgtgtgtgcgcgggggagtgcgcggagggagcgcgggcggcgggcggcgcgggaggcgggaggcagggcgcaggggagggggctgggagggagagtgtgcgcgcgtgcaactccactccggggctttgtgcgagcccgggcgatagcatcggcggcggctggaggaggagcggccggagacgcgtgcagcccgcccgccagagcccggcagccggggcaggtgggagcccgcgcgggagccgagccgacgcgagtcggagccggagccgagtccgagcggagtccgggcggagcccaggagcctcgctcgcgggcagcccgtgggcggcagccaggcggggcgggcgccggcggggcggccccccagtaagatgtgcgcggcgccgcggggcgccccccacttgcagcggcgctcgggagccgggcggctgggccaggcggcgccttcggggctgctgcgcgcccgcgcctagagctgccgccccagggagcccgccacggccgcgccccgggcacgctcggcggcgcccaacgatgaccgctccctggcggcgcctccggagtctggtttgggaatactgggccgggctcctcgtgtg

SEQ ID NO: 1146 - DNA, 2300 bp, Homo sapien
aggtgcccagcatgggatgtgagctggcatgcagcagggggccttgtgtttcctctctccttgggttgccaagcccctggagctgctgtgcctggggagcagagaaggggacactttggggtcttcaaagatgaccaggcaacaaagcaggaacaccgctaggtaagagcaagcaagcccagaggaacagcctcagggtccagatagagacgtacacgcctgcctccctggggtctttggtggcctcccgaacaagcaggtgtggatggggagatggactgccttggagagagctacatgagttccagctccaccagcccccagagcctgagcaggtgacttcacctttctgaatctctgaacatccatttcctccactgtacaatttcattaagatacatacaagaatatccaaagcacagtctttgtaatagaaaaaaaatcctagaaacaacatccaacagcaggtgactgaataagtaaccagtggtatattcataaaatgggacactattcagtagtaaaataaattacaggtatgcaggcaatcaaaatggatttttaaaaatataatgctgtatgaaaaaggaagtcacataattatggaatgactccgtttacacaaagtaaaaaatagcaaaactatacaatatcccacttagggatgcatacagaggtggtaaaactacaagaaaaagcaagagaatgactagcacaattaaagttcaggaaactagttcttcaggatgtgggcaggaggctgtgatgggggcacccagagggcctcaaggtactggcactggtctattttttaagttaggtgatggatacatggcttttttattattactattattctttaagctgtacatgtacagttgtgtctatggtgtcttttacaataaacaagtatttattataacactagcacttataggatacatgcctatgatgaggtagagagaatgtaacaaaggactggcacatagtaagcactggtggcatgtggctctgtcctccagcgtgtgggctctgtgttttctctctctctctctcactcacacacacgcacgcacacacacacacacacataggaagccaggctcccctctgccctcagtcactcgtggttcacaaaaatggcaaataataggagcactagaataggagctctccatcctggttcgagtctttccagctggggcagtttagcctttgcagaatttctcaagggtaacatcagcataatgacctctgtctgtaagcccgtgagtgtaagcctgtaaagtgctgtgctcatgcgagggatcaggtctgacctgggaaactaaaagcatcttcatggagcaagggtgctcctccagtgggggcgctcagtgagttctgcggtatgggtgacagtattcttgtgtggacagtattcatgtggtgattggggtaaatggccctcttttgcctggttttctgcctcggtcattgtgcatctgctgactgaacctgccttttggtcctagtaaagtacagatttcaggaaaagtgtacctggccccgggggtggccaacctctgtgtgacggctttaagcacagtgtgtcttgagggggcctgactccatctgaaaagtgcctgtctggatgtacctgtctataaccatggacctgcctccaaggtgcgtggaccaacctccgcgtacctgattcactcgatgcgcacctggccgtacgtagcttcatcaggcagggtgtacctgtcaagttcttaggtccgagtgttcgcggctttacctgtcctggtaccgccgtccgcacctcggtcagtgcgtccccggcaggtgcgtgtacctgattcagtccgtgcttatcttgcgcatacgggccgttcagtgtcccgctcggagctcgtcgccgccgcagccttgaggctccgacccccgcttgggccccgtccggcgcgcagcggccgcgggggcggggccgcgacgcgaggagcggagcaggaaggggcgaggcagccccgcccccggggcggtctcccgggacggccccgccccttgcccgcttccgcgtcagtgcctcaccaccacctgcccgcgcgccgccccatataaaggcgccgccgtccttacccccaggactcggccccatggagacgccgccggccgccgctggcgcatggcggggtgaggcgcggcggggagggtgcgggcctcggcggggaagcggcagggagcgctccggcggggtccgagccgagccgaggggaggggacgggaggggacgggaggggtggagaggggagggg

SEQ ID NO: 1147 - DNA, 2300 bp, Homo sapien
gaaaccccatctctactaaaaatgcaaaaaattagctgagcgtggtggcgggtgccggtagtcccagctactcgggaggctgaggcaggagaatggcatgaacctgggaggcggagcttacagtgagctgagatagtgccactgcactccagcctgggcgacagagcgagactccatctcaaaaaaaaaaaatatttttgactcttaacagtttgagattgctagagatggaatagtactgctctgttgcgccactgcactccagcagcctgggcgacagagcgagactctgtcaaaaaaaaaaaaaaaaagaaagaatagtactgctcttaaaaagattatttacgtatttatgaaactgcagtgggatgcctagtttccttccctctgaggaaagcacacagcagaccttaaaatatttttgactctcatagtttgacattgctggagacagaatagtactgctcttaaaaagattatttaagtatttatatattttatttatttatttatttatttatttatttattgacaggatcttgctctgtcacccaggctggagtgcagcggcctgatcaaagctcagtgcagcctcgaacttctggggtcaagccatcttcctgcttcagccttactagtacctgggactataggtgcatgccaccattcccagctaatttaaaacatttttattttgtaatgatggcttcttgctatgttgcccaggctggcctcaagcagtcctcctggcctcaagcagtccttctgccttggcctcccaaagtgctgggattataggtatcaagcaattctcctgcctcagcctccccagtagctgggactacaggcatgcaccaccatgcccatctaagttttgtatttttagtggagatggggttttgccatgatgggcaggctggtctcgaactcctgacctcaggtaatccacccacctcagcctcccaaagtgctgggattacaggcatgagccctggcacctggcaatatagagtattcttgacatcttgacctgtgcagtaaagaagataattaaaatgagcgataaatagtctaagcttgaaagttaaagagcctaagcttgaaacactctgtgacttagtttttgcatttattctgtcttctatgccccccaaccttactccaaattaatgaggcattattttatttatttatttttttgagacagagtcttgctctgtcgtccaggctggagtgcagtggcacaatcttggctcactgctacctccgcctccagggttcaagcaattattccgcctcagcctctcgagtagctgagactacaggcgcgtgctaccacacccagctagtttttttttattttcaatagagaccgggtttcaccatattggccaggctggactcaaactcctgacttcgtaatccacctgcctcagcctcccaaagtgctaggattacaggcgtgagccactgcacccggcctaatgaggcattattgcttaaaaattcacatcaagctgggcatggtgatatgcacctttagtcccagctgcttgggaggcttagaggcagcaggatcgcttgaagccagaagttcaaggctacagtatgctatgatcatttctgtgaatggccactgcacttcagcctgagtaacgtagcaagacgctgtctccaacagaaaattgacatctgaagccttgactacagggggactatactggtttatgtgaagtgtggggagagagcaggattgtgcttctttgtacacatttgcttctcccaggatagtgtcatagtgcctaggaaggtgatgtgtgtgtcagatacaatgatagtgaaaagaagggattggaattttcatacctgtgtcagtctaaatgagcattaccttgtctgaattgtctaagtggtaagcttcgtgatttgaaacagttttcactttgaaaaactgcttccgtggattaaaagttgtcaccactaaagtgggctgtggtggagtcgatgctgatcctcacttagggcagtggcctccaaggggaagagggcacacaggatggctgggtgggggtgggaagaaaagattaggcctttgatttatattcattttgaggctcagccttatttagtttctcactttggatgtattttatatatatacatcaaatatacatcaatattagttcattagtacatgtaggtcattaatttataaataaaaggttgaaccacaataaactgctgataattgtttttgatctgtaaaagtggcagttatcatagtttaacagcatatacat

SEQ ID NO: 1148 - DNA, 2300 bp, Homo sapien
ccacgcccggctaattttttttgtattttttaataaagacgaggtttcactgtgttagccaggatggtcttgatctcccgaccttgtgattcacccgcctcggcctcccaaagtgctgggattacaggcgtgagccaccgcgcccggcctgcattccccttaaaacagggaacaaggcaaggatgtctaatgttatcacttttatttaacagactactggaaatctgcacaataaggaagaaaaagaaaaagcactcagcttagaaaaaaaaaaactccctatttatttgcagatgaaattattatctatgtaaaaattccaaggaatctatacaaccccccctaaaattagtaagggagttcagcaagatggcaggttacaagatccgcacacgaaaccagttattcagaatgcagcacagagggacaaaaagatggaaaatatagacggtaggttaaaaagcttcttatgttcgagttccagaaggagagagaaatgagacaggcatctgaagaaaaatgactgcgatttcccaaaactggtggaagataccaacccacatattatagaaatccaaagacttccaagcaagaaacaaaacaaaaggaagaaaaaatatcccacttagacttatgatagcgaaactgcagaacagtgaaagatggagagctgaggacggagaaatccacaggggccaagtgaaaacaacgtttacaccttggacttaacgataaaagcgaactcgtacttgcacagtcattggcgcctgccaaaccccttacacatattaggtgatttactcctcacagcaaatgtattaggtagattctattactgcttgtattttacagatgagggagttgagatttggttatttgcccaaaggagcacactttatcgatgtagcgataggattttgaacaaggtagttctcgctccagttttgtgcccttaaccactacacatacttgtttctccaaagggcactgggaaaatgggaagccactgaaagactttaaaccggggagtgataacatttgtttctggaagatcctggcaccactgtggatagtggattaagtggggctaaaggtggaaataagccgctggaataatgtagccccaaacagggagggcctgaatgaactagtgaggtggcagaaggcgcaggcacaagcaaatggattcgcgagctcttccggagtcgagtccatagagcttgacctgggatcgcgttttactccaggtgcagagtgaggaaaaccgcgtttctgacgcaggcaattcggtggatagtgaaagtcattcactgaagtggactgaagcggggcgcacaggagactcggaggcctgaggacgagctaggctttggacgcggtggatttgtggcgtctgtaaagccggcggccagccgaggggcaggaaacggcagaaagcagaagccgcatctctagagctctccgagaaggaccttcgagagccccggccttagcgaagctcggcacggcgctgcacgcgtctccggaagccgcgcgcgcaggcgcagagcgggggggcgccccctggcggcgcagggaccgcccccaacctcgcgccgccgccgcccgcctcagcccaacatggcgatgcacaacaaggcggcgccgccgcagatcccggacacccggcgggagctggcggagctcgtgaagcggaagcaggagctggcggtgaggggctaggacaggggttgcacggcatggggctccgcgcccgccccgcctccaggccccaagcccggccgcgctaggccgtttgttactccgggggcgcggcgcggcgggccgggtgctcggcggcctgaggccgggtgcgcattctgcggcccgccggcggttcagcttcccggctgtgcgaatccggagccgggagagagccgggagcgcgggagggggaggggaagcggcagccgcaggagggggcgtggagggaggacggtgccggggcccggggagagggcgctaggaagggcgagcgtcagtgagccgcgggggtgggcgaggcgggctagtccgtgatctttgcggggagggggtggggaaggaggctagtgtgggagggggacccagtcaccccgtctggactttggaggctggtggggagcgtgttctttttggtactgggagtagatccgttgaatggaggtttttgatagacagggttgtgatgtgtttgggaacatctagaaggtgacaggcgagggagaagaacacattccggagaattcagaattgtgacaggcacccaaggcccaatgcac

SEQ ID NO: 1149 - DNA, 2300 bp, Homo sapien
ctctctcacccaggctggagtgcagtggcgatctcggctcactgtatcctctgcctccccggttcaagcgattctcctgcctcagcctcctgagtagacgggattataggcgcacaccaccacacctggctaattttttgtatttttagtagagatggggtttcaccatgttggtcaggctggtcttgaactcctgacctcgtgatccgcccgcctcggcctcccaaagtggtgggatttagccaccgcacccagtggcttaaaagtttttttacttgtttgttttttggtttacactaggaatatagaggtacttcctcaccttgaaaaacagcatctacaaaactcccacaactaatgtcatacttaatggtgagagactgaatgcattcgccaccccccctttttttttttgagacggagtctcgctcttgcccaggctggagtgcagtggcgggatcttggctcactgcaagctccgcctcccgggttcacgccattctcctgcctcagccttccgagtagctgcgactacaggcgcccaccaccacgcccggctaattttttttgtattttttaataaagacgaggtttcactgtgttagccaggatggtcttgatctcccgaccttgtgattcacccgcctcggcctcccaaagtgctgggattacaggcgtgagccaccgcgcccggcctgcattccccttaaaacagggaacaaggcaaggatgtctaatgttatcacttttatttaacagactactggaaatctgcacaataaggaagaaaaagaaaaagcactcagcttagaaaaaaaaaaactccctatttatttgcagatgaaattattatctatgtaaaaattccaaggaatctatacaaccccccctaaaattagtaagggagttcagcaagatggcaggttacaagatccgcacacgaaaccagttattcagaatgcagcacagagggacaaaaagatggaaaatatagacggtaggttaaaaagcttcttatgttcgagttccagaaggagagagaaatgagacaggcatctgaagaaaaatgactgcgatttcccaaaactggtggaagataccaacccacatattatagaaatccaaagacttccaagcaagaaacaaaacaaaaggaagaaaaaatatcccacttagacttatgatagcgaaactgcagaacagtgaaagatggagagctgaggacggagaaatccacaggggccaagtgaaaacaacgtttacaccttggacttaacgataaaagcgaactcgtacttgcacagtcattggcgcctgccaaaccccttacacatattaggtgatttactcctcacagcaaatgtattaggtagattctattactgcttgtattttacagatgagggagttgagatttggttatttgcccaaaggagcacactttatcgatgtagcgataggattttgaacaaggtagttctcgctccagttttgtgcccttaaccactacacatacttgtttctccaaagggcactgggaaaatgggaagccactgaaagactttaaaccggggagtgataacatttgtttctggaagatcctggcaccactgtggatagtggattaagtggggctaaaggtggaaataagccgctggaataatgtagccccaaacagggagggcctgaatgaactagtgaggtggcagaaggcgcaggcacaagcaaatggattcgcgagctcttccggagtcgagtccatagagcttgacctgggatcgcgttttactccaggtgcagagtgaggaaaaccgcgtttctgacgcaggcaattcggtggatagtgaaagtcattcactgaagtggactgaagcggggcgcacaggagactcggaggcctgaggacgagctaggctttggacgcggtggatttgtggcgtctgtaaagccggcggccagccgaggggcaggaaacggcagaaagcagaagccgcatctctagagctctccgagaaggaccttcgagagccccggccttagcgaagctcggcacggcgctgcacgcgtctccggaagccgcgcgcgcaggcgcagagcgggggggcgccccctggcggcgcagggaccgcccccaacctcgcgccgccgccgcccgcctcagcccaacatggcgatgcacaacaaggcggcgccgccgcagatcccggacacccggcgggagctggcggagctcgtgaagcggaagcaggagctggcggtgaggggctaggacaggggttgcacggcatggggctccgcgc

SEQ ID NO: 1150 - DNA, 2300 bp, Homo sapien
cgtttgtgcatggctaaagactgtggtgattttatagcatcctgggcatttcacatccatgaagtaggaattggggctctgcaccaggcgtttcttcttgtgtttcctcttctcctcttctggggagggatgaaggagatcctttgcgagaggcatgttctcgtgggtaggtcgtcaccgcaagaaagggcttgttttgatttttaaattgagacggagtctctctctgttgcccaggctgaagtgcagtggcgtgatctcggctcactgcaacctccgcctcccgggttcaaacgattctcctgcttcagccttctgagtagctgggactacaggcgcgtgcccccatgcccggctaaattttgtatttttagtagagacggggtttcaccacgttggccaggctggtctcgaactcctgacctcgtggtccgcctgcctcggcctcccaaagtgctgggattacaggcgtgagccaccgcgcccagcctgaagtatttttctaattaaatggagaaatgacaaagtaggagccaatgggaaacctcccctttgccccctgaagattcgctcaaaaatcaattcacaaaaggcagattaattggagaaaaggcatacaaatgtatttaaaatgtatacacggggagaatcacagtatgattacccaccccgaaaagggttcagaagcttatataccctcctggtaaaacaggtttgtgagggtgggagaaggaggaattctgttcagggattactaggcagaatgaatgaataagggaacagagataaatttgtaaatagttttttgtgtttttttttttgttttggtttggtttttttgaagacagggtctcactctgtagccctggctggagtgcagtggtgccatcacggctcactgcagcctccaactcctgggctcaagcgatcctcctgtctctgctgggaccacaggcacgagccactagcccctgccaaatttaatttttttgtagagacagtcttgctatgttaggcagtttggtctcaaactcctggcttcaagcgattttcctgccttggcctcccaaagcgccggaattacaggctgcagccaccgtgctcggctgtaaatagctacttttgacagtataagggtctctggtcaggtgtgattacattcttgggtggagaagaaagaaacaattattccttttggtagtctggatcttaggcagataaagacctgtgctttgggagagatgatgggcactggaaaggaacattgaggcttcttcagttcagcttgtcagtgagccgtattttggggttttggtttctgagccccaacagcattgcagaaagttcaggaaatagaagaggaaaagctaatgatttgaaaagctaatgatttgcccatgggttatcatctctgattgcatttccatttcttcctcccttctatttccaaatgtaaatgtaattatagtttgcacacaattttgtatcctgctttatcgttaacaagtcagggtttttaaagtttgtaaatggtttactaatggccacataacacccattaatttggctaacttccctactgctggtatttacattgtttccacgttttgtaattactaataatgtggcaacaaacagccttgagaggtttgctttttcccagtttttgttgttgtttgtttttgagacatctcgctctgttgcccaggctggagtgcagtggtgagatccctgctcactgcaacctgcgcctccagttcaagtgattcatttgcctcagcctcccgagtaactgggattgcaggtgcgcgccaccacacccggctaatttttgtatttttagtagagacggggttttgccatgttggccaggctgttctctaactcctgacctcagtgatccgtcagcctcggcctcccaaagttctgggattacaggcgtgagccaccactcccagccagaagtttgtttttgaaacttgaaactcccgccacccaagcctgtcgctgcggccacacccactagggagtagtcacgtgtttaacctttgccgcgaggatttctgggagcctgggcaccccggaagcggaagtccaggagttaaactcgtcatttcctccagctagaggagctcaactgatctgttttctttcgcccagccaaaatcacagaatgaaggcggtgaagagcgaacgggagcgagggagccggcgaagacaccgggacggggacgtggtgctgccggcgggggtggtggtgaagcaggagcgtctcagcccagaagtcgcacctcccgccc

SEQ ID NO: 1151 - DNA, 2300 bp, Homo sapien
agcagtagggaagttagccaaattaatgggtgttatgtggccattagtaaaccatttacaaactttaaaaaccctgacttgttaacgataaagcaggatacaaaattgtgtgcaaactataattacatttacatttggaaatagaagggaggaagaaatggaaatgcaatcagagatgataacccatgggcaaatcattagcttttcaaatcattagcttttcctcttctatttcctgaactttctgcaatgctgttggggctcagaaaccaaaaccccaaaatacggctcactgacaagctgaactgaagaagcctcaatgttcctttccagtgcccatcatctctcccaaagcacaggtctttatctgcctaagatccagactaccaaaaggaataattgtttctttcttctccacccaagaatgtaatcacacctgaccagagacccttatactgtcaaaagtagctatttacagccgagcacggtggctgcagcctgtaattccggcgctttgggaggccaaggcaggaaaatcgcttgaagccaggagtttgagaccaaactgcctaacatagcaagactgtctctacaaaaaaattaaatttggcaggggctagtggctcgtgcctgtggtcccagcagagacaggaggatcgcttgagcccaggagttggaggctgcagtgagccgtgatggcaccactgcactccagccagggctacagagtgagaccctgtcttcaaaaaaaccaaaccaaaacaaaaaaaaaaacacaaaaaactatttacaaatttatctctgttcccttattcattcattctgcctagtaatccctgaacagaattcctccttctcccaccctcacaaacctgttttaccaggagggtatataagcttctgaacccttttcggggtgggtaatcatactgtgattctccccgtgtatacattttaaatacatttgtatgccttttctccaattaatctgccttttgtgaattgatttttgagcgaatcttcagggggcaaaggggaggtttcccattggctcctactttgtcatttctccatttaattagaaaaatacttcaggctgggcgcggtggctcacgcctgtaatcccagcactttgggaggccgaggcaggcggaccacgaggtcaggagttcgagaccagcctggccaacgtggtgaaaccccgtctctactaaaaatacaaaatttagccgggcatgggggcacgcgcctgtagtcccagctactcagaaggctgaagcaggagaatcgtttgaacccgggaggcggaggttgcagtgagccgagatcacgccactgcacttcagcctgggcaacagagagagactccgtctcaatttaaaaatcaaaacaagccctttcttgcggtgacgacctacccacgagaacatgcctctcgcaaaggatctccttcatccctccccagaagaggagaagaggaaacacaagaagaaacgcctggtgcagagccccaattcctacttcatggatgtgaaatgcccaggatgctataaaatcaccacagtctttagccatgcacaaacggcagttttgtgtgttggctgctccactgtcctctgccagcctacaggaggaaaagtaaggcttacagaaggatgttccttcaggaggaagcagcactaaaagcactctgaatcaagatgagtgggaaacaatctcaatgaacacattttgggaacaactacaacaacaaaaaaaaccttcaaaaaacctaggaactccagatgacttcctttgggaattgtcccttaacccttcatgagaagtcaggagatgactcctgtttttcaggtgacaaaattggagcatggcaaaggtgatctgcccacttcaaatcgctagctagacggagcatagggactcgaactgccgttttcctcgcctccaagagtacagggacgaaccggtgagcagaaggcctaagaagtcaggcacaagaggtttctgcccaggaggcacagaatgaaacttgccggctgttggccccgccccacttcgaagctccgcccaggccaagaagcgcgggggcgggagtgagggggcggtttccatggtgacggcaaacaaggcccacactggacagggcagctgctgggttgctactctcgcctccgccatgattccgcccgcagactctttgctcaagtacgacaccccagtgctggtgagccggaacacggagaaacggagccccaaggtaaagacgggggctcgggagacaaaggagcctcgaaactccg

SEQ ID NO: 1152 - DNA, 2300 bp, Homo sapien
tgccagaaactcttttgtggcttcccatctcagactaaaatcaaaaatccttacaatggcctggaagatgtggcatgatctggcctacgatgtatccctgaccttatctcctgttattctgtttcttgttcactgtgctgaatccacagggacctcacttgctatttctgaaatgcctcattcactctcctaccacagggccctgacagctggtgttttcactgccaaagatgttctccccttgatattctcctggttcctttcatttcttccaggccttccttgagaatttgctatagcagagcacccctgcccaacatgatctccttttcttgcttttttcttctgcagccacattgataaaaggacatgccttttcatctatttttatgtaataagttgacagcacagttggtaaggctatgaggaaaagggaaatgggggcctacgcaggcacacaccttcatgaacctctccaccccgatacacacatctgcctctttctggctcgcacaaggttcatgatgtcctgtgtttcccaccccgtaagttggtgggtagttcctactgttcacatcaagcaacaaccataaatcggtcttcagcatgttaggagggtaagatctggaacagtggggaatgatttcacagaggcccgttgccaaggtggaaattgtctaccacctacccattcccaagatccctgtggaggcagcatagtgggtgtggctttggagcctcacaccccaagggatggaggattctggtgggttggtggcaaagctgcccctcaccactactcaggcagagggctcaaagggccctctgctcatgtgctagggaccttcaagtcaacgggttttgctcagcctcgctgtgtctgccacagggagtgggtggaagacacgcagctatggatccagcaggtgtccagcacccctagcaccaggatggacgtggtgcacctccaggagcagttagacttaaagctgcagcagcggcaggccagggaaacaggcatctgccctgtccgcagggaactctactcacagtgttttggtgagtgagccaggtgaggggtgggcactacacaccctactgctcccttcccttcaccttcagcacagatccaagcctgagcaccttggagctggagcccatctcatgctggaatcccctcttctccccctgcctgacccacccagcaacagctaactgcccccttccccttcccagctgaagggggccagcccctccacacctgtgggtatttctcctcaggcaggaggagagactaagaaaagaaataagacacagacaaagtatagagaaagaaaggtgggcccaggggaccggcactcagcatacggaggacccgcaccggcactggtctctgagtttcctcagtatttattgattactattttcactatctcagcaagaggaatgtggcaggagagcagggtgatagtggggagaagatcagcaagaaaacacgtgagcaaaggaatctgtgtcacgaataagttcaagggaaggtactatgcctggatgtgcacgtaggccggatttatgcttctctctacccagacatctcagtggagtaaagagtaacagagcagcattgctgccaacatgtctcgcctcccgccacagggcgttttttctcctatctcagaacaaacgtacaatcaggttttatactgagacattcagttcccaggggcaggcagaagacagaggcctttctcttatctcaacggcaaggggccttcctcttttactaatcctcctcagcacagacccttcacgggtgtcaggctgagggacggtcaggtctttcccatcccaccaggccatatttcaggctatcacgtggggagaaaccttggacaatacctggctttccagggcagagatccctgcggctttctgcagtgcattgtgcccctggtttatcgagaatggagaatggcgatgacttttaccaagcatgctgcctgtaaacattttgttaacaaggcacatcctgcacagccgtagatcccttaaaccttgattccatacatcacatgtttctgtgagctcaaggttggggcaaagttacagattaacggcatcttagggcaaagcaattgttcagggtacaggtcaaaatggagtttcttgtgtctttcttttcaacgtagacacagtaacagtctgatctctccttcttttccctacaccagccccgcctcttctacaagtcctccagctgccaaccactatattcttggcaacttgagttcctcacccct

SEQ ID NO: 1153 - DNA, 2300 bp, Homo sapien
atatattccagcaggggagtgtgtggtttcttctgacaccaaatacataatttttttccatatcagttctgcagttctcagataccagctgagtgtcccaacaatttaattcagttgtgacactaactcccggagttagcacagaccccacaagttaaggactaggtcccctgcttcagatggcagcttcaggctatccacacttacgcccggctaactacaaattcaggggttctggggtttgataatttgccagaaggactcccagaacccaggaaagtgctgtgtttacaattaacggtttatgataaaggatgaaactcagtcacagccagtggaagaggtgcacagggtaaggtatgggggagaggcacagagcttccatgccctctccacacattgatgtgttcagcaacccagagctttccaaaccccatcatgtaggggtttttatggaggtttcattacatagacatgactgatgaaatctgtggcagttggtgatagactcaatttctggtctcccttctctcctctgagtggctgaaagcaccaaccatgtggtcaagtgctttgtctttctggtgaccagcgcatcccccatcctgaagctatctaggggtctaccatgagtcaccacattagcataaactcaggtgtggtggaaaggggcttgtaatcaataaaaaagatacccatcgcttgggaaattccaagggtcttaggagctctgtgccaggaagtgtgacatttatatcacagggagacagtaggcagataaacatataatgtcaggaagtcttgcgtgctgtgaggaaaactaaaccaggctaaggggtttgggggagatgaggagtactttggggtggtcggggaaggcctctgaggcagtggcacttcagcagagcccttaatatgagacaggagccatgctagtatctagggagaatgttccaggcaaggggaacagcacatccagagcagctggggcaggagtatgctctgtgtgtcctgatgctgaaaggaggtcactgtggctggaatgtcgtgggccaggagagggtgtcatggtgggaagccattggaggttttgagttagcagctggattctagggtcattctggatgtccgtatcactgctgtcttgggaccctgtgtggaaacactggcattgtcttcagcccttcctccgtatgtagtcagtaagtgtagataagtagttcagataattcttaagaactattgtaaccataatagatttgttgcccaatgcacacagcaagtcaatatgctgagacaccaccaggttgcagcagagaaagaagtttaaccgtagggtcaccaaaggaggagatgggaggaatcctgaaatcatttccacgaggagtttggggttagggttttaagggttttggagtgggctggagtgagggtcattggttgggtgaagagtgcagggtgaagtcacggacagggagatgaagaagctgtgttctcatgcagatcccgtttctctggggatcttcaaactggttgctggaattagggatctgaaaagacattttaagcaatccttaaacaaaaaccttatgattctaatgtcagagatcttgcctataggaacaatgggggtgcatatcaattcttacatagtcttatgacccaaatgtcagaaatcctatctatagggacagtggggatgcaaatggtcagtacctagtgttcaggaacttttagcaacaaggatatgggccaaagtgccccctaattagtgcttaattataattgtatttctgtccagaacttggcagatacttcttgtcaaccctttggaggcagtttcactctcatatgccttactctgtgattctgtttttcttttttggttaagagcagaaaccccttcagaaactgaaagccaaaaattgcccttcctagaaaaatgtatgtataaattttgtgtgtggtttcctgaattttatagttctgtacttatttagtgatttgcccggccactcttgactttagaacatcacttttaagttctctgagtttttgttgcaaggataaaatgatattatacatgtgaaacaccagtagaaagcttggcacatacttatctttgcggttacctaaaacaggccagtcatttcagggtccccagacttagttctctaatgaactctcttcaatcacagaattccccctccttaccttatactcttgcttcaggatgcctcctatcttagtctgttttgtgatgatgcaacagaatactacagattgggtaattataatga

SEQ ID NO: 1154 - DNA, 2300 bp, Homo sapien
tttattctggtttgcaccaacttgaggcatcagaaacacattaactgaatcttctctctgggaggaggctatggtatccttgttttggggatcagagggacagtgtggggtggaagggggcatcttcactgatcatgaagttttttccaaatagctctcagagcttccctaacacaggtcacagtcagggccttcccagcagagctgcatttaatctcatgatacttgcccttggggcaataaaagcgaagcttgagggacagaaggtatttccagctctagcctatgacatggcctgcttttgctctaaagagaatgttttggggtttgtttcaaactcagagaaataaagactcaatcatcccctgctcaattagaatacctcactttataacaaattgtttgtttttatgaaatgagctacactgcatgaatccacccttcctcttgcctaaccatctcttctttggcctatccagagggtacaaagatggccattttctgacaatttgaggtaccaaaaaagagagagggaccaggcgaggtggctcacacttgtaatcccagcactttgggaggctgaggcaggtggatcacctgaggtcaggagtttgagaccagcctggccaatgtggtgaaagcccgtctctactaaaaatacaaaaattagctgggcatgataccatgcgcctgtaatctcagctacttgggaggctgaggcaggagaattgcttgaacccgggaggtggaggttgcagtgaaccgagaccgggccactgcactccagcctgggcaacaagagcgagactccgtctcaaaaaacaaaaacaaaaacaaacaaacaaaaaataaattgtaaaaagagagagggcttcttggttcaaacactggcatctagacactttattctggctagtagaaacagaaatcactgggtcttaatgccttccttcatcctcaaggcaagagacattcccatctactcattctttcacttaatgaatattttttgagtcctttgtttcagatgctattcaagtcttaaagacacagcagtgaacaaattaacaaggtccctgcttttaagaatcttacattctagtttgggggaagcagccaataaacttgtaaaaaaaattcaactagtgataaatgccatgaaataaataaaacagaatactgtaacagaataactgtgaaagggtgaaaggtggctgatttagacaaattagacaggaatgagttctcacagcaggaagggtcaccagataaaatacagaacgtacagttacatttgaatttcaggcaaacgatgaatacttttttagtctaagtattttccaggcactgttggaggtgtactaaagaaaagtattcattttttttctctgaaattctaatttaatttggtgtcctgtatttctatttgctaattcttgcaggcctaccaataggtgatatttgagcttaggattgaatgacagctatgcaaagattctgggaaagagtgattcaggcagagagaatatccagtgtaaatgtcagaataaccagagggagggacgtacacatgagattagataaataggcaggcaggggccagatcacagaatcctgtagggatggcaaaaagtttgaatcaatctctgtctctgtctgtttctcccttctcccttcccctacctctcattctaagagtgatgataagccactggagttgtaaggaagagaatgacacctcctaacggatatttggctgctgtgtggtcggcaacttttggaaggacttagaagacaaattcagaagacaaacttaagcttgtgccactggcctgggaagaagcttctttattcggaggtggacccaactgggagctctggccgcgcgttcaggttaactaggcggttgctatgaacgggcagcttggcggttgctagggctggagcgggctggggctccacgcagggcgacgcctaggcggctggagcgggggcggagccaggagggtgacggcgcgcgccgcgcgttcacaggaagtcgctctgaggccgagagggacgcgagcggaagtgacgtacgtcgtgcacacgtggtccggcgtggttcaggcgggtgtcttcggccgggcttgggaacataaaagtttgtttcaccacgtaagccggacctcgcactccggtcccggtctcgtcgccaagatggtgaagcccaagtacaaaggacggagcaccatcaacccgtccaaggccagcacaaacccaggtacaggcggcagggctgatcgagggtggagcttgga

SEQ ID NO: 1155 - DNA, 2300 bp, Homo sapien
atgcaaatttagagcaacacagctttcccagggaaacaactcatttggcataacctgaactgggctggccacttgcaggctgtgtgtctctgagcaattgacttggcgtctctgaggatcagaatttacatttatgggaaaaaaggaaaaaagaaaggaactacaatagttgcgaaattaggtaacagaatatatgtgcaaaacacagtgcttggcatacattaggtgcacaagaaacattctttcttattcacccattattgtcacatggttctaattcgttatcttctgtcacccaggtggctttcttccctttctcactcattcctgagcctagtaacgaggccccccaacttccacagacttttcctcaggcaggaaacccgagcccactgcctggcctaggacagcttctagggctgtgtggtttgtgttatttcttctcttttctctctctctccctcttttttttcctaaatgcaacaaaataaaaccaaacaaaaagcccaatgcctggcgtggcttgtcagagagttatgcaagtgtgtaaaaaaataaaataaaataaacattgagttttcggcatttggggctgtttgattagacacagagcatagccaagggccggttagacgcagggaaggctcagggcagaggtgagagaggagggacttgagtgggggttggaggttggagggggcccctggaccaactcggaaatgactgtttgcctcctgcaaacttggcaatgctctggctgaatgaacccagacactgggcatttcggacccaactgctccactttctctggctatccaccatccctgttccctggccattgggacactctaggggtcattacatccatcctcctgtcattgtaaacgaccctgtgcccttaactcaatagtcagggctccccccttctctcctaagagggagattccacagcctgtcttgattactcaccccccctatacacacacacaatcagtacatcttttctgctctagcttaactcccactaactacagttttagcccattttcctttcccaatctgaagtgaagctggagaacagctgtttgtcactctaagaagtgagtctccttccctcccttcttcgggcttgacttcaacatcatctgggtcactgcaggtgtctgtagccgttcaagactcattccacaaacatgtatggggttcccaccattaaccagaagtttgtagccttcatttcattgaaccctcagaacagatgaagccttgcgattcagagaggttcagtaacctaggcatgaccacacagctggtaagtgatagagccagacatgaatctaagtgttattgtatgatctccctcactctcacctaccagctgcctctggaggtgtcctcacctcggtgcccaggatctgatagccttggtatttcttctgaactgggaagatgcacagaagatttgaccctgaagggggagagggtgtggtcaagaccaccaggctctgtggagcctgttccttgtcactttccaggttcctgatggggaaactggggttttcatgagggtctccggccgcgttctgacgccaagatgagcggagttgttgcgggttctctggctgcgtggaatccccggggcgcggggaggggcaggggacaaaagcagaaggtctgccccagggtcctggggacttgtccctccgccagccccgcgctcggagcgcagagcgccagcttcgggcaaggacgtgtggactcccgggccggcgctccagtccattttttcttgcggatccctggaaggggggccggctcgcgggggggactgcgaagggggggattccctccctggtgctcgcagaggactggcccctctccgggctgggagctccggccgagcggaggcgcgacggagagcaccagcgcagggcagagagcccggagcgaccggccagagtagggcatccgctcgggtgctgcggagaacgagggcagctccgagccgccccggaggaccgatgcgccgggtggggcgctggccccgagggcgtgagccgtccgcagattgagcaacttgggaacgggcgggcggagcgcaggcgagccgggcgcccaggacagtcccgcagcgggcgggtgagcgggccgcgccctcgcccctcccgggcctgcccccgtcgcgactggcagcacgaaggtgagtcccctcgtagctgccccatccttctccccagcgcccccttccccgggagctggggcgcggcgggccctcccgtcggggctggttctagctgggt

SEQ ID NO: 1156 - DNA, 2300 bp, Homo sapien
agggcggacggggaccacccgaagaagtcgccaggcacgtacctgcggtcccgagacaagggctgagcaaaacctcgctgtgccagtgagagagagcggctctacagtcaaccgccacccaattcaaactccacagtcacaggctgacgaatgagaagccgccgtcccacaacatccaatcacaagcaagttcctgccggcccagggtcttccgcccaatgcgccccctatagcctgagtgcgacagcgaggccgccgccgtcgcgggtactcctgggagttgtggtccaggcttgtttccccgccctccccaccaacccacccggctccgccctggccggctgcgaactatacaaactactactcccggcaggccttgtggcggctctgcaataccccaagctctggagggctgggggcctactaggtcaggtcggctgtaggattctgctccagggttggcggctgcttctttctggcctggctgccactgagtagccgaggggccgccgtgaccctctgactgattgactggctggctgcctacgtcggcgctcctcagggccccaagctcctcaggccgaacttcgggcaagtggcgggtcggcagagacagagcagccccggcagggtttgacagagcaagggggacggaatgatagaggagcagggcaggggtgcaggctttggggggggcgcgctatcccgcggccagtctgggcagcgagtggggggaaccctgtcgttcctcgctcccccgcgggccggccactcccgcccagttcgcgtgttggcgcctcgactgggtgcgcagcgcggggctgcgacttcaggtgcaagtagtggcgcttggcagctggccacacggtgactgcagcatgagccgcggccaccaggctccagggagcccagggcaggaggcagctctgggtgtcgtggccgtgggcctgggaatgggcgtgtagacggcgagccccgccgagccgcggtcctgtcggaggtgctaactgtgcatcttggtatctgcccacggccacagggttggattgctcaagagttgtgctgagacccagaaggctagaggctagtttcgaagctgtagctcaggctgagtctcaaggcgggcggcgactggacggccagaccggcgagctcttgacgggtttgtggcctgattgtttggatttggtgcttttcacctgtggatgcggtctgaagccatgtcagaggggttgtgtttaagcgtgcatgttataggctatgggagtgataatcttgcctctccccctctgagttgaggaacaatcgaagaaataagcaaaggtgccaagcaggctcctgatgggcaccagcgagcttggggacagagcagtccaagcatagaagtcctggcaagcctggaccttcctggaaagtcctttctctctcttccaccctggtctgttgctccatatgcaacaaatatttgaatgtcgctcttccgcccgaggtcagccctgggcagtgggtagtgggggtgacaccccagtctgctgggtgcctgaggatctccatcagtcagatggccaagatgagacgggatgacaacccgtacctcatgtaggctttccccctgcaggtgtttttatgctgcgcaagtcgggcttccagcctctcggtttcagggtttccttcaccctactccccagtgagcccgaactccctgggcacctaggacgtccacctgcattttagccagagctgccacgtcaggagcccgtgatttactagtttttgccagttggttgtgatacacaatgtcaaaagtgtcattaaggcacaaccggaggcgcaagataagaggaaaagactccacagctaacaggacatgccaccaccgccacccaatttaaactgccgcaggctgacaaatgagaagtcgccgtgtttggacggtcccaacatccaatcccaaggaagcttcaagccgagtggccagtccacatgttggactacagtacccagaagtcattgcggcactacgatatattttcgcgactcagtagccaggcaggcccgcggagtagctttgtggggaggtcgcgtgtgagcatgcgcagagagactgtgggcgcgtggtgcagtccctggagggttctcacgctttggctgtctggacttttaagtttttccgctttttcaggaaggcgaccggcagcctcgggcaggggagacaggactgtatgtcagagaagagacggcgcttggacgccaggaatcctctgaagcaggagactgccctatccaggttacccttcccg

SEQ ID NO: 1157 - DNA, 2300 bp, Homo sapien
ccgtctcttctctgacatacagtcctgtctcccctgcccgaggctgccggtcgccttcctgaaaaagcggaaaaacttaaaagtccagacagccaaagcgtgagaaccctccagggactgcaccacgcgcccacagtctctctgcgcatgctcacacgcgacctccccacaaagctactccgcgggcctgcctggctactgagtcgcgaaaatatatcgtagtgccgcaatgacttctgggtactgtagtccaacatgtggactggccactcggcttgaagcttccttgggattggatgttgggaccgtccaaacacggcgacttctcatttgtcagcctgcggcagtttaaattgggtggcggtggtggcatgtcctgttagctgtggagtcttttcctcttatcttgcgcctccggttgtgccttaatgacacttttgacattgtgtatcacaaccaactggcaaaaactagtaaatcacgggctcctgacgtggcagctctggctaaaatgcaggtggacgtcctaggtgcccagggagttcgggctcactggggagtagggtgaaggaaaccctgaaaccgagaggctggaagcccgacttgcgcagcataaaaacacctgcagggggaaagcctacatgaggtacgggttgtcatcccgtctcatcttggccatctgactgatggagatcctcaggcacccagcagactggggtgtcacccccactacccactgcccagggctgacctcgggcggaagagcgacattcaaatatttgttgcatatggagcaacagaccagggtggaagagagagaaaggactttccaggaaggtccaggcttgccaggacttctatgcttggactgctctgtccccaagctcgctggtgcccatcaggagcctgcttggcacctttgcttatttcttcgattgttcctcaactcagagggggagaggcaagattatcactcccatagcctataacatgcacgcttaaacacaacccctctgacatggcttcagaccgcatccacaggtgaaaagcaccaaatccaaacaatcaggccacaaacccgtcaagagctcgccggtctggccgtccagtcgccgcccgccttgagactcagcctgagctacagcttcgaaactagcctctagccttctgggtctcagcacaactcttgagcaatccaaccctgtggccgtgggcagataccaagatgcacagttagcacctccgacaggaccgcggctcggcggggctcgccgtctacacgcccattcccaggcccacggccacgacacccagagctgcctcctgccctgggctccctggagcctggtggccgcggctcatgctgcagtcaccgtgtggccagctgccaagcgccactacttgcacctgaagtcgcagccccgcgctgcgcacccagtcgaggcgccaacacgcgaactgggcgggagtggccggcccgcgggggagcgaggaacgacagggttccccccactcgctgcccagactggccgcgggatagcgcgccccccccaaagcctgcacccctgccctgctcctctatcattccgtcccccttgctctgtcaaaccctgccggggctgctctgtctctgccgacccgccacttgcccgaagttcggcctgaggagcttggggccctgaggagcgccgacgtaggcagccagccagtcaatcagtcagagggtcacggcggcccctcggctactcagtggcagccaggccagaaagaagcagccgccaaccctggagcagaatcctacagccgacctgacctagtaggcccccagccctccagagcttggggtattgcagagccgccacaaggcctgccgggagtagtagtttgtatagttcgcagccggccagggcggagccgggtgggttggtggggagggcggggaaacaagcctggaccacaactcccaggagtacccgcgacggcggcggcctcgctgtcgcactcaggctatagggggcgcattgggcggaagaccctgggccggcaggaacttgcttgtgattggatgttgtgggacggcggcttctcattcgtcagcctgtgactgtggagtttgaattgggtggcggttgactgtagagccgctctctctcactggcacagcgaggttttgctcagcccttgtctcgggaccgcaggtacgtgcctggcgacttcttcgggtggtccccgtccgccctcctcgtccctacccagtttcttgcttccctgccccatctccgccgctccccgcagcctcc

SEQ ID NO: 1158 - DNA, 2300 bp, Homo sapien
atctttagcacctagcactgtgactgacacatgctcagtatttggagaaataagcaaatgaatggcttaataaataaaagggcaagtcaaaaggatcattcaatgtctaatatgtgagcagaccatgcatttctatccaggaaggagactacatgctggatagttaataataaggaaaacagaaaagggcaacccagcagaaaagtacagcctcctgcatttctccggacatttaataagggagtgcagaaacaggctgggatttttctctggccaggaaaactgatgtgtctttttttttgagacggagtttcactcttgttgcccaggctggagtgcaatggcgtgctctcagctcaccgcaacctctgcctcccaggttcaagcgattgtcctgcctcagcctccagagtagctgggattagaggtatgcgccaccacgcccggctaacttttttgtatttttagtagagacagggtttctccatgttggtcaggctggtctcgaactcctgacctcaggtcatctgcccgcctcagcctcccaaagtgctgggattacaggcgtgagccaccacgcccagcctgatgcgcccatttttaggttagcaatttccataagctgcagaaggagctgcttcgggttattcttctatctgagctctggttaactaaccatgtcatttattcattcatttttaaatgggtaaaatatacatatatttttaaaaatactattttctggccgggcgcagtggctgactcctgtaatcccagcactttgggaggcctatgtaggtggatcacttgaggtcaggagttcgagaccagcctggccaacatggtgaaaccccgtctctactgaaaatacaaaaatcagcggggcatggtggcaggcgaccgtaatcccagccactccagaggctgaggcaggagaatcacttgaacccagaaggtggaggttgcagtgagcagggatcgcaccactgcactgcactgcactccagcctgggtgacagagtgagactctgtttaaaaaaaattaaataaatttcctgatgtgtgaaaattatgtgaaattcacatttcagtgtatccataactaaaattttattggaatacagcccatccatgcccattcactacagctgttttggacctgtaaacagcagagctgagttgtccgacagagaccgccccgcccgccgccccccaaccacccccccatttttcatagagaaaaatgaagtagggaagtgagacagagagtgaaagggtctgcaattttccataagtggtcatgtcagatctcattaaaaggtgacatctgagcgagccctttctgaagggtgtcacctaaccccaaggggctcctggcctccgcccagggaagctctccagctcttaccgaagtagtcaagccagttcatctcgcgcagagccttggggagccgcaggatctcgatgttgtagaggttatccacctccttgaggaggttctgcctgtctgactcaatttgcttgattcgtatttccactgcgggagggcagagccgacaggacacgggtcacgggcgggcgaatctgtgcagctcgtgtccccacccgccagcatcccgcgaccgccccaggaggccgcgacggcctggccccttaccttcacggtcgaagtctttcagaaaggaggcgagcttccgcctccgtaaggagttggtcttggccacccgactactgcccttcctaggagccatggcgctcggcggaggctgcggggagcggcggagatggggcagggaagcaagaaactgggtagggacgaggagggcggacggggaccacccgaagaagtcgccaggcacgtacctgcggtcccgagacaagggctgagcaaaacctcgctgtgccagtgagagagagcggctctacagtcaaccgccacccaattcaaactccacagtcacaggctgacgaatgagaagccgccgtcccacaacatccaatcacaagcaagttcctgccggcccagggtcttccgcccaatgcgccccctatagcctgagtgcgacagcgaggccgccgccgtcgcgggtactcctgggagttgtggtccaggcttgtttccccgccctccccaccaacccacccggctccgccctggccggctgcgaactatacaaactactactcccggcaggccttgtggcggctctgcaataccccaagctctggagggctgggggcctactaggtcaggtcggctgtaggattctgctccagggttggcggctgcttctttctgg

SEQ ID NO: 1159 - DNA, 2300 bp, Homo sapien
catggtgaaactccatctctactaaaaatacaaaaaaagtaactgggcatggtggtgcacacttgtaatcccagctactcaggaggctgaggcaggagaatcgcttaaacctgggaggtgggggttgcagtgagtggagatcccgccactgcactccagcctgggtgatagaaggagactcgaaaagaaaaaagaaaaaataaataaaataaaaagaggataaagtatataacctcacaggtggttgtgaggattcaatgaattaatagacgtaatttaaaaaataataaatagagacggggtttggccatgttgtccaggctggtctccaactcctgggctcaagtgatctccagctttggccttccaaagtgctgggattacaggcatgagccaccgcgcccggctgaaagtaaaatgtttcaaagttttccgaacacacagcgttttctaagggtaggtaatgggttgttcaggagtcactccacggggcagtgctgactggagtggctgagtcccctgactgtttttctatcgcaattggaggagataaacgctgccctaaccaggccagtcaggaaagcggggagaaactggaggagccccctcttctcaccagccatgccctgcagcctgtcccccagggttttacaaggtgtccccgcggcggcccctctgctcaccgtgcccagagcacagccgggccctggaaaacgcctccaccttctgcgtgtgccaggacagctatgcgcgctcacccaccgacccgccctcggcttcctgcacccgtgagtcccccctccaggctgcactgcggagggtggggggtgggagtggccaagaaggaaggcctgatccaggtggtggtgagggcagggtctccgcactggggcgcacgtgggcggatatgggggccagcgccccggaaggcggcgtacgggggagcggagcctggacgcgccctgggggccggggcctttgatgagaagaaccaggacaactgcgagagtccagacggaggatggggttaggatgcctggcagatcactgaggagagcgcccctccgctgccctctcctcaccctgcctaccctccagccgaaaggggggctcccgaccttcgcaccatcggttcggtccccatgctgccatcctcggttcctcactaacctcctcccaaatcctcaccaactgccccgccactctcacattccgacctcccaagggcccccacgcccccgtctctgacccttcccggggcaagcccctcctcccgctcgcccctgctcccactcacccctgctcccgctcgcccctgctcccactcacccctgctcccgctcgcccctgctcccgcttgccccgggctcatccgccctcgacccctcactgactgaccatctctgtaccaatctccctgactgaaccccacgcccccattcctcccaccccagacccctcacaccttcctatcccccatgcccactggctcccacggcccattcccgctcatccatccctgttccttcaccggtcgtcccttctaccttcctccctgactgaccccatgccactgtctctcctgtcccccgtcccccctcatccaccaagtcccttgatgaacgccctggttccctcctccccgactgaccctcgcgcccctgcttctcctgcctcactgggggtggacaagaccccgcccccccctcgtgcatcccgcccctctcacgggcacccacgccccgccctgaccgccccgcccctgtgccgcctcagggccgccgtcggcgccgcgggacctgcagtacagcctgagccgctcgccgctggtgctgcgactgcgctggctgccgccggccgactcgggaggccgctcggacgtcacctactcgctgctgtgcctgcgctgcggccgcgagggcccggcgggcgcctgcgagccgtgcgggccgcgcgtggccttcctaccgcgccaggcagggctgcgggagcgagccgccacgctgctgcacctgcggcccggcgcgcgctacaccgtgcgcgtggccgcgctcaacggcgtctcgggcccggcggccgccgcgggaaccacctacgcgcaggtcaccgtctccaccgggcccgggggtaaggccgtccgcgccccccaccccgaggccaccgcgcctgccgcccctgcgccctcttggggccgccccgtcggtcctgcgggagccccacccacccaccccagagaagccatcctctgtacacgcaccccgcccctctccgggacacaaagtcacccccccggacgcccc

SEQ ID NO: 1160 - DNA, 2300 bp, Homo sapien
tgaaagacagagacagtacttgaacctgtgggtgtggttgggacagaccaggagaacgtgtggggtaagaagccaagagggccaacaatgaagactcatagaatagcaatacttaaggacaagtagaaaatacagagcccattaaaaaggctgagagggagtgatcagagtatggaggagaactaggagagtgtgatattatgacagccaagagagattgaaggtgtccaggaaggaatgccctacagagttgggaagcagtcaggtaagtcaagggttagaaagtgcccagttggtggccttggtgagagcaattgcagctgagtgatggacacagagaacaggttgcagtagattgagggataaaggaagttgaagagcttgagtcagggaatctagaagcctggatttgaattagaagaggaggtatctcgaggaggacattggattgagagaggatttttattatagatgggagagacttgtttgtatgcggaaggacaaagagccactgggataccaagtgtgtatatgggggggatccccatcccggtcccaggaggcaggagtattttattactgatgtgggctagaattgctgatgcattttgctaataaaaaagcaggccagattttagtcagttttattattgtttttacatactctatagtttgtgcccttattgcctgcacccaaaatgggccactttttactgcttcactaccaagaagggagatgactgatggaatgtagtatttgatgaggttaaagggagagatccagggtggagacagaggggctggccttcaacaggaggtggctcattccctcctctaggactggaagggaggaggagaggggagatggttgtggatgggggcatttgtgtattctgatgggcagatgttgagggaattatcaactgatggcttcccttctccctataaggtgggagggagggcatctgtacaaatggacagtaaggtccttgtctgttttattcattgttgtgtatctatagagcctacctagtagatgccaaaaaatatttgctgaatgaatggatcaggagtgagaggaggaggtttctctgggaaatgagggagaaagagagagagagagaaagagactcaggaacccaaaccatgtctgatgagaacagaaaaaggccatttgtaatggcctcagctctgccttggggagtggggagctggggacaatgccaaggaaagcttcacaagggagatgttatttgaactggggtttggagaagtatagaagtttgccaggagaaaaaggatataaggaattacagaacaagacccagaggtgtgaaaggatgagctcagtgtaccatggttagagtggctggcagtggggagctgttggaggacattaggaagggaagggaaatgattggatttgcatttagaaagttaaggccttccaagtgccttctgcagctaacacaagcttccctctaaaagtagatggataagtgggggaatagaacgaatatgttcttttcccctttttgtttctctttagtgaccttgacttttgttctccctcggttagccactagagaaattagtaaaagagctggggtttcctttgggggaaaaaatcagggcatataacaagtagctttaattctctgctagggccaggtgcagtggctcacacctgtaatcccagcaatttgggaggctaaggcaggaggattgcttgagccaggagttcaagatcagcctgggcaacacagggagatcccatctctccacacacaaaaaattagccaggcatggttgcacagcatgcctgtggttccagctacttgggagggctgaggtgggaggattgcttggccccaggaggcaggggctgtagtgagctatgattgtgccactgcactccagcctgggcaacagagcaagaccctgtcacaaagaaacaaacaaacaaaacaactcagtgggattgccttggagccaagggacccaagcagatatgttctctgaggctccatagggcacaatgagcccctgtgatggggtggcacaaggggcattacagacagcgaagctaatgggggctcatcctaagaagcactttctgccagcattgttcaacaaaggcagcctcagaagcgggtgaatgcctcatgataaagtatgtgacaaagactgtggctactgctggggaagctgccggaggaccaggccagtgggagctgagctagattatctctgaaggtctgaccttgaagagagggaggggctggcagtcaggaatccct

SEQ ID NO: 1161 - DNA, 2300 bp, Homo sapien
cagatgcgtgaaggtgtgtgtggtggaagagggtagaaaccagactccaacagtcaggtatttgccagagcatcctatgtagatttccccagataatttcccccatctgtttggtttctgaaagatccttgtcaggttcagaggaagtctgtattttgttttagcaccgagggtcagaacctctgggctgaagtccctggagcttcagtaagaagccatgattggtgccttagagcctgctaaggggatggaacccggttttaaagaggagtgaggggtggtggagtgaggactcattttgaaatgaaaggagtcctgggtctctaagcagcttctaaaaataccatctcccagaggtggaggcagggggaggggagaaatcgagcgtgaggagaatgaagatggaaaggaggtggcagtgtgagaacccttcctcaggtaggtctggttttagaagtcccgcctgcatccaaggactggagggatgccacacctccttctgcttcctcagggggcttgtctcctgtggtgtccaagccacagcctctcctgatgacctttctttctgcaggtaaagaagaccaattcctcccacctactcctcctattgctactgtccagcaagtatgtctgagtgggcacgtgtgcatttactcgcacatatacacaagcacacacgcagaaatggcacatgaaagcgggttgtaaatggccagtgatctacgatgccaggaatcctccttacactcggcgttcaaagaggtatggactctggcagagacagcgtggttcaccagggcatccgcagcacagagcatggcgcccagtgagggctgggtagaggggtgagggatacatatatgcaaaagcacagacactcagaccgcaggggccaagtagtcacaggactcacactcactctcgaggtttctcaggctatattcgcttccaaatagagagggggtgggtcccccaagaaaagagctcggaaaagccacgaggtgggtggagctttctcccctcaagttcagcccagatggtggcgctcagtagccgcctccctcgtcctggagggccccaacccttcccaccaccaaagtgttaaaccctcagcttgcacataaatgaccttcactagacagaggtcttgttccacgttttcttgcggcttcttcagcgccggctgaactctgccaggattgctccgcctctctcgcagatgtctccgattcctggcctctgtgctgttcaccagtcccctggggtgggcggagtggggtgatcaaagaggggaacccccgactctgagcagactgagggcatgggtggttgtgaggtgtgctgcttgtatcttgacagcaggagcaagaacctgaggaaccgatcgttcatgcaaaaccgccaccgcccccatcccagcgtccacatggtttcccagcctcggaagcgcgttggtagggcaggaccccgtccctcactttgctctcctttcccgagcagctcccgggatcgttcggcccctccttcctgccgctgtgtgtgtgtgtgtgtgtgtgtgtgtgtgtgtgtgtgtgtgtgtgtgatgagggcgggaagagaaagggggggatgagctaggagacaccgggagcctcagacacaggaacagacctagggcagggagacaggagagctccccagagcttggggtcaggacataaagcttcaaaaccccgcaagtcctgggaacaagggagctttcagactagctcagaggctgcaagtgttgctgcctccccgagggtcgcccctccttaagccaagcccaccttgcctgcctacttctcaggaatgaggagctaaggtttagcgctctgggccaccgatgccagctcattcccctctcgcagaagccctgccagctcccacagctgccccaccccccacggtttggagatctgcaggaccccttcctttccccaccagttgggtgttccgcccctggcctatgaaactccaccttcccaccctctgctggcggggattggttggcatcccgcggcggtgcctagtgattggttcccatggatgatggtgagcggtgagactccgccccccgctggctctggggtctgggggcattgctcagcggtgctaggctggcgcggcttgagccgccgccggactgacagctcggtctgcggaccatggagacctgcgccggtccacacccgctgcgcctcttcctctgccggatgcagctctgtctcgcgctgcttttgggaccctggcggcctgggaccgccgaggaaggtgagaag

SEQ ID NO: 1162 - DNA, 2300 bp, Homo sapien
tgccgtccttacccgttttcttctctttctttctttctttcttttctttctttctttctttctttttttgagacagagtctcgctctgtcacccgggctggagtgcagtggcgtgatctcggctcactgcaacctccgcctcctgggttcaagtaattctcctgcctcagcctcccaagtagctgggactacaggcgcctgccacctcgcctggctaatttcttgtattttagtagagatggtggtttcatcgtgttgcccaggctggtcgcaaacgcctgagctcaggtaatccacctgccttggcctctcaaagtgctggattacaggcttgagccactgcacccagcctcttctcactctttctattcccagagtcacctcactctttggtagacatggtattctctccaacatttaacccactccacaaatgtaatctcatctagtcatggtaattctatccccctcggcaataatttgtctggcataaaaaggcctaaaccagattagaccaaggagattcaatgagatgtttgtttaggacttctgggaaagagaaatcagtcttacccttgcctgtggaatgggaagagcagtcaatagccatagcagccattttgtggcatgaggggaactgggtttgtatatgaagtcagtggtggggagagtagagcagtgagacgggaacatctcaggttcctaatgacattgttggatcagagaaaatacccactctgccctgccactgggctccttgctttgcaagttgatacactggcatattccttaagtcaggctgaatcgggtatgggcgacctggagctgaaggcattccacttcattcacatttaccaccataaggtctctcaagctcactttcctcggctgcaggtctaccaacacttcccaagctccctgctcctcttcctgggttccctacaattcattttacttaaccaataagaactgggtgcccgccatcatcccaagctctgttttagacatgcagacagggaatgaaacaaagttgctgtcattgcggaccactgaaggaggcatatgataaacaaaactatcttctgaataaatgaagtaatgaataatgcagtgtaggaactctatcaatagcgagtgaaaagcttattatctacagactatcacaccaggggctggtactcacttaaacggcactaggaagtgagtgtcagatgctgttccggcagcccttggcgtctaacaaggtaaataagacggggcctgtcctctggagcccagaatccaggaagaaaggcgcacatgtattgagcgcttgcttttcaggccccgtggaagtgctttacgggaaccatctcatttaatcctccctgactctaggaggttctcccaggagagaccgctccagacgacatcaggcctacaagccaagaaatgcagcaggcctctagaaactgagaaagacccccagatgacagccagcaagcaaatgggggccttagccctgcaattgtatggaactgaattctgccattgagctggacgtagatccgttcctagagcctccagaaaggagtgtaacctgccaacgccttaattttggcttcgtgagattccaaccagagaactcactaagccacactgcgacccggcaggctgggcagtgcagcgagctctggagagtgcgccctgacccggggtccaggcccggtcagtgtgaccttgcgcgagtcacggtcgtcctccgcccgccaggccccggacggcgtctgcagggtccgattcctggggatttcccgacgccccttcccccgaggttcaggggctgcctggggtgccggggaggggggccgagggatgggggacctggggctagaagggtggcactgagacccgtagggagggggccagtgaagtgagtaaaggtggatcgacgaagaaggaaatccttggggagagaaccaccgacgcgcgcttctttcccccccccgccccgcctccgcccccgcccccgccgcgccgcctctctcccgcgctccggaaggcctgcgtccccgctccccagccaggcgccaccacctgccgcccaggcagccaggcgactcttctttcgcgggtcacgcggcctgactcaggcccctgctcctgtggccccgaaactcgccgttcgctgggccttgcgttgcactcggcgtgcagttccccctcggctcgcggccacttggtccgcgccgcctgcgtcctgtgtgccgagcccgcccgcactgcggggacaggccgggcgccgcccacgccgcgctctg

SEQ ID NO: 1163 - DNA, 2300 bp, Homo sapien
ttgcaagttgatacactggcatattccttaagtcaggctgaatcgggtatgggcgacctggagctgaaggcattccacttcattcacatttaccaccataaggtctctcaagctcactttcctcggctgcaggtctaccaacacttcccaagctccctgctcctcttcctgggttccctacaattcattttacttaaccaataagaactgggtgcccgccatcatcccaagctctgttttagacatgcagacagggaatgaaacaaagttgctgtcattgcggaccactgaaggaggcatatgataaacaaaactatcttctgaataaatgaagtaatgaataatgcagtgtaggaactctatcaatagcgagtgaaaagcttattatctacagactatcacaccaggggctggtactcacttaaacggcactaggaagtgagtgtcagatgctgttccggcagcccttggcgtctaacaaggtaaataagacggggcctgtcctctggagcccagaatccaggaagaaaggcgcacatgtattgagcgcttgcttttcaggccccgtggaagtgctttacgggaaccatctcatttaatcctccctgactctaggaggttctcccaggagagaccgctccagacgacatcaggcctacaagccaagaaatgcagcaggcctctagaaactgagaaagacccccagatgacagccagcaagcaaatgggggccttagccctgcaattgtatggaactgaattctgccattgagctggacgtagatccgttcctagagcctccagaaaggagtgtaacctgccaacgccttaattttggcttcgtgagattccaaccagagaactcactaagccacactgcgacccggcaggctgggcagtgcagcgagctctggagagtgcgccctgacccggggtccaggcccggtcagtgtgaccttgcgcgagtcacggtcgtcctccgcccgccaggccccggacggcgtctgcagggtccgattcctggggatttcccgacgccccttcccccgaggttcaggggctgcctggggtgccggggaggggggccgagggatgggggacctggggctagaagggtggcactgagacccgtagggagggggccagtgaagtgagtaaaggtggatcgacgaagaaggaaatccttggggagagaaccaccgacgcgcgcttctttcccccccccgccccgcctccgcccccgcccccgccgcgccgcctctctcccgcgctccggaaggcctgcgtccccgctccccagccaggcgccaccacctgccgcccaggcagccaggcgactcttctttcgcgggtcacgcggcctgactcaggcccctgctcctgtggccccgaaactcgccgttcgctgggccttgcgttgcactcggcgtgcagttccccctcggctcgcggccacttggtccgcgccgcctgcgtcctgtgtgccgagcccgcccgcactgcggggacaggccgggcgccgcccacgccgcgctctgccgggcgcacagtctgcctgggaagcgcgcggccgggcgggcggccatggcgcggcacgctgggaggtagcgcggcggctgcaggagcgcacagtcggccatggcccggcggcggcgccgcgcctgcatcgctctgttcctggtgctgctcttcgccttcggcaccctcatgggtctgcgcacgctcaaggctccggacggactcccggcgctgggcccgggcctggagctggcgccctttgagcgacgcccagagggggcccccgcgcccgctgccagggccccggcagcccctgccgcgccgcccccgccgccgccgccgccccgcaccgcggaccctggcggctcccctgggccggcacccgcggaggccgagcccgcccccgtgcagagcctgcgcgtctactcggacctgcacgccttctactactcgtggtacgggagcccgcggcgcgagggccactacattcactgggaccacgtcatggtgccgcactgggaccccaagatctcggccagctacccccgcggccgccacagccccccagacgacttgggctccagcttctacccggagctggggccctacagctcccgggaccccgaagtgctgcgggagcatatgacccagctcaaggaagccgccatcggtgagcgccccccaccccgggcggccctgccccccagcctcacccttcctccttcccacaccccagctccctctggtcctgtcaccggccctttggtcccacttatccgcca

SEQ ID NO: 1164 - DNA, 2300 bp, Homo sapien
tgagattccaaccagagaactcactaagccacactgcgacccggcaggctgggcagtgcagcgagctctggagagtgcgccctgacccggggtccaggcccggtcagtgtgaccttgcgcgagtcacggtcgtcctccgcccgccaggccccggacggcgtctgcagggtccgattcctggggatttcccgacgccccttcccccgaggttcaggggctgcctggggtgccggggaggggggccgagggatgggggacctggggctagaagggtggcactgagacccgtagggagggggccagtgaagtgagtaaaggtggatcgacgaagaaggaaatccttggggagagaaccaccgacgcgcgcttctttcccccccccgccccgcctccgcccccgcccccgccgcgccgcctctctcccgcgctccggaaggcctgcgtccccgctccccagccaggcgccaccacctgccgcccaggcagccaggcgactcttctttcgcgggtcacgcggcctgactcaggcccctgctcctgtggccccgaaactcgccgttcgctgggccttgcgttgcactcggcgtgcagttccccctcggctcgcggccacttggtccgcgccgcctgcgtcctgtgtgccgagcccgcccgcactgcggggacaggccgggcgccgcccacgccgcgctctgccgggcgcacagtctgcctgggaagcgcgcggccgggcgggcggccatggcgcggcacgctgggaggtagcgcggcggctgcaggagcgcacagtcggccatggcccggcggcggcgccgcgcctgcatcgctctgttcctggtgctgctcttcgccttcggcaccctcatgggtctgcgcacgctcaaggctccggacggactcccggcgctgggcccgggcctggagctggcgccctttgagcgacgcccagagggggcccccgcgcccgctgccagggccccggcagcccctgccgcgccgcccccgccgccgccgccgccccgcaccgcggaccctggcggctcccctgggccggcacccgcggaggccgagcccgcccccgtgcagagcctgcgcgtctactcggacctgcacgccttctactactcgtggtacgggagcccgcggcgcgagggccactacattcactgggaccacgtcatggtgccgcactgggaccccaagatctcggccagctacccccgcggccgccacagccccccagacgacttgggctccagcttctacccggagctggggccctacagctcccgggaccccgaagtgctgcgggagcatatgacccagctcaaggaagccgccatcggtgagcgccccccaccccgggcggccctgccccccagcctcacccttcctccttcccacaccccagctccctctggtcctgtcaccggccctttggtcccacttatccgccagcctggcttcttagctgttccctcccactctcatcctgggcccaccatgcgacaccgcccctccgtctagtattcagaccccccagctgggcccttccatccctaacatccagggcccttcccatagggcggaactgctaggagtttgcaccaggagagggaggcagagtcttcaaatttgttgggcgatgggaagtgaggcctggagtcctggcccgcaggttctggggttcagaggagtggaacttagggcggcctctgctttcatggcaggtacagggtagagcagcagccgttcctgcttttgctggctgcagagaggaaagtgtgcccgtgttccatgaaggcctctgctctatttgcagttggaggtagtgttgggggtttagaggcttttcatcaagcacccagctggagggaaggtcccagggcgcctccttcgtaggctatggaggggaggctcacttatttcggatttcgtcactgaattttgctggattttacagatggcctctgctcagggctcttctccatgcgggacgttagggttaggggtgcttctcttcttcagaggtaggcctgtggcttccaggtgggtgtggcactgtcctcccattccctttgttctactacttgctgaggcagtctaaagcctggctcccttccggcctggcgcgctacggttcccgcaggcgctccgcttcagcaccgcgggcgtggacagctccggggcgcgaggctctgggactcatctgcaggaagtgaacctggcaggaggcttgcttcaggtttttaggaaccatttttgcaattggagatgtttgtgaggaaaaaaatctctgt

SEQ ID NO: 1165 - DNA, 2300 bp, Homo sapien
attacaggtgcccaccaccacacccagctaacttttgtatttttgtatctttagctgggcgtggtgatgcacagctatggtcccagctacttggggggctaaggtgagtggatcacttgagctcagaagtttgaggttacagtgaactatgatggcaccactgtactccagcctgggatttcaccatgttggccaggctggtcttgaactcctgacttcagatgctctgcccacttcgacctcccaaagtgttgggattacaggtgtgaaccactgcacccggcctcccagggctttgggaggcagaggtgggaggattgattgcttgaggccaggagtttgagatcagcctgggcaacatagcaagaccccatctctactgaaaaaaaaaattagctgggcatagcagtgcatgcctgtagtagtcctagctacttggaaggcagaggtgggaggatcacttgagcccaggagtttgaggttacagttagccacaattacaccactgcattccagctgagaacagagcaagattctgtctcttaaaaaaacaaacaaaaaaaaagagagtattgagtgcctacatgtgtccaggcactgacttaagcccagttgtacagtaatgggtaggactagcgaaatttctgatttcataatgtttactttctagtgtatgttgcaggtactgtggagcagacagtaattaaatgggaaaaatcaaacagtgatctgtacaggattttgtgctagagtgtgcccacgatgctacttaagaatggatagtcaggtcaggtgagtctgaggagacaacaggtgagctaacacctgaatgagcagtcagggctgggtgtggtggctcacacctgtaatcccagcactttgggaggctgaggtgggaggatcacttgaggccaggagtttgagaccagcttgggcaacatggggagactctatctctacaaatttttttttaaacattagctgggcatggtgatgcatgcctattgtcccagctatttggggggctgaggtgagtggatcacttgagcccaggagtttgaggttgcagtgagttacgatggcaccactgtactccagcctgggcgatacagtgagacttaagaataaaaaaaagaaaaaagaaaaaaaagcccaggcccagtggctcacacctgtaatcccagcactttgagaggctgaggtgggtggattgactgaggtcaggagttcaagaccagcctggccaacatggtgaaaccccatctctactaaaaatacaaaaattaggcaggtatggtagcgggtgcctgtaattccagctacttgagaggctgaggcaggtgaatcacttgaaccccaggaggtagaggttgcagtgagctgagatcgcccaccgcactccagctctgagcaacagagcaagaccctatctcagaaaaaagtagtaataataagaagaaaaaagaaaagaaaaagggtcagctctgcaaagatccggaggcagggagaaaattccaagcagagggctggcagatgcaagtcccataagatggaacaagcttgcatgacacatgagagccggatagaaaggccagatggggagtaatagctgggaaaagagcaggaatggagtaggcagggccagatcaagtaggtgggaataatgaatggattatatggaggcaggatgggagcctggagaccagttagctggctgttgttgcaatccagatggaagacggtggtggcttggctaagggtagggaagtgaggcttaggaatgacaactggagagaggaaggagggaaccaggttcttgcttagaggcatgatgactccaactgtggagactgactggctccagaactgggctgtgttgcatccgtatctcatccacgggaggtcctacagctgtgctggtctctcccatccagctgaggctcttctttctccttctcaggtatggctcccatggtgcattttaccgctataagaacagcatgggcaagagcctcccactcttttatatctacgactcatacctgacgtcccctgaggcctgggcccacctcctgacaccaaacgggccccattcgatccgcaacacgccctacgatggggtcttcatagcgctgctggtggaggagggccacacccacgatatcctggccgccggatttgacggcatgtacacctactttgcctccaatggtttctcctttggttcttcccatcagaactggaaagctgtgaagaacttttgtgatgccaacaacctcatgttcatccccagtgtgggg

SEQ ID NO: 1166 - DNA, 2300 bp, Homo sapien
gttctaatctatgtagccaagacaggactaggatgatcttttctttgacctggcttgccgcaaagataagagaacagggtcaagagtcaaaaactaggtaaaaagaccaggcatggtggctcacgcctgtaatctcagcactttgggaggctggatctcttgaggccaggagtttgagactagcctggtcaacatagtgaaaccccatctctactaaaaatacaaaaattagccgggcatggtggcacacgcctgtaatcccagctactcactcgggaggctgaggcaggagaactgtttgaacccgggagatggaggttgcagtgagctgagatggtgccactgcactccagcctgggcaagagagtgagactgtctcaaacaaaacaaaacaaaaaaaaactaggtaaaaatctggtcacttaatggctgcgtaacctggaacaagtgattccagctccttctagctctagaactatgctcctggatctcactgcgactctgatcagggtaggaagagtagaacatggtagattctgcatgccaccagcactcagtctttgggctatgagaaggatactccccctagagcagtggactgaattgttaactgagctagagcttccccaaccccccaaggaagacactgcagtggcagttaggcctggaaatctgggacaggaaatcataaataccagttactgtgttggacaggtcaaatgattgctgacaaggtaaaaacctcccctccctgtgccacatcccgattcttgctcctggggtacagccaccaggaccaagtcaaacctgcactctgagaatgggaagggatgctgaactctcactttctaagaaccctgagccccactctaggtctgggaatggaaaacccatcgaatggagttctgagcagggatacgggctctaactctggactttccatcgtatctctatgtgactgcacgcaagttactctatccaggcttattagctggatgtaataagcccaaggaaggcccaaggcctgatgctggatactatgtgtgatactatgtgtctggccgagtctggggacacaatgtagcttattactacgttttacatcttagtaataagaaaaaaaacgaaatttctatgtgtcctcctttgttctaatctatgtagccaagaaaggattaggatgatcctttctttgatctggcttgtggcagagataagagaacaggggcgagaatcaaaaactggttaaaaatctgagtcagtcacttaatggctgtgtgacctggaacaagtgatttaactttctggaggctaaacttcatctttttttttttttttaagagacagagtctcgctctagagccctgcctggagtacagtggcacaatctgagctcactgtaacctctgcctcccaggttcaagtgattctcctgcctcagcctcccaagtagctgggattacaggcatgcgccaccatgtctggctaatctttgtattttttattagagatggagttttgccatgttagccaggctggtctcaaactcctgacctcacatgatccacctgcttgggcctcccaaagtgctggggtcacaggcatgagccactgcccttggccttcttcatctttctttacagcactgtcgtgaagatttatagcctaactgtgttctccagaaactgttatctccagaaaaacaggaagacattgttcttataatctttcctattattataaagactgaagaaaagaccaattctccccctggcttttcagactttgagataaaatctttcaaatttttttaatttatattgccccccaccacctccctgccagctgggcaaccttcccactgttggcccaagaactctcatgcctggccatcccagtgtactatcaatgccactgattcacagaaaacagtatgtgcgctggtgacatttccaggggaaggactgggtaaactcacctcgacattcagagaactggcctgggagctgaggttggcactagtgagagcaagcggaccctcaaacatctgagccaagtcttgcataaaagcatgatcaggaatccgaatgcctacaagctgtaaggcaaggggaaagggatcatgagaaaggttggaagggataagagggtaagtcttatctggatcctagtgaaagccaagtggcctggagtctggggacacaagagaaaacttgactcacaggcgtaaaagggtttaggtccttgttgagctcctccgagcgttccatcaccagggtcactggtcctggcagtaggtc

SEQ ID NO: 1167 - DNA, 2300 bp, Homo sapien
ttcatctttttttttttttttaagagacagagtctcgctctagagccctgcctggagtacagtggcacaatctgagctcactgtaacctctgcctcccaggttcaagtgattctcctgcctcagcctcccaagtagctgggattacaggcatgcgccaccatgtctggctaatctttgtattttttattagagatggagttttgccatgttagccaggctggtctcaaactcctgacctcacatgatccacctgcttgggcctcccaaagtgctggggtcacaggcatgagccactgcccttggccttcttcatctttctttacagcactgtcgtgaagatttatagcctaactgtgttctccagaaactgttatctccagaaaaacaggaagacattgttcttataatctttcctattattataaagactgaagaaaagaccaattctccccctggcttttcagactttgagataaaatctttcaaatttttttaatttatattgccccccaccacctccctgccagctgggcaaccttcccactgttggcccaagaactctcatgcctggccatcccagtgtactatcaatgccactgattcacagaaaacagtatgtgcgctggtgacatttccaggggaaggactgggtaaactcacctcgacattcagagaactggcctgggagctgaggttggcactagtgagagcaagcggaccctcaaacatctgagccaagtcttgcataaaagcatgatcaggaatccgaatgcctacaagctgtaaggcaaggggaaagggatcatgagaaaggttggaagggataagagggtaagtcttatctggatcctagtgaaagccaagtggcctggagtctggggacacaagagaaaacttgactcacaggcgtaaaagggtttaggtccttgttgagctcctccgagcgttccatcaccagggtcactggtcctggcagtaggtctttcaggagcccctcaggtactctcacacggcagtatctgggaaacacagaagaataaatccattcaaaattgaagggccactggtggtcctttcctagactctaggcagacgtagaaaaggaatccttcgagtttacaatgggagccgcctgtctccctgcttcacctccctaagagcttgagcagaaagcagggctccagaggcgcacccctggcttgacgcccatgtgcctctggtctcagggactacaacagctgcaccgctgtgatatcatgatagtgggatcaagctccacgttttattttcttcaaggcattcgctattaaattaagctactgtgtttgtttgcttttttcccgggggcctccccaattagcacaaatacgccaagggaacagggtccctgcctttctcgtgtgttgctgcttcccagcagcatgtagttcagggcccggggcacgttaagtcctcggtacatatttccagttccggattccttggtgagcctggacaagcccctcccgctctctgcgcctcagtctcccaagcctgtcaccggaaacccctcccgcggtgccgcccctagcggggccgggtcggggcggccttacctgtagacgtcggccacgcggccgaggcatacggccagaggcttggcctcgctgcgacccttgaggcggtacacagcgcgcagagccgccgagcagctcgccgcgcaggccaggccgtacagcgtatcggtggggacggccaccacggcgccggcgcgcagctcggccacggcggcccgcagcgcctcggtccagccggcgcgctccgggctcgcggcctgcacggccccgctccccgggagccgcaacagccgggcgccgggggccgccggagcgggactcggcgggcggaagaggcgaccgctccgggagccagcaggcccctcgctcaaccccacgctggcagccaccgcggccctcatccccctgcaccgacgcgccggagacatccgcccaggcccgcttccgggaggaagtgacgctcccagccagcttccggtccaggagactcggccccgcctctgcgccgggcagcttaaagggaccacgacccccaggaggattgaaggagaccggtggggacggggcggggcgcagccttgcgaagccctaacgcagcgctggggaggggggcggccgaaaggggggcggtggtcgggccgcgcaagcggagatggaatggggcccgggctcagactggtcacgggggtgagagggggcccgtcggggcgggaggaaggggcttggccccgcgcaagcgccgg

SEQ ID NO: 1168 - DNA, 2300 bp, Homo sapien
ctggtctgcccaaatctgggtaatcagactgggtattcattggctgcatttcaaagcacagcactgctttcagccaggatgaagtgggagtgaacccagctgctagcagagctgccactccaggctgagagccaagtaccagccactgccagtgaagactggcccctttactgaagggagttgttcagagtccagccaccggccctggggagggagagaagtcagggtattctgctcggggatggtcagggctccgcagctccatcgccagcatcctttggaaagccgcctctggcggagacagccggctgggggggcgctccaggtttggctgagacgttctagttggaacagaaaggaaaaaagtgaggctgggaggcaaggccttggattaggccccacaaggatgtggccatttggcatttggatagtattaactttttcgaaacctctcaccagatcaaaggaggttagggataaagcggcggagacatacttcccccctccagggtaagctagggcttggccagcctagccagtgggcagaccccaccccaccccagcccagcccagggtgggcactaaccccgccaccagccggctccgggcgccggcggcccagctgccgtaacatctcctcgcaggctgcgatggtgtccaggagctgccgctgccgctgctccaccgcgtccagcagctgctgggcgcgctcctcccggggcggctgtgggggtggcctcccgccgagccccagccccgccttcccgcggtccacgccggcagcctccctgcccgggagagagcgagagacagacggtcagggccggcgcttgcgcggggccaagccccttcctcccgccccgacgggccccctctcacccccgtgaccagtctgagcccgggccccattccatctccgcttgcgcggcccgaccaccgcccccctttcggccgcccccctccccagcgctgcgttagggcttcgcaaggctgcgccccgccccgtccccaccggtctccttcaatcctcctgggggtcgtggtccctttaagctgcccggcgcagaggcggggccgagtctcctggaccggaagctggctgggagcgtcacttcctcccggaagcgggcctgggcggatgtctccggcgcgtcggtgcagggggatgagggccgcggtggctgccagcgtggggttgagcgaggggcctgctggctcccggagcggtcgcctcttccgcccgccgagtcccgctccggcggcccccggcgcccggctgttgcggctcccggggagcggggccgtgcaggccgcgagcccggagcgcgccggctggaccgaggcgctgcgggccgccgtggccgagctgcgcgccggcgccgtggtggccgtccccaccgatacgctgtacggcctggcctgcgcggcgagctgctcggcggctctgcgcgctgtgtaccgcctcaagggtcgcagcgaggccaagcctctggccgtatgcctcggccgcgtggccgacgtctacaggtaaggccgccccgacccggccccgctaggggcggcaccgcgggaggggtttccggtgacaggcttgggagactgaggcgcagagagcgggaggggcttgtccaggctcaccaaggaatccggaactggaaatatgtaccgaggacttaacgtgccccgggccctgaactacatgctgctgggaagcagcaacacacgagaaaggcagggaccctgttcccttggcgtatttgtgctaattggggaggcccccgggaaaaaagcaaacaaacacagtagcttaatttaatagcgaatgccttgaagaaaataaaacgtggagcttgatcccactatcatgatatcacagcggtgcagctgttgtagtccctgagaccagaggcacatgggcgtcaagccaggggtgcgcctctggagccctgctttctgctcaagctcttagggaggtgaagcagggagacaggcggctcccattgtaaactcgaaggattccttttctacgtctgcctagagtctaggaaaggaccaccagtggcccttcaattttgaatggatttattcttctgtgtttcccagatactgccgtgtgagagtacctgaggggctcctgaaagacctactgccaggaccagtgaccctggtgatggaacgctcggaggagctcaacaaggacctaaacccttttacgcctgtgagtcaagttttctcttgtgtccccagactccaggccacttggctttcactaggatccagataagacttaccctcttatc

SEQ ID NO: 1169 - DNA, 2300 bp, Homo sapien
ctcaatgcagtttctactttttcttatgggaaaatttttcataaaacctttttgcaccaaaacccaggggtgttttttgcaatatccttgttatcctcgtagtgtgccaagtcagaggctttctcttgcccttttcctgctgtgttctcaggcctcccaagggctatttgactcaacagtctacatccttcgttgtgttttggagaatgtgggggtgggggtcagagttcaaggtgtctgttcccttttcctgtgaactctttctagtccctatttggggagggtggctggaaacagatttttgctgaatttctggctcagatcttctagccaggaaaggcaagagcccccaagagcccttttttttgacatacactaatcattggccggggtcttggtgacaacttttaaaatcccaaatagttttatttggattatgtaaaagtaagtgtgaaacatgggaacaacggacttccactgagcgatgtgaaaacgttacaggttcagtacttccaaaggaagaaacctccaaacccaaaaaagaataaatatgaatttgtatttttgaagaatgtgaaataatggtgtttgcttaattgctcattttgtataaacttaatattgtactttaaaatatctgctaaaaagtgaaaatttaactttttggaattgaaaaagcaatattaaatactaatgaaatcctaattaaatgcttatttaaatctggtagtatctgtggcatttcttaccaaccctgcccatagttgacatttttccaccactccccccttcccagccatcagtcttggagaggggacagaaaggaaacgtcggtcaccaggagagtctgcaggtttccttttaatcaaggctctactgaaggtgttttgtggggctaaaagcccccaaaacatgaaatggacatgtaacaccacctggatcccccatagcaggccagaccactctggcgagcactgctggtctgcccaaatctgggtaatcagactgggtattcattggctgcatttcaaagcacagcactgctttcagccaggatgaagtgggagtgaacccagctgctagcagagctgccactccaggctgagagccaagtaccagccactgccagtgaagactggcccctttactgaagggagttgttcagagtccagccaccggccctggggagggagagaagtcagggtattctgctcggggatggtcagggctccgcagctccatcgccagcatcctttggaaagccgcctctggcggagacagccggctgggggggcgctccaggtttggctgagacgttctagttggaacagaaaggaaaaaagtgaggctgggaggcaaggccttggattaggccccacaaggatgtggccatttggcatttggatagtattaactttttcgaaacctctcaccagatcaaaggaggttagggataaagcggcggagacatacttcccccctccagggtaagctagggcttggccagcctagccagtgggcagaccccaccccaccccagcccagcccagggtgggcactaaccccgccaccagccggctccgggcgccggcggcccagctgccgtaacatctcctcgcaggctgcgatggtgtccaggagctgccgctgccgctgctccaccgcgtccagcagctgctgggcgcgctcctcccggggcggctgtgggggtggcctcccgccgagccccagccccgccttcccgcggtccacgccggcagcctccctgcccgggagagagcgagagacagacggtcagggccggcgcttgcgcggggccaagccccttcctcccgccccgacgggccccctctcacccccgtgaccagtctgagcccgggccccattccatctccgcttgcgcggcccgaccaccgcccccctttcggccgcccccctccccagcgctgcgttagggcttcgcaaggctgcgccccgccccgtccccaccggtctccttcaatcctcctgggggtcgtggtccctttaagctgcccggcgcagaggcggggccgagtctcctggaccggaagctggctgggagcgtcacttcctcccggaagcgggcctgggcggatgtctccggcgcgtcggtgcagggggatgagggccgcggtggctgccagcgtggggttgagcgaggggcctgctggctcccggagcggtcgcctcttccgcccgccgagtcccgctccggcggcccccggcgcccggctgttgcggctcccggggagcggggccgtgcaggccgcgagcccgga

SEQ ID NO: 1170 - DNA, 2300 bp, Homo sapien
tgcgttggcgtggtcttggctcactgcaacctctgcctccttggttcaagcaattctcctgcctcagcctctcgagtagctgggattataggcgtccgccaccatgcctggctaatttttttgtgtgtttttagtatagacacggtttcaccatgttggccaggctggtctcgaatgcctggcctcaggtgatccacctgccttggcctcccaaagtgctgggattacaggcatgaaccaccacgcctggcctaaaatgtttttaaataactgtacttgtactcactcaccctacctccagggcatagtcagtctgggctgagatccccatgatcagatatttgatggaaagtcctgaaaggccaatgagttggatggcaagaatgcaggcagaagctgctggataaaataggctacagccacctcagatgctttcagtgctctgtctgaggatgtgtatatgcatatgcaaactcgacccccgttcctgcccagataatggctcaataactctgaggctggttgctcagcctctgagggcaatacaggcatttaaaaaattaaaatgaccaggcacagtggctcacgcctgtaatctcggcactttgggagactgaggtgggagcatcacttgagaccaggagtttgggaccaggctgggcaacacagggagaccccctctctacaaaaacatttttaaaaaattagctgggtgtggtgatgcatgcctgtggtcccagttacttgggaggctgacgtgggtggctcacttgagcacaggagtttgaggctgcagtgacctatgaccacatcactgtacgccagcccgggtgagagagggagaccccgtctctaaaaataaaatgtaaaatcactgaaaaaatgagtgttcggtgaaacaagtgggattttctgggccagcaagtcttccaaactgtatatgatgcatcctgtctccatgtgtaatatattttaatgataaatgtatttttaacagtggcggttgtgtatgtttttatgtcttaagagatggcagttcgctgcagctggattttgtggctcaagccttggggccaaagagacatattcctggcagtctggtgggtaccagtcactattcacatacttccagcaagaaatggttatggcactgacctgaaccccttgacccctggtctggtctttggagttgtcccactctgaatattcgagagaagcagcttatggttaaaacaggcagtggcagctgggaggatctaacagctagatcctccaggcatttggaaaggacaggggcataacgaaggcagaatcgcttcctgggtacgaatgcccactacttctgggcactgtgaaatgggtttaagacgcgggccagcaggacaatgtgaacggtgaaaggaagggagtggccggtaggtggcgctaactggcccgggcatgagtcccgccgtagccgcgtcctcttgcaggggaagaaagttgggaccgccagcctgggcaagcgcgtgagaagggagctgggggtcctaggcaagcgcgtgagaaggggaagaggcggcggcgtcctctccagctgggcttagaatactcttagttctgcctttggggtcttgtcttcctttctgggcctcctgcctgtgttaactttgatgggtgctgaagggaaggccggggtcccggcaggagaaacccgggaacgtcgcggccgtccaggctcccctggcgggttggagccagggttctgactgccaactgtggtccttcccgctgcggctgtggctgccagggcgagggcggtcagcgcaaacctggctgaggacatttcggattcttccttggggattcgttcccttctccttgactccggtgccgcgagggcgacaccctccgggccccgcgtggccaccccgggcgcttccccacgcggatgaacccacctcctgggcgccttcccctcggtgccccgctcgccaattggaggctgcagctcagccccctgacaacctgagccaaccagaggcgccagggaggggcggatcctctgtccccaccttcctccggaaagaggaagcggaagtgacgttaggggaaggtgggggcaatcatggtgccgctggggaggggagaagctgctgctgccgccgttgccgggagccgcggaggtaaaaggcgaaactagactcggcctgggcttgggacttaccgggaggcgcgggacttaggctccctcctgaagcatttcccaatagagacctcagtttggtcaccatagggaccccaccccttctccgtttcca

SEQ ID NO: 1171 - DNA, 2300 bp, Homo sapien
gatgttggtaacctagactagcacagtgacactggggataggaatatattggtttgagaggcatttaggaagcaaaattgaaaggctttggtgtcttagtttttagccttagtctgtaggctgttataacaaaataccatagactgagtggtttataagcaacagagatttggctgggtgtgatggctcacacctgtaatcccagcactttgagaggctaaggcaggaggatcatttgagctcaagagttcgagaccagcctgggaaacatggcaaaactccatctctacaaaaaaatacaaaaagttagctgggcatggtggcttgtgcctgttaatcccagctaccagagagcctgaggtgggaggatcacatgagccctggaggtcaaggctacagtgaaccatgatcaggctgctgtactccagcctggagaccctgtcccaaaaaaaaaaaaaaaaaaaaaaaaagaaaaagaaaataataaaaaaacatacaggaaaaacaccacaaaacaaaagcagagatcagagatttatttttcacagttttggaggctgagaagtccaagatcaaggtgctggcagattcaatgtctggtgagggcctgctttctggcttagtggcagctgtcttttttcactgtgttctcacatagcaaaaggggaactctagtctcctcaacccttataagggcactaatcccaatcatgagggctccacccttgtgacctaaacacctcacacctaaaggccccaactcctagtatgttatcttgggggttaggatttcaacatatgactttgggcaggggtataaataatcagtctatagcatttggtgattgattggaggcattgaggtgtaattattttcatgttcaaatgattatgctttcttttttcaaaagtttttttctggttcatgtgaatgcatggttgagaaatccatgtttagtaatagtcttcgcagcaaaattcttcagtggtgtttcattcctccagagctccttcccataacttgggttttaaaatcacatctctctgtgaccgcttcatgttgttccctgttgacaagagatctggcttttaaagagcagagaagctattggcagattaattttcctttccaggtttatcttggtttaacgactttcccaaaatatttctgggttgggcccttgggctctttggttttcaaggcaatttgtcaacaatgacaagcgcttctcattttctagagctcttagactatttccagttttaatctctgacccttgcctttctcctcttcagagtggaagtcgctatgttatgttttataatatgttgtattgcttttaaagtgcctactcatatgtcaactcagttgaccctacattaaacctgtgaagaaggcaggacaggtcaaattactgagattgagagaggttagatggcttttccaaagtcaggaggtaataaataataaagcaggtgataaaactcaggttttcagatttcatggttttattctttccttaatgtaccctttatccaagaaaagggagttagactagctggaatagttacactttcagcagtaaagatacctggatgagatacttttttctccttctgtgtatggtctgtgggacttcacccagacatcagcataggccctttgaagcaatatgtggactaccaataattcctagactacaatttccgaagctgttgtctgtatattaaagcatatgtatgtttcatttatttatttatttgtttgtttgtttgtttttgagatggagttttgctcttgttgcccaggctggagtgcaacggcacgatcttggctcactgcaacctccgcctcccgggttcaagcgattctcctgcctcagcctcccgagtaattgggattacaggcatgcaccaccatgcctggctaattttgtatttttagtagagacggggtttctccatgttggtcaggctggtctcgaactcccgacctcaggtgatccacctaccttggcctcccaaagtgctgggattacaggcatgagccaccatgtccagcctatgtatgtatattttaatttcttctccttccctttaggtggttctaactttgatggtttgagaccaaatgggaagggagtgcctatggaccaaagctccaggggtcaagataaaccagaaagcttgcaaccaaggtaatgcaactctcccttcacttgtcccttgtaggactgaggttctcctcacagtactgagaccattttgggtataatgtaagttgtcccagggtagctggc

SEQ ID NO: 1172 - DNA, 2300 bp, Homo sapien
aaagccctcggagttcagagatttcagtgcagatcccaggtctgtcacttcctaaatgtgaatgtgaacactacattttattttatctattatttatttatttatttatttatttatttatttatttattgagacagagtctagctctgtcacccaggctggggtgtggtggtgcaatcttggctcactgcaacctccacctcccaggttcaggttattctcctgcctcagcctcccgagtagctgggattacaggtgcccgccaccacacccggctaatttttgtattttctttttttcttgagacagagtctcactctttcacccaggttggagtgctgtggtgcgatctcagctcactgaaacctctacctcccaggttagagggattctcctgcctcagcctcccgagtagctgggactacaggcgcatgccaccatggccagctaattttttgtattttttgtggagacagggtttcaccatgttagccaggatggtctggatctcctgacctcgtgatctgcccgcctcagcctcccaaagtgctgggattacaggcatgcgcctggccctactatatattttattttttcagaccttggcttttttatttatacaatggaaatataaacttgccttcttcaataagccaagttttttgaggatcagacgaggccaagtatgggttaatagtatgtaaatgctgaagacaacttaaaagctgtgtctggcagtgccatagtcaggactggaactcaagtcttctcatatatcatgtccttgcacatcctattcagttcggtcgggttcatgcagctctacagacagagcaggtgggatagcaggagggttaagagcaactgttccagagtcagatagtttgagtcagagggtttgagtcagagacagaggtgactcaagaatttctaagagggagagtggcagtctggttaagggagaaacagaggacttgtcttgatatatttcatagtaaacacactgcttacttacggcgtgtgtttctctggagtgggctgccaactgctgctggaggttatgggtggtgaaatcctccaaccctctggcatcggtttgaatcctccactctgctagtcactctgcgacctcagacttaacctctctgaacttggttgccttgtatataaaatggggataataggccgggggtggtggctcacgcctgtaatcccaacactttgggaggccgaggcaggtggatcatgaggtcaggagatcaagaccatcctggctaatacggtgaaaccccgtctctactaaaatacaaaaaattagccaggcatggtgacacgtgcctgtagtcccagctactcgggaggctgaggcaggagaatcgcttgaatccgggaggcagaggttgcagtgagcggagatcgctccactgcactccagcttaggcgacagagcgagactccgtctcaaaaaaaaaaaaaaaaaaaaaaagaaaagaaaagaaaattgggataatagtttcctccctcataaaaggtgtgttacgaggagtaggaagataatatttatacgaggcacagaccttggcacatagttaccgtgaggttcaaggaatggcggtggtctctgccttggaatagtacttttgtgttcacaattattcttgcatttgaacctcagtgcgcacagaacccttctgtgcgcgggagaaacagggccggagtctcttgggataatacaatcatgcagagccggctcttcaagctcgtggctcagtctgcccccatttgttcctgcacaggcttcgattctgcgacccgggatcctgaattcctgtggctgtctcggtataggtgcgcagagctggagctggagatgccaacgccgcgcggttgtaactcggccctagttacctggccagggtacgcgacaattggcggaggcaggtatccgtcccggaagaaacggtggggattggaggaggcccggccacagggggcgggctccgttctgttttggggcggagcgatggagaagacaggctttcgattgatggagcgggcacacgggggcgggttcgtctgggggcggagcgcgcgggacgggcggcgggatgaggagcttgaggaagcaggcagggaaatgtctgccgccgccggctctcgggagcgcaacactgcaggttcggcgggcggcgggaagctgggctggggagctgggccgggggcggcggtgcgcccggccctcgggtgggcagggtcggcggtttggccagtggacgctcggggcgaagaccaaagtcctg

SEQ ID NO: 1173 - DNA, 2300 bp, Homo sapien
cccagtgtcatggggctgtggccccaccctgctaccaggagtgctgtcaagcctcaacctcaggcagctgccttcagctggatgggaaacttcacttcaaccaggcagctcctggggccaccagaaaccccctgcactgggccctggctgtggctatgctacttctcctccactctgctctgctcctattcctgctcccctagctgggcccagcagaatctgggagcagcagtcaagaagaccctgtaggatctacaagccttcaggtccccctccagctctgattcctgtagttgcatctttagtaaaaggcctttatcaagcccacagctctgggcttaaggctcctcacttctccccttctagggcctaggcctgaccatggaaccccccaagggggcaggccctcagccctaatctcagggagaggatagggtttgtctggaaaaacagaaaacctcctgcctgacccccacccagtgggaggacccccaaatcctgcagggacagtttcttcatcataaaaagcacacagccccatctactttgcccagaccctcctcgccaggctttgacactagagcagggctggaattggggttcctctgcttccctgcagtgaccccaccccttgatcctaagggtctgagtcaatcccctttcccctcatcgtccacatgacttagacactgaattcaaataaacttgagctccatttgtgctgtggatgtttccaggaaaagaaatggattgagaagaaggcaacgactgtttctggaaggggtttacatatgcaaagttgaactggtcattaggatggccacttcacttggggaaagaggaagggaaactgttcacaagtcacaacagtcaccccctccccagcactgaaggcccattccttcagtttgggccaaagcttgagagaaggtgtatttattaaaatagttcagaaagtaattcactaactccatagataactgtgtgccagaaactgctggtatgttgatgaaaaggcatagtcctgtccaacgggagcttacagcttaattaaacagccaataggccaagtgagaatgatcctagcattccttatctgagctgggtgagcaatcacagctcactgcagccttgaactcctgggctcaagcaatcctcccacctcagcctcccaagtagctgggactacaggcatgcaccaccatacccggctaaatttaaaaaaatttttttttagagatggggtctcaaactcctggcctcaagcgatcctccctccttggccttccaaagtgccgggattacagacatgagccactgtgcccagtccctgtgctggctctttttgtccatcttgggtaacctccttatcttagatggggaaattgagtcccaagggaagaaaggtcttggccaaggtcacaaagccaggcggatcaggggaaggacgttgccggacaggaacagtgtcataccctttataaagtgcgttcacacccagtagcctcaaacagccctgtgtggcaggagggctgggtggggctaagggaggaaatagggcagtgtgtagcggtataaatggcccaggagttgcagtcagactttcagtggagtcccagtgttgccacctgctagctgcaggacttaatgtcaaactgcttaacctatccaaggctcagtttctccacctggaaaatggacataatggttcttcatagtctggttctccctccattaaaccaggagaaggtagttattttaggggaagagtttcagtagaggtccgggttgtctaccctggagtgagaagagctgaggatggaactaaggagaaaataaaaatgcattatattcttcccctaagataaaatgtgaccatcttccttctgggtgggaagctctggccccatgacctagagggctggggatgggagtgagggcaatcattagaaaacctttctggtataggaagcccagtgtaccccagggcctaaggggttaacacggatggagagactccccaccccacgattgactcgggcatgctgggacttgcaggctgactgaccaccatgtggcgcaggggctgttgggaaatgtagtcactgtcccggaacctggggcagcggagtcccgtgcgccctgtggtgacagctcaggaggtaggtgacaatgtcagggagctgtgggtgggagcagagcaggaaagccagggcagggctgggcaggagggagtgggcaagctgagggctgggacaccccccaacccccggcctgcagctgatgcaatgggcctgctg

SEQ ID NO: 1174 - DNA, 2300 bp, Homo sapien
acactaacatacggggtgtgttgtgtgtgtgtgtgtgtgtgtgtatatatatatatatattttttttttcatttaagggaaggattgtagctatgcacctgagtcatggactcttcataactattgtttgcacatccaagggatacaggatgctgtaagaatgggcacgtgtaagccggccgcggtggctcaagcctgtaatctcagcactttgggaggccgaggtaggtggatcacgaggtcaggagttcgagaccagcctgaccaacatgtttagtagaaactccgtctctactaaaaatacaaaaattagctgagcgtggtggcgagcgcctgtagtcccaactactccggaggctgaggcaggagaatcgcttgaacccaggaggcggaggttgcagtgagccgagaccgcgccactgcactccagcctaggcaacagagcgagactccgtccaaaagaagaagaagaagaaaaaaaaaaagggcacctttctgattaatgaagaatgcccaagagttccccattcagagaactgaggaagcaccctcacgttcggcagcctgtggacatctgtccaggcagagagcccgcgactggccaatccggttacctttggccagggactcatgctgagacaccgcacttcacttcccctctcttttcccgccctcgccaacccaaagagaggcagacagctgggcactcacatcttgcatggcccgagtgcggtgatcagaattgatctggtcccggagctgaaaaaacaaacggtgacacaaacgccgttagtttgcgttctggagtagaaaaggccgcccgagggcggagcttacccgctcagcttttaccagctgaggcagaaaggcctctggggctccggaccccgggaggaggttaccaagaccggagctcggagagggagcccggaggaaggcagggaggttctgagggccaaagcaagctctcagaggtcaaacacgggatagaggctcgtgctcctgccgcagcctctgctcaggccccactcaccgtggacttcttggtgagcatctctttagccatgacgtccatgagccgttccttctcctcatgatagcgccgctgctgctccagtattgtctccatcttcccttagtcgcggcttctcaattcagaccaccaacacggccggaagcaactcctgccgcccagcgcgcctgagtccccacgttgcgcatcaggctgcaccaaagttccgcgagtgccggaagtgccccgggacttaagaaaacaggagcaccacaaggaaggccagtccatgttatggagatggcaacagtgccacctgctggtgggaggtgtggtggagcgatgccgagaggttcgcagatgcctccagggggcataggaaaacccaagaacctgaggttcagcggacggcttcctgcggcttgctggggccggcttggcgggcaggtatcctgtgtggactgcgcgagcagttggagtgcggatgggagttgggaaaccggaacttgaggacgcagctttcagcataaattatgagaacgttttctctttctctggacctcagcgtctttctcaggaaaatgggaatagtggggttttgctggtggtgtttttaaaaaaattcacatgtgaggccgggcgcggtagctcacgcctgtaatcccaacactttgggaggccgaggcgggcggatcacttgaggtcagaggttcgagacgaccaggctggctaacatggtgaaaccccgtctctactaaaaacaaacaaacaaaaattagccgggcgtgatggcaggcgcctgtagtcccagctactccggaggctgaggcaggagaatcgcttgaacccgggaagcagaggttgccgtcagctgagatcgtgccactgcactccagcctgggcgacagaatgagactcagtctcaaaaaaaaaaaaaaaaaagaaattcacgtgtagaaacgacttgtctatcggcagcgaatatgttaaataaaatactgtgcatccaacgagatcaggagattgagaccatcctgtctaacacggtgaaaccccgtctctactaaaactgcaaaaaattagccgggcatggtggcgcgcgcctgtagtcacagctactcgggaggctgaggcaggagaatcacttgaacccaggaggcagaggttgcagtgagctgagatcatgccactgcattccagcttgggcgacagagagagactccgtctcaaaaaaaagtaaaataaaataaaataaaatactgtgcatccaagcagtggaagaccagct

SEQ ID NO: 1175 - DNA, 2300 bp, Homo sapien
ctgtgcttggggtgtatacaaagaaaaatctcccatatcagatctccaaggctgtctgctcaggaacaaccactgtttactgttacttggatatccttacagaaataatctctttgcacatctatttttatacacacttgtgcatctagcttttttcagtttgtgtggccatctctccatatgagttcatacagagtttttaacagttttattgaagtgtaatttatataccataaaattcacccatttttaacagtacaaagcaattaattttaataaaatgaatagagttatgcaactatcaccacaatccaattttagaacatttctacccatccaaaatggattccttgtgcgcatttgtaatcacttccaatctcacctgcggtcacaagcaaccactcatatttctgcctccatagatttgcctttgttaactcaattgtagcctaaagctgcctccttacatattttaaatttagcctaaaggtttctctgtacattgtgaactataacctaaatggagttgtaaacagaccatagcctactctttgccaatcaccgagttttggccaatcaaacatggcaaactatgcaaaccgtgttcaaataaggcaaagaccaagctgtaataaccggtgtttttttttttttttctttttgcaggggccatgctaatcttctctgtatggttccaattttagtatatgtgctgccatagcaagcaccagtgtttttcttttaacaccgttctggacgttttatctggacatacactgttgtttttctgtctagcttctttcacttagcatgatgctttcatggttcatcattgtagtattcatttattgcagaataatgttccattgtactgtatagatataccacactttatccatttgccagttaatggactcttgggctgcatccagtttttgtctattatgaataatgccgctgtgaacatatgaacacatggacatgtttgcatttctctacctacaagtggagatatatagacagaattttttttaaggctgtatgtcatttcacagctggtcttccactgcttggatgcacagtattttattttattttattttacttttttttgagacggagtctctctctgtcgcccaagctggaatgcagtggcatgatctcagctcactgcaacctctgcctcctgggttcaagtgattctcctgcctcagcctcccgagtagctgtgactacaggcgcgcgccaccatgcccggctaattttttgcagttttagtagagacggggtttcaccgtgttagacaggatggtctcaatctcctgatctcgttggatgcacagtattttatttaacatattcgctgccgatagacaagtcgtttctacacgtgaatttcttttttttttttttttttgagactgagtctcattctgtcgcccaggctggagtgcagtggcacgatctcagctgacggcaacctctgcttcccgggttcaagcgattctcctgcctcagcctccggagtagctgggactacaggcgcctgccatcacgcccggctaatttttgtttgtttgtttttagtagagacggggtttcaccatgttagccagcctggtcgtctcgaacctctgacctcaagtgatccgcccgcctcggcctcccaaagtgttgggattacaggcgtgagctaccgcgcccggcctcacatgtgaatttttttaaaaacaccaccagcaaaaccccactattcccattttcctgagaaagacgctgaggtccagagaaagagaaaacgttctcataatttatgctgaaagctgcgtcctcaagttccggtttcccaactcccatccgcactccaactgctcgcgcagtccacacaggatacctgcccgccaagccggccccagcaagccgcaggaagccgtccgctgaacctcaggttcttgggttttcctatgccccctggaggcatctgcgaacctctcggcatcgctccaccacacctcccaccagcaggtggcactgttgccatctccataacatggactggccttccttgtggtgctcctgttttcttaagtcccggggcacttccggcactcgcggaactttggtgcagcctgatgcgcaacgtggggactcaggcgcgctgggcggcaggagttgcttccggccgtgttggtggtctgaattgagaagccgcgactaagggaagatggagacaatactggagcagcagcggcgctatcatgaggagaaggaacggctcatggacgtcatggctaaagaga

SEQ ID NO: 1176 - DNA, 2300 bp, Homo sapien
caacatagcaaaaccccatctctgctaaaaatacaaaaattagctgggcatggtgccacgcacctgtaatcccagctactagggagactgaggcagaattgcttgaacccaggaggtagaggttgcagtgagccaagatcgtgccactgcactccagcttggatgacacagaaagaccctgtctcaaaaaaaaacaaaaaacaaaaaacctcgcagttttttggtgtgcggtggctcacacctgtaatcccagcattttgggaggccaaggcaggcagatcacccggaggtcaggagttcaggaccagcctggccaacatagtgaaagcccgtctctactaaaaatacaaaaactagccaggtgtggtggcagtcacctgtaatcccagctactcaggaggctgaggcaggagaatcgcttgaacacaggaggtagaggttgccgtgagctgagatcgcgccactgcactccagcctggcgacagagcgagactcccaaaacaaaactttaaatgtggcttttgttgcgtgggaaaaaaataaaaaattaaccagggtggtggcacccacctgtgggggccacaggggtggaggctgcagtgagccatgattatgccactgcactccagcctggggcaacagagagagaccctatcaaaaaaaaaaagaaaaagaaaaaaaagaaaaaagtgaacaataggtaaattactaataatgtgatgcattatgtcctcctcgttcttttttgttaaacataaatgtgcacatatgtattttcagttttaaattaatttttaaattgaaaaagtatgtttaagaataactttttatgctgtgcttggggtgtatacaaagaaaaatctcccatatcagatctccaaggctgtctgctcaggaacaaccactgtttactgttacttggatatccttacagaaataatctctttgcacatctatttttatacacacttgtgcatctagcttttttcagtttgtgtggccatctctccatatgagttcatacagagtttttaacagttttattgaagtgtaatttatataccataaaattcacccatttttaacagtacaaagcaattaattttaataaaatgaatagagttatgcaactatcaccacaatccaattttagaacatttctacccatccaaaatggattccttgtgcgcatttgtaatcacttccaatctcacctgcggtcacaagcaaccactcatatttctgcctccatagatttgcctttgttaactcaattgtagcctaaagctgcctccttacatattttaaatttagcctaaaggtttctctgtacattgtgaactataacctaaatggagttgtaaacagaccatagcctactctttgccaatcaccgagttttggccaatcaaacatggcaaactatgcaaaccgtgttcaaataaggcaaagaccaagctgtaataaccggtgtttttttttttttttctttttgcaggggccatgctaatcttctctgtatggttccaattttagtatatgtgctgccatagcaagcaccagtgtttttcttttaacaccgttctggacgttttatctggacatacactgttgtttttctgtctagcttctttcacttagcatgatgctttcatggttcatcattgtagtattcatttattgcagaataatgttccattgtactgtatagatataccacactttatccatttgccagttaatggactcttgggctgcatccagtttttgtctattatgaataatgccgctgtgaacatatgaacacatggacatgtttgcatttctctacctacaagtggagatatatagacagaattttttttaaggctgtatgtcatttcacagctggtcttccactgcttggatgcacagtattttattttattttattttacttttttttgagacggagtctctctctgtcgcccaagctggaatgcagtggcatgatctcagctcactgcaacctctgcctcctgggttcaagtgattctcctgcctcagcctcccgagtagctgtgactacaggcgcgcgccaccatgcccggctaattttttgcagttttagtagagacggggtttcaccgtgttagacaggatggtctcaatctcctgatctcgttggatgcacagtattttatttaacatattcgctgccgatagacaagtcgtttctacacgtgaatttcttttttttttttttttttgagactgagtctcattctgtcgcccaggctggagtgcagtggcacgatctc

SEQ ID NO: 1177 - DNA, 2300 bp, Homo sapien
tgggtgacagagcaacacactgtctcaaaaacaaacaaatatagatgcacatatatttaataaagttattgaataatcaggtatgtcaatatatgtaaagtgttcaggactggtgcaaagaaagaactcaggaagtactggctctcattaaggctatttaggagagattagagccatgcatcaagaacagagattccaatactctgccttttatcaggccccttctgtactcactcataaccccttgctttctgaaggctccccacctttgccctcccgtcccccagagctgacctcctcttggtacccactccaccaaggctgagtagtcttcactgcactcccctgggctgggagtctcttacacctgcaagatacatcccagagaggctgggcatggtcactcatgcctgtggtcccagcactttgggaggctggggcaggcagatcagatcttgaggtcaggagtttgagaccagcctggccaagatggtgaaaccccgtctctactaaaaatacaaaaaaaaaatttagccgggcgtggtggtgcacacctgcagtcccagctacttgggaggctgaggcagaagaatcgcttgaacctgggaggtggaggttgtagtgagcggagagtgcgccactgcactccggcctgggcaacagagcaagcctccatctcaaaaaaaaaaaaaaaaaaaaaaaaaaaaaaaatcccagaaaaaggccccatccatgggctggatgctcactgcctggactccagatagcaggtgcctgtgatccaaaccgaggatgttagaggggcatacatactgaagcagtgtctggtatccattcattcatcagatgtttattatgtgccggatattggagtaagtactgagaaggcagtggggaacaaaacggagccctgccttcatggctcttaccatttaggcaacaacagcaataataagcaagcaatgatttaattttgaaaggaaaccagacctggtgggtgacttgggacccaggaacccaggcatgatgcagagatgggacggaaaggttctcaggagccccagcctgggagggtgttagttcctccgtgagagctctgctacacccagcctggggtgtggggaggcctctgtgggcacctgaatcttcactctagatgctaaggttattccggggttgatttgttgtctcttgtttccacaaacagcacagtagagcctcctgcctccctccctcccccacctcttccagactgaggctatttattcctagtgacaagcctgaggatcccagggggggtggccttaaggacctggaggggcctcgtgtccctagcaggcgccagtcctccctcacggacacagggaggaagccagaggctcagacaccgcagaggtcccctcccctctcctccaccacccctgaggtgccccatcctctcacactcctcacaccccaccctagaagcccaaagatcatggggccgaggattagggtctcccccgggcctcaaaggtcaaaactattcctgggcactgcggaaacccaggcaaggcaggacttctcagtgtcaggaggctgctggaagtggggaggtggttacccctgtttttgctactcaaagttgtggaataaaaccctttggaggtcaaggccctatggtggggaggggtcctctcttcgtcccatgttttcagagaacaccttggtgcccgctgacaggctcatgacagcagagtcaaaacgtcctcctccaggctggattaaggccgggctgagtgtcacccctggggtaaggtgaaggggtggggggatccgaggaggccagaggactcccccagtggaccatggtctgcggggtctcgtgtcgccggcctgagatggaatacagcagtctccctctggcagctggggatggggggtgggaggggaggagaacagaggctgcggggaggggacaggggcggggtcccggccgcttgaaggttgggagagccaggttaggccgggcgggaggagggggccgggccgactggcggccgaaagggaggtgggggcggggtctggcccccgcggcgggctggggggccgggggcggggtccgggcggggcgggcccgcgctcacttcctcggggaggggttggggccgcgctcccactcgcccacacggtccgtctgcagtcggcagcctcgccggcagctcgctcggcccccgcttggcccggcccgcaggtaggagccgccgagggacgcggcgcccggttcccggccccgcctgcgccgcgcgctccccgctccc

SEQ ID NO: 1178 - DNA, 2300 bp, Homo sapien
gctggaggagtgacccctgtcatgagaaatgcgtgcaattatacatcctgtttcatgtggtggaaaagaaaccaaatacctctggaatgctctactgtgcccaatcctctctctaaacttagaagcaggtttagtaataataaaaataacaatagtaactccattttattgtgaacttgctaaggaataaaaacagcattaagcactttaaacatagttcgttttggccgggtgcggtggcttacgcctgtaatcccagcactttgggaggctgaggcaggcggatcacgaggtcaggagattgagaccatcctggctaacacggtgaaaccccatctctactaaaaatacaaaaaattagcctggcgtggtggtgggcacctgtactcccagctagtcagcaggctgaggcaggagaatggtgtgaatccgggaggcggagcttgcagtgagccgagatgatgccactacactccagcctgggcaacagagcgagactctgtctcaaaaaaaaaaacaaaaaacaaaaaaccaacatatttcgtttaatcatcaaaacagtcctgtgggtatagtattattattacctcagttttacagatggggagatggaggctcagtgaatctaactttaccttgactggggtggcatcagaacacacctcatgggtcattaccttgtactgcctctgattcgcatatcgtcaaccagccattcccttagggatgtgagggactcagaactttatagctattgtcattgggtgatttccttctatgctctttacagatatgactcctcagttcaactgtgagctcttgacagcaatatgaggcaagaagtgtatgttattattatcctcattttatgcttgagaaaaatgatgctcattaaagtcaagaaacctgccaaaagtcacacagcctgtaagtgaatggcagagccagttatggttttaaggtctcttgtctctctatagaatattttttcctgtacactgttgtagaggagcaaaaaatggacaggtcagatgaatgaagtttatatagtgtcccaagttacagaaaagaatagtggcatggggcctctgggggctggtggcaacacatattatgggaaggtgagaggaggaaatgtcctgttatggagataaaatctctcaggaagtaatagttgtcagccctcttcttgacacagatacctcactaaaaatgtagatttcctttgtaggtgataaatttatttctacaaaaggaaggacagcttttcagagcaactcctgtatctgcagtttctcagcataaccagctttaagaaacaagccagagaaatatatattttggggtggcatattctggcctcccacagtcatattttggagtggtgagtcctgagccccaacagtgttttttttttttttttttttttttttgagacggagtctcactctattgcccaggctggagtgcaatggcgccatctcgactcactgcaacctctgcctcccaggttcaagtgattctcctgcctcagcctcccgagtagctgggattacaggcgcgcaccaccaagcacagctaatttttgtattttttttaagtagagacggggtttcaccatgttgggcaggctcctgacctcgtgatccgcctgccttggcctcccaaagtgctgggattacaggcgtgagccaccgcgcccagccagccccaaaactgttaaatccgtactgctctagctttaaacataccttctagatacagcaacccgtgccgagctgtaagtgactgcacatgcgcacacgctaagcccagctcagacggaggccagtgccagccacgtgttcccaggtgcccacgcgggccaagcgcgaaggcgagatctgggtagcgtggacaggcgctagcgaataagaactggctcttatagagtcacgagactatatctgggaaactacacttcccagaagcagcctgcggtgactgcctctgttaaatgacgtacttcctgaaagccggctccggataggttgcttagaggaagtaggcggttctaaaccgccggcggctaggcctatttccggtaggaatcagtggacttggcggcagaggcagtgcggatccggcgttctccactgatcttttccaaggctgtacagacatggcggcggcttttcggaaggcggctaagtcccggcagcgggaacacagagagcgaagccaggtaggaccatacaggccccacaagtgctggcctttgtcgccatgtgttacccttgccccaaccctgtcgccaccgt

SEQ ID NO: 1179 - DNA, 2300 bp, Homo sapien
gtaatgcgattgtacattcaggtggacatgagagatttcaagatttctgcctcacctcatgttgttgcttttttgaccctttagcttgctttctctactctgttaacctccctttgctgtaattaaagttaaaattattaggggaggtttggtattattttacttatgtttttgagatagtgtctccctctgttgccaaggctggagtgagtggggcaatcacggctcacttcaggctcgaccccctcactcaagccattcttttgcctcagcttcctgagtagctgggaccacaggcgtgtactgtgacacccagctaattttattttatttttttaatttgtagagatgaggtctcactgtgttgcccaggctggtctcgaactcctgggctcaagtgatctgcccacctcagcttaccaaagtgctaggattgcaagtgtgagcctggccttaaatagttatttattgcatcacttgaaggataaaagatgagaaagatgactgttaaaaatcctacccaaattattatacaagtttttttttgtttgtttttttgaggcggagtctcgccctgttgcccaggctggagtgcgatggtgtgatcttggcccactgcaacctccgcctcccgtgttcaagcaattctcccagctcagcctcttgagtagctgggattacaggcacctgccatcatgcccggctaatttttgtatttttgtagaggtggagtttcaccaggttggccaggcttgtcttgaactcctgacctcagatgccccacccaccgtggcctcccaaagtgctgggattacagcatgagccactgcacccggcctattatacaagtttaaacactggagaagtgtatgcatttcccaaaatgttaagattattcgcaacagaagaggactcagtctactgtgatggccctagggagaatgggttctagttttggctctgctacttattagttctgtgttcttgggcatatcattctctaaacctcattccctttatggaaaactggggtaacaatagtgcctgtttcaccttctttccaagattgtggtggggattaaatgaaattgtgtaaggagcatagcacattgcaagaccctgacatatactaagtgctcaacaaatggtagtatgtagaaggatcataccaagatttaatccttataccttccatgctctccaagtctacgtcagagaaagtactttctgtcatacttttttctcatactgagtaccacaagtataataataatagtaaactcatgctggaaagctgctatgtgtcaagccatgtgcaggcattaccattaatagaagctccttgaatcctcagtataacccggagaagcaggtactattttcatgttacagtcaggaaatagcagctcagagaagttaagtgacatgcccaaggtcacagattgttcagaggtaaagcttggatttgaacccacatctccagactctaaatttagctcccttaccacagttgcctccctgttactatgttttccctttgtagtattttataaacccttggattaagttggtagtaattttagtacaactggcaactgcttgcttagtgccgagtcattgttgcctctctctgtccttaataggccaagaaacctactacagcagtgcttgtgacctgtctggtgctggcagggtccctctcatccttgggcagagcccagttgtggggaggggagggaacagggtcatgggttagctccaaggactggatttactgagcactccagagactcctgtgcctgttagatgtcgtgttgatttggatatgtgtttgcggaggaaactaagcactgttgttctttcttttgtcttctagcctggctttcgaaaacatctgggcctgctggagaaaaagaaagattacaaacttcgtgcagagtgagttcagtctttctggtagaggcgctgccaagaaagcttacaacctccttgcactgcagctgaattgcctgagtgtccaacaggggataatttcctgccattgataaaatggccaaagctctggcagcctgtcagataattttttctgtgatcctaaatttctctctttgtttaggcagatcattatttatttaactgtagttgcattgtgaattatttgtattatgttgttccagatcattttctcatagtggctttgatttggctctgccttggtgtttgagcccaaagttgaatctttttctctttgttttcttgaagtgcaggatataatctgaaattccatttgttgagtctct

SEQ ID NO: 1180 - DNA, 2300 bp, Homo sapien
tgcccagggagatgatggcagctccaggttgaaagcccaagcttcaatatcacacaggcctggttagggctggcacgagcatggacttcactgcggaattcccagtcttcctcctacctcccaggcctgggaaaggtgaaagacctgggctgcctcaaggtgaccattccctgggccagagtccaggaaagcccagtatctctagctcggttcagacacagagctccatcgcagctcttacagctagggtgggaccacggagcctgctcaggacagtggccaatggcaggataagggccctgctctgtcccactccttccctggctggtcctagggcattcagggcccacatgatcaaagtctgtgcccagggtgacccctgtcactgtcaactctgtcccagccgccctggatcgttccaatggcagctgccacctgagcccccagcaacttttttcaatctaaggatttattccacagacctgatttgcccagtggggccctaggtgggcccccagctcagttctgtgatctgggaccccagggccctgtaagctataaatccacttgaggctagatccaggagagaaaagagggaggactggcagctgaagactccctgggacccaagcctcggtgtggggaagaggagaaaacacagctcagtaccctcagcctggggcccaaggtcgggtaagaaggcacaaaggaactgcagtgaggtccgactccactcaagatccttcagggagtcctcaagggctggggcgtgaggaggtagctaaattccactgcccacctttccaacaaggcctcctcaatctcaattcccttttcagcagctccaggcaagtccgggcaaactctagcccagggctcttagcgaggctggacagctcccggcctgcacgccggatttctggagagcccgagccccttccctgagcccatccttctcctctcccggggcgtgatcccaccacgaccacagccgatgagccgttcaagctgggagaaggagcgagaaggctgcagcggcgcaggtcagatacccctgggcccaacgtccacccccaactagcgcccttgccagcagcgttttccccggagccacagtctccacctcgagatcttctccttctggaaccccggagcgcggccgggtaccaggggctcgcgtaggactgtagaaccgctgccgcccgccgtcccagccccagctgcccgcgcggtactcacctgggcctcagtgcccgggagaaggtgtgcccgcgcgaggcgtgaagccagagtccgtccgactccgcccgcaccggacgcgctctcagggcagaggaggtcggcggagttgtgacgctgggactagaggaaggagaaggaaagccgagacgggccgggcagacgcgccgaggagcgcccagtgcacgctggcagccgcgggaggcgaggcgggcgcggtgagcagtcgcgccggaaccgagccgcgaatccgcgccgcctcgcgctcgcagccgccaggacccgcgggaatcctggtccgccggcagcggtactgaggagggaggggcgcggggctgagccgcttctcggagcccgagcgcctcccggagccggcaatccctgctgcccgggcgggatgcgggcgggaattcagctcgcgtggaatgtgggaccggccgggctcggagtctccagcgctgggggaaagcggggcccacacagccaggacgagagggggtgcggtcccagggccacccccgcgccactccccacgtggcggccgcgcccccggggcgtgagtgtgtacgcggacggtaggggggccgtgaatgaagccccagcggccaatcagcacggccggcgcgcgggaccccgggagcgacgcccaatggagagctctgggcggccgggcagggtggcgggcgggcgcgcggggcgggggccgggcaggggaggcgggaggcagctccgcgggcagccaatgggcggcgggcggggtggggctccggagcgccgagcgggtcggggctttaagccggcggagcgaggcggcggggcccgcagacggagcggagcggcggcggcggcgcggcgcagggcgcggggcggcatggccaccaccgcgcagtacctgccgcggggccccggtggcggagccgggggcaccgggccgcttatgcacccggacgccgcggcggcggcggcggcggcggcggccgcggagcgattgcatgcaggggccgcgtaccgcgaagtgcagaagctgatgcaccacgagtggctgggcgcgggcgcgggcc

SEQ ID NO: 1181 - DNA, 2300 bp, Homo sapien
gggtcgtttcaacagcagatgtgctcgtctctgtgcaggacctgcctcccaggggaatacggtagtgctgagaagagggtgtggacggactaagggctgaagaagtcctggagacggggtggcgatggtgagtgtgcttgctgagcccaggagacggaccgcagcaccgggcactcgggtggggtccagaggagaggagcctcctgcagggacagcaaagctgacgagaggacaacataaagccacttctgtctttacctcgcattgcctttgcaccacatccatttgggtacggtgcaaagcttctcccgttttattcctaagtctgaaaccgcctagcgggaggagggagaggagtgttctttcattctctaagggcctcccgtgtgccgtatgctgggaacttctcctttctcattttatttccttcacgcaacaaccttgtgagacggtgattctcatccctgtattacagatggggctcggagctcagtgtgggggcagcttgcgcagcagccccctccaccctctcgccccaggtcaccactcagtggtgcagctgagattccagccaaggcctgcagagcagaagcctgtgctctctgaggcgtggtctcccacgcggccagctggagggctcctccggaagggtttccagggaggccatgagggctgtctagattgatagcgagttccccacatcctgtaacccctccctgccaggcctgtgcccgccgctctggctgcaggcagggagcgaggctgggcgctaatttacacttgtttaactacagctgccgccctcccgccatgtgtctgtccgccatttattgcgctttccaaagccctgcccggcactcaggggcatttcctgcctgcgctaatggaggagaatagacgcattatatgtgaataatggattatgatgatacaatttgggtctcttagctctcaccgagcctaggctggccttgcattattgataacttacacacaccttcccgagcgtgtttatgtaaatatttaatagggaaagcaagttaatccattggtttcagccatttccagagcactagaagtaagggccatgaggggtgacttggggggcccccagcaggagttagttctctttggaaaagccgggaagttgccaagatgctcacttggccacaaggagtgtatggccttgaggtttggggttttccaagagctgaaacaaaagggtagggctacctcactgtgggagatcacctccggtcaagaagacgagttgtccaacacaggcagagcagggtgaggatgttgggatgaggggtgcagattactggaatgcagctgtggtggacgtcaccactgaataaatcgaaccattgcttcctatcttacatggccgatttcctgtgcttccccatggcttccgcatttcacactccattgcatgttggaaggcaatgctttagagactgcctgggtttcaccctgggctccaccacatgcccactggacggcaagttagttaatctctctgtgcactggttgtcacatctgtaaaatggggaactaatttatttgtctcataggtacccattgttggtgcaagaatgcagtgagataatatatctgaagtccttttacagtgctaggcaatactacctattaccatataagccacaactggaaagatgcacatgctttcacatgggtcttcatgccatggcacacattagccggcagtgtttctgagtggtgtagaaaatagttgtgcatcccagacacaatgaaatatggttattttgctaatatcctgtttctggcaattaaactactgtgtatcctttgggaaatcacgagggtgggcatgtgccccatctgcttatgcagagggtggaggaccaggcagaatcaggagatctgagctggcctccctctgcaccccaccccaggcacctgcctcctctccagcttatctcccccatccccttcccgggttgccattgacaacctgccattctcagagcatgcttctgagctgccgagccttcgcacctgctggctcctccacctgaatgtccttctctctgtcctcttcctggaaaccccagctgcctcaggatatggttcagtcatcacctccttcatccagccttctctacctctttgtcttaacattgaaatggccagcgtgttcttctacctgcctgccagacatgcaggcccaaggtaccaggaggcagatgctgacagatgcatctcagtatgcccggcacctccaccacacaagggctgtgctggttgctgtg

SEQ ID NO: 1182 - DNA, 2300 bp, Homo sapien
gagtgcagtggtgagatctcagctcactgcaatctccgcctcctgggttcaaacgattctcctgcgtcagcctcccgagtagctgggattataggtgcctgccaccatacccggctaattttttatatttttggtagagattgggtttcaccatgttggccaggctggtctcgaactcctgacctcgtgatccacccgccgtggcctcccaaagcgctgggattacaggcatgagccaccatgcctggcttgttttaattctttacataatcaaaatgagacattgtcagtttattatatattttaggatagtttcatatttcccacttctaatttaaacaatggatgagtagaacgtttgctttttctttaaaacaaatcaaaatttcataaaccaactttttcataatacaaaaatcaaatttaactgtaaaatttattttcaatgttagatacatgttatttattttatttatttatttttttgagacagagtctcactcttgtcgcccaggctggagtgcagtggtgtgatctgggctcactgcaacctctgcctcccggattcaagcagttctcctgcctcagcctcccgagtagctgggattacaggggtgcaccaccacgcctggctgattttgtatttttagtagagacagggttttaccatgttggccaggctggtctcgaactcctggcctcaggtaatccacctgccttggcctctcaaagtgctgggattacaggcgtgagctaccactcccagccaatacattttaaaataccttatacataataaagtacattatattagctggatgtggtagtgtccacctgtagtcctagctaaatttgggggattaagcagaaggatgaggcaggagaattacttgatcccaggagttccaggctgcagtgagctatgattgcatcactgcactccagccacgggtcactgcagcctcaatctcctggactcaagtgatcctcccacctcagcctcctgagtagctgggactacagccgcacaccacaccatacccagctaaccttttttttttcttttttttttttgagacatggtctgtcactaaggctgaagtgtagtggtacaatgacagctcattgcagcctctgcctcccaggctcaagtgatgctcctgactacaggcgtgtgccatcatgcctggctgagttttgatttttgtggagatggggtctcactatgttgcctaggctggtcttgaattcctggactcaagtgattctcctgtcttggtttcccaaagtgctgggattacaagtgtgaaccattgcagctggccttttttgtttttttaattttacttttttgtagagacagggtctcatagtgttacccaggctggtatcgaactcctggccttaagcaatattcccgtcttagtctcccaaagtgctgggattacaggcatgagccaccactcttggcctgccttggcattattttgattaagattagcatattttcctaatagtcttaaaaactgttaaaacagataaatgtagaaagcagatcttatgctttacagattctgagcaagcattttaaggtcattaacatatttttattcttaattttattaatcacagccaaatcaagtcactctaatctccagactttgaatagaatgtgcctttcttatttctttctcatgttagtgtgtgattcaagatcatatgctggcttgacattaggagctttatagttttttacagttgctggctgtgggtactggtttagggaatcatctttagggttgtctatgttggaacctgttgtcagagttagttcttgttctcactttccatgtggcacagaaaaagatctacatggggcatcttaactataagctgagaacatgtagcacttataacttcctcttctccaattagaaggaagtagttttcttctatactcttaaaagcaaatgacaccaacttcccctccactctgccgtcccaaattaactttatattagttaaggtactggaaactgcatggaattgagttaaaaaccctaagtttgagtcctgactttgccaggagattacttcatttttaatgaacttcagttcctaccttttttttttttttttttgagatagggtctctgttgcccaagctggagtgcagtagtgaacacagctcactgcagcctcgacctcctgggctcaagctgtcctccttcagcctcctgtgtagccaggagcacaggcgtgtgccactgcacctggctaacttttggatatttttgtag

SEQ ID NO: 1183 - DNA, 2300 bp, Homo sapien
agattagacccctgtcttgctagattaggttcttaggtcagctccttgaaagtatttttttttttttttttgagatggagtttcactcttgttgcccaggctggagtgcaatgatgccatctcggctcaccgcaacctctgcctccctggttcaagcgattctcctgcctgagcctcccaagtagctgggattacaggcatgcgccaccacgcctggctaattttttgtatttttagtagacatggggtttctccatgttggtccggctgatctcgaactcccgacctcaagtggtccacctgccttggcctcccaaagtgctgggattacaggcgtgagccatcgcgcccagctgaaagtatctttaaattacctataaagttctgtgtctctgatgttatatatacgtataaatgtgtggtggatgcgactatataatgaagattgtactccctgagttataaagcagatagaattgttgacagtgtttaaattgttaaaggcttccctctcaaatacgtgttttattgaatctacatgtgttacttctccaccgtaagtccttttaggcctccagactcctgtagattcctccattctctgtagagtcccgactcccatcctgtttaatatgctctttacataaattgtaaacaccaattgtattcatttgtttattcagcagatacttatgagcactgttcagggaagtgggcttgctgctaggagcgagactgacaaagtctctttcccctggaacttaacattttcagtgacacagctcagaagcacctaaatgaatgtatagtatcgttttaagtacttaccagtggtgtgaagaaaaacaaattaggggaaaggggttgaaagccttgggtacacgagtgctattttaggtaggctggtctggaaagaactttttgaggtgacattttagtagaaacctgaattatgttcttatttaataaatgtcacataactcttctagttttctcggttttagtcttatttttggtctcagttatgtgcttaaaaaaagctttttggatcagattgcaaagacttcggtgaatattggagtttatgtacctgaaaatccttttctcagtactacttcagttgccccctgtgtaaatgcagtaaagagatgaagccaggtgggaaagtgtatttgtcatcttgagtgatgggtatggtagacaagataaagaggctttattgaactcactgaaatcaaatgttaagaaacttaaaattttatgtattataatagttgtcatagaacataaggtatttttcaaattaatcaagctatgttgtgtttttcagcttttatctgactagtatctatgaccattcaatatttgaagcctttagtaaggtggtgcagaaactcattccacaactgccgaccttggaaaacctattaaatatctttatatcagtaagtgagcaatttatatttaattcactgcagcttctgattccatttttgggaatatatttgtgttttcaaattttccaaaaaagtcttgaattaatctgtatcaagtacaaagactagtgacccacttaacatgtaaaataaatgataacatattattcaagttattttctgaattcttaaatagatgttgatgtcaacgtgtaattcttttatggtttgtaaattgccacataacgcctttcttgatagcaaagtaattcaaatcagagatggtttatattaataagaggattattgaaaatgtagcattgcttgatttttagagatttttgttaaattttttgtgatgtcttagaaaacaattcatttgagtaaagaggaagaagaagatttgacttaggaaattgtgtcagtaaatcagagtagagaaataattcctctttcattctttggataatagaagagtctctcaagcaagtgctatttgttttttggtattgggttatataattaaaaatgaccttggatgttattcagtaattctagatcttcgataagttgtaaattgtgattcttaaaaaatactgaacagtttcccatttgtttttccaagaattcaggtattgaaaaagcttttctctttgatgttgtcagcaaaatctacattgcaacagacagttcccctgtggatatgcaatcttatgaactttgctgtgacatgatcgatgttgtaattgatgtgtcttgtatatatgggtaagttatgtatatattcctgcaatatctcagacaggcggaaaactattaacttgatttgttcagaagactaatttctgaggcccctggcaagtg

SEQ ID NO: 1184 - DNA, 2300 bp, Homo sapien
gaggttgcagtgagctgagatcgcgccactgcactccagcctggcgacagagcgagactccatctcaaaaaaaaaaaaaaaaaaaaaaaaaaaaattcctcagttacactagcaacaattcaagtgcttattcctcataggactagcggctacatgtttgacagtgcagataaagaacatgtctatcatgtatatcagttgtattgaacagcacgataggaatggttgaaactgaggatgttcagcaaggaacagagaagacttagtgggtaatgaatactgcaatctggtatttgaagggctgtcatgaaaaaggtgaagactattcctattttattctattataggcttcagggagtgtggtttggctttaagacttttttttttttttgagacggagtctcgctctgtcgccaaggctggagtgcggtggcgcgatctcggctcactgcaagctccgcctcctgggttcaagccattctcctgcctcagcctcccgagtagctgggactacaggcgcccgccaccacgcccggctaattttttgtatttttttaagtagagatggggtttcaccatgttagccaggatggtctcgatctcctgacctcatgatccgcccgcctctgcctcccaaagtgctgggattacaagcgtgagccaccgcgcggccggctttaacaatttttaaacaaaggtttaccacagtggagttggctgcctttcgagatggtgagctcttttaccttcgaactatttaagtgcattctgcatgtctattagacactatagagttggttcgttttaggtgagaggttgggctagatgacctctaagggtgtatcctacctctaacttctgggttcagacaaaaccaaagtcccagacctgcccgcatgtgcgaatttttccttcataatcaagaagtcagtctccttggagggctgggagcacccccactcctgtactttaaaaagtgtatagggctgtgctttaagaggatcctcttctcaaacttccagttctagagcctgattatcaaaaataaaaattcctctagatttctcggacatatttggtgacaagcatttgcttttgtttgctttcattattcaatactttggtctctaatctgaacgaggtcatagaagaggcagtgttctatgggggatggaattcctagagtagactttgacaaggcgggaaggagggcaaattgagtcccgttgggtttgaagtggcagcagtatccactatcggcgacttactgaagaaagaagataagatgttctagcttggctgcatctgctttcccatcagggtccagctacctgctagaacaaactatcacggtgacccatgactctgccttggttgaggtttgccctcagtgtggctggctcccccatacctttgcacatcccaatctatccatccacctagatctgctcagacgctttctcattcaactcccgagcattatttatccgtgaccttcccacataatatttcgtagcgaggttacttacgcagaggtccgatctctctgttcatcttcaagcaacctgaaggcaggcagggtctgcgtcggatccagttctgtgccccttggtaggcacccaggacactgcaggcatcaataaatatcggttgggcaagtacagttgcaggatgaggacaatcaattcttcctcaaatgccgggagagcatctccatagcggtgctctgggagcccggaagaaggcaggggagcggtgcagacagcgttgtatgcgggccggggcggagggctgagggcccgagccggggctagaggcgcggccgggccgccctcctcgtgactcctcctcccccctccgcggctctgagtcaggtgattccggcacgtgacggggcaccacctaccctgctgctctcgagtagcagctcgggcggccaataagcggctgggcttcggctcggggcctatgagagccgggctccggggggcgggccggactgtggcggctgccgggggcggtggcggtggtggcggcggcggcggaggcggactggggaggcggcggcctggctcggcctggcctggcctgtcagggcgcgggcggcggcggctccagcaccatgtccctgcagtacggggcggaggagacgcccctcgccggcagttacggcgcggccgattcgtttccaaaggacttcggctacggcgtggaggaggaggaagaggaggcggcggcggcgggcggaggggttggggcaggggcaggcggtggctgtggtccggggggcgctgacagct

SEQ ID NO: 1185 - DNA, 2300 bp, Homo sapien
aaagacaatattcctattatttatgcaatctatagccactatttcacttttcttaaacattcttgaaattttccacctaggttttaaaaagattaaaagagggctttggggaaaatacaagttgaagaaggaacataatgaattccatgcaaacaaggcaaaacaaaatgtagccaaataccagagcacatctgcaaattcactgaagcgactcccttctgcccctgattataatctgttagtggaaaagcaaacacacactgcagtgtaccctagtttaaattcatcttctgtattccagccaaatcctgacaatcatagtgtaaatgatgagaaatgcattttggatgaacaggaaactgtactttctaatgagatttccacacttagtactagttgtagtcattttcaacacatcagttcaaacaataacaaagacactcataaaatatttggaaaagaacttaatggtaaccagttaatggaaaaaagagaaactgaaggcaaagacagcaaaaggaactactactctagaggtcaccgttctattccaggtgttgctatagatggagagaacaacatgaggcagtcaccccaaacagttttctccttgccagctaactgcgattggaaaccgcggtggcttagagctacatggggttcctctacagaacatgaaaaccgggggtcacctcctaaaggtaacctcaagggccagttcagaaagggcacagtcagaacccttcctccttcacaaggagattctcaatcacttgacattccaaacactgctgattctttgggagggctgtcctttgagccagggttggtcagaacctgtaataatcctgtttgtcctccaaatcacgtagtgtccctaacgaacaatctcattggtaggcgggttcccacagatcttcagatctaaacagcggttggcttttagacattatatatattatcagagaagtagcctagtggtcgtggggcacagaaaaaatagataggggcagctctaaagaccagctgttaagacagacaactgcaaactcatttaagcaagagaaaaacagctctaattcgagattgtgaagcaacacttctaaattcaaagacatagagttgtcaaatcaggatttttttttttttaaatgatatcctttcgaatgtaactgattttgggaaaatcacatgttcagaattgaggctaaatggtttgatcaggttttctctttgaagagaccacagccttaggaaatggttcttgatctatacaattccaccttggacactgggttaattctgtttgcccctggaacacaatcacgtaagtttccttctagactggcatcctgatgtgtcttgagtataatcacatgttgctacctagtaaataaaatcttaagaagatccgtggctttccttcaccagttcatagcatcgtgattcattgcccggattggactcgactctactcactggacatctaaccactccacttaattaacaatacccaccctacaggggtgttgtaaggattaaaatttaaaatacccgtgttttctacagtgcctggctcaaaagctactgcaagctcgttactgctcatcctccagaggcccacatcaagtcagccacgactcaaggagactccaaagataaaagctgaagccaaaatatatgattctaaacaccctcctcggctactgcaaagcactgtgagcactttctcaggacgagagccaagaagcccagcacctatgggtcaccacagtttccgaggtcccagatgaaaaagatgcgctcgctaccaccgtgcggcggtcctttctctcgcaatagtctcaatgctcccgggccctgcctccggacgccaggacagaggtaccaaaatctcacctcctgcaaagaaacctaattgctacgggggccggaagaggaagaggtgcggctccgacagccagaggggcgggcatacgcagcctccctcggctcagcctgctactggggatgcagagcgtcctggtcgccatgaaaacaggccacacctcggcgatcccggccggtggtttgcaagtgcgcaggcgcgcgcccccttccgcgcatgagcagtgctgctcccaacccgccagtcgcggtctccggcgccagctacgccgctgccgctgtcactatggcccattacaaagtgaggggggcgcggcgtggctgggggcatgcgggcggtagcaagccgctggtcggctctgggtgggagtggggtcgcgcgcgcaggtttgggcgggagggccccgaggtag

SEQ ID NO: 1186 - DNA, 2300 bp, Homo sapien
ttttcaccataggtttgctttaagaaatagtgctcccttcagaatggaagaatttatctgcctcttatttgatgtggatcagagctaagatggctgactaaataaacatgggggactggaatctccttggagatactctggaggaagttcacatccactccaccatgattggaaagatctggctcaccatcctgttcatatttcgaatgcttgttctgggtgtagcagctgaagatgtctggaatgatgagcagtctggcttcatctgcaatacagaacaaccaggctgcagaaatgtatgctacgaccaggcctttcctatctccctcattagatactgggttctgcaggtgatatttgtgtcttcaccatccctggtctacatgggccatgcattgtaccgactgagagttcttgaggaagagaggcaaaggatgaaagctcagttaagagtagaactggaggaggtagagtttgaaatgcctagggatcggaggagattggagcaagagctttgtcagctggagaaaaggaaactaaataaagctccactcagaggaaccttgctttgcacttatgtgatacacattttcactcgctctgtggttgaagttggattcatgattggacagtaccttttatatggatttcacttagagccgctatttaagtgccatggccacccgtgtccaaatataatcgactgttttgtctcaagaccaacagaaaagacaatattcctattatttatgcaatctatagccactatttcacttttcttaaacattcttgaaattttccacctaggttttaaaaagattaaaagagggctttggggaaaatacaagttgaagaaggaacataatgaattccatgcaaacaaggcaaaacaaaatgtagccaaataccagagcacatctgcaaattcactgaagcgactcccttctgcccctgattataatctgttagtggaaaagcaaacacacactgcagtgtaccctagtttaaattcatcttctgtattccagccaaatcctgacaatcatagtgtaaatgatgagaaatgcattttggatgaacaggaaactgtactttctaatgagatttccacacttagtactagttgtagtcattttcaacacatcagttcaaacaataacaaagacactcataaaatatttggaaaagaacttaatggtaaccagttaatggaaaaaagagaaactgaaggcaaagacagcaaaaggaactactactctagaggtcaccgttctattccaggtgttgctatagatggagagaacaacatgaggcagtcaccccaaacagttttctccttgccagctaactgcgattggaaaccgcggtggcttagagctacatggggttcctctacagaacatgaaaaccgggggtcacctcctaaaggtaacctcaagggccagttcagaaagggcacagtcagaacccttcctccttcacaaggagattctcaatcacttgacattccaaacactgctgattctttgggagggctgtcctttgagccagggttggtcagaacctgtaataatcctgtttgtcctccaaatcacgtagtgtccctaacgaacaatctcattggtaggcgggttcccacagatcttcagatctaaacagcggttggcttttagacattatatatattatcagagaagtagcctagtggtcgtggggcacagaaaaaatagataggggcagctctaaagaccagctgttaagacagacaactgcaaactcatttaagcaagagaaaaacagctctaattcgagattgtgaagcaacacttctaaattcaaagacatagagttgtcaaatcaggatttttttttttttaaatgatatcctttcgaatgtaactgattttgggaaaatcacatgttcagaattgaggctaaatggtttgatcaggttttctctttgaagagaccacagccttaggaaatggttcttgatctatacaattccaccttggacactgggttaattctgtttgcccctggaacacaatcacgtaagtttccttctagactggcatcctgatgtgtcttgagtataatcacatgttgctacctagtaaataaaatcttaagaagatccgtggctttccttcaccagttcatagcatcgtgattcattgcccggattggactcgactctactcactggacatctaaccactccacttaattaacaatacccaccctacaggggtgttgtaaggattaaaatttaaaatacccgtgttttctacagtgcc

SEQ ID NO: 1187 - DNA, 2300 bp, Homo sapien
tcatgccactgccctccagcctgggtgacagagtgagaccctgtcttaaaaaaaaaaaaaatctccttttgccttctcacttcaaacctgctgtttttccctagtgctgaccatcatcagtggtcacaacagtatggtctgtatccttgcagacatttttctatgtaggatgagcagaaaggaaaatggatttaagttaatgtccaactcatccactgtattgaacttcactgaatctgctctacaccctcaaagggacaaatctgaagaacaaattagaggtgtccatggtataactcctcctaagcatcatttgcttctcagattgatctcaactaggaaaagtttttgttaatcgattttagctaaatatatatgtgtgtgtgtgtgtgtgtgtgtgtgtgtgtgtgtgtgtgtgtatatatatatttttttttttcttgagacagggtcttgctgtgtcgcccaggctggagtgcagtggcgccatctcggctcactgcaacctctgcctcctgggttcaagcaattctcctgcctcagcctcccgggtagctgggattataggcatgtgccaccatgcctggctaatttttggtatttttaatagagactgggtttcaccacattggccaggctggtcttgaactcctgacttcaggtgatccgcctgtctcagcctcctcccaaagtgctaggattatagacatgagcccagcctctaattagatatttttatgaaatgtaggttttaacaggataaatgtgatacatgtattgttctataacttgctttacaacatgacctagggacctttctctattagttcatagaaatctttattctctgaattgctgaatgatatagatgtaccatagataaccattcctctgtcagacatttaaattattgctgcttttgtataattaccaacagtgctatgtgaacatcctagcatgtgcagtgtgtctctgaatgtctatgctgaatgaatatttcaagtatccaaaagcagaaatgctatactaatattgataggtttaaactgccttttaaatagctgtatccatttatattcttacctacaggatatgagagtaacagtgtctccctactttgccaaaagaaggtattataaatctttaaaattttgcattttgatagttaaaaaataatatttcacttaaatatgtattctctgactaccgaggttgaggaagtttcgagtttattaataatttatgagttacacatatgtaattcagataacacataatatagaaacatgaatatattgtgcatgtatgtgtgcctatacaaatatatatatatataaataatatatatataaaaatatatatgtaaatatatatatatatatatatatatatatatatatatatatatatatatatatttgtccctggtgaaatgtttgtatttaatctgagaagtagctattgttggcaaaaaagcccagggaagaagtatttatctgttatgctcaacctgccagatcactagctctgaagggacctttaatgacctaaaatacaatgtaattgttaataacagaacatgggagacagaatcaggatctatctatgaaatcggacatgacccatttattaaggcagatgaccaagaagttattatctagtaagaaagacttttttggttctagaaacatggtttattgcacaaaaaacaatgacattttattaggttcccccagtggcaaaagttgcatacaaacagcacacaaatacctcctgtcattttaaatttgacatctctgaattatggaggaatcattcactcagcttaatttggggctcatgactttagtcttctagattgcagtgtgttatcaggactattataagcattctttatctgtgctgtccaaaaaagcagccattaggtagatgcagctctttacatttttattaaaattatttaaaattaaaaattcaattgctctgacacacaaaccataatgcaagtgttcaatagctacatttggctactggctgccttattggctagcacagatagaatatttccattgttgcagaaagttctattggatggtgctgttttaaaagcaaggataagcagaaagggacatggattttagttgatggatgactcactcactacattcaactgaactgaatctgctctataccagcaaagggacaaattcagaaaataaattgaagatggccatgctgtaacttctaaacatggtttgcttctcagatttacctaaactaagaaaggtttgtgttaatct

SEQ ID NO: 1188 - DNA, 2300 bp, Homo sapien
ggtagaaaaatcacctgagcctaggaagtcgaggctgcagtgagctgtgatcatgccactgcgttccagcctgggcgacagagtgagactctgtctcaaaaaaaaaaaaaaaaaaaaaagaaaaagaaaaaagaagaaaacaaaactgtggttagagaacaaactttgtatgacttgaatccttttaaatgtattaagatttgttttatggtccagaatatggcctatgttggtaagtgttctttgtacatttgaaaataatgtgtgagatcagttgttgttgggtagaatattgtatacatgtcaattaggtccatttggttgattgtgttgtttgtcttctgattttctgtctactttttctataaattattgagaaaggattattgaaatctctgattataataatgcatttgtttgtttctcctgtggttctatcagtttttgttttatttatttatttatttatttatttattttattttttttgagatggagtctcgctctgtcacccaggctggagtgcagtggtgcaatctcagctcactgcaacctgcaccgggttcaagcaattctcttgcctcagcctctcgagtagctgggactacaggcatgtgccaccatgcccggctaatttttgcatttttagtagagacggggtttcaccatgctggccaggctggtctcagactcctgacctcaggtgatccactggcctcggcctcccaaagtgctgggattataagcgtgagccactggcccatttatttatttatttatttttaaatttttctttcttttgttttctttctctttttttctttccttctttctttctttctttcttttttttttttttgagactgagccttgctctatcacctaggctggagtgcaatggtgcgatcttgggttactgcaacctctgcctcctgggttcaagcaattctcctgtctcggcctcctgagtagctgggattacaggtgcctgccaccaagcccagctaatttttgtatttttagtagagacagggtttcgccactttggccaggttgtcttgaactcctgacctcaggagatctgcctgccttgtcctcccaaagtgctgggattacaggtgtgagccactgcagccgaccatatgcctgataatttttgattggatgctacacattttatctagttggatggtgcatatttttgtgttcctgtaaatacttttttaatttttaaaattttatttatttatttatttatttatttatctatttagagatggagtcttgctctgtcacccagattggagtgcagtgatgtgatcttggctcactgtagcctctgcctcctgggttcaagcggtgctcctgcctgagcctcccaagtagctgggactacagacgtgtgccaccacgcctggttaatttttgtatttttagtagagacagggttttgctatgttggtcaggctggtcttgaactcctgacctcaagtgatcctcctgccttggcctcccaaagtgctgggattacaggcatgagccactttgcccggccaatgctttttattttttatttttatttacttattttttttgagacagagtctcactctgtcatccaggctggagtgcggtggcatgatcttggctcactgcaacctccgtctcccaggttcaagtgactcttttttttctttttttagacagagtctaactcttgtcgcccaggctggagtgcagtggtggatcttggctcactgcaacctctgcctctcaggctcaagcgattctcctgcctcagtctcccaagtaactgggattataggcatgcaccaccatgcctggctaatttttgtgtttttagtggagatggggtttcgccatgttggccaggctggtctcaaacttccgaccttaatgatccacctgccttgtcgtcccaaagtgctgggattataggcatgagccactgcactcggcccagggggttcttgtgtctcagcctcccgagtagctgggattataggtgcacaccaccatacccggctaatttttgtatttttagtagagaaggggcttcaccatgttggccaggctgcttttgaactcctgacctcaagtgatctacctgccttggccttccaaagtgctgagattacaggcctgaaccactgctccaggccataaatactttttagatttgttctgtaactcagttatgttacttgaaagcagtttgattctttttggtaagatggtaattattcccaccactggacccttttgtgtactctgagcat

SEQ ID NO: 1189 - DNA, 2300 bp, Homo sapien
tcagccttccttcagctggaagtacaggcacgtgccactatgcccagctaatttttgtatttttagtagagatggcgtttcaccaggttggccagtctgttctgaaactcctgacctcaagtgatgggattacaggcgtgagccaccacgcccggcccagatactgttttaagtgctttacatgcattatctcaagtaagcttcccggcaatgttatgaagcaagtgctatcattatcctcagtttaaaatggaatctgagggtttcccaacaagttaaacatagaattaattaccatatgacccagcaattccactcataggtatatgctccccctcaaactggaaactgatgtttaaagaaaacttgtgccaggtgcggtggctcatgcctgtaatcccagcactttgggaggccgaggcgggcggatcacgaggtcaggagatcgagaccatcctggctaacatggtgaaaccctgtctctactaaaaatacaaaaaaaaaaaaaaattagccaggtgtggtggtgggcacctgtagtcccagctactcaggaggttgaggcaggaaaatggtgtgaacccgggaggcggaggttgcagtgagccgagatcacaccactgctctccagcctgggcgacagagcgagactctgtctcaaaaaaaaaaaaaaaaagagaaaacttgtacagggatgttcacaatagcgaaaaggtggaaacaacccaaatgtccataaacagacgagtggataaacaaaatgtggcgtgtctatacaatgcaatagcattcagccattaaaaaaaggaaattctaggccaggtgtaatggctcatgcctgtaatcccaacactttgggaggccgaggcaggtggatcacttgaggttgggagttcgagactagcctggccaacatggtgaaaccctgtctctactaaaaatacaaaaattttctgggtgtggtgccgggtgcccataatcccagctacttggtaggctgaggcaggagaatcgcttgaacctgggaggcagaggttccagtgagccgagatcgcaccactggactccagcctgggtgacagagcgagactacatctcaaaaaaaaaaaaaaaaaaagaaaacatgtgaaggaagccaaccacaaaaggccacatactggatggtacatatgtattgtatgatttcatttatgtgaaatatccagtataggtcaatctatagacacagaaagcagattagtcgttgccagggactgtggtaagaggagaataggaattaactgcttaacaggtatgggtatggggtttttgtttgtgatgaaaaagttttggaactagtggtgatggctgcacaacattgcaaatgtactcaatgtcactgaattgtacactctaaatggttaaaaacagggccggcttcggtggctcacgcctgtaatcccagcactttgggaggcctaggcgggtgaatcacttgaggtcaggagttcgagaccagcctggccaacatggtgaaaccctgtctctactaaaaatacaaaaattagccagggagggtgaagcagaagaattgcttgaacccaggaggcagaggttgcagtgagctgagatctcgccattgcactccagcctgggcagaagagcaagatgactccacctcataaaaaaaaaaagaaaaaatatatattatatattaaatggcgaaaatggtaaattttatgttatgtgtatttcaccacaatttaagaaatatgtaatttgaggcttggagaatttaattaagtgatttatctgatgttaacttacagctgatacatggtagagctgcattttaatctcagtcatctggctctttttaaaacaattacatagaaaactttattttgggccatttaggaggtttagatcattttgatcatcttcagctgtcttctcttcacatacaggaaaggccttggaaagcagtcgttgcgccagacagcccagggaagagcggcagcctgaggacctagggccacctgctgttccctgggattcatgtccttctggggaggagggaggacccaggacaatggctgctgttcatgatctggagatggagagcatgaatctgaatatggggagagagatgaaagaagagctggaggaagaggagaaaatgagagaggatgggggaggtaaagatcgggccaagagtaaaaaggtccacaggattgtctcaaaatggatgctgcccgaaaagtcccgaggaacatacttggagagagctaactgcttcccgcctcccgtgttcatcatct

SEQ ID NO: 1190 - DNA, 2300 bp, Homo sapien
accactgcacctggcaaactttaatttttaatttttttttgtagagaaaggctttcgctgtgttgcccaggctggtctcaaactcctggcctcaagcaatcctcctgcctcggtctctcaaagtgctaggattacaggcatgagccaccatgcctggcccattattttttatttaaaattttttttttacatggccaggcacagtggttcatgcctgtaatcccagcacgttgggatgccgaggcgggtggatcacctgaggtagggagttcgagatcagcctgaccaacatggagaaaccccatctctactaaaaatacaaaattagccaggcgtggtggcgcatgcctgtaatcccagctactcgggagggtgaggcaggagactctcttgaacttaggaggtggaggttgtggtgagccaagatcgtgccattgcactccagtctgggcaacaagagcgaaactctgtctcaaaacaaaacaaaacaaaacatggccgggcgccgtggctcacccctgtaatcccagcactttgggagcccgaggcgggtggatcaagaggtcaggagattgagaccatcctggctaatacggtgaaaccccgtctctactaagaatacaaaaaaattagctgggcgtggtggcaggcacctgtaatcccagctacttgagagactgaggcaggagaatcgcttgaacctgggaggtggaggttgcagtgagccaagatcgcaccactgcattccagcctgggcgacaaagcgagactccgtctcaaaaaaaaaaaaaaaaaagaaagaaaaaaatttacattttaaaatcttcaatttatttatttatttcagagacaggatcttgctctgttgccaaggctggagtaaattttcatttttaactctaatcccatcacagttgaaggagtacctttctataacacttggtgcgtagaaatcacaggggctgtggaacatgtgggggctttggagtcaggcgcccgagactcttctcccagccctccccttattagctgtgagaccttgagtaagttactttgggagcctgggtttctttatccttaaaatgggaatattattaccctgctttacaaagtggtaaaaattaatgaagacaatgctcataaagtgtttagcctggatgctggcacacagtaagtgtttattattctagtacctctttattattttatttgattcttaccacaattctgtaagatactcagggcagaggtgagctctgttttacagctgaggaaactgaggcccagtggaaaactaaatgtggatgctgggagtagaattcaggtctttatagtgtcaaacacaaggcaggctattcttcaaaggcagatggcaagccctttttttggtagccattatgacatggcagcttcacagtgatggtgcccagtgatggtagaatgataatggaagtggtgcggccttgcagaggaaaaggttggtaggaggctcttttcttttctttttttttgagatggagtctggctctgtcgcccaggctggagtgcagtggcgcgatctcggctcaccgcaacctccgcctcccaggttcatgccgttctcctgcctcagcctcccgagtagctgggactacaggcgcccgccaccacgcccggctaattttttgtatttttagtagagacggggtttcaccatgttagccaggatggtctcgatctcctgaccttgtgatccacccgccttggccttccaaagtgctgggattacaggcgtgagccaccgcgccctgcccggtagaaggctcttttcaacataaagtcacacaaagacttagtcaatgtgtggttggaattcctccttcccccttttccctcctctctttctctccctgtctctttccctccctttcttccagaagcattccttttaaaaaacatttttaaaaaaataactctgatgttttgtatggaatgcttcacgaatttgcgtgtcatctttgtgtagagaccatgttaatcttctctgtattggtccggtttttagtatatgtgctgctgaagcgagcaccacaagcattcttttattgattgattggttgagatagggtctcgctttatcactcaggatggagtgtagtgccacgatcttggctcactgcaacctccacctcccgggttcaagcgattctcctgcctcagcatccccagtagctgggattaaaggcatctgccacctcacctggctaattttttgggtacttttcgtagagatggggttttaccatgttggtcaggctggt

SEQ ID NO: 1191 - DNA, 2300 bp, Homo sapien
ctacattatcacttgccctgactcatgcaaccctgactggttttcttgcctctagtcttgcctccttcaaacccttctttacactgcaggtctcagtgaatttttttttttttaagacagggtctcactctgtcatccaggctagagtgctgtggtgtgatcatagctcattgcagcctcaacctcttgggctcaagctgtcctctcacttcggcctctggagtatagctgggactacatgtgcacactaccattgcccggataattaaaaaaaatttgttttgtagagacaggtgccactatgttgctcaggctggtctcgaactcctgggcctaagcaatcctccagccttgacctcccaaattgctgggattacaggtgtgagccaccacacctggctccagtgatctattttaaatgcagtctgatagtttgtgtcccttgtttaaggcctatctgtgagctagcagggtgtggtgtaccacctgtaatcccagcgctctgggaagtcaaggcgggaggatctcttgaggccaggagttcgtgatcaccctgggcaacagagtgaaattccatctctacaaaaaatttaaaaactggctgaccatggtggtgggtgcctgtagtcccagctacacaggcagctgaagtgggaggatcacttgagtccaggagttcaaggctgcttcaagctatgagtgcaccactgcactctagcctgggtaactgagagagatcctattttttcttttttctttttttttgagatggagtctcactctgttgcccaggctagagtgcagtggcgcaatctcggctcactgcaacctctgcctcccagagagaccctgtattgcaacaaacaaacgaacaaacaaacaaacaatctttctatgactccccagaacctataggacacagtccaaactgtttaccaaggcacacaaggcccttcatgatctgacactccctgctcacaattctgaactttgagtagttcctgctgaattccgtcccttcccatggccttttctgtcagcctgtgctccccttctgtgtgctccccgcttacaattctggaaaacccctgttcacctttcaaaacccatcttgtatgtcatgtcatctaggagcttttccagaacacttccacacagggggattcctctctggtcccttctgcctgaatttttttttttttttttttttgagaccgagtttcgctgttgttgcccaggctggagtgcaatggcgtgatcttggctcactgcaacctccgcctcccgggttcaagcgattctcctgcctcagcctcccgagtggctgggattacaggcatgcaccaccatgcccagctaattttgtatttttagtagagatgaggtttctccatgttgatcaggctggtctcgaactcccgacttcaggtgatccacccacctcaacctcccaaagtgctgggattacaggcgtgagacaccatgcctggccaccttctgcctgaatcttgagcagcgtctacttagagcttcattctttgtcttcctagtagagtaggaggtcagggaccccgttaatctacctcttcatcctcagggcctcacacaaggccagttattctcaaaatgctttgaatgaataatcagagctggcaaagctatttcaccaggggccatggtgtcaccaattcttctgtggactaaatctctgctgaggatcgtcaagtcacccaccctggtgcccagtacaggcctggcttcagactggagcataaccaaatgcagagtgatagagaccacccggttgaggcgtcagagagctgagagtggagagcaggggacccaggcatgaagcaggagggcaggacttggaggaggaatggagctcagtgtcctggagaaagagcagaggctgccaccggctccctggctaagacccaagcaggcgaagaggaggactcattcatccagggccagcccaggagcaagactgccaagcaggccggcccagcccagctgggaggggatttcctcagcctccctcctcctgggctgggcagctttggaacctgtctggaggatttttgtttggggagggacggaggagcgcctggcagagcgggatcttcagggcagcgggcaaccccttggcccaggaagcctggaacgcaaggaccggagggcgtgggctgggacgcccctaccttggtctttcagggtaagatgtgggagctgggagggagtggagggagtcctatgtcaggacaagggggcggcagcaggaagtgcagggccgaggg

SEQ ID NO: 1192 - DNA, 2300 bp, Homo sapien
tgcagtcagctgcaattaagccactgcacttcagcctggacaacagagcaaaactctttctcaaaacaaacaaaaaaaccgtcactagattgctttttatgtccttggctttcattagacataacaaaaagtatccatgtgaattttgctttagcatttgttgttaaaatcttcctgattactttattaaatcattcactgtttcctaataaaatcacatgagaaactacctttagaatttggttatatagggaaaaaaaatctatgatgtctcctatgattaattcattcctttcagatgacaaaatctattcaatatgtactgtgttttcatttttaccctagcatccaggaagctcagaactacatttctttctttttttttttttgagacagggtctcactctgtctcccaggctggagtacagtggcacaatctcaaggtggcgagtccaagcaattctcccacctcaaactctccagtggctgggattacaagtgtgcatcaccacgcctggctagtttttgtatttttagtagaggcagggttttaccatgttggccaagctggtcttgaactcctagcttcaagtgatccacccgcctcggcctccaaagtgctgggattacaggcgtgagccaccgcacccagccgataactacatttcaaattcagttacagtcttgtttaaccccatgataattgtgatctcctttttctctggccctaattttctatttctagttttctagcctattgtaaagaccctttatgctcttatggacaagagaggagataaaattaacatttggtatgctgattttagaattatttctgcaatttttacaaagataaatgcaaagatatatgtcctatgttatgatatttaaagaatttgtagaggttactccgggcatactgcatgcctatggggtagctctgttccacaaggagcagaaaaaaaaaaaaaaatttgtagtaactgaagaggatccagagaaaagcaatagaaaaagaacaatgaatgggcactggggtagtatgcccatattctccaactcaaatattgtggcacattgatgtagcatatgggctaatagaagtgaatatctgtaattcggactgtcctgaaaaatcctggagatatgttgaagacagatcccaggagtcatggtcattattcagtatatatgagaaggtacagaaaggctttatcctttctttggatcagattcctttgatgatctgttgaaaacaccggaactgctccccagaaaaatacagacgcgcagagtttcagaaagcagaacccccctgttatctatttatttttccacaatatcaaaagcactttacagctggtattgctgtaaagagttcagaaagatgaggaagaacctgagctgccaagtcagatgggaagaatggcaaatcagctaccagctgaagttcttaacactctgaagccattcttagacggtttaagccagtgggtgctttttgtaggttctcaacgttttaaagtaacatatccctttgatgagctgcttaaggtatgggtcagctatctcaaaaatactcccacaaacacccccaccctcgctcccaccccacaaatctgcaaataatttcatggggttcatggacttgctaaagcccatcctccaatactcgcttctgtttaagtgcagacttcccagggctcagcggaatgcccttgatgacctttaacaatcacccttttatcatggggacaagagcggcctagaaggaggtttttggagtcaccagacccccatggcccctcaccaggccccttcaagctctcccctcccccacgcccgcgcagcgcaggtgcgaaaaccttaggggccacccgggcgcgacagccccaaagcgggggggatgggaccctgggaggggcgggggtgggggtgggggccttcccggtgttgcttggtgaccacgctctccgcccagaccgttccatttcttcagcagggggcgccccgggccgggccggcactgaccagcctcgcagagccaccctcttccggcctgcccccctctgccgggcgatggtgtgcgcccgtgacgtcacagaaggcggggccagcgccgctgccgggtgctggaggcgccattggagccggcttggctggcgagcccggctgaggagcctcttgggccgcacttaccgccgcgtccgctcccggtccctggcccctcagcggcatggcgtgcggggcgacgctgaagcggcccatggagttcgaggcggcgctgctgagccccggct

SEQ ID NO: 1193 - DNA, 2300 bp, Homo sapien
aagagatactgatctccacaaaaaatttttttaaagaattagcttggccgggcgcagtggttcacgcctgtaatcccagcactttgggaggctgaggcgggcagatcacgaagtcaacagatctagaccatcctagccaatatggtgaaacctcgtctctactaaaaaaaaatacaaaaatcagctgggagtggtggcgcacacctgtagtcccagctattcaggaggctgaggcaggagaatcgcttgaacctgggaggtggaggttgcagtgagccaagattgcaccactgcatttcagcctggtgacagagtgaagctctgtctcaaaaaaaaaaaaaaaaaaagaattagctgggcacagtggcatgtctgtagtcccagctacttgggaggctaagcaggaggattgcttgagccctggagtttgaggctgcagtgatctatgatagcactactgcactccagcctgggtgatggagtgagaccctatctcaaataaaataataattataataaagactgccaggcacatggtggcatgcacatgtggtcccagctatttgggaggctgaggtgggaggatcaccagagcccagggaggttgaggctgcagtgaactgtgattgcaccactgcactccagcggggcaatgggagtgagaatctgtctcaaaagtaataattatatatatatatatttatatatatatatatatatatatatatatatatatatatatatatgttctagtattttcctcccatacctccaatgtataatatctcatgcaccctgtggtccaccccccaaagacatacacacaacactttagagtctctgatgtagtcaaagggagtcattggaggttctggaacagatgacaggcatggtagcagttgattcacaaactgaaagctgagacatcaaagaactgcgactgccttggaatgtttcccatgtgctagccaccgcctcagtgctttatacataaatcagttaatccctatagcaagcctccattgtgaataccataattatcttaacagacgaggagactgaggcacaatgaagttaagaaactttcctagagtcacacgaaattggtgggggcctacttttttttttttttttttttttttttttttttttttttgagactgaatctagctctgtcgccaggctggagtccagtggcgcgatctcacctcactgcaacctccgcctcccggattcaagcgattctcctgcctcggcctccccccactagctgggattacaggcactcgctgccacacccagctaatttttgtatttttagtagagacagggtttcaccatattggccaggatggtctcgatctcctgagcttgtgatccgcccacctcggcctcccatagtgctgggattacaggcctgagccactgcgcccggctgggggcctacatttgaccccacgtggtggtttgggctcatagtccatgtgcttaaccactagtgggtaggcagggagccagtgttctttctctcctgtgactttggtgaagtctctcaccactcagtgttgtcgtgagcatgctaggcagagtgcaagaaaggagcaagaactcactaatggctaggccttccctgtgtctctgtaattgatgggtttgggttttttttcctttctctctctctacctcctctctctcttcttcatcctctctctctcactctccccctgagataaggtcttgctctgttgccagggctggaatgcaatggaatggtgtgatcatggctcactacagcctcaatctcctgggctcaagggatcctcccacctcaacctcctgagtagctggaaccacaggcatgcaccacctcgcccggctaattttttattttttgtagagaggggagtttcgccatgttgcccaggctgttttcgaactcctgggctgaagtgatcttcctccctcagccttccaaggtgctgggattgcagacgtcagccaccgtaccaggccaacgggctcggtttctatggttttgtggggagacggctgagggaaggtcggcttccggcgtcgcgctgcaaacgtctcgctgaggtcatcctttacggcaggcgtccgcgtcgctagctagtcgttctgaagcggcggccagagaagagtcaagggcacgagcatcgggtaggtaggggctgcttatgtccgcgcggcagcttagcttaaggaccttccttccgaggtctctttaacagatttcctcttggcttgctgtgtgtccccttctcccagacctgaactca

SEQ ID NO: 1194 - DNA, 2300 bp, Homo sapien
aggtaactactgtacagggtttttgggaagacttaatgagataatatacacaaaacgcccaggacattgcctagcacttagtaggagttttgtaaatggtggttgcttgcccttaatatgaaacagtgcctgcaaacacagaaccttagcaagtttcagtgagtggaaaacatcccttcccatctctatcgtccctgctccagttgacagcctcattacctttggctgggactagtacagtagcctcctagcgtaaccatccacacccatctggtacctgtccttgggttacttttgctgttactttgacacctttcttggctgcttataataattaaatttaggtcaaatttcttttccttccttccttccttccttccttccttccttccttcctctctttcttgatggaattttcactcttgttgcccaggctggagtgcaatggcacaatctcggctcatcacaacatccgcctcccgggttcaagtgattctcctgcctcagcctcctgactagctgggattacaggcatgcgccacaacgcctggctaatttttttgtatttttagtagagacagggtttctccatgttggtcaggctgatctcgaactcccgacctcaggtgatccgccagcctcggccttccaaagtgctgggattacaggcgtgagccaccacgcccagccaatttaagccaaattccttagctcaagggcctttgtaaattgctccaacacatttttttttctcccaatcgttatggtgaaaaagaacagaatgtgaatctgaagacaggggtccagtcctgggaccatccgctttctccctacatgactttgagtatatcatctcagttctacatctatacattagagatcattatgctgcctcatgggatgcatccatctttcctgctgaactgtgagcccatggtcaacaggcagggatgaaatgcatcttgctcacactgtatcttcagtaccctgcatggggcctgacaccgggtagatgttcagcacgtatttgttgaatgaatgaatgaatgaatgaatgaatgaacagggttgtgaggactggatttggcatgatccaggtaaagcgccttgcacagtcaccaggagacacgcccatatggtagctgttgctacgcaggttactaagtggaatgactttagacacattacttctctggaaacattcacgtatctgtcctaggagaggatagaagggactcctgcctcgttttgtgcatcattaggtcgtgtgtgcagaaggagctcaataaatgcttcctcggtggataaagcatctcccaaggctccacttggggctagcgctgtctaaagagactgagttccctcattggggcctggttcttttctgctctttaccctgcggggaagatgaggccttctttgggtccctccttcattcagttccagaagcccagcagataggtgggcctataggacccgcaggatctgcaggacgctctccgagagctggagcaagagcgccaagggcggggacggaatgtgggtttaagggaaacgggcgaaagaggggtgggcatggaaaagggtggtttgagaaccaggggccaggcagaaggacagcccggcagcctgagagagcgactggggggcggtgaggagctccaagggggcgggtcggctgagctggcccagggtcagctagcggccgcggggccggggcggagaggtcgcagagcagagggcggagaatttgggggtgtggttggcctgcgggggacaccggaggccactagggaggagttgcagaggggagggaccgagggagggcctgggggcggccagaggacgcggggtcagtgaggagggggcgccgggcgacggactggcaggggcgcgcggggcgggcggaagcgcaggggtggggtgcagggcggggggagcgcgcatcggggggcggggggcggcgtcggcgctgggagtgggggagcgggttgggcggctgcgccggctctgcttcagccgctgccgctagggcgcggggggcggggggctcggcgccgcgagctcggccattgtgggagccgctcccctcggctccgccacgctcccctcgactgcgctccagcctggggcgcgcccggccgccgccgccttcgctgccgccacgggcccgtcttcttcctccttcggctcccagggtaaggcgcggggcgcggggttggatgcaggcgccctgcccgctgcgcgggatgcgcagcggcggctggggagcggtgattgatcgcccccggcggccgcgc

SEQ ID NO: 1195 - DNA, 2300 bp, Homo sapien
ttctatttcatagaattttaaaactgcataagcctttaacctctgtttctcaaattcactttcccctttggaatgttataattctacttcacctgactcctggaactccctgttatcatgtaacatattttaattattttgattgttgtctgagtcttcctactacaagagtgagactgagtctcactcttggccaggctggagtgcagtggcgctgtctctgctcactgtaacctctgcattctgggttcaagagattctcctgcctcagcctcccgagtagctaggattacaggtgtgcaccaccacacttggctaatttgtgtattttagtagacacagggtttcaccatgttggccaggcaggtctcgaactcctgacctcgtgatctgcccgccttggcctcccaaagtgttgggattacaggtgtgagccaccacacccggccaacaatgcaaacttcttttaaaaatttgtttttaaattttttgtgggtacataataggtgtatgtatttatgaggtacatgagatgttttgatacaggcatgcaatgtgaaataagcacatcatggagaatggggtgtctatccctcaagcatttatctttgtgttgcaaacaatctaattacactctaagttattttaaaatgtatagttaagttattattgactatagtcacccttttgtgctatcaaatagtaggtcttattctaactattttttaaaaatgtggaacacttcacgaatttgtgtgtcatccttgtgcaggggcctccctaacctctctgttgttccaattttagtatatgtgttgcttaagtgagcactagaatgcaaacttcttaagaatagaggtttttatttgtgtattaactaatttccctagcacctagaagagtttctggtataaagtagctgctccaatcaatattgaatgaatgaattggaaatgttaagttagttcactcttgttccccataaggaaaagaggcatggaaaggcacaataacttgctcaagctaacgccatatctccttaccaggtaagtgggttttaaaaaagtttaaataaaacgatgcttaatcacagttcctttatgtgatttggtactaatgtgtattatggacttaactgtattatctctatgaaaaggggtgggggaagcaaaagggaagaagctaatatatattgagtccttactatatgccgggtattttgttttattttatttatttatttatttatttatttgagacagagtcttgctttgttgcctggtctggagtgcggtggcactatctcggctcactacaacttcgcctcccgggttcaagtgattcttgtgcctcagcctgctgagtagctgggactaggcgcgtgccaccactccgggctaactttttatatttttagtagagacggggtttcgccattttggccaggctagtctcaaactcctgacctcaggtagtccgctcgtcttggcctcccaaagtgctaggattataggcgtgagccaccgcgccaggccagtcttatttaattgtcataaatgatatcctatgatagtccagtaaccttactagattttacagatgagagaactgaggcttaaggaacctaaatcacttcccagagggtcacacagctagtaagtgactgaactgggttttgaacccaggcccgattaactccatttggccctcttttaccttaaggcacaggaaaattttggatttgtggtctgggttgctttaagattcccagatcagactactcttgaaaatggtctgatttgaactactcaagtagagttacaaaaattgtttaccttaagacagccccatggagcagtggggttgtgtctgtagcgctcttgagtaaaaaaaaattctgtgttgcacatactcccactcagttgtatcgtatataattcacatttcagactttctttttaaccagggatccagaataactacagaaaggtgattatgtaacatacttgtacagtgcagccacttctgtgtttggtaatattctttttttttttttttttgagatggagtcttgttctgtcactcaggctggagtacagtggcgcgatgtcggctcactacaacctctgcctcctggattcaagcaattctgtacctcagcctcccgagtagctgtgattacaggtgcccaccatcatgcctggctaattttttgtatttttagtagagatggggtttcaccatcttggccaggctagtcttgaactcctgacctcatgatccacctgcctcagcctccc

SEQ ID NO: 1196 - DNA, 2300 bp, Homo sapien
aaataatgccatctagtctcctggctttaaaattccagcctgggccaggcacagtggctcacacctgtaatcccagcactttgggaggccgaggcaggtggatcacctgagatcaggagttcgagaccagcctgcccaacatggcaaaaccgtgtctctactaaaaatacaaaaattagccgggcgtggtggtgggcacctgtaatcccagcttcttgggaggctgaggcaggagaatcacttgaacccggtaggtggaggttgcagtgagccaagatagtgccactgcactgcagcttgggtgacagagctagactccatctcagagaaaaaaaaaaaaagaaaaaaattccaggccaggtctctccctgaactctagattcatatattcaattgtctattcaaagttccacttgaggggtgggcatggtggctcaagcctgtaatcccagcactttaggaggccaaggaaggaggatcacatgaggccaggagtttgagaccagcctgggcaacatggcgaaacccggtttctaccaaaagaaacaacaaggaagtttcacttgaatgtctttaggcatttcaaacctaatgttattcaaaaggacatttctaccctgcccccccaaaaaacagacagccacagccaccaatgaatcccaaaccctctgcatctctggtatcagtcttccccatctcaggaaatagcagttctatcctttcaatttctcaggccaacattttggagttattttttattctttccctgctcattccacaaccaatctataagcaaatccagatgattccttctttgtaattacagaatttgaacacatcttaccacctctgtggccacactctggctctacccatcattttgtagccaccaattttcacttgaattattatactggcattatagctggtttccctgtacccactcttatctctcagtagtatgatctcaacataggaacaagaatgatccttttttttttgagatagagtttcgttctgtcacccaggctggagtggcgcgattttggctcactgcaacctccgcctcctggattcaagcgattcttctgcctcagcctcctgagtagctgggactacaggcgcgtgccaccacgcccggcttatttttagtatttttagtagagacggggtttcactgtgttagtcaggatggtctcgatctcttgacctcatgatccacctgcctcggcctcccaaagtgctgggattacaggcgtgattcaccgcgccaggctgagcaatccttttaaaacctaagttaaatcgtgttactgtctcacacaaagccctccaatggcttcccgtttcacctagaataaaagccaaaggctttacaatgatctgtacagccataggtgatctgacctcgtctctggcctcctcttctgatactctttcctttcctctttcaggtccagccattctaggttctttggtgttccctgaacataagaaacgtaattctgcctcagggactttgcacttgttctttggcttatccattctccagatagccacatgacttgtttgctcatattctttttttttttttttttttttttttttttgagatgcactctcactctgtctcccaggctggagtgcagtggcgcaatctcggctcactgcaagctctgcctcccgggttcaaaccattctcctgcctcagcctcccaagtagctgggattacaggcgaccatcaccacgcccagctaagtttttgtaattttagtagagatggggtttcacggtgttagccatgatggtctcagtctcctgacctcatgatccacccgcctccgcctcccaaagtgctgggattacaggcgtgagccaccacgcccggcctcatattctttatctgctcagatgtcaccttattagacgagccttctctgaccatcctatatataaaaccgtaaacttggctaggtgctggccgggcgcagtggctcacacctgtaatcccagcactttgggaggccaaggcagttggatcacgaggtcaggagttcgagaccagcctggccaatgcggtgaaaccccatctctactaaaaatagaaaaattagctaggtgtagtggcacgtgcctgtagtcccagctgctcaggaggctgaggcaggagaatcgcttgaagccgggaggcacaggttgcagtgagccaagatcatgccactgcactccagcctgggcaacagagcaagactctgtctcaaaaaaaaaaaaagtaaactatcccccattgacattgaca

SEQ ID NO: 1197 - DNA, 2300 bp, Homo sapien
tttgcagtagcatgagtttctctcccatgctctctgcttatttcttactatagtttgtgatggccataagatggtgctgcagttttgcagtcagccttaaggataaggcttaggggaagaacacctactgcagttgtgaggcagatgggacatcaggagggtcttagaagggattgtgtaaaagccgttgctttagggcttcttgttgctttccttttgtggtcttttcctttttttttttttttttttttttttcaggtctccaggaaagatagttaaggctatgctagtgtaagtctttatggcttgcatggaaccaggcaggctactgctttctgctgtgtggcctggatccttttgttgtagaataaataactgcaataggaaagaaacacatatataattttattctccattcacagccctttgggttatagtcttttcccatatagcagatactatactaaaaaaaattggggtggaggaatcttcactgacatcacaaggtgatttttgaatccgacttttacagtctgaaattcagacttcctgccctactgcaatgggagtaaaaaccacctgaacctctttttggcagcttcttctcttactcccaaatggcaacaagtgttatctctttgattgagctcttggtccatgcagtctaattaccaattcagaacagtgggggaacttcttattttacacaactggcaactgagtacagatttccactactgcagtagttagaagagagtagttggggttgaaattaaaagtcttaaagttaacagaagttcatgttctggctttgtcacttactagctgtgtaacctagggctattaatcaactttcttaaacctcagtttcttttttcttttttggagacagagtcttgttctgttggccaggctggagtgcagtgacatgatcttggctcactgcaacctccacctcccagttcaagcaattctcatgcctcagcctcctgaatagctgggactaagggcgcatgccactgtgcccagctaattttttgtattttagtagagacggggtttcaccatgttgcccaggctggtcttaaactcctgagctcaggcaatccgcctgccttggccttctagagtactaggattataataggcgtgagccactgcgcctggccaaacctcagtttctttaccgataaaatataaaataatagttttgacctcatatagtgactgtaagaattaaatgagaaagtccatgtaaataactttacacagtgcttggcacacagcaagtgcaaaaaatatattagatgttagcagtggcagcatcaataattactattgaacatttttgtcaaatattgttcatcagagaccctgttcatctgttgtatttagaagtggtattctttttaccaagcactcatttactgtactcaaaaccaacttccagatttttcctgtctgtgtcattggctggcagaattaacagatctttcttttcttttataggaaaaaggagggaaataaatgctccagaaggctagatctttaaagtctgtgttccttttcttaactgtaagaagaaggctctggtttcttcaggttataatttcattaaaataattttattgttttctgacctgaaaaaattcagaatatgtatatctgcttgatattttcttttgggcatcttggtgcaacacttaaaatctatttcattttgtagtttgggagccataattgcagcttcaccaggcttggttcttcttggcccgggcccttcccttcccttgctggttagtaccagccgagctggtttgctttttccctttttggtactattctcctcctccttcctccacgttaccttctgccacggcctctcttctttttccctccattttcaatttacacttacattttccctcctcctcctggccctccctagtttttcccctcccctggtttctagctcctttttgctttctgtttgtgttactgagggcagtgctccaattacctcatatttggagagaggaagctgcagccaatccggtttctgtctgcttttaggtcaagtgatttctgaactgcagtgagatgctttgaatttgtcttgttgcagctctgagcctgtaagatggctgtctgaatcggcagcggctggaagagacagagagaggcggggagggagggagaaagaattggagggattgccggcatagtgcatgtttttaaatgtgcatcgaatccgatgaggccaaggttgggatttctgtgggatcccaggactggcttag

SEQ ID NO: 1198 - DNA, 2300 bp, Homo sapien
ttttaaggtatcttgaaatttttcagttatcacattccagtgaactttttccttcaatttctttaaaacagacacatagtgagtttgtataatatatatgtttaaattatatgaattggactttctattcttggtcagaaaacatggggatagggaataaataatactttaaatagtgtagagaagtctgtcagttattccattgattgaacacatatgtagaaatggagatgagaaccaaatatactgttctttcatttgctatccattctgtattcttattgtatgcacctcatcaagcttgaaatcctcagtgcgtgtttctaacacctgaggggaaatggcttaatgattttaagggtttccttattatttatccatattcatcccatatttattaaatgacagctactgttcctagaccttcatggacaatggatcagctcttacagaacttactcactgagataaaatgaaatgccattatttaggaggcagggaaataattggaaattgcttccacaagatcctctatcaataagatagagagttaaataagtaatcagaaagtagcactgaccaaagagggacagataaaattatatacagaaaatgaaaataatgaacatgaaaagaagagctgaaaagttggagagtaataaaaatgatgaagtgttgtaagtggttaaacacttaaataatttaaaatctgaatgtattattctgtgataaaagatctcaaaaatgagaattctttaggagctgtttctaggatttgcaagggtaattttgacagcgtatatgccttattcactgaccttcggacctaactcctgtgttaagatgtgactctactgtacttgtcttttacagttttctgggtctgactctgggaggacaaacaagatttagaatcagaccttgatttgtttctggaactcactagttttgtgaccttggacaagttacctaaactctgtgcctcattttcatttcttcaaactaaagattcaaacaattgttttcataggattactgtgagaattaaatgtcagtgttcagtagatctagtaataagtgatagctgtagtcatggttattgtactacccattctagcctggatcagaagaaaagttactagtggttccataggcaagggtccccaatctgtttcttccttgacttgctacttccaagacctagaactaacttaatttagagccattgccttgggagaagctagcattgtccaagaatatgagtatcccacttgctaaatagttgcttgagtagtatacacaggcctgtttactgggatgcacaattgttctggagcttctgggctgcataaatctctcttattctatggaccagtcctgctgtgctcatcagcagggaattgctacttctagagtcttctgtgtggtttgcaacaccaaaaacttgttgtatggcgttgaattctcactttgggggaactgttacgtgtctttaagaacatttatgatgatttagtcttagaaataagattaaatcctatcattttcactgcttaccaccctgtagagcttgtcactcagatatgcttaatgccactatctctcaagtaatctaggaacttctgacctattaaacattctgcagtttagaaaaactcttttttagtcttaacaccgggtggcttgcttcagaatatttcctacatgttggggcttatcccatgctgggttttccttgtggtcagaattttatatactgtagtactttttttttttttttttgagacagagtctcgctctgttgcccaggctggagtgcagtgatgcaatctcagctcactacaacctccacctcccgggttcaagccattctcctgcttcagcctcctgagtagctgggattacaggtgcgcaccacacccagctaatattttgtatttttagtagagacgggtttttcaccatgttggtcaggctggtctcagactcctgacctcatgatttgcctgccttgggcagattataggcgtgagccactgtgcctggcctgtatactatagttctttgaatgactcctttcaatagttgtgctttgccattggctctgattcagttttctttttcttctcttttccttttttttttttttttttttttttttttaggaatgcagagcagttgctggggtgattgacctaggcacagtggagatatttcccatcttcaaagccatgcaaaagggcctccttgaccaagacacaggcctagtgcttctggaatctcaggttatcatgtctggc

SEQ ID NO: 1199 - DNA, 2300 bp, Homo sapien
tgccgggtttaaggctggagtgttcttcggtccggcaaggggcgcgctaaaggtgacactggaaggagcagggacagcctttggcggcagagatggagccgagagcgatgcaggcggcctaccccagccggcgcgacctgccggcacacgggaactcgagtggccgtcgccagagccggctagctgggggagcgcgggcgccctttctggattcgttcgcctttgggctgggctcggagccgggccggttggagcgagacaggggcgggaggggccgggccagcgggaggagggcggggctttcctttgtcaggggatttgcgccgcgcagcccagactcgcgcgggttccgttcctctccttgcgccctctccgggggcggggcgttcccctctggccccggggcgcggtgggcgtgggctgcgggagccgaacggctggcgtcccgggtctctcgctccgaatcccgcagaagcccctccttcggcgcctcagcctccaatcctctccaccgctccctccactctcggagtcgctcctctccccggccccgcccccgccgggccccgcccccgccctcgtcctccttcctgtgctctccgcgtcgcgcgctccctggcttccagggggctgcccgggcggggcggcgcagcgcggcggcgcggggaagggggaggagagccgcccgccagccgagcacttccagcgagctagcgagctagcgggtcgcgctgcgcgggggaggaggactcgccccccgcccgaccctagcggagccttttgttcccagccagaagtttgcatgccgggaccgtgacagctgcgggcggggaggacggcggggccgcggggccagcggcgtggtggagaatagaggcggctgcttgtcatgcagcccacggcgtggcggctgcgggccggggactggcggcggcgggcgaggcggcgcccacagcactcgggactcagctgccggagggacaaactaacttcctgagcgcgggacctgaggctggcgcggccgggagccacctgcagcctgcggtgaggcgaccctggccctcggggcgcgcggcatggcgcggggaagcgggccgtgctgagcgagcccctccgacagacccgcggccgctgctgctgcccgcccgcccgcctgcctttccgaaggcctggcgcggggctccgctcgccttgttttgcagctacagcgcagggttggcctgggagccacaacaatgccatgatgttttggagacaggaagccccaagctggccccgaatgaaggacttcctgtgtttaaagttgcaggaatatccgccgaccagcccagttcaaatgcaaacaccccagctagggaggacgaatggctaattcagaccagctggactctccagggctggaactgaggataaaatgaaaggaattcttaggagcttgggccatacttgaagactagagaggctgtgccattgttattaaaggatacaatcggcataaatttgctgctcccaactctgcttcggtgagaagtgagtggaactagatatcgaaaaagactcgtcaatatcagatgatttttgttgactgtatttgaaagagcagtgctcttaaaaaaaattaaaccataagccatacaaggaattattttaaattatatcgtctgtcaaccatgaggctgctagcctgtgaggaaaaagctgtttgtcttagagcttctcccagaatggtttcaaaacggaacttccaggcctttctggagggcagatgcaattggtggtttggggtatgaacagctaaaaggatttataacttatgtagaatgcatttggggggaacctgtgaaaaatacttttgaaagattgatggttcatcttgattgaaaaaggatgggtaagccactcagcagaccagactgtttaaggcggaaccccagctgcctggggaaaggagaggaggaggatggctacatagaggactgctatgttccacaacggtctatatatgatacgatgaggataaatgagcaaattgaccaggggtcaaagcttaaccagacttcaaaaagcaccatggaaaagatggaaggaagtactatatccagcaatggtacattaggagcagcatctaatgtttttgaatctagagcaccagaaggtaagaagctggatgagaggataatatttgatgcactaaagctaagcagtgatgtgcagaagtcagcacctgtgccacccagaaggcggccaaatgcagaacgcaaagacaatgttaacaggagatcgtggaagtccttcatgcc

SEQ ID NO: 1200 - DNA, 2300 bp, Homo sapien
gtaaatcatcaatttgtaataccaacaactgtcttattgactgctcttggacactccaaagcctctacatgcattacctcatttaaccataatgatacctgacctttgctgggcaattactactgaatatgtaccaaacagtagctgataatcatttaatcctcataaccactgaggtgggtaccatttttattccattgtacagatgagaaaatgaccataaagaggttcttaactcccctaaggtcactcagctaccctgttggcagagctgaggtttaaaccatggcagtttggttctaaaagttgtacttttatctatttgtacccactatgccatgctaaatattacaatattgctaccctatttgtacttttttttgtttgtttgtttgagacagagtctcactctgtcacccaggctggagtgcagtggcgcgatctcggctcactgcaagctccgcctcccaggttcacgccattctcctgcctcagcctcccgagtagctgggactacaggcacccgccaccacgcctggctagttttttgtatttttagtagagaagggatttcactgtgttagccaggatggtctcaattttctgacctcgtgatccacccgcctcagcctcccaaagtgctgggattacaggcgtgagccaccgcgcctggcatttttttttttttttgtcatgttgagacagggtctagctctctggcccaggctggagtgcagaacttactgcagcctccaactcctgggctcaagggatcctcccacctcagcctcttgagtagctcagactataggcatgtgccaccatacctggttaatgttttttgtttttgtttttgagatggaatctccctctgtcatccaggctggagtgcagtggcactgtctcgggtcactgcaacctccatctccccggttcaagcaattcttcttcctcagcctcccaagtagctgggactacaggtgcacaccaccatgcccagctaattttttttaatatttttattagagacggggtttcaccatattggccaggctggtctggaactcctgacctcatgatccacctgcctcggcgtcccaaagtgctgggattacaggtgtcagccaccacgcccagccattgttttttatttgagtagagacaaggtcttgctattgtccaggctgttctgtaactcctgacctcaagtgatcctcccaccttggcctcccagagtgctgggattgcaagtgtgagccaacacacttggcctgtactccaattttttttttttatgaggtgactgaggttcaaggagatgaagaaacagcctagggtcacacaactgatacagagctaggagttgaactgattccagatcactaccaaaactatcatcttttacttagagtggtatatgaggtgattaacacagaccttgggttgttagggtgtgcctgtgtgtcactgggctataagatgcctaaagggtatctctacctgtcccctgtgctacccttaatccattctagagggtggtttgatttaaaatgtctcaccatctctcagtcactttttactctatttctttttttttttttttttttgagatggaatctcgctctgtctcccaggctggagtgcagtggtgcaatctcggctcactgcaagctctgcctcccgggttcgcgccattctcctgcctcagcttcccgagtagctggaactacaggcacccaccaccatgcccggctaattttttgtatttttagtagagacagggtttcaccgtgttagccaggatggtctcgatctcctgacctcgtgatctgcccacctcggcctcccaaagtgctgggattacaggtgtgagccaccgcgcccggcctttactgtatttctaactgttctaacatagaagtcactctctatatagggttcaagcaatattccctttcagcgaggcagaattgtgggccatttgtaaaaggaatccctaaaaatggtagcgtttgtgtgcatttctcaggcagcacaagttggaggaagccctgctcttttcgggtcagttcatggatgctttgcaggcattggttgactggttatacaaggtggagccacagctggctgaggaccagcccgtgcacggggaccttgacctcgtcatgaacctcatggatgcacacaaggtaggggtgaggtctgggctacattggagtgcagtgggtcttctgtatatgactgcctagggtcttctacatatgactgcctctgcccttctttctaggggagaaagagag

SEQ ID NO: 1201 - DNA, 2300 bp, Homo sapien
gcctgggcaacatggtgaaacccatctctactaaaatacaaaaaattagctgggtatggtggcacaagtctgtaatcccagttacttgggaggctgaggcaggagagtcacttgaacccgggaggcagaggttgcagtgagccaagattgtgccactacactccagtgtgggtgacagagcgagagtctgtctccaaaaaaataaaataaaaagccattatgaaaatcagatgaaaaagggctttggaaacaaagggggtatgcttgactgaaagaggccatggtttccttctttttccacaggtcctgacatgggctaagcagcaccagcagcgtcttgaaacggccttgtcagaactggtggctaatgctgagctcctggaagaacttctggcatggatccagtgggctgagaccaccctcattcagcgggatcaggagccaatcccgcagaacattgaccgagttaaagcccttatcgctgagcatcaggtatcttaacctcactgtgtgatcactggtgttttccgtgttgggcatggagaccatctctgttgccctgtgtatatgtttttaaatggctgcttaacacattaccacagacttagcactgtaaaacaacacatacttacttacctcatagtttctgtgcttcatatacctgggcatgagttgactaagtcctcttcctggagtctccccaggcagaaatcaaggtgtcagccagtactgcagtctcatctggagttcagggtcctcttttaggctcactcaggatgttggcagaatccagatcctggtggatgtaagactgaggtctctactttcttgctggctctcagctaggagttgctcttgccttctagaggccccctcaggtcttagccacacagccagccggagaaactgtccaaagtgctctatggagtcttgaaatgtaatgaagaatgaaatgtaattaagggagtgaatattccatcatttgcccacactcaagggagggggattacatagagtgtgcatacaggagtgggaatcctgggggcctttttagaagtctgcctgccacagcctgtttttattgaccatcatttgagccagggtcccactggtccccattatacctggttcagaaagctctctcgcatgaacccagtggtcagtgaaggtgcacattagactaaactgaatggaggaaagctcaggtgggccatcttcataatatatccttaagaggcaaatactatttttaaccataatcatttatactgaattcaagcgtgaatgttgattagttatactgtagactatatggtctttttagtttatataaacaattaccccagcaagtgagaactcactatacagatagtccctgacttacagtctctcaactttatcatggttcaaaggttatacatattcagtagaaactatacaattagaggccaggcgtggtggctcacccctgtaatcccagcactttgggaggccaaggggggcagatcacttgaggtgaagagtttgagaccagcctagccaacatggtgaaaccctatctctactaaaaatataaaaattagtcgggtgtggttgtggttgcctgtaatcccagctactcaggcggctgaggcaagagaatcacttgaaccagggaggcagaggttgcagtgagctgtgatcgcaccattgcactccagcctgggcgacagagcaagactccatttcaaaaaaaaagcactttgagtgcccatccaaccattctttcactttgattacatgagatagtcaacactttattataaaataggctttgagttagatgattttgcctaactgtaggctaacgtgttttgagcatgtttaaggtaggccaggctaagctacgatgttccatagtttaggtgtgttatattttcagcttaacgatgggtttgccaggatgtaacttcatcgtaagtcgaggagcacctgtccttcctgtgggatgtacctcctctctgagagattatcttcttcctattcagttcttctcctttctgttttcctctctctcctctatgtcttcagtctctccctgtttattcttttctctaaagcttccagacatgtccttccaacccagagttcccctcctttttcagctacgcttcttgttccctgtctcatctccttttttcccatcactccccaagtccctgtggtctggctgacactgttctggtcacattctactggctaaatccaacagagttttttcagtctttattttgtttgacatgtaacctagctggctcttc

SEQ ID NO: 1202 - DNA, 2300 bp, Homo sapien
cattgacagacagtagctgtactccatattctttggtatgattggtatgaaattacgaggtggttaagcttattttttaacagtggcctttccattgttttggttatcagccctagctgtttacatttggcttgtactaatttaatcaacacaacagcttctacagaatatgttgcttttttagttgagttaacgtgtcatcagctcactaaggtaggacagaattgcttggagatatgtaggcagcaggtaagtatgtgctgggaggatcagtacttttggaattagtacacctccgtatctaaatattgccaagtcccgtatttcttttctcagttattgactggatattattataaagatcttctaggtttatacatacagctatttctctttgtatactaaccagctgttctaatcttgtgattatttttccttttagggaaatccctaagtcagccaacccctcctcccatgccaatcctttcacagtctgaagcaaaaaacccacggatcaaccagctttctgcccgctggcagcaggtgtggctgttagcactggagcggcaaaggaaactgaatgatgccttggatcggctggaggaggtaatgccctgctgagtggccttccctgaaacaaagtgcttttttcaatcaaaacacagcccttctgaggctctcttaatgtgaaccttgtgtcttaatttactttttcacaatagaaacagacctataccaagccagtactcattctttgaggcccctgaatgagaaaagacacatgtgtaagaaaaccgtttgtgacagagtaggctaaagcttctaggtgtggaaagcaagaaaacagccagtccataatgagggccaggacctgatctgcctcagcatcttgctgtggttgggaatcaggaacagaactttggaaatttatctccagatatgtagcatagcacaaaaatgacccttgttgagcctttcatgtaaaaacagatgctacagaattatgaaataggagtaatttttaatgattttgttattagtcttcacttgatcatgagaagcaactctattttgaagtgtcattacccagtataaaaaatatagtactatgcttcctagtttctaaaacaagcctctaatatcttttgtatttttttatttgtgcatatcaaagcagctatgcctggaagtgagtgttctgtgttttgtttattttttccttaggtcagttgacttttaagcttattgggttcttggtgcttttttcccccattccttctaactttggagtttgaaagaccaaggggaaactgctgcactctttaagtcattttgagtgtatatcattaacgtagacttaagtagctgaaaattgtcttgcccactgcataggcctgctgttttccatcaaggccaaatatttaacatggaggtcagatgggcaatttgctctctggtgccattccaaagaaacatgcttggatacaacattgggttcccaatgcttccatccagaactcagattttctcattgaaatctcagaagatagtggtaaacacgagcctcctgatatgagccctatgtgtgattataatgcctttcaaaacaacataatcgaggagtgctaaggacctcccttctgggttagaatccatttccttgcatctaagagagtgatcctttgaaaagcccaaagggaaagcaaggctggcttcacccattctcattctgtgtgctccatattttccatggtgattcagttattgtttctcttgctattccattataccatagctcgtgtaaatagtcatggctttaagtgaaagagccagattgtgccttcacaaaagaagcaaacacatagatttcattgttgatggcccctggaagcatggctttactgaatgtctgaaagtttgggtatgctctgggcagcttttgagggcccaaaaaataaatcttattgacacttctgatttctgtgtagttgaaagaatttgccaactttgactttgatgtctggaggaaaaagtatatgcgttggatgaatcacaaaaagtctcgagtgatggatttcttccggcgcattgataaggaccaggatgggaagataacacgtcaggagtttatcgatggcattttagcatccagtgagtctagtcatcattccaaacatgggtcacacctggattccttgcactttgtagaagctgtgatattctagctaaacagtctttctgaagctggccaggagcttggctcacacctgtaattccagcactttgggaggcaggtggca

SEQ ID NO: 1203 - DNA, 2300 bp, Homo sapien
tctaactttggagtttgaaagaccaaggggaaactgctgcactctttaagtcattttgagtgtatatcattaacgtagacttaagtagctgaaaattgtcttgcccactgcataggcctgctgttttccatcaaggccaaatatttaacatggaggtcagatgggcaatttgctctctggtgccattccaaagaaacatgcttggatacaacattgggttcccaatgcttccatccagaactcagattttctcattgaaatctcagaagatagtggtaaacacgagcctcctgatatgagccctatgtgtgattataatgcctttcaaaacaacataatcgaggagtgctaaggacctcccttctgggttagaatccatttccttgcatctaagagagtgatcctttgaaaagcccaaagggaaagcaaggctggcttcacccattctcattctgtgtgctccatattttccatggtgattcagttattgtttctcttgctattccattataccatagctcgtgtaaatagtcatggctttaagtgaaagagccagattgtgccttcacaaaagaagcaaacacatagatttcattgttgatggcccctggaagcatggctttactgaatgtctgaaagtttgggtatgctctgggcagcttttgagggcccaaaaaataaatcttattgacacttctgatttctgtgtagttgaaagaatttgccaactttgactttgatgtctggaggaaaaagtatatgcgttggatgaatcacaaaaagtctcgagtgatggatttcttccggcgcattgataaggaccaggatgggaagataacacgtcaggagtttatcgatggcattttagcatccagtgagtctagtcatcattccaaacatgggtcacacctggattccttgcactttgtagaagctgtgatattctagctaaacagtctttctgaagctggccaggagcttggctcacacctgtaattccagcactttgggaggcaggtggcaaaggcatggtggcacacttgcagtcctagctacttgggaggctgaggtgaatcacctgagcctggggaggtcaaggcctgcagtaagctgtaatcgtgccagtgaactctagcctgggcaacagagtgagactctgtctcaaaaaaaaaaaaaaaaaagacagtggttaaccagaggttttcagctgggaaacaatatgatttggtctgtgttttagtaaatcactgtgactactataaatagtcacacttccctttgtatagcaatttgtttagaatctaagacaataatctaaacataggaaaacttcatgctattccaaactgtcactattctgaaataatctaaatatccaataattgtggagtggatgagtatattcttgagttgagtggtaggactgtgggtggttgtaatattatgtttatgccttttggtatatttgaaatggggaatattaccttttttcgttgcatttggggtaggggagtctataagtggatatgtattatttttcaggaaaaatcaagacataaatttttttgctcttaagaagtatttctggccaggcgtggtggctcgcgcctgtaatcccagcactttgggaggccaagatgggtggatcacttgaggccaggagttcaagaccagcctggccaacatggcaaaacctcgtctctactaaaaatacaaaaaaaattagccgggcctggtgacaggcgcttgtattcccagctactctggaagctgaggcaggagaatcacttgaaccagggagacggaagttgcagtgagccgagattgcaccactgcactccagcctgggcgacagagcaagaccttgtctcaaaaaaaaaaaaaaaaaaaaaaaaaaatctataaccgccaaccgaacaagtacccctcttaatgtttcaaaatatgattccttttctccagagttccccaccaccaagttagagatgactgctgtggctgacattttcgaccgagatggggatggttacattgattattatgaatttgtggctgctcttcatcccaacaaggatgcgtatcgaccaacaaccgatgcagataaaatcgaagatgaggtaagggaaataattatattttgagtacacttctggctgtaggtttgtaatatcctgaatttggttgggttcagtgatcatattagcctttgacttgtctgttgggagataattatttggagttctattttgagatctctttttggatagcatttcaaagagtcccagaggatctctgacatc

SEQ ID NO: 1204 - DNA, 2300 bp, Homo sapien
caagaataaagtactcttgtggttccttcctgattcaccctggggtacacacaggtgcatactccctgcctctcacccatccagagaaaaccctttgcagtgactcaggtccaagagcactgctcttgggtggaatcctccatatctctcagaacctcccacagggcttctcattttcacttgtggggcccagcttctgagagggggctctcacagagcctggggggcagcttccttcccaggacaggacgtgtattctctttcaagtctgggttcagtgctgctgctaccacacagtgcttttgctgcagtcactttgtataaacatgtttaaattgtatcagatgaaaggtgtgggacttcttttattttcaaagtaaagggctgggagggaggatacagtatttttcaattgccttgcctgtgcaaatactgcatttgagtcagagcagctaaggaatatggagaattaccacaagtatattaattttgagggaggatggctatatgacctcagatatcctttcttgcattttcaatttttctgccttgttttaaagttacagttgtcctttataactttgaaaatcctggccgggcgtggtggcttatgcctgtaatcccagcactttgggaggccgagacgggcagatcacgaggtcaggagatcgagactaacctggctaacacggtgaaacaccgtctctactaaaaatacaaaaaattagccggcctggtggcgggcgcctgtagtcccagctactcggaaggctgaggcaggagaatggcatgaacccaggaggcggagcttgcaatgagccaagatcgcgccactgcactccagcctaggcgacagaacgagactccatctcaaaaaaaagaaaaagaaaaagaaaatcctaccaactccatacccgaggaacccttgaattgaatgattttaggaattccatttctcctaccagatgtttgtttgttttggaaactctgcatacttctcttttgttgctccttacttcattttggaaagagggtaatttatgccatgagaaactccagatgtttagagctgggaagtaggaatgtttgggcaagaaaaaagggaaaacataaataatcagaaatatgcttgttttagcatctaaaatgattattggatactgttcataatcatcatgggagctacaatttttaattgcttcaactcaattttagtataaatatgacctaatcatttgttcagctgaagaaacttttctgctggtgacactgcaattagcaaatacttcgggttaattcctgaaaacctgatgcagaaaatcagattttcttctaagcttgtaatgatgctttgcaaaggtttccttaaggcttgaaatagtattcactattttccatttagctttaaagcatactgtattcagaagttgatatccacaatctttcttttaggaaaacaaattagcatgccaagaatatgaatttttaattgagcagaatctcttttaaaaaaataaagtgacctaacactttgtctgttttcctacctctccttttggtgcagaggcagtggtgtgaccattaaaagtgatttttatcccaatagaaagtatattggcccggcgcagtgtctcatgcctgtattcccagccctttgggaggccaagactggcggatcacgaggtcaggagttcaagacagcctggcaaacatgttgaaaccccgtctctactaacaatacaaaaattagctgggcgtgatggcacacgcctaataaacccagctactcgggaggctgaggcaggagaattgcttgaacctgggaggcagaggttacagtaagctgagatcacactgttgtactccagcctgggcaacaagagtgaaactctgtctcacaaagaaaaaagtatatcaagacaccagtctttagcttgatatttctgcttttctatttttaaaatccttttgtgaaatatataaaaatgcaaaattgtgagagttaacaattcttctgtagctatcaaattgtcattcctgtctgaatacagtctgctttgggagaaaaacatagatctgctttaagacatatatattaattaagtttcctttgattctacagtttggggattctcagcagttgcggctggtccgtattctgcgcagcaccgtgatggttcgcgttggtggaggatggatggccttggatgaatttttagtgaaaaatgatccctgccgaggtaaggaaccattctaagcatgaattacgtgttaggtatgcccccagcagtgatctttta

SEQ ID NO: 1205 - DNA, 2300 bp, Homo sapien
atgatttctgttataagaatcagcccagcactgggcagcttgcagtctagctgggagcccagaattgcacaaaacaaacctgagaattgtacaggctggatctagggcctcaagtgatgtgcagtggattcaaaaggggcgtgcagagaggacagtgaagggggtgtgggcaggagattccgagactctgaccaagatgacatggggacaaagccctgtggattcagcctcctaaacagctttctcctctgcccctccaccccatcaccattagagactcatggtcattgtacccacccccacatctgattgctgtacctgcctccaactgcagggccctgactcctgtctccctctgatccatattccgctctgcttccaagctctggtcttgggtactttcaacggttattctgcattatccttagctcagtatccttatgggacagtcccagtccgcagggtagccccggcttctaggcggtggcatccacatctgctctgcccggagctgatgcaggtgcctcatggggggcgctctggggaccgcgcagaaaatttacgagcagtgtggaaatatacctgttgggtaaaagacaaactaggcgtgtgtttaaggcaccagcaaatgactatttagattaagaatttgttgtagaaaattttattgaagtgatgacttccaaatgtgatttttgggggcattatacacttgcttcgaggtttaatcttcaatccacatggcggggcaccataatctctggtgcccagggccctcgtctagcccctgtgaggccctttgcggtgcctcccttgccagcccctccagcctccgccgtttgccccctgggctctccagtttccactgcccccctgcccgagcgcagctccactgctgtgtgacctggcgtaagtcccttaaccgccgtgtgcctcagtttcctcatttattaaaagaggaggttccagtggtatgtaccccctaacgatgtgcgagcatcacagaaatgacacgagacacacactcagaacatgccttggcgtggcaagtgctgactgttgccattattaggctccccagccggggtctcagggccttggcacaagctattccctctgcctggagcactttcctccactgacctttcctggcgctccaggtcaactccaggagccttcccagtgcagtctaggtgccttctccttccgcagcgcctgaaccacacaggaataagtaaggcgagagcgcgcccagggaagagcaggtgtgcagaaagggactgagtcagtcgagacgtttccgcggggatccttctcttggcaggcctgcaccggggccgtggggactgagaagatgtgcacaggtggctcccgagtgctcgggaagggccccagagcttctggcccagctggaggcaggaggcggagcctcctccgcaaagctggatcagtaccggggacgcagggcgcacagctagggctggcgggggcggcccgactggggcgctgcctgggctcacgcgggagccaggtgggggacgcagggagaagcagccgagcaggtgccgagaaggaggcgcccgcagaagcgcatgcaggggccacggggaaggcgccaggaggcggtgaggggccgcggtggccggaacccgggccggctgctgcgggcagaggaacaggccccacccgcggggcttggctggcaccgcccggctctccagacggggctacggccgcgtgtcgggcccggtggcgaccacggcacaccacggcgaggcagccgggtggcaccactggcgggaccgggacggcgccgcggccttaggatctctgcgccgaggcccgcggcgggagccacgacggccctgaccacgctgacgcccaggctgcgggctcctcgcccggaccaaccgccagccacgccgaggtcgcacctcggggtcgccccacccgcaacacctgccgccgcccggggctcctagcgggcgcggcctccgcgcccaggccccgcccccgcgcccccattggtcagtcccgggggtgggcgggcggcacagacggctgagccggggcaaggactcgcgggaatcgcgccgcccgggtcgctgccggagctcgccggtcgcccctgcgctgcgcggaccgcagccacagccggactggtgggaacggcggcgacagacggattggctgacagtcccagccctcagaacagccccggcctcgaagcgttggcgtctgcgtccgcgtcagcgtccgcttgtcccggagccggggcaggtgcgcgcggggggcgctcc

SEQ ID NO: 1206 - DNA, 2300 bp, Homo sapien
agggccccctccgtgaacccgaaaccccagtccagccacgagaaaaccgtcaaacaaacccaaagagaagggctttccgcagaatacctgacaagcgcttctcaaaaccgccaagctcatcaaaaaaaagggaaggttgggaaattggaggagcccagaggcacctaagaagaccagctcagtgcatgtggggtcctgggttgagtcctggaccagcaaaaggtcattagggagaagttatgaaatccagatcgatcatggtgtttacttaataataaggtatcagtattggttcattagttatgagaaaggtaccctgctagtgtaaaatattagcatttcccagaggaaactgggtccaggtgtatgggaactccttgtgtagtttttttttctttgagacagggtttggctctgttgctcaggctggagtgcagtggcgcaatcacagctgacggtaacctccaactcctgggcgcgagcgatcctcccaccttagcctctgtactatctttacaaagttttatgtaactatcaactgttgtaaaattaaaacttaatatatgcataaaataaagaaccccctgacttcagtggagagagcagactgagatggacaagagtgaagtcagagagacgtgtgggggccccacagtggtccaggtgggcgctgtgagtgacttgttggtagcagtggagatggagaaagatgagtcgatttcagtgtcaggacatgcttatagctggcgaggaggtgagggaacaggaggaagcctgaatgatgtgtggttggagccagtggatttttttcaatagatttttctttttggggaaaagatagatgaagggcaggtttgaggtgggtggccaagggttctcttttggctggaatattactgacccccctgggatgttactgagatcactggtcctcatggaaatgccattacagggaccggtgagcgtgaagacccaggcgagggaggtgctggcatgtaagtggatttaaagcatgggatgggaccaggtcatctagggaaggagggtagtgatggagaagaaagagggcctggcccagagccctgggacctccaacatccagagacctcacaaggaggggccacagagagcccacagagaccagccagggagggagcaggacacctggaggatgaggtgatccagacgccagagtaaagtgtttccagaagcaagggtttgtcatttgtgtcctgctgtgggcactgaaggcaagaacagagaagtgaccaagggttttgccatcacagaggttgttgatgacctaaatatccgtggagtgtgggtctgactgaggaggtggagggagacaggcagtggaggcaggagacagctctttccagaacctttgctggggaaggggagcagagacatgggctggggctggagagaacccgggacaaggcaggtcctttccaggtgaggagacgcctgcacgctgctgtggtgatgcagtgattctgtgcagagggaagaaaactgcaaaattccgcacaagttggagcagggagctggagtgggggaggtggagagggcggggggatgcagaggacaagacggggggcctcttcagagcagggacccttcctgatggaggtgagggatagtgtccccactgtcgcagtgaggggtgaacctgagctctgggaggctgtagtggggcaggcactcactctccgggttgtcacaggattaaaggagggtgcttggcacagagtgatgcccagtgaaggtgttcatgagcgtcggtgtcacccagcggcgcctgctcattggacacttggtgtctttaatgagctggggaagctggggggaagcttgggcggggtggttggagtttgtgtctgaggctccactggggcaggaggggacctagcctgtgccctactcgcggagcctgacctcagctctgtcctgcgcccgggcctgtgcgctggacacggaggactgactcggggcccccagcccagggcggagccggccccctccctgttgcgggtcgcgggcctggcctagagcctgcgcctggccggggagacctgctgggagggagtgcgtcagggcgcgggcgcccgccctgctctgtgacgcgcggcccgaggcgcacgcagggctcacaccacttgtcctggcctccgacccgggccgactatggcggcgctgcggctcctggcgtcagtgctcgggcgcggggtccccgccggcggctcagggctcgcgctgtcccagggctgcgcccgctgctttgccaccagtccccg

SEQ ID NO: 1207 - DNA, 2300 bp, Homo sapien
gccagcagggaggagaggggctgggtgcagtgaaggggaggagagtggagggaggtgatgccggggtgagccaggccagctcccgtagggcctggggttccctgggaaggagggtggattttattccaagcaaccccagaggctgtcagaggtcttcagcaaagcagtgtcctggtctgcgtcaccctccagaaggacctttctggcttggggaggctgatggtcgcgggagtggaaggcagaggagcaggggatgagtgagggctgctgtggtcacctggcaggtgatggcagctcgactgggcaggtggtccgaggcagcacggaggtggaggttgagccaggggctgctctcagggaagggaggaggcgaaaggagtcatccaggaggcctcccaggcgggagctatgatgtcagggcgggaggaattctatgttccactgaggcctcattagacccccaagtgcagaagtgggaaggggagcaggatccgcaagtctggagttcagaagagaggtccaagctgagccaggggagtggagaggtgcgggcacatgcagggccttgaagtgctgagggcggatgcagtcctctgggagaaggagcagcacaggagagggggcgaggcctggcctcccagagcctggggagggaggccagggtgtggggaggcagagcctctgggggggtctgaagggctataagaagacagtggtccttccaggttcccccttggggacctcactaagggcacaaacctggccatgaggttctccttcccattatccccaggaggaagtctgagcccttggcctgggactcgaggcccctcattagtgccctgcccacctgccccacaccctggggctgccatgtatccctccctgggcactgtgggccaccacagctcccgctcccagagctctcagggctgctcttattcctgttaataattcttattattgtgctgctcccatgtggcttggagatggccagggcagggagcaggtggagctggggcggggctaggtgggtcctcagaggaggccactggcctcatgcccctgcctgtgctcccttcctggccaggtgcacctgatgaagccaaacgcagtccccaaggcgtgctgtgcacccaccaagctgagcgccacctctgtgctctactatgacagcagcaacaacgtcatcctgcgcaagcaccgcaacatggtggtcaaggcctgcggctgccactgagtcagcccgcccagccctactgcagccacccttctcatctggatcgggccctgcagaggcagaaaacccttaaatgctgtcacagctcaagcaggagtgtcaggggccctcactctcggtgcctacttcctgtcaggcttctggtcctttctcggtacctctgtgcccctcccctggggtttgtggctgtcactctgcccgacactttggtggcctaaggcacacagcagcctcagagcctgtgctgactgcactgtctggagtcagcacagaagtcctatcttaggacctgtcagactgtggctggccccggatggtctgaggttggctgacccgagcttttctccattcaccagagggtttaggtgtgaggagaagggctctgcctcttcccaggtacaacactggccatttctgggcaaaattggacacgcttatgttctcagcacagtgtgttctgggattcttctcatttggtccagggtgcagttagcatattagaaaaagaataagctggacatccccacgaagccactggggattttttttttttttttccagatagagtctcactctgtcacccaggctggagtgcagtggtgcaatcctggctcactgcaacctctgcctcccaggttcaagcaattctcgtgcctcagcctcctgagtagctgggattacaggggcccaccaccacgcccagctcattcttgtatttttagtagagacggggtttcaccatatcggccaggctggtcttgaactcctgacctcaggtgatccacccgcccggcctcccaaagtgttgggatgacaggcatgagccaccgtgcctggccactggggatattttatgtcatgtgtattcccttgccctgggcctgccccttctcctgcctgggaaagaggtatgactcccacaggagcaaagaatcctgggggcttccagttccctccaccatctctaccatgctgacccatttggggctcagcactgagacagaggcaagaccagcagctccaacatgtagtgtaggctggcacagagcaaatgcccccg

SEQ ID NO: 1208 - DNA, 2300 bp, Homo sapien
ccaagtcagtggctgagttggaaccagaatacctgtctcctaacactcaggccattgcctcttccaatctctgctagctgagcttgaagccttagactagtggggaactcaccatcttccagacagcctgggcccaccctttatgtacatgagagggtctcttcctctgcgcttgcacatggaggccctccctggtccaggtggaggggctgctgtcccgcagtgtggccccagcctccacccctgctgctggaccagctctccccaggcccctccctgggggtgcagcacgtgaactccagagaggcgcatccttgggcccatggggaggtggaaccactctgccaggctgtgcctgtggatggggcgggcccaggatctgcttttaatgacacggtttgggcagctggactctgtctgttccagcaggtaaattacaggcttagcaagtcagaaatcaaataaacactccaactcccagtggctgttccaaggagaacagcggtttccgggaacagtggaggccgagacaaacctccccacccaactcagcctaattactgcctgtcactccctgggacagggaccttttctttgactcacagacccaagacacaggacagcgctggtgggcacccagggtgacgccaattttggtggccagcttgttcataactcctagacacaagcaaacactggcagtccccacccttgccccatgcctggccggagactgccagtcaccctgctttggatggaatggattgctctgcagtggggcaggagggggaactgaggtcttattgacaatgcctggtggtggctgtctgcagttctgtgctgaggcctggaggccctgtcctggttcagtgggaaaggtacgtaggttgattactgacatgagccatgggcaaggggagcaggctgcgggggcatttgctctgtgccagcctacactacatgttggagctgctggtcttgcctctgtctcagtgctgagccccaaatgggtcagcatggtagagatggtggagggaactggaagcccccaggattctttgctcctgtgggagtcatacctctttcccaggcaggagaaggggcaggcccagggcaagggaatacacatgacataaaatatccccagtggccaggcacggtggctcatgcctgtcatcccaacactttgggaggccgggcgggtggatcacctgaggtcaggagttcaagaccagcctggccgatatggtgaaaccccgtctctactaaaaatacaagaatgagctgggcgtggtggtgggcccctgtaatcccagctactcaggaggctgaggcacgagaattgcttgaacctgggaggcagaggttgcagtgagccaggattgcaccactgcactccagcctgggtgacagagtgagactctatctggaaaaaaaaaaaaaaaatccccagtggcttcgtggggatgtccagcttattctttttctaatatgctaactgcaccctggaccaaatgagaagaatcccagaacacactgtgctgagaacataagcgtgtccaattttgcccagaaatggccagtgttgtacctgggaagaggcagagcccttctcctcacacctaaaccctctggtgaatggagaaaagctcgggtcagccaacctcagaccatccggggccagccacagtctgacaggtcctaagataggacttctgtgctgactccagacagtgcagtcagcacaggctctgaggctgctgtgtgccttaggccaccaaagtgtcgggcagagtgacagccacaaaccccaggggaggggcacagaggtaccgagaaaggaccagaagcctgacaggaagtaggcaccgagagtgagggcccctgacactcctgcttgagctgtgacagcatttaagggttttctgcctctgcagggcccgatccagatgagaagggtggctgcagtagggctgggcgggctgactcagtggcagccgcaggccttgaccaccatgttgcggtgcttgcgcaggatgacgttgttgctgctgtcatagtagagcacagaggtggcgctcagcttggtgggtgcacagcacgccttggggactgcgtttggcttcatcaggtgcacctggccaggaagggagcacaggcaggggcatgaggccagtggcctcctctgaggacccacctagccccgccccagctccacctgctccctgccctggccatctccaagccacatgggagcagcacaataataagaattattaacaggaataagagcagccctg

SEQ ID NO: 1209 - DNA, 2300 bp, Homo sapien
ctgtagcagttctacaggctcatcatgccaagaaagaagctgcccagaaggtgggcgctgttgctgctgctacctcttagacaaggaaaaaccgtatgtgtggctattttcatttttgttcctatgagcattgttcctatgagcattgtctttgtggtttgacctgaggttgtatatatgctcactgcttagctctgggaatacaataagtacagttagttacacggagtgtgttgcaggtgacttcttatcatgaggactgtggactttgtctgcaggagcttgagtgaataataaaactagtactggttgatggttgtaggtgtctccagatagggaaagaagagacagtaaaataagctaaggaaaaagcacatggtaaggaccagagctggtgtgttgggagggttgacttggcatagtcatgaccctcttgtcaagggcctcaggagccttgtcatctagtggtaaagaccagagatgctgctaaatgttgtacagtacacaggaggacagacccaacagaatgtccaaagtgtcaatagcactgaggttgagaaactctcttctagaataccttcctttatccactatatgttaatgaatctaaattatttgattatgcatttatttgtgttggtgcttttctttacaggattcaaaagccaaataaccccttatggaattcaactcaaggtttgaagacttcctagcttgtcctatggacctcaacaccaaggattacaaattgcaaatttaataggtcattttgtatcaaaaggtcaattatgaagcacctagaatttttcaattatacgaatatgttctttgggttctgctgtggcccagacagtgttaactttttttttattgtgggttttgattttttcccccagaaattggttttatttgatgtacccaagtcttacgtttcccaataaagaaaaaaaatctccataaaactgcctctgtctctgaccacagttttactctatgaattccggttttcactggaagtaactttaggatgtgaattggttccagtgatagtttattctttcttgacttgaagctgacaaagattagcaagatacacagaactgttaaatatgatcctgtcccacactgttctgttacagtatgattgttacattagccccatttaacttagagggaacagagatctgatgtggtcagagcagaccatgggtctggcccaggaaaatctggggcagagtggggttggcgcacaccccaaggacatacggtgagatctgcagatcccagttggttagttgagccccgtccttcccttcctgaactcggttggggtgtgtcctgtcccctcttatttcctgcagtcagtttatgctgcattcgagtcagcggatccagttccccagattctgcaaccaagttttcccctagcagggaaaatgggaggtctgtgactatagcaaatggtgctgaagtcttcagtgcttgtggtttctttgatgttcaaagtgacagtaaaatgacatcctaaaggccaagatcacatccctttgcagcctactttccctgcggctccagccttgcctgctttccctcctggagcttgcttggtgcttccttagtgccccatccaggcagtccttagaatgctcatccctcttggcaggctcctttagatctggtgtcacctcggctgggcacagtggctaacgcctgtaatcccagcactttgggatgccgaggcgggcggatcacaaggtcaggagatcgagaccatcctggctaacacggtgaaaccccgtctctactaaaaatacaaaaaaaattagccgggcgtggtggcgggcacctgtagttacaacttcttgggaggctgaggcaggagaatggcgtgaacctgggaggcggagctagcagtgagccgagatcgcgccactgcactccagcctgggcgacagagcgagactccgtctcaaaaaaaaaaaaaaaaaaatctggtgtcaccttaacagatctaaaggagatgtccttgtttccggacggccccttctttccttaatctggtgccggatggggtggggcacggtgcgggcttccggcggaagcgctggaagcaagatggcggccgccgagagggttcacaaagggtagggtggtgtggagcaaggcagggtcctcgcaggcagtgccaagattgagctgggggtgggcagagtgggcggggtgcggacccatggccctacgcatcctgggccaggtctcttgtggtgcttcacgctctcgacctgtgagtggtgcctgct

SEQ ID NO: 1210 - DNA, 2300 bp, Homo sapien
caaccaaaccaacaaaaaaaacaaaacaaacctacaaataggaaaaaaaaggatgtccctgggtggggagggaactattcagaagaaccagaaagcctgggttctgctgcagtcactgagtctaggtcagggttctggcacaggatttaccccagaccaactaagtcacaacctctaaggtatctaggtgttttctttgagtccccaggtgatgctaaagttctgaaacactatgatatggctaataataaaaccaggaactcaaagatgtttcctgatacctggtggatagctactccgggtaaccacaaaacatcttgagagtagtactgagcaatttattttcatatctcatatgcttcaagacctcggtggacaaactctaacaagctcttaccaacgtcaggataacacttttggaataccacgtgtggacaggagtcctaaaatgttcaggtaaccaatgactgccaccattaattcaatgagatgaccagctcagagataggcagcctagattctagtctcacttgccttcctgaggctcaatttccaagaaatactccaaacagctacaaaaccacaggtctactggttcaggcagtcttttcccacattaagttcatcattcacaaatggcattcttcctaatagacaaggttattcactgtcttctctggtgtgactgtcattgttttatgtcttagttaatggcccagagagcctcctgaagtggaggatagggaagtaaagaagtgcatcactccataactctctaccaatgagatgggccagtaaggtatgtgaataaaaatgccacaccatcataatgaaaatggggacaattcaaggtatggctcttctgctctcttaacaaatgccaacttgactactaggcagataagcaaggatagaagatcactccttacactgatgagggccagtcaaggggggggtcatagcaaaaacgaaagggtaagaactgggcaaacccacagttggcctctggccaactccctactacaactgataacattgctttccacattcccaggttgggagcaaagtccactaagagccagggcagggccactaagcccttaccagcccacgtggcttcccttctcatcaactaaaggattttgtggcatctggtacacctgtttagcaagaccggcgtctgcatccggccataactcaaaatgttcagatggcaccagtttccatcctgctcccaaagtgccaaggacaagcagtacaccatccccatgtagtcagcattctcttgttcaaggactaaaattccttatctttaaaatgaggttcctacttaccctgctaacttagttgatatgattatcaaagaaaatcaagcaaatgatgcacactacgaaacatagaaaaaccttccactcccctttcctctctttttaagaccagggtagaagttcccaagcccacctccaaaatcttcaaaataccttcattctcaaggagaaaatgtggcagagctgtagagacaggccccaagacaaatggaaaacaacctgtctggatttcctctgctcattctgtagcaccatctgtccccacaccggcacgaggcagcaaggaatgggaaagattcaggtgctctgagttggcaaggaggggctgggtcaaattcctctccagactccagtgcttgggaaacagtgtaatgttaacctaatgaaatgtcattctccagaatgcatccagaaattttgctagaaaaacgtagtagctactttcagaaatgaacataatttaaatgctattccttcaatgggacaaatgccaataagcctataatggaataccactgctttcaatccccagatcgcagtataataccttagcactggtaattgatccaaaaggagaaaattctttccttaatttctcatcatcaatagtgtcatccaagttcttaatgtagagattcaccccctgaaggaaaaagatcactgttaactacacttctatatcacaaatattccctaagaaagtggttccccaagggtggccccagaccaggagcaccagcatctttgggaacttgttagaaatgaaattctcggccggacgcggtggctcacgcctgtaatcccagcactttgggaggccgaggcgggcgaatcacaaggtcaggagatcgagaccatcctggctaacacagtgaaaccccgtctctactaaaaatacaaaaaattagccaggcatggtggcgggtgcctgtagtcccagctactcaggaggctaaggcaggagaatggtgc

SEQ ID NO: 1211 - DNA, 2300 bp, Homo sapien
ggcagagtggagagggccctggactgaccaggagctgtatactagcagtgtgaccttggctttcctgtgattcaggtctgtccatgggtccctcgctagtggttgatgccaaattgtccccgcggttctccattttctaacttatgactcagtgacctaatacaaggctggctccacagtaatacttggtgacaatgaaaaaatcccatccctttgcagaaaaacttcataacagaccttgttgctttgatgtggttgttactgtagaatgcagagagggggaacttaccaaagccatatggggagaagaagagacaataagtcttggctattacaagccaaaataatttttgtcctttgtgtcattcagtatgccagaggatgggttatctttataatgtctgtgtgtgcagtggttgatctacagatatcactaaaaagaaatacaaaaatgtcagtgcatggataaattttcttttaagtataacagaccaaaataaataaatttaaaaagcaaagggtgccccttcactccaacaatctcatatctaggattaaccactgttaacagtttggtttgtatccttccagaccttttctatgcatttacatagttgcacagaaatgaacattttaaaaacatggccatcaggtttcttcatgaaggcagtgtgatgtggtaggaatagccctggtctaagccaggagccctggggctggtcctcacaggatagtcctgcctttttctctttctgctggggacttggggtatctctgagcctccttggtggtggatggggatctcgtgttttaacctctcctgtcagtctttaacctgtattcctttgggtccctggacatcatgttttattcctctgggtaattactgttcttcatggtttcattttagatttgtgggcagattcaagtctcgcaaagagcgggaagctgagcttggagccaaagccaaggaattcaccaatgtttatatcaaaaactttggggaagaggtggatgatgagagtctgaaagagctattcagtcagtttggtaagttggggttccttgtctcctttcacagtctaccagacccatctgttttttcttaagagatgagggcactgctccagagatttgcttcaagtgagtttccagagggaagccttctgttcctgagctgtgctcaagatggtgttactaatagttctgtcctttggtaataggtaagaccctaagtgtcaaggtgatgagagatcccaatgggaaatccaaaggctttggctttgtgagttacgaaaaacacgaggatgccaataaggtgagtataccacaaagattgggaaaagcttttaagaggttgccccagagtatgggtagggtcttgctagcacctacctagagctgggacggtctgagtatctggtagtagatgtaccattactatactctgggatcatcttcctgggttccgcatgttaacttcatgtaggtgtttacaaagcacttggcacatacctgtcacctcagctatcagttgttgaaagaataggacagacgtttgttatgctgcaaaggtgagagaactaaagcccagtgagtgctgatttgataacagcacggcagctacttgtgggcaaagcattgtgccagaccctcaatatttatcacttaaatacccacaaaagcacctgcagaatttactggcagccggaatattatatcgccctaggctcatgtcagcacacttgtgtttatacacctgtactatttctatattatctggatcaataacccatttaaatattaacctcactttacagatgaggaagtttggatttgtgtgacagacttcagaggtggagtgaatttagtttttagtcctatagtagaaagaatattttttgggacttagacctccagaataagaccccatcgctgcaactttattttaaagacatatttttcctctctaggctgtggaagagatgaatggaaaagaaataagtggtaaaatcatatttgtaggccgtgcacaaaagaaagtagaacggcaggcagagttaaaacggaaatttgaacagttgaaacaggagagaattagtcgatatcaggtaaggtggtcttggcccagcctagcaatgggatttgctgtgaaatatttgcagaacacccctatgtttagcgggctttctttttgaggacttggagtgtgttcttcttcccattttacctaaaaagatgaggtttaaaaggatatatacctactacatatgactgattattatagaaccagaaacaag

SEQ ID NO: 1212 - DNA, 2300 bp, Homo sapien
gcttgaagacaagaagacaagttggtgtgatagtgattaacaatgttgacggctactttagaccacaggaggtctaggaagactttcctgaggagggaatctatagaaggagcactcccataaatgttcctttttttttgagacggagtctcgctctgtcacccaggctggagtgcagtagcatgatctcagcttactgcaaccgctgcctcctgggttccagcgattctcctgcctcagccttccaagtagctgggactataggcacgtgccatcatgcccggctaattttgtatttttagtagagatggggtttcaccatgttggccaggctggtctcgaactcctgacctcaggtgatccgctcacctcagcctgccaaagtgctgggattacaggtgtgagccatcgtgcccagccaatgtttcttgatttaatatagttattagaatataaactccatgagagagggagtgacttctggtccaccatggtatctccagcccctgtattgacattggcatagagtaggctcagattaaccatttatttgaattaattaatatataaatacacatatttctttagtcatttacttaaatcagtgcttttgaagggggatgtctgtgtcttttggcaatttctgtttttggttttcacagtgatggcaaaggtggttcctggcacttatggaagaagggatgctatatatcttgtaatgcgtgtggacagtcccatataacatagtcctataaagtgatatgacttttttttttttgagacggagtttcgctcttgttgcccaggctagagtgcaatggcatgatctcagctcaccacaacctctgcctgccgggttcaagcgattcttctgctttagccgcctgagtagctgggattacaggcatgcacccccatgtctggctactttttgtatttttaggagagacgggggtttcttcatgttggtcatgctggtctcgaactctcgacctcagtgatccgcccgcctcggcctcccaaagtgctgggattacaggcgtgagccaccacgcctggcctgtgatacgactttcaaatgacctgccagactctcatgcagatgaaaagtctttttataattatccaagcctagaagaaactttaaacataggaacagaaagtatttctgtgcccttaaacacaaactaaatgtccgggaatgccaccagcatgtcaatagaggggatgcttgtgtttggtttcattgaagctttaccaaaatgtgctcatcttttcagaaaatcccatcacccatggatactgcttgcatttctagttcctgacgattctacctctaggtcaacggtatcctgaaaacttctcaaatctttattgtatttggacccagacatttacctattggaccacctattattttattttaacttattttatgtcaccttcatttcacaatttggcataccatttaatttttttttttttgagagggagtctcactctgttgcccaggctggatggagtgcagtggcacgatcttggctcaccgcgacctccgcctcccgggttcaagctattctcctgctcagcctcccgagtagctaggactacaggcgcatgccaccacgcccggctaatgttttgtatttttagtagagacggggtttcaccgcgttagccaggatggtctcgatctcctgacctccatgatccatccgcctcggcctcccaaagtgctgggattacaggcgtgagccactgcacccagccccataccatttaattttaaacctcatgcgtgtgtgcaggttaaatggctcctaggttccattcccgggtgatgggtgggagggtgttaagatttatttgttatagaaaggggccctggggtctcccgcagccgcgagctgggcggtcctcccggcgccaggggtcgctgtagcgccgcgcggccgcgccgggtcgctctcgcgtggccgccccgcctcgggcccccgggccgagtgggcgggcacgactgcgcccaggtcgcgaggcgcccttcgaccagcagcgcccggggcgggcgggtataaatggagcggtggctccctcggccgcctctctccgccccgggtcgctgccgcctccgccgctttcgggcttcgcagcctgaggaaaaaaagagaaaaagataaaaaaaatctgaaaacgcttcaaaatcctgaaaaaaaaaaaggaaaagaaaaaacgaatcctcggagaacccgcggggaagtcactttcgtacgcttccggcctgccccgcgcccgccgccgca

SEQ ID NO: 1213 - DNA, 2300 bp, Homo sapien
cactacactctagcctggtgacagagtgaatccttgtctttatttttaaaagaagggggagtactgtataaagtaataaagcctaatgttttggctctggaactgaactgccttgttgaattccagcccttccatttattgcctgttggccttaggtggagttagtctacctctcagcctttgtttctcacttgtaaagtggggattataatattactactttatagggttgtcaaggattaaatgagttaatatttacaaaagacttagaatagtttcaggttttataataagggctcaccaaatgttaagtatttagctaggcccctgctctgtctccatccacgttttctgaatgatcccatctgctcccatagctttaaatgccatcaattacctaatgacgtccaaatttaatatccagctgagacctctgttctgaactccataccctctatttaactgtgcactgtattttgatgatccaagacatctcacatgaaacgtccatcacggggcccttgaccttcccctgcaaatctgctcctcttccaatctttgctatctcagccaattacacagggcagctatctgggaggcttccttgacttccgcctttccagggaatgcataacacattgtgcaacttctctgttagttgaggtttccactgactggcatgtgcccacagaagtgatgtgagtgctgagggcatttggaatgagagtccatagttgtggctggggcgaccaccagggcttcctggtactgattgctcacgacagttgcgcctaccagtatatatttgtaagtctgtccgtgtgtatgtgtttgcatacctggccaaatggttgtgtctgtggatgtgtgtggacgggggcacaggaacattctttcccatcaagtaatcaagtgtcccccagcaagcaggccttgctgtggggatggaagcacagttattctcagatgaccaacccgattctcccacttgaaggggtggcttccctcaggtcctgacctggtggcgggtaaaaaggaaaagacctctcatatctaacccagcacaccaagacctcctctatctcctcttccctgcccaagaagtccagctccaggatgctctcatgcagcttcctttggagccttaggagcttctctgaggtactgggcgcctgaggatgaccggtgaatctgagaacttcccacaagtccccctaaggacagggcagctagagccctccctgagtgaacagtttgatgggttgccagaagcagaggccccaggaagagaggctggaaggtatcttcccttttcctctccttctcccactttgaggccctgccatagcgtctagaaggagccctttcctggcctcctggccgcccaggacaactcgacctctggtgaactgggaactgattcccagggacaacccaccactgccaccacgccaggcctttagggacctcggccagagcccagctttctcagatgcggtggccacaacttcagccgtcccttttgggggtgactgccacctctcagaagtgtaagtgtcttccccttgcccccaccacactattccacttgctttgggcccctatggagttgctgctggggaattcttgctgaggatcaggccacaaccaccacgactaacttcgacaaacttgatgtgtctgctgcctccagaacaccaggaggcaggagcgcgcagggttgacccttgcggaatcccgggcatcgaagcggcgcctctacaggccagcagcgcccaggcgacccagggacagacggggactcctggcttccccgcggggcctcccagggcacctgcccaaggccacccagcgcgcggcagccgagacagcggagcagagccggacctcccagccgtcgatgaaggcggcgaccgcctagggccttcccacggctcggcggcgcgtcaccgcgggggcgagggggcgcctgggcgcccggagctgcggcgcaggaaagggccctgggaaagggcggtggcggcgcccccgaggcggggccggggcggggccggggcggggcctgacttcccgactgggagccttagccgcggggctgagaccaggcagcctgcgttcgccatgaagcgacccaaggagccgagcggctccgacggggagtccgacggacccatcgacgtgggccaagagggccagctgaggtaagggccgggatgcggggaccgagcaggcggagggcgagcggggtgggggtcggcccgacgggctcgccgagcaggcgggccagccctccagcaccg

SEQ ID NO: 1214 - DNA, 2300 bp, Homo sapien
tactttgcatataactgcagtctgctgaggctcacccaggtctcttcggagccaactgtatttcacagcatcctcagcttctattccaatggttgactgcccagcccatttcccaattccaaattcctgagaaagacaaatctgcttggcccaggtcatcttttcaagccaatcacacagattaaaggccgctggacagcatgggggtggctcacttttgtgtgaagtgcccacctccatccaagtaaccactctatgtattcttcctgagttacttcatcattcttctccatgaggcacctgagaataattgacctcattcctagagtttcaattatttattgcagtgtaacaagctaccccaaaacttggtgcctgaaacaacaatttattatttttgatgattctgtgagttggctgggctcagctggaaggttttactgcttcaggttgtgttggctggcgtcacccacatagctgcactccactgggagctgagctggggctgggacagccaggatggcctcattcacatgtctgtcaattgtgcctatagtcacctgggctgtcgctagcttcttatcctccaggtcctatctgtctcactacgtggcctttccagcaggatagtccagacttatttacatagtagctggctcccaagagggcaaaaatggaatctgcaaggcctcttaagacgtaagcttggaaaccacagagcaccacttctactccattcaattggtcaaagcaagtcacagggccagctcagactggactccacctctgaatgggaggaatgtcaaagtcacatttccaaaggacaggcaggatggaagaggtttttgggccatctctggaaacaatcttctagaagtaagtctaaacacacttcccccaatcctaacattttattatgatttttcccttcctcccacacaagggttggtttattcctcccaggacctggtggaggctgaggggatcactccattctgtagccccctcacctccccagtcagaggccctcctagctaagccagtgttttctcctgcttctcccacccacccatgcacacctctgagagaggctgtctgcttcctggcctgtaccttgggatgggtgacatttgtgtctgcaccctgagactagtacagagctctgcatcaagagggacaacaccctggaattccaggatggtagttccgaggcccctcttctgccctccctctatccagccccttcatggcctataacaaatcaccccaagctgggcaggtgggggcctaggaatgcgcgccctctgctgaccaccaaagggccagcaagaattcgggttcagagtccctgggagtctctctggcctgggtccccaccccaggccaaggtctcgacctgagaccacccgagcctggtctcaacatggacttcaagggcccctcctaggtggtgtggaggagctgccgggttgggcccttcactgagctcccgctgggagcaggcttctgctagtgagaggagccatccatgcatcacctcctgcccgtctgccggatggactggcctcggagggaaggggacatcgtcaggatcccagggtcctagctcctaaaggaaagatgggcagctagcttttgggaggggagcggctagcttttcattttgtcctttggggatcactatcctgggggaaaaaaaaagttgtcaggcctctcctgtctccgcgccctgcagcgcctgcgaagaacatcattttcgcaatccccaatccgctgcagcccacaaacccagagagccagagagcccccctcaccacccaaccggctgctggcgtgggtcggtcggggaaggagagcccagctatccctcataccgtacagcagtagcagcagcagcggcagcgacacacgggcgaccgagagggccagtgtgacctccccccgcccggcgggcggggagcccagctcacacgcacagcctcctcgccgctgcccgcccccttccctcgccgggactcgcctccctcctgcagcccagccccagccacctccgcgtctacgccgccgcctgctctggccgggccgggtcagagccggagcatggaacctgggcagccccgggagccccaggagccccgcgagcccgggccaggagcggagaccgctgcggccccggtctgggaggaagccaagattttctacgacaacctcgcgcccaagaagaaacccaaatcggtaaaagcaatgcacgggtatgcgggggacgggggaagggttaccccggaggaggggtcataagt

SEQ ID NO: 1215 - DNA, 2300 bp, Homo sapien
ttctagtttactgtactgctggaatcccatatcttgttcacctgagacagaagggctgcccaggaggctggattttgcctttctaataccttggggaatcagaaacaaatattccaatctaaggtccttacccttaaggacttgaaggaccataagaagaggcagtattgtgtactgattaggagtgtgggctctgaggctagactgctggggttcaaatcccagcactggagctctctttactagcaatgtgaacttgggtcagtcacttaaccgctctgtgccttgatttcctcatctgttaagtaggagtaataatagaacctgcctcacagagctcttatggggaataaattgagtaacttattcccaatttatattatatggtaacatataatatgctagaatagcacctgacacaaagtaagctctcgatacacattagctattgttaaggggctcaggactcttaagtggagcagtcagattcatgtccacatacttctgtccaagggacagtctttcttcacccacctggttgaaaatttccccctgctcctctggacctcttgagccagctcccacatttcacagactgggaggcccagaatgagaagggttttgcccacggtcgtaaatggaatcattggcaaaaatgagactcaatgttagcaatatgaacttgggtcagtcaatgttagggtttcagataccacttctagtaacctgtgctgcctctccccacttcttcacgccttggattatggttaactgtgagcaaggggggttctcgctcatctctgggtccccaagacccagagctgagaaggtatcagagaagtgaaagagttagagcttcaaacacctgtctttcatgagtcaccaacccatagtgccaaggacgcgccttctcctacagctgcaggttccttggagccctcagcccccgctaaggccgcagagagaaggcatagtccgcagcctcgaaaatggtagagcaaaaccgtttcaaggggcaacgggacaggtcctaaagaaaagggacgtccacgggttcctcccccagcgagcctggcccaggcatttctgggaccagctccagaagcctcgcccccactcgcggcaggtctgaccccatcctccatcgccccgcccagcccacctctaccttcgccgcgcggacagaagccccgcctctcaccgctgctcttcagcgtccgcgctccgattaggccaatccccagccgtccgccccgactttcgacagatccttagaagtccctgccccgcacgtggcccagcccggggatgtctggctccccttttgcccccagtttggcttaaaagggttccttcccacagccttgtgtcaggagctctcagacgccagtgcagcccaggcggccggcccgggctgtggggagacccccaagtgcggggaggaggtgttgccggggccctgaaagcttccagacccgctcagtgtaaaccgcctcgggtttgtgtcaacatccgaggccggagactggcggcggctggggaccggctccgtctgcgggacgggaaaacgggagggtggggaatggaggatccatggctaggcataggggtccttcgggggagaacgcgagaggcctcttgggggtccatgagaaaggaggagggcccgtctggggagggaccggaatgaagggccagaggggtggctggagggaacccacgactagcgcggggctaggtagaggctgggacttcgccacccataccgcgctctccgcgcgcaaccagcaccctcctctctgccccacggcgtgaggggagtggatgcgtggggaggggggacgcagagatgtggactgctgaccagccacctcctccctctcccacccagctcctccccagctcctctttggcccctcccaatttcgggtgggatatgggtgtgggggggggtctcatcttgtgactcatcccctcttccgcccccacccatgctggggcccaggaaaggaagcttagagattcggctgtggttctcccgtttccatagcaacggtgaggttgtttttgagaatccactttcatcgtcgaccctttccaccccagacttgtaagccgggggctgagcctcagggcaggggtgcagatgggggtgcagccctcccgcttcccggcgactccgggaaggtcagcgcgggcaggcggggcgcgctcctgcggccgggcctcgccggccacccggtccccacctgaaaccccgcctgccactccgctccagaggagccaatagccgtgcaacc

SEQ ID NO: 1216 - DNA, 2300 bp, Homo sapien
agaaagataaccctaggccgggtgtagtggctcacacttgtaatcccagcactttgggaggccgaggcaggaggatcgcttgagtccaggagtttgagaccagcctgggcaacatggcaagaccctgtctctaaaaaaaaaaaaaaaaaaaaaaaattagctgggcatggtgacgtgcacctgtactcccagctgctactcgggaggctaaggtgggaggatcatttgaggctgggaggttgaggctgcagtgaaccatgatcatgtcactgccttccagcctgggtaagagagcaagaccctgtctcaaagaaaaaaagaaaaaaaaaatcaccctggacaagtggattggaggaacagagccactatcaactcttccttagtctactacattaacttcctggtctcctgggttccaatcaacccatcctgggcctagtgtcagagcactgtctaaaatgatgtgagcatgtaactctcctgttgtaacttcagcagcttctcaaagctcccaaatcttccagaaggcttacagcaccctcatgatgtggccctctgcctacctttcccacctgatatgccctccaccccaccatcccaggctctggtcttttagttccttgagtgtgcggaagctgcctcctcctctctctggctccttttccttcagaattcagcttaaatgtcacctcaggaaggtcttaaccccctgctccatataaaatagatggtcccattatttcctaccactatgtcaacctgtaatttatatattagtgggtttagtccaagatgttactctaaactgcaccattttgtaagctccctgctattctgcagaccttggtcaaagtgaaacatttcacaggggtttgggctgtgagaaacatcctgcctaaccacccgaccacaaggcagacaaaggcccaactaaagaaacatccctctcatatcttcctgggcaaaggtccaagggacaccatgatgacatcccactggaacaagggccaaaccgcctcatcatgagaacatctttatatcaatatcctgctaggcagcaacccatactgcccagacccctaccgcccatacctataaattgcccagtctgtaagcagtggtgggcactggcattaggctggttccccacttctgtaggttattatgctggacataaagcctgcgtttgctgtcgagccgccctctttctgtgtgtgtgtgtgtgtgtgtgtgtgtctttctttaacccttgccttcttttcaaaacctaacacgagtagacaaacgttctttctgaagagccagattgtaaatattattgtaggctttgcaggctatagctcttctgcccttgtagtaggaaagcagccacagtcatacttaaaggaatgagcgtggctgtgtccccataaagctttctttacggacactgaaattttaatttcacataattttcatgtgctaagaaaatatacatatatattttgtgagatggtgtgtcgctctcgtcaccctggctggagtgcaacggcgcgatctctgctcactgcaacctccgctacctgggttcaagcgattctccagcctcagcctcctgagtagctgcgattacaggcgcccgctaccacgcctggctaatttttgcatttttagtagagacggggtttcaccatgttggccaggctgctctcgaactcctgacctcaggtgatccgcccgcctcagcctcccaaagtgctggggctacaggcatgagccaccacgcccggccaagaaaatatagtttttttattttttccaactatttcaaaaggtaaaattcattcttagctcccaggttgtccaaaaacagacgcgcaggatggccaagcaccagagtttatcgtttgcccataataatcgggttgattcggccaaggtttccctcccccaacacggtgcgcactgggaagcgcgaggaccacgtcccttggtttaccactgcgcacctcacaaggcgcccagtgcatccgggtagcgggatgccggttggaccaacgcgagggtgggcggggtctaagagctaagcgttgggggcggggcgggacagtggggaagaggacgggtcgagtgctggcttccggcggaaaagcgcgcgagcaagatggccaccaccaagcgcgtcttgtacgtgggtgagcaggaggggttgctaggcggagtctgagtgaacgcgacccccaagggtcggggcgtggggtgggacgcatctctgaaccaggaggacggcgagctgctgtcaaggccgggtctctggcggt

SEQ ID NO: 1217 - DNA, 2300 bp, Homo sapien
ttactgacccccctgggatgttactgagatcactggtcctcatggaaatgccattacagggaccggtgagtgtgaagacccaggcgagggaggtgctggcatgtaagtggatttaaagcatgggatgggaccaggtcatctagggaaggagggtagtgatggagaagaaagagggcctggcccagagccctgggacctccaacatccagagacctcacaaggaggggccacagagagcccacagagaccagccagggagggagcaggacacctggaggatgaggtgatctagacgccagagtaaagtgtttccagaagcaagggtttgtcatttgtgtcctgctgtgggcactgaaggcaagaacagagaagtgaccaagggttttgccatcacagaggttgttgatgacctaaatatccgtggagtgtgggtctgactgaggaggtggagggagacaggcagtggaggcaggagacagctctttccagaacctttgctggggaaggggagcagagacatgggctggggctggagagaacccgggacaaggcaggtcctttccaggtgaggagacgcctgcacgctgctgtggtgatgcagtgattctgtgcagagggaagaaaactgcaaaattccgcacaagttggagcagggagctggagtgggggaggtggagagggcggggggatgcagaggacaagacggggggcctcttcagagcagggacccttcctgatggaggtgagggatactgtccccactgtcgcagtgaggggtgaacctgagctctgggaggctgtagtggggcaggcactcactctccgggttgtcacaggattaaaggagggtgcttggcacagagtgatgcccagtgaaggtgttcatgagcgtcggtgtcacccagcggcgcctgctcattggacacttggtgtctttaatgagctggggaagctggggggaagcttgggcggggtggttggagtttgtgtctgaggctccactggggcaggaggggacctagcctgtgcccttctcgcggagcctgacctcagctctgtcctgcgcccgggcctgtgcgctggacacggaggactgactcgggggcccccagcccagggcggagccggccccctccctgttgcgggtcgcgggcctagcctagagcctgcgcctggccggggagacctgctgggagggagtgcgtcagggcgcgggcgcccgccctgctctgtgacgcgcggcccgaggcgcacgcagggctcacaccacctgtcctggcctccgacccgggccgactatggcggcgctgcggctcctggcgtcagtgctcgggcgcggggtccccgccggcggctcagggctcgcgctgtcccagggctgcgcccgctgctttgccaccagtccccggctccgtgccaagttctacgcggacccggtggagatggtgaaggacatctctgacggggcgaccgtcatgatcgggggcttcgggctctgcgggatccccgagaacctgatcgccgcgctgctcaggacccgcgtgaaagacctgcaggtggtcagcagcaacgtgggcgtggaggacttcggcctgggcctcctgctggccgccaggcaggtccgtcgcatcgtctgttcctacgtgggcgagaacaccctgtgcgagagccagtacctggcaggagagctggagctggagctcacgccccagggcaccctggccgagcgcatccgcgcggggggcgccggggtgcccgccttctacacccccacgggctacgggaccctggtccaggaagggggcgcccccatccgctacaccccggacggccacctggcgctcatgagccagccccgagaggtgagggagttcaacggcgaccacttccttttggagcgcgccatccgggcagacttcgccctggtgaaagggtggaaggccgaccgggcaggaaacgtggtcttcaggagaagcgcccgcaatttcaacgtgcccatgtgcaaagctgcagacgtcacggcggtggaggtggaagagatcgtggaggtgggggctttccccccagaagacatccacgttcctaacatttatgtagatcgcgtgataaaggggcagaaatacgagaaacgaattgagcgcttaacgatcctgaaagaggaagatggagacgctggaaaggaagaggacgccaggacgcgcatcatcagacgcgcagctctggaatttgaggacggcatgtacgccaatctgggcataggcatccccctgctggccagcaacttcatcagtcccagcatg

SEQ ID NO: 1218 - DNA, 2300 bp, Homo sapien
agagggccccctccgtgaacccaaaaccccagtccagccacgagaaaaccgtcaaacaaacccaaagagaagggctttccgcagaatacctgacaagcgcttctcaaaaccgccaagctcatcaaaaaaaagggaaggttgggaaattggaggagcccagaggcacctaagaagaccagctcagtgcatgtggggtcctgggttgagtcctggaccagcaaaaggtcattagggagaagttatgaaatccagatcgatcatggtgtttacttaataataaggtatcagtattggttcattagttatgagaaaggtaccctgctagtgtaaaatattagcatttcccagaggaaactgggtccaggtgtatgggaactccttgtgtagtttttttttctttgagacagggtttggctctgttgctcaggctggagtgcagtggcgcaatcacagctgacggtaacctccaactcctgggcgcgagcgatcctcccaccttagcctctgtactatctttacaaagttttatgtaactatcaactgttgtaaaattaaaacttaatatatgcataaaataaagaaccccctgacttcagtggagagagcagactgagatggacaagagtgaagtcagagagacgtgtgggggccccacagtggtccaggtgggcgctgtgagcgacttgttggtagcagtggagatggagaaagatgagtcgatttcagtgtcaggacatgcttatagctggcgaggaggtgagggaacaggaggaagcctgaatgatgtgtggttggagccagtggatttttttcaatagatttttctttttggggaaaagatagatgaagggcaggtttgaggtgggtggccaagggttctcttttggctggaatattactgacccccctgggatgttactgagatcactggtcctcatggaaatgccattacagggaccggtgagtgtgaagacccaggcgagggaggtgctggcatgtaagtggatttaaagcatgggatgggaccaggtcatctagggaaggagggtagtgatggagaagaaagagggcctggcccagagccctgggacctccaacatccagagacctcacaaggaggggccacagagagcccacagagaccagccagggagggagcaggacacctggaggatgaggtgatctagacgccagagtaaagtgtttccagaagcaagggtttgtcatttgtgtcctgctgtgggcactgaaggcaagaacagagaagtgaccaagggttttgccatcacagaggttgttgatgacctaaatatccgtggagtgtgggtctgactgaggaggtggagggagacaggcagtggaggcaggagacagctctttccagaacctttgctggggaaggggagcagagacatgggctggggctggagagaacccgggacaaggcaggtcctttccaggtgaggagacgcctgcacgctgctgtggtgatgcagtgattctgtgcagagggaagaaaactgcaaaattccgcacaagttggagcagggagctggagtgggggaggtggagagggcggggggatgcagaggacaagacggggggcctcttcagagcagggacccttcctgatggaggtgagggatactgtccccactgtcgcagtgaggggtgaacctgagctctgggaggctgtagtggggcaggcactcactctccgggttgtcacaggattaaaggagggtgcttggcacagagtgatgcccagtgaaggtgttcatgagcgtcggtgtcacccagcggcgcctgctcattggacacttggtgtctttaatgagctggggaagctggggggaagcttgggcggggtggttggagtttgtgtctgaggctccactggggcaggaggggacctagcctgtgcccttctcgcggagcctgacctcagctctgtcctgcgcccgggcctgtgcgctggacacggaggactgactcgggggcccccagcccagggcggagccggccccctccctgttgcgggtcgcgggcctagcctagagcctgcgcctggccggggagacctgctgggagggagtgcgtcagggcgcgggcgcccgccctgctctgtgacgcgcggcccgaggcgcacgcagggctcacaccacctgtcctggcctccgacccgggccgactatggcggcgctgcggctcctggcgtcagtgctcgggcgcggggtccccgccggcggctcagggctcgcgctgtcccagggctgcgcccgctgctttgccaccagtcc

SEQ ID NO: 1219 - DNA, 2300 bp, Homo sapien
caaagaccacttgaggcggaggctgcagtgagccaagatcataccattgcactccagcctgggtgacagagcaagactccatctcaaaaaaaaaaaaaaaaaatccatctctagaaattcatcctaaagaaatcaccatggatgtgcacagattattctacaagattgttcataacaacatagtatataatataaaaatataattatcccataacataagcttgattaaaaaaattatgataacaatatgatgaaaaaataccacgaagccagtaaaaaaagtgtgcaataattaatggcatagtgaaatactgcaatataacgtgaagctaataaagcaaataagatcctgttttttgtatgaaaaaatacacatacatgtaagaaaaagagacatcaaatattaccagtgattatctctggaaacagggatttgggtgattttaaaatttgttgggggtaatatttttacttttctgtactgacctggcataagttccttaatcgctgtgtgcctcagtttcctcatttgttaaaagaggaggttccaatggtatgtaccccctgatgatgtgcaaaagtgattatgaaactattttcaaaagtttctacaaaagcaagttacctctgtaatcaggaaaaagtagttcttttagtgctctgaatagtgtaataataatatttattttatttcattttattatttacccttgcagaaatttacttcttcggtaaaagacagactaggcatgtgcttaaggagccagcaaatgaccatttacattaataatttatttaatatagaaatttttattgaagtgatgacttctaaatgtgatttttgggggcattatacacttgcttcgaggtttaatcttcaatccacatgggggggcaccataatcactggtgcccagggccctcgtctagcccctgtgaggccctttgcagtccctcccttgccagcccctccagcctccgccatttgccccgtgggctctccaggttccacttgaggagctgccccctgccccagcccagctctactgctgtgtgacctagcgtaagtcccttaaccgctgtgtgcctcagtttcctcatttgttaaaagaggaggttccagtggtaggtaccccctgacgatgtgcaagcatcacagaaatgacacaagacacacactgagaacatgcctcgcgcgtggcaagtgctgactgttacctgccattattaggctcccccgccggggtctcagggccttggcacaagctcttccctctgcttggagcactttcctccactgacctttcctggcgctccaggtcaactccaggagccttcccagtacagtctaggtgccttctccttccgcagcgcctgaaccacacaggaataagtaaggcgagagcgcgcccagagaagagcagagagtgcagaaaggggctgagttagtagaggcatttccgcggggatccttctcctgccaggcctgcaccggggccgtggcgactgagaagtgcacaggtggctcccgggtgctccagaagggccccagagctcctggcccggctaaaggcaggaggcgggtgcgcgtctcccccgcgaagctggatcagtactgggggcgcagggggcgcacgccgcgcagcgagggctggcgggggcggcctgcctggggcgctgcccaggctcacgcgggagccaggtgggggcgcggggaggagcagctgagcaggtgccgggaaggaggcgcctgcagcatgccatggcgacccgcgcacgcgacggcggggcggccgggtggcaccactggcgggaccggaagggcgccgcggccctaggatctctgcgccgaggcccgcggcggaagccacgacggccatgaccacgctgacgcccaggctgcgagcccctcgcccgggccgcctgcccacccgccacgcccaggtagcacctcggggtctccccacccgcgacaccggccgcagccccgggccccctcgcaggcgtggcccccgctcccaggccccgcccccgcccccccattggtcagtcccggggtgggggcgggcgacgcggaccgctgggcagggcagggcagggactcgcgggaaccgcaccaagcgggtggctgcaggagctcgcccatcgcccctgcgctgctcggaccgcggccacagccggactggcgggtacggcggcgacagacggattggccgagagtcccagtccgcagagtagccccggcctcgaggcggtggcgtccgcgtcctctcgtccaggagccaggacaggtgtcgcgc

SEQ ID NO: 1220 - DNA, 2300 bp, Homo sapien
gttggccaggctggtctcgaactcctgacctcgtgatccacctgcctcggccttccaaagtgctgggataacaggcatgagccaccatgcccggctattttattttttgtagagatggattttgctatgttgacaagctggtcttgaacccctgggctcaagtggtcctactgcctcggcctcccaaagtgctggaattacaagtgtgagccaccacgcctggccccaatcagccttcttgattcgacaggtgaaggtactagatactgaggcccaaagagtagaagggtgtttgctcaatatcacagtcatttcatggcttgcacaaataagttaaaccttttcccgtgaagtatgtcctatcccatcttctttcctctttccactctctcctcttctggaatcttaacatttttcccttccccttttcatttctttgctcactttccctttgttaatcatactacaggttgaacatctgaaaatctaaaatccaaaatactccaaaatctgaaacttttggagtgctgagatgatgctcaaaggaaatgctcattggagcatttcagttttcagattttcaggtttgggatgctcaaccagtaagtataatgcaaataattcaaaatctgaaacatttccttggtcccaagtattttggataagggatatttaacttgtgtataattgacattttatcttactgtggaaattgtatgctccctatacttaatttaaagggggaaatagagaatttgttttctctttttaaagcaaacagtgttttttctttatgatccttgattggtaacatctttcttcccaccctgccttagccgcttaagggttagtgggattctagtagaaaagaggtggtctgtctctatgcctgcagattggctggcaaggagaaatgtgtaaatgattatttacctggatattgaaagtcttttaaaaaaagttattttcggccaggcacgatggctatcgcctgtaacctcagcactttgggatgctgcagtggatggattgcttgagctcaggagttcaagatcagcctgggcaagtaacatcgtgaaaccttacctctacaaaaaatacaaaaattagccagatgtggtggcatgtgcttgtagtcccagctacttggtggcgggagctgaggtgggaggatgactcgagccctgggaggttgaggctgcagtgaactgttttcgcgccactacactccagtcttggtgacagagtgagaccctgtctcaaaaaaaaaaattattctcaggagcaaaggccgccttaaagcagataattatctgttcaacggagattctaaagagaaaaatttaaagtagcagagatgaaaaaacaatagtggctatagtaaattgagtgcttactattttttaggcattgtgataggggatttctatgaattgtcacatttaaggctcatggggatttttacaggtgagaaaactgaaactcagacaggctgagtaattgtccaagagctgaacctggaaattgaagtctatttatcttcagaacctgtgcatctcacttaatttggtcaagcctcaagtggcaaaatgtgatagtctctccatgatggtagagactgactaagtctaagaaccttagagaaaccagcttgtgttttgccttagaaggcaaagtcatgcaatggatgtcaccttgatggcctcctgagcagctgacacttggttctgtgagagtccttgggcttgtgcttattgaactgatttggaatactaataaaactttgacttttagcagcaagacctagaaagttctagaactggaaggaattaccactatgcatttgtctctggtttctgcaagtccctccagaactgattggacatgattctggaaatttgttggaaacactgagggctggtatcaacgcattttggttcccaccctttctcctctgctctgcagataaatgaatgtggtttcttgctaatggtgtccttccaaagtgagtcaggattctcttgatatcgtgatatctttcttaatgttcacattgaagatatatttgcccgagacaaaattcctattgttgtgggaggaaccaattattacattgaatctctgctctggaaagttcttgtcaataccaaggtaagtttagttcactcgtaactcactgaggaaatggattgctctttcttgctgtctaatttcagtgggagaaaggttgactcttgcctatttcttatacccagcaactataattttcctacttaatattctcaagcaaatgccacctc

SEQ ID NO: 1221 - DNA, 2300 bp, Homo sapien
gagcaagatcctgtctcaaaaaaaaaaaaaaaagaggtgaagttaatgaagttcacagagctgataaatggcagagctgggatttgaacccagctctatatgactccaaaggcctttcttaaaatggtgtggtctctggaattttggtcctctctggtcctaattttttccacctccattttaacctcagggttgctacaactttaatcctttctttcttttttcttttttttttttttttgagactgagtcttgctctgtcgcccaggctggagtgcagtggctgatctcgacttactgcaacctccggcttccggcttcaagtgattcccctgcctcccacgtagctgggattacaggcatatgccatcaccacgcgtggctaatttttgtatttttagtagagacggggtttcaccatgttggccaggctggtcttgaactcctgaccttgtgatccacatgccttggccttccaaagtgctgggattacaggtgtgagccaccgcgcctggctatttatttatttaagaaggaatttagctcttgttgcccaggctggagtgcaatggcatgatcttggctcaccgcaacttacgcctcccggttcaagtgattctcctgtcttagcctcccaagtagctgggattacaggtgtgcaccaccatgcccagttaattttatatttttagtaaagacgggttttcaccatgttggtcaggctggtctcgaactcctgacctcaggtgatccacccgcctcagcctctcaaattgctgggtttacaggcgtgagccacggctcccggccaactttaatcctttctacctgcgttccttttccctttcctattttgcggattgtagtttacttgcttgtttttctctgttctcactccacatgttgcattctttggccaaggagatgaaaaggtttgccttctgtttttttgttttgttttgttttgtttgggacggagttccgctcttgttgcccaggtttggagtgcaatggcgcgatctcggctcactgcaacctccgtttccccggttcccatgcctcagcctcccaagtagctgggattaaaggaatgcgccaccacgcccggctaatttttgtatttttagtagagacggggttttaccatgttagtcaggctggtcttgaacacctaacctcaggtgatccaccagccttggcctcccaatatgctgggattacaagcgtgagccactgtgccgggccaaaggtttgctttgtgattgagtatgaggtcgtactatgggatgaaaatattagagcagctgccctggcctgagaactgggcagacctcattctggagaatgccacacctctgagcttactgccccgggcactagaccggcaggtcattctcctcttcattgaacaagtattgggtgtctcttgggtaccaggtactgtgctagacactggagatacagcaatgatctaggcagaatttgtcccaataagtcagacaaaaaaacaagagacctatttataattttatattgtaataagtactgtaaagaaaaataacttgagtgctgtgaaagaataatagggacggatctatttagatagggttgccatctaccatttaagacggcaggtggtctggcgcagtggcgcatgcctgtaatcccagcactttgggaggccgaggcgggtggactgcctgagctcaggagttcgagaccaccctgggcaacatggtgaaacctcgtgtctactaaaatacaaaaaattagccgggcatggtggtgggcgcctgtagtcccagctactcgggaggctgaggcaggagaatctcttgaacccagaaggcggaggttgcagtgagccaagatcgcgccactgcactccagcccgggcgacagagggagaccccgtctccaaataagaagaaaaaaaaaaaaagacggcgggtagttgaggttctgacaccagttagttgactgcagtcacgtcgcctgggtcctgccgctccctcctccctaagcaacctcgctacaaagcctgagatccgcgcaggcgcatagacggttgccatggggacagctgctccggcgcaagcgcagactgccataagatggcgtccgtggcggctgcacgagcagttcccgtgggcagtgggctcaggggcctgcaacggaccctacctcttgtagtgattctcggggccacgggcaccggcaaatccacgctggcgttgcagctaggccagcggctcggcggtgagatcgtcagcgctgactccatgcaggtatggcagtgc

SEQ ID NO: 1222 - DNA, 2300 bp, Homo sapien
gcgcaatctcggctcactgtgagctccgcctcccgggttcacgccattctcctgcctcagcctcctgagtagctgggactacaggtgcccaccacgacacccggctaattttcttgtatttttagtagagatggggtttcaccgtgttagccaggatggtctcgatctcctgaccttgtgatctgcccgcctcagcctcccaaagtgctgggattacaggcgtgagccactgtgccctgcctaaggttggtttttgttatttgtaaccaataacccagactagtacagcaaccatctcagacatctgtggaccagagaaaagtcactaaaggacaatccaatgcctgtgccttggggctgcaaccaaacctggaacccttctgatttgtgtcttccgtttagcacaaagcagggcacacaagctgtctcagtgaaatctggttagctgagtccctcagtaagtcagttagttcacaaatgtctgccagaagctgttctaggtgcagaaatcacaaagcaagtaggagcaggtttctgccttcaagatgtcccacatgcagcacagacccaacgtatctaaaacggaaggctgtcattttccctgccttcccaacccatataacaacacacatccgtgtcccatgctccaaccacactgaattgcttgcccttctcacttccgtctgccaacagtgagtagtttggtgttcttagaccacaggggtgggagggaaagagagagacagcagacaatcaggctggggtagacagacaccagaccttgatgccaggtggaggaatctagatgtattggctgctgtcccaagttactctcctctggcctaaatctcagactggccgtatagtttaattttttctcttccaccaaaggtcatctgtgtagaagatgacacaaagggggacccagcacggtgacccgtgcctgtaatccctgcactttcggaggctaaggagggaggatcatttgagcccaggagttcgaggctgcagcgagtcatgatcgagccactgcactccagccttgacgctgagtgagaccctgtctcttaacaaaatatatttaaaatttaaaaagaagattatacaaaggggttatctatcatcttggccagcaatgcagggcaaaacttgaaacaacttggtcctgcagtattttccagatgccaaatcctcattctctactgtacagctcctacagtgttttgtgtgagatgagagggagcatggcgggtctcagctggctttgccctgggaaaaattcctcatttctgcaccgcctccccaaagcgggggctaagccagcgccgtctgcctctccacctagaccagaccccttccctagatgctcttatttccctgaagcctcacaacaaccctgtgaggtaagcattaccatcccttcattttacagatgaaactgaagctcaggaaggttacgtttcgggctctaaatcccggaatcttcgcttcgatgccatccaggcttgggccactgagctcaagaaacgggccgacgggtgaccagacggacgccgggaccagcccaagttcagggctgagggccgccaggtggcgcgtttccctccccctacccctcgcggcggctcgggcgcacctgaacccagcggggtgcgccggggaaagtaggcgcgcagggtggggcggggagtagccctaattccccagctcggagtgggcaaggagcacggtttagctcagccggctggcaccgccaagcggccgccgggccgcatcagccctcctcctgtttgcgctccccagcgtgcaatttatttggggggctaccggggattgaacggagcgggcgagcgctgccaggaggtggggccggccccacctgtcgactgcccgtagtaggcagggagagggcggggtttgtcccatagggcccgccccccagtccctgggtcccgggcgcgcgacgagatataaggcagtcaggaaacaatgcgcctgcagctcgcgctcccgcgccgatcccgagagcgtccgggccgccgtgcgcgagcgagggagggcgcgcgcgcggggggggcgcgcttgtgagtgcgggccgcgctctcggcggcgcgcatgtgcgtgtgtgctggctgccgggctgccccgagccggcggggagccggtccgctccaggtggcgggcggctggagcgaggtgaggctgcgggtggccagggcacgggcgcgggtcccgcggtgcgggctggctgcaggctgccttctgggcacggcgcgcccccgcccggccccgccgggccc

SEQ ID NO: 1223 - DNA, 2300 bp, Homo sapien
tcccaggcacttgtgctaaatgcttcctgtgcattttcttgtttcatccccaaaacaaatctattaggtagctactattaatttttttttttttttgagacaagagtctttgtctgtcacccaggctggagtgcagtggcacgatctcggctcactgcaacctccgcctcctgggttcaagcgattcttctgcctcagcctcctgagtacctgggactacaggtgtgccccaccacacccggcttatttttgtatttttagttgagacagggtttcaccatattggccaggctggtccggaactcctgacttcgtgatccacccacctcagcctcccaaagtgctgggattacaggcgtgagccagggtgcctggccagtagctactattaatatcaccattttacacagggaggttaactgagttgttcagagtcagccgcacagctagtaaatggagacacttagggcttttcctaatgggtttctgtgtgcttgtaccttagcaggggaagactgaacattcattcactgaacacaataattcaggccctaagctagttggtggggacacagaagtgaaaaagatgcggttcctacctgaggagctcattgtcaaccgggggatacagatcacttgtggtatggtgtgactgtgggagagaagatttgggggctgcaagggagcttagctaaccaagcctggagaggggaaaagagacagaacagtgtcacacagcttggagtaatggggccagccattccctttccacagtattcagtgcctcactttggctctcttctgctcagcaatggccaagagctgtgtgcccagatgggatctgctggcgtatgagggagcatggtgtgaccatcctggggcagatagaccttatctctcctccctgcaatcagagatttaaagaaaggaagaaggaggctgacattaaggagcacaggaaccgggtgggtagcctttgagagttccagcagccccttcactaatcagagaactggaaagaccggggtgacattgacataagggactcagaggtggaactaaagactgttcttttctggcatccgtgcctgccttctgttccaaactaatgccctcccatcttcttttgaggaccacatttctgggcattctctttttcaaaactttccctgtttcaaccctcagtgcctctggagccatgtatctcccagggcttcttgttgggagacacatacaccccattctgccgtctgtaatttatgctaagagggatagagcagggctgttgagagcaactgctttggtatcggacaaaacctttcaggcctggctctgctacataacagttgcttcacttctccaagtttccccttcctgtgctgtaaaatggggataataatagtaccaccctcacttggtggtttttgagggccgaaagagatcatattaagcatggaggaagctatccataaaaaggccactgttgtcatagtgtactagcgggcgtagccccggcttctctccacgacttgggagctcccttctggcaggggcagccactggattgcctcatctttctccccattgcccggatgccaagggcaggacgggggaatggtgtgtcttcggggatgagagagaggcatcaggagggaaagtgtcagcgtacgtcctctaggcttgaagaaggagagaggccctgactccagattttaaagtgggcttcagagcccctacctttcctaggcctggggctcagaagtcatgggtggtaggcccgactcggggagagtcggaccttggggacctcggggacctcgggcagatcggggaccccgggcagatcactttcagcctggggcctcggtttcctcgcgcgtgtctgggaggtctcgcggcctgcttctcggattgctaggagccagcgcaggcagatgccggttccggggcttggagaacgtggctcggtggcacagagccgccgggcgaggcgggggcagggaggcgggcgacgggattggctggaggcggggcagcggggctcggggattggccgcaaccgagagggctgggcagaactataagaggcgcggagggggcgtgcagcagagtgcgttcctcgtctgccagccggcttggctagcgcgcggcggccgtggctaaggctgctacgaagcgagcttgggaggagcagcggcctgcggggcagaggagcatcccgtctaccaggtcccaagcggcgtggcccgcgggtcatggccaaaggagaaggcgccgagagcggctccgcggcggggctg

SEQ ID NO: 1224 - DNA, 2300 bp, Homo sapien
cttgactcaggggttggtggctgttgccaggcttgtggatgagatgcatcccacctttacctgaggagcagaagggcacttaggtgccaggctaagttagaatgccccagtacacagggtctttgactgggaggggtacttagggtgaaacaggactattctgtgcattgagaagccttggccagaagcctggcatcctgagaattcaccctgtctggatgggagagtgggaggcagaatagccatgactaccggggctcctgcaccagctgtcttctctgtgtagcatctaacttggcaagcatcgcatcttagttgtatccatttacagagggggaacactgaactccagaaggaacaaaaaacttcagcagctaatttttgagtaactcccatgggctgggccttgggtggggtgtaaatatgaggaacctgcagtcaaagtgtaaacctgttgtagtgggtgttagagctggggttggggggttagactagggagactatggtatggggaagaatacccactccccagagaaatagcaatagcagggctttgatggataaggaggagtctggagagtctgtatttagggcctggggggttttggggcggggagggggataacttgagtgggtagtgacaagtccctttttaaaaagcatctataggctcctttttccacatccaagatagagcttgaacctgtaaggtagagctcataactcccattatacagatgggaacactgaagcacactgtgttcaccccgtgaatgctcattctgatatcaggtggtcaggagctcagggctgagagagggagggaaggaaatgtttgtggattcatttgaattgatgggaatgttttcaagggcagtggagggaagcaattaaggagacagagctgggaaagcttctaaggaggcacccagtgctactgttattggagaaatgctattgtcattattaacaaggcaagtgaagatgtgtaaggtccatgtgggagcagctcagggtcacaagatcctggctgagatagggagggagcctctgcttctgcctaccagtgagagttgaggcgagtagaaggatgaggaagttgtcttttgcttctcctcattccaggtgggccctttctctgcctccatcatcctgtttgtgggccgagcctgggatgccatcacagaccccctggtgggcctctgcatcagcaaatccccctggacctgcctgggtcgccttatgccctggtgagtagaatatgccccttcgaggtggcacaaggcaggacttccagcatatctgctccttggtccttctctctgtcttgtcacaggcagaagggtgaggagaaggaaggagttaaaagcccaagggtgttgaaaccccatccgaggcatcagctaccctgagcacgggcactggcatgctcagccagttcatttccaggacagccaaagtgctaggctgggcagctcaggcctcattcctccccagggtccactcattccccttggtgaagctggaattctgaattctcccactctatcacttcctgcagtggccgaggtagtacttaagagtggttaagcagttgtactctggagccagcctgcctgggcttattttattatttttatctttctttctctttctttctttctatctttctttcttttttttttttttagagacagggtctcgctctgtcacccaggctggagtgcagtggtgtgatcataactcactgcagcctagaactcctgggctcaagtgatcttcccacctcagcctctcgagtagctgcgactacaggcacgtgccaccacacctggctaatcttttaaaattattatttgtagagacagcgtctcactatattgcctaggctggccttgaactcctgggctcaaggtgtcctcccgcctcagcctcccaaagtgttaggattacaggtgtgagccaccatgcccggcccctgtctgggttgaaatcccaatttccctacttagagctgagtcacttcacatctctgagtctcaagtttcttcatctaaaatggggataatagttatacctatctcacactcacagagttgtggtggattaatttttttttttgacgttcttagaacagtgcctgacttaattctacttcataaggttgatgtaattttgagacttaaataagttgatactaaaataccaagcagtgtctgggacactaagtgctatgatgaccacttcagggaagctcagcaggagagctggcatgtggtccctagtacaggccacaccag

SEQ ID NO: 1225 - DNA, 2300 bp, Homo sapien
caggctccagctgtggctacaacatagggtttttatacaagagaagtaaagtgaattaagcctgttaaaaaaaaaatgtttacgagacagagtcttgctatgttgcacaggctggactcaaactcctggggaaaagcaatcctcttgcctcagtttcccaagtagctgggataacaggcatgtgccactgccattacagccatttttaagtgtacagttcagtggcattaaatacattcactttggtttttttgtttttgtttttggtacagtagggatacaaacctgtcggttctctaatatttcttttttgggcagtgcagttttaacattccacattaaggatgtaataatcaaggagtttgtttgtttgtttgagacagggcctcactccgtcaccaggctggagtgcagtggtgcgatctcggctcactgcaacctctgcctcccgggttcaagtgattctcccgcttcagcctcccgaggagctgggactacaggtgtgcgccaccatgcctggttaatttttgtatttttagtagagacggaggtttcgccatgttgggcaggctggtcttgaactcctgacctcaggtgatccacttgactcagtctcccaaagtgctgggattacaggcatgagccactgcgcctagcctaagtacattcactttgtcgccaccatcaccaccatccatccattacatccttccaaagcgaaattatgcaatatttatctttttgtgtcttgctgattttccttggcttaatgtctacaaggttcatctatgttgtagcatgtgtcagaattttattccttatgaaggttgaatggtatatataacttttaaattatgtcaacttttctgtttgccaactagtatgtaagttccacaagggcaatgattttttatctgttctctagttatcctaagtaattagaatagcgcccagcccatagctggaacttatgaggaaatgaggaaacgagcttcagataatttaaataacttcccaagactaagttttatagttagttggtggagctagaatggaatccctgaagagtggctcaaaggcctttctctttaccatggcctgtgctgccttgctatactgatgccatgaagttagtccatcctgaggtctaaccccttttgatggtgtggaactcacatggggaaggcggacatttgcccacctgggccttcaactccttcacttggagctggcctctccccatcatgccagcttccctgtgtgtgaatgggtgtgtgtgtgtgtgtgaatggggtgtgtgaagtgtgtatgtgaatgggggtgtgtgtgaatggggtgtgtgtgtgtgaatgatgtgtgtgtgaatgaggtgtgtgtgaatggggtgtgtgtgtgtgtgaatgaggtgtgtgtgtgaatggggtgtgtgtgtgaatggggtgtgtgtgtgcggttgatgactatccgtgtgagaacacgggagttggggctgctccttctctttgcctccttgcccaggcacctgaggtcttggactcctgtcctaactctcagcccattagaggctgctgcctctggactagactcaggctctgacctcacactccatgcctaggatttcagtctggggtcccagttcccatctgccattccgggcttggtcatcagcctcttcccagaggcccaggatgggtggatttggcaggagtatggggaaggaaggaagagcttagcttccttccctgtggggaccctgtgaggcacagcagactgggctgggcctggtcctgggctccagcctccagcctccactcacaccctcctcttcctcaggatcatcttctccacgcccctggccgtcattgcctacttcctcatctggttcgtgcccgacttcccacacggccagacctattggtacctgcttttctattgcctctttgaaacaatggtcacggtgagtgtgggtacctcccttgggtgtctctaggggccgggaggagggcggtccttggggcccccagggttggtactggaagctacatcagtgtgtccacccgcctgaccagccaatgacctgtcttctatgccagtgtttccatgttccctactcggctctcaccatgttcatcagcaccgagcagactgagcgggattctgccaccgcctatcgtgagtctccccagcccacctgaccccaccctccagggaccctccagccatacttcttcccttgcgggtccagctctttgctctgctctagagtgtgggtgtgaaaccatcttaaaaataactcaatc

SEQ ID NO: 1226 - DNA, 2300 bp, Homo sapien
ttgacctcgttatctgcccgcctcggcctcccaaaatgctgggattacaggtgtgagccaccgcgcccagcccttcatgtgacggatattcttaaactatcttcccatctcctactggagttacaaatgcatggatctagacttcttaaaagactggacattccttagggcaggggttgtaacttaagtcgtgtgtgcattctttataatgaagcattttacaaagtggtttcacatacattactgcttccgtttctcattacagccccattaatattccccacctgatgaggaaactttcttcattctccttcctgcttcctcttctctctcctcttcctctagaatgcgtgtatggtctatgttccttctgtctctaatccagaaagagatttagaataactaaatgcagagtcaaagattatgtccaaataaagttagagtttgtgtgtgtgtgagacagtgtttttagttaaatgtcaatatttaaaatatactatgacttttataccatattttttcatgttgtcatgttcttttaaacatgctgggagccataaagttaggaagaggcccagtaacccgtccaaagtaacctgaccaaagtctgacccctagtagagggcctatgccagcactggaacccagtgtctccagatccagaggcattcaccacctcaaatctgcctcaaatgtctgcagtatggtctatcacaggggctaattaagctcatgggatttagagtcagacagatgtgtttccttcaaagtttcaacagttactttctgaccttggcaagttattcagcttcctcatttgaaaactagagggcataatggtacctaccaccgagagttgctattaggagtaaatgaaaatacgcttgaagaactcagcatgggcctggcaagtagtcagcgtgcagtaaatggtagctgttattttaagaactttatttgttgaatgattgactctggcacataacgcctgcattcaacttgaaacacggagctgtcacagtcgttcagctgaaggggcgggaactgtggcacttgccaattttttctagaaataaatctttgtgggaggataatgaccggttggagagtgtgagtcttgagggaacaaagatcggatctcccggcccaaggagtacggaagcgaagcctcccctgcgcgcggcagccaccgtgcgtaacctcccctgaaccgagtagcagccgcctgagcccacccagccctgggcgaggctgcctcagaagccggatttcagcagagtgggtgcaggatctgctttaattctgctcatcttattctcggggaccacaccctgcgcgccgggaggaagggctccaaaaccacagggcggaggcttccgcgcggccccagacttgaccatctatggtcacagaacacaccgaccaaacaggaagtggggtgagagcggagggttccctaccttcccagccccgcgactgccagccgggctggggctgacccaccgcgccctcactgacccccacgccctgcgcccagtctccgcaagtcctcccacaacaatgtccagactaattgccttcccacgtcacaaacggggaaaccgaggtatgcacgcccagagacaggcggagcgtggcctcgatcaccaccgagagctgacggccgcccggattcccgccctcagagaatcctggcccccagtcgttccaagaccctttacggactgcagcttaaaggaaccggcctctgccattgagaccaaactgacagaggaactggtcactcttctgttctttccagagaggagcttagccagggacttctgcccttcctgggcccgggcctcgggggcgattccgggtaggtaaagcggaacgagggcgtggcctctcttgtgagcccgccctccccgtgtcgctcccgccttgagggcggggctctttcccaagtgccctctgtgagagccgggccgctctctccggggcgtggcgaagaggggcggagtcacgagcggggcggtgagacttcctgcccagtcgcgggccagcctagcgcttcagccggcggctcatttccggtgggggcgccgcgcccagtgagggcccggaagtgggtcgcgcggagattgctgggcggttcttgccggaagcggagagcggctgatcgcagtccggaggtgaggcggaactctgaggtgagggtgtgcagcttggtagggattggggtcccttccggggcccatcggcccctggtggtgttaatggcccttctggcctacgcgcgtgtcatgaaccctgcc

SEQ ID NO: 1227 - DNA, 2300 bp, Homo sapien
gggagatgatgaattatttttcccttaaaacataaaagaaatatatttttacttttattttttattttattttattttttttgagatgggagtctcactttgttgctcaggctggagtgcagtggcgtgatcttggctcactgcaatctctgcctcccaggttcaagcagttctcctgcctcagcctcctaaatagctgggactacagcacctgccaccacacccggctaatttttttgtacttttagtagagactaaaaatacaccatggtagccaggctggttttgaactcctaacttcaggtgatccgcctgccttggcctcccagagtgtgggattacaggcatgagccacagcgcctggcctagaaagatattaaactacaggttaacatgagaaagtttttaagtgtcaatagttgaactaaatttgttaacaatctgtatgattataaccaacaaaaccaaatatatgtagaaaacaatattgtagagttgcaaatgccaacactgactgaggaggtgggggaagtagggttagctgtggggagtgagggtatttttttcttttccttttaccaaattttctttactaccactcatttttctttattgctttaaaaattatatatttgtgcacatacatttgatatgtctttctagacatagaggataaggatttacatatccttatcctcacccacaatatacacacattccatgttgttgttaatggaaccatataatttaatcttggggagaagagaaatgataaaagtacttttccaaaactgcttgcaagagaacatctcaaaggctctggttttggctttgaattttctgttaaggatgtttaacatgacgatagcagctcaaaggtctggtatgaaggacaggaacaaggtagctgttgttcttacagccctgaaacatgtatctgatgacatgaagactcacaagaaccctgccctgaaggctcagagtggtccagtacgcagtggccccaaaccattctctgcacctaaaccccaaaccagcccatcccccaaacgagccacaaagaaggagccagctgtacttgaactggagggcaagaagtggagagtggtgagttaaaaatacctagacaggggcaggtatttttattattttatttttttgagatggagtttcactttgtcgcccaggctggagtgcagtggcgcgatttcggcttaccgcaacctccgcctcccggggaaaaggagtaggaacaggaggttaaatggagcttagctagatgagggcagagttctggcttcaattgcaagaacaaaaagtttgggatagcctggttattttttgttcggtgtgtgctttgtgatgagaatcctgggatctctctctaacaggaaaatcaggaaaatgtttccaacctggtgattgaggacacagagctgaaacaggtggcttacatatacaagtgtgtcaacacgacattgcaaatcaagggcaaaattaactccattacagtaggtgagtctttgtcgctgtcccacgcaagccccgtcccagagcccgagaaggctaataccattttacctaccctatccttaaagattcctaaatgtatattactttcctttaaagttacacgttgacacactccctttcttctcctagataactgtaagaaacttggcctggtattcgatgacgtggtgggcattgtggagataatcaacagtaaggatgtcaaagttcaggtaactcgatattttggctccttctttttgtccctgaggaattaattcaaagagacatggtagacccacagatgttgctttggtgggaatctgattctacaaagtctgtaagctgagctgctttggacgtggcagaagaagggttggctcttcaagcaagttcttttcaggacccatcccaacccacccgagtatccagtgtcttgcgcatctgtgagcttttcatgtagttgctgagtcacgtgaaacaggaaaccttttcctgcgacttactgttgtccttcccaaccactgggactcagttctctttgtttactctgcaggtaatgggtaaagtgccaaccatatccatcaacaaaacagatggctgccatgcttacctgagcaagaattccctggattgtgaaatagtcagtgccaaatcttccgagatgaatgtcctcattcctacagaaggcggtgactttgtaagtttcttgatctctttagtatgatgttaaaaacagaagggactgaagatttctggcattgaagaaagctattttatgaacattc

SEQ ID NO: 1228 - DNA, 2300 bp, Homo sapien
agttattgctccagtttaaagaaacctttaaagaaattataaatagttcattaaaggcaggaaacttcattgagcgggctatattcacagaaaaatcctgaaactacttcaatttgtaagtcttaagttaaaataaaatgcttatacaataagcttatttttcttaaaacaaaactgtatactgtactgtataatgctttatgattctgcatttttttttctttgagacagagtttcactcttgttgcccaggctggagtgcagtagctcaatcttggctcactgcaccctctgcctcctgggttcaagtgattctcctgtctcagcctcctgagtagctgggattacaggcacccaccaccatgcccggctaattttttgtatttttagtagagatggggtttcatcatgttggccaggctggtctcaaactcccaacctcaggtgatccacctgcctcagcctcccaaagtgcgcccagtggattctgcattttaatcgacttttcaactaacaacttacctctagtcccaatggcatggaatagaagagattacagaccgtgggtttgtaatcgacttttcttttacaacatattaagggcatttttcatgtcactttatgtaaatttacctcatttttcttttttgagagagacagggtctcactgttgcccagggcaacagcgagatcatagctcagtgcaatggcgagatcatagctcaatgcagccttgaactcctgggctcaagtgatcctcccaccttagcctccccagtagctaggattacaggcacataccaccacccctggctaattaaaaaaaaattttttttttgtagagatggggtcttgctatgctgcctgggctgtactctctttttatttattttttattcttattttttgagacagagttttgctcttgttgcccaggctggagtacaatggtatgatctcagcttaccgcaacctctgcctcccgggttcaagagattctcctgcctcagcctcctgagtagctgggattacaagtatgcgccaccacacccggctaattttgtaattttagtagagacgggatttctccatgttggtcaggctggtctcgaactcgctaccttagatgatctgcccacctcagcctcccaaagtgctgggattacaggagtgagccaccgcgcccggccctatactcattttttataaaactggcctcatattattccattgtatagtggatacactctaatttctttataaattatttaaactattttttgatgttttgttgaaaaaaaacttgagcagggaactgatattatgaaggtggattgagggatgaatgtggcaatagagcataaaatgaattaaagaggagagaatggaaaaggaaatggttgatgagagacccttgaaataatccagctgagattaggccagttagtggccatgggtttccccctcactcttatgcatccaacatatgctttcgtccgtcttgaagtcccgacatttctagaaaacacagttgtctttctcctctctaccttagctcatctcagtccttctgaatttcatctttgcttgttgaaatcctacctctccttcaatatccagaacaaaccccacaccctgccatgattggtcctggctggaaaccgtccctccttctttcttccttcctctgtgcatgtttcttgcaaaggcagtacagggcagtggtgaagagcaacgactttggaaccaccaatttgctatctctgtgaccttgggcaccttactcagtgccaattcgcagtgcctcagtgtcctcacctgtcagggggagaagtgcatacagcattgttatgaagagtgaattagttaaaggttgtaagaatagtgcctgatagcatctgatcagcactgaatatatgttagcaattattttgattcaccgcagagggcggtctacgagagcgcagagccccactcggccagcggggtctggcgggggacctgtcgcgctgaaagctccagggtagggccgacgcccatcaggctgggcatccgttcgggatgcgcaggttgcgatctgcaaccggcggcgccacgcccaggcgggcggagcgcggttcccggagtctcgcgcccgcggtcatgtgacacagcgaagatggcgtcgcccggctgcctgtggctcttggctgtggctctcctgccatggacctgcgcttctcgggcgctgcagcatctggacccgccggcgccgctgccgttggtgatctggcatgggatgggtgagtgagtgagaaatt

SEQ ID NO: 1229 - DNA, 2300 bp, Homo sapien
cagttttcttttttggtgaactgcctttttacctacttttctttctctctctctttttttttttttttttagtgtccctcaggctagaatgcagtgatgccaccttgggtcactgcaccacagctttgatttccagagctcaagcgatcctcccacctcagcctcctaagtagctgggactagaggcgcatgccaccacgcctggctaattttgttttcattttttgtagacacaagatctcattatgttgcccaggctggtctcgaactcctgaactcaagcaatcctccggccttgggctcccaagtactgagattacaggcatgagccaaaacgtccagctttttaatttacttttctattgggttgtttgcctttttcgattttgggaactatttgtttgtttgtttgtttgttttttgagacggagtcttgctctgtcacccaggctggaatgcagtggcgcgatctcggctcactgcaacccctgcctctcaggttcacgccattctcctgcctcagcctcccgagtagctgggactacaggcgcccgccaccacgcccggctaattttttgtatttttagtagagacagggtttcaccgtgttagccaggatagtcctgatctcctgacctcgtgatctgcccgcctcggcctcccaaagtgctgggattacaggcgtgagccacctcgcccagcccgggaactgttttggatactaatcaaaacaatggttatggctgggcgcggtggctcacgcctgtaatcccagcactttggaaggccaaggcgggcggatcacttgaggccaggagttcgagatcagcctggccaacacagtgaaaccccgcctctactaaaaatacaaacattagccaggcatggtggcggacgcttatagtgccagctactttgggaggctgaagcacgagaatcacttaaacctgagaggcagaggttgcagtgagcctagatcgtgccactgcactccaggctgggtgacagagtgagaccctgtctcaaaaaacaacaacaataaacaatggttatatatatggggaatatcatttagtctgtggcttgtctttgtgtgctttttcaacttgttatacggaagtaacacattttaatacagtcaaatctaaatattttcccttatggtttgtgcttttccggtcttattaagaaattcttagccgggcgcggtggctcacgcctctaatcccagcactttgggaggctgaggcgggcggatcacctgaggtcaggagttcgagaccagcctgaccaacatggagaaaccccatctctactaaaaatacaaaattagccaggtatggtggcgcatgcatgtaatcccagctgctccggaagctgaggcaggagaatgtttgaaccaaggaggcggaggttgcggtgagctgagatagcactgttgcactccagcctgggcaacaagggtgagactccgtctaaaaaaaaaaaaaaaaattcttccctatttttgacattataaagctatttttattttctgaaaaatgtttgcaggtctttaatccatctcggccttatttttggaaatggtttgaggtagaaatctaatcatttatttcccttttggaaaaaatgtctcatcgccatttattgaagagtctgtcctttcgcccactgacttgtaatgccgtctgtatcataaaccaagttcccttgatgttactcttcatttcggcctcacaatctttgcttattttccttctaccagggatgcttttcgctatgttcctttcagggctaccttcctcttgtcccttcagatcgcagttcaaatgtcatccccctcaaatctagattgctctacaggcatttctggctccgtgatcccatgacctcaaaggggtctaggtgggcatagcctctagccagttgttgctaggctgttgtcaggactggcgatgcgtaggccactgagagcacccggagtccgagtgacggaatcaggcgggcgcccgcgtcgctaaggagtgcgtcacagtgcgcgggcggccgggggcagggccagggctgagtcacgtggcttggttgcctacgcgctggtgggccgtgggaagatggcggacggaaagggagacgccgccgctgtcgccggggctggggctgaggctccggcggtagcgggagccggagatggagtcgagactgagtccatggttcggggtcatcgccccgtatctccagcgccgggagcctcgggactgcggccgtgtctgtggcagctggagacagagctgagggagcaa

SEQ ID NO: 1230 - DNA, 2300 bp, Homo sapien
acctgtgaataggcattgacctccaagctgggggaggagggggaagctaggcaaagaacaagagtaatccaattatgtgccaaagctttgtggttcaacagcttggtgtgttggtgacattgataagactactatagctggagttgaaagaacaaatggcagaggaagagaagacttggtaggtaagcagggaccaggcattttagtgccctgttagccatgttacagattttggattttgtttgaaagacaatgaagaacctataagaatttttcaaaggcggactgggtgctatttctcatgcctgtaatcccagcactttaggagggcaaggtaggaggatcacctgagatcaggagttcgagaccaatctggccaatatggtgaaaccccatttctactaaaaatgcagagatcagccaggcgtggcacgtgcctgtagtcccagccactcaggaggctgaggcaggagaatcgcttgaacccaggaggcagaggttgcaatgagctgagatcgcaccactgcactccagcctgggcaacagagcgagaccctgtctcaaaaaaaaaaaaaaaaagaatttaccaaaggcttgaaagtaggcattgcctaagtcagtaagtcctaatagggcatgatatggaagactactgagtggaagtgactgacagatgagtgggtggatgccactattaaaggtaaactgaaggccgagtgtggtggttcacgcctgtaatcccagcactttgggaggcctaggcgggtggatcacgaggtcaggagttcgagaccagcctaaccaacatggtaaagccccgtctctactaaaaataaaaaaattagccaggcgtggtggcacatgcctgtaatcccagctactcaggaggctgagccaggagaatcgcttgaaccccagaggcagaggttgcagtgagccaagattgcgccactgcactccagcctgggagacagggcgagaccaaaaccccgcctcaaaaaaaaaaaaaaaaaaaaaaaaaaaaaaaaaaaaaagccctgtttatatcctacctccttgctgggtgcagtggctcatgcctgtaatctctgcactttgggaggccagggcaggtggatcacttgaggtcaggcattctagaccagcctggccaaaatggtgaaaccccatctctactaaaaatacaaaaaattagccaggcgtggtggcgggcgcctgtaatcccagctactcaggaggctgaggcaggagaatcgcttgaacctaggaggcataggttgcagtgagctgagatcgcaccactgcactccagcctgggcgacagagtgacacgccagctcaaaaaaataaaaataaaaaatcccatctcctcacatttccattcaacctcaatacaactcagttttttttattatgtgaaaacagctgcaacagctgctgtccatttgaattgttggaaatgtagatctacactaaccaagagagaagccactagccacaggtggctatttaacttttttttttttttttttagatggagtctcgttctgtcaccaaggctggagcacaacatcagctcactgcaacctctgcctcccaggttcaagtgattctcctgcttcagcctcccaagtagctgggactacaggtgtgcaccaccacgtcaggctaatttttgtatttttagtagagacaagatttcaccatgttggccaggctggtctcgaactcctgggctcaagtgatccacctgcctcagcctcccaaagtgctgggattacaggcgtgagccaccatgcccagccaaatttagttaaaatgtaaaatgcaatctctgctgcactattcacatttcaggtaactagtggttaccatattggacatggcagataaagaacattttcattattgcaaaaagttgtactggacagcactatgctagagccagaactagccaaagatcagacaaagcaatatgaatgaactgaaaacccaggccggtgcctggttggttttgagtaagattcattggttgggtgagtgggaagcaagctgacctttggaacagtgacatcacaaagcacagctcacaatggctctggaatacctaggcctccagactactccccctaactcatatttagattcctgaagcttctgcacatgtagttcctagagctgctgcttattaaaatgtcaacatcttcatcttctagctgggacaacctcttagagtctctctctctcagcacagtatggaattggatacaagcaagttttttgggagagactagtgcacc

SEQ ID NO: 1231 - DNA, 2300 bp, Homo sapien
attttactgatgaggatctgatgcacagattaaagaacgtgctaatacatggtgcggccgtggctggcaatcaagcagcttgactctaaacctgtgcccttagccacaaagcttgggtggtagaagctcctgtgaggctttggactcacagacagctgaagtcaagagtgaagagggcatagcaatgatggcctgagggagagaaaattttgaaaaagtgtttaccccttatatatttaagttggtatctaactggttccatcataaattcaaatagttgcaatggatgtaaattcttgcaaattgtaaatactgacattttaagataaaactgttaaatcactctttataatgtatccaagagaatctacataacaactgaataaccaccattatgcattaaaacatacactaatgagctcttcaacattgttcttttattatctctaacatatttagattgtactctaacaaaaaatgttattcaaatatagtactttgatgtttgaacaaccttttcttgatcacttcttcgcaataaaaatatgacatatgtagtaaaccttaaaaaatttcgtgtaactttatggctctacgctggaattcttctgaagtgagtaatcatcacaatcatctttagtatataatggatcaaaatgacacgattgcaaatattgataacacacagttataaaaggtgaaattctattgggaacacatctcttagtgagatagatggggctgacccaccaattaattcatttatctggatgaatagttcctactggtagattaacagggttcattttcaattctgttgttttcacagatacaagtgctgagaaatggttttacataaataggtgagaatgctagtagttttgttgtaagcatgtcaatcaatcgtttggtttctttccgagttgcatgccaaaaaccaaatagtgttccttcatcagctgacaattcatgggccaccattaattttgttgaaagcaaagaactggaaaccatctgacttgaaaagaatttgttatcctgttattagagtcattcactttctctagtgacttttaattatactaattactctcagaggcatttaggcagggttgagaaattcaagatattaatttcaacacatctttagcatcacaatatcacagtaatttaaatatattttagttgtagctatttagctcactttattgtaaataataattatgctaattagcaacgatagtatgtttaaccaattaatcatcagattaactttcggtcagaataatggacttcaatttttaagtcaaagcaatgtacaggcgtcccagtcaccatatttcacttctgaattccaagagagaaatggcgttgcgccttactgacgcaaatatgtacctagataaagtaagacgctttcatttcaggtatgtctaacccacgctatccttgctttgttccagggcactctcgcagggaaaacgccgcctctgactacacttggggtggttaagacgagatcttcaaatgaaaattctcaacgctaccgtccactctctcatacgcttgaattccgaacaccccaatactggccaaaagactccatttctcatgcttggtcttgcttttgaggtagctctaactcagaggcacgatttttagagcctgggaagtcggctgctgttcagtccttcctagcctcctcaggcgggagccgcggcccactcagtcagttgcggcccactcagtcagttccggccccagccccgactacctgtcgccttgttgggggaaggaaggcagataccgcagcccagtcagggtaagccgctgacccagaggatggaactgcggctctggagattagaaagaggaggacttcgccgcgttcactagcccaggaggaaagccagaaccctaggccggaacccagcgtcaagacgtgggggaagaatgttgatgcaacacagctcagccgggcccggaactcggcgtttgggtccccgccctctttgggccggaagtgaggaaggtggggctggggcttttcctgtagaaactaggagggactagggagagtctgcaaggggaagagtgtgtctgtgacactgccagcagcgcgcagagggagggatgggggcgggtatcggcgtaggggccctcggaaagaacggatattgctgtgacaccgcggggacgctctgaagggacgagtgtcggtgtggcaccggtgcacgctgaaggagccggcggaaccgggtggccatggggatgtgggcatcgctggacgctttgtggga

SEQ ID NO: 1232 - DNA, 2300 bp, Homo sapien
tctccttaaaaaaaaaaaaaaaaaaaaaaaaggagaaagatcaactatctcattatactaaattataaaaggtaagggtaatttcagtccaggaaatgtaatacagagaatggataccaaacaaaataatgggccactacaacatgctttccctatatattgttgtgtgccaataaaagctgaggggagatcgagcacggtggctcatgcctgtaatcccagccctttgggaggtggaggcggcaagatgacttgagtccaggaactccagaccaccccgggcaacatctctacaaaaaaatcaaacaattagccaggcacagtgatccgcacctgtggtcctagcaactcagaaggctgaggtggaggtggaggggtcgtttgagcccacgagttcgaggctgccttgagctatgatgatgctactgtgctccagtctgggtggcagagtgagcccctgtctctaaatacaataaatattctatcctggccaagatggtgaaaccccgtctctactaaaaatactaaaattagctgggcgtggtggcacgtgcctgtaatcctagctactcgggatgctgaggcaggagaatcatttgaacatccctccctctgcgcgctgctggcagtgtcacagacacactcttccccttgcagactctccctcgtccctcctagtttcttgcagtgagccgagataacgccactgtactccagcctggtgacagagctagactctaaaattaaataaataaataaagattaaaaataaataaataaaagttcagatctctaaaccatggttatctcaggtaaattgttaactttcactttttattttaccattttaatatttaaactaaaataatgttgattttatgaaaaacgagaaatatatttcatttaatttcatttatttatttattttgagattgagtttcactcttgtcgcccaggctggagtgcagtggcacaatctcagctcactgcaacctccgcctactgggttcaaatgattctcctgcctcagcctcccaagtagctgggactacaggtgcgcgccaccacacccggctaatttttctatttttagtagagacgggttttcgccacgttggtcaggctggtctcgaactcctgaccccaggtgatccgcccgcctcggcctcccaaagtgctgggattacaggcatgagacaccacgccgggcccgataagttttttgtttgtttgtttgttttttcaagcagaaacaatatatgcactttaaggagaaacaagagtgcaagttcttggaaggactgcaaaatcctatggttaggcatgattacataaatgtcatgaggaagttgggtgtctaaatccttttaaaggcttattccaaagataaaggaggccaagtctgggcccaaggatcccaaggaagctgcagggagggcacaagagcccaagccttcctccaggccctaaagggattgggtcccatgataacgttacagaaaacttccttgacgcaccaagaccctcctcaaagccacagtccgccatcgggccaagttacgagactcagcagggaccacaaagacgagactggcgcggggaccgaagcaatcaagagtctcagggtcgaagccaaggctactccagggctggccgggtatgggggtcaggttggaccctgtctaggctcacctgccgctgtgctaggaaggtctcccaaagatacactgtccaggaaaagagcagcacggccccgaagatacgcttctcggccggcatctcccacaaagcgtccagcgatgcccacatccccatggccacccggttccgccggctccttcagcgtgcaccggtgccacaccgacactcgtcccttcagagcgtccccgcggtgtcacagcaatatccgttctttccgagggcccctacgccgatacccgcccccatccctccctctgcgcgctgctggcagtgtcacagacacactcttccccttgcagactctccctagtccctcctagtttctacaggaaaagccccagccccaccttcctcacttccggcccaaagagggcggggacccaaacgccgagttccgggcccggctgagctgtgttgcatcaacattcttcccccacgtcttgacgctgggttccggcctagggttctggctttcctcctgggctagtgaacgcggcgaagtcctcctctttctaatctccagagccgcagttccatcctctgggtcagcggcttaccctgactgggctgcggtatctgccttccttcccccaacaagg

SEQ ID NO: 1233 - DNA, 2300 bp, Homo sapien
ctgtattggcataacattagttacaataacaaatcccagaatatcacaggcttatttgcaatggtttatttctcaatcacgtaatagtccagtgtgagtatttttagttatcaggtgactttcttccatgtggtaagccaagaatccaggctctttatcttagggatttgtctgtatgatttaaggtacctttcatatagtgcctgtgtaataaaaaaggaattgttttgtttctcatttacttctctcaaaagtaaacttttttgaaggcagggatgatatttcagaccttatgttatccatagaatcaagcatattgcttgggatgtagtaagtaagtgctcagcaaatacttgttgatttgtttgccagtagttcataaaaactggatttttgttttttcttttgtttagatcactcagtccctggtgtttctgctgttggctacacttttcagtgcattgactggtttgccatggagtctttataatacttttgtgatagaagaaaaacatggcttcaatcaacaggtataataaagaatacaaatgttctcttttaaatgtgaaaaacttctgtgcttttgtcctgtactgtttataatttaaacataatttactatttcagagtatgaattgagaaaaaagggaactacagatatggtaaagatcatagctgaaagtcttgggggccgcggtggctctggccagttgccctggcactcggggaggcaaggctacatgttcgaggccaacctggtcaacactgattttaaaaaaaaaatacttaaggccaggcccagtggctcatgcctgtaatcccagcactttgggaggctgaggcgggtggatcccaaggtcaggagatcgaggccatcctggctaacaccgtgaaacccgtctctactgaaaatacaaaaaattagccgggcttggtggtgggcgcctgtagtcccagctactcgagaggctgaggcaggagaatggcgtgaacccgggaggcagagcttgcagtgagctgagatctcgccactgcactccagcctgggtgacagcaagactccgtctcaaaaaaaaaaaaaaaaaaaaaaaagaaagaaaaaaagtcttgactgggtacagtggctcacgcctgtaatcccaacactttgggaggctaaggcgggaggatcacttgagttcaggagttcaagaccagcttggatagtatagtgagacttcatctctacaaaaaaattctaaaagccagttgtggtggcatgcacctgaagtcccagctacttgggaggctaaagcaggaggattgcttgagcccaggaggttgaggctacggtgagccatcattgtgccactgtactccaacctgggcaacagagccagacctgtctcttaaaaaaaaaaaagaaatttatgttataaactcctttagcactaatatctattgtttttcagctactaatcatttgtttgtttgcgacagggtctcgttctgtcacctaggctggagtgcagtggcaggatcatggctcactgtagccacgaccttccagattcaagcaatcctcccacctcagcctgcctagtatctgggactatagatgaattatactacactgggttaatttttttattattatttttagtagtgacagggtctcactatgttgcccaggctggcctggaactactgggctcaagcaatcctcccatctaggccttccaaagtgctggaattacagttgtgagccactgcactcgtcctcagttaataaggtttaaatgaattttcagctgtaaaatgcaagacatttacccattgtcttaagctgcctaatgtcatataatatagtttcactgcatgttaattttaaaaattgctttaataatgtatcctttgtatttatttatcagttattttaaaaagcagaaccagtttctcagtttcttgtggtaatgttttctttttgcagactttggggttcttcatgaaagatgcaatcaagaaatttgttgtgactcagtgtattttgttgcctgtgtcttcacttctactttacattattaaaattgggggtgactatttttttatttatgcctggctgttcacattagttgtgtctctggtgagtaaaatctttatttcgttttcttttgcaaaagttccttggtgagattactgtaatcttcattggcatgtaaacagttcttaagaagcagctgaaatataaataggtgcttatatacatttcccccttggtttctgcttttgattgtagacacaggagtattgactgaccataa

SEQ ID NO: 1234 - DNA, 2300 bp, Homo sapien
gagaaacttcatggaaagcccacaaagagataaaggagagaactgtccaagcaactccagctgttccggccccagcggttgaaggcttcccagtactgacatcagacatgtgagtgaagaagccttctaggtgacatcaggcccagccaccatctgactatgaccttataacagaccccaggccagaccgaaccagcagagtcactctcaaattcctaatccaaagaaattgtcattttaagctgctgaatgttagggtgatttgttatggtgcaacaggtaattaatacatcaatgtgtgctgtccagactgtgaaactcatcctctttccataatttccacacacaaaaagaaaacttactcacacaaggcctttcttgtggttagcccacaaaagatggagagataagtgatgtgaaacaaacaacttaaaattgaatttggacatcccagttctaaaaatcctttataggtttaccccacccaccccaagcaatgcccaccatccctctcttacatcctcctcctcttgctctcatcttccaacaaacttcaaattcttcttcactctgttaggcagagcaattacattctctcaagctctttctcccaaactcagctccaggacaacctttcaaaatccagagccctttgctaacctgcccaatggagttggacttttctagcttcaactaggttcatcattttagctgatctgcctgtggccagcttccccacattggatgccaacctagtaaaacagtcatccataaatcataaggaaagctaaaatgtatcaagcacctactatgtgctggttcgaggttaaatgcctcgcatgagtcatctcattcaatttccacaaaaaccctttaagataaggacaatttgctgggcacggtggctcatgcctgtaatcccaacactttgggaggctgaggcaggcagatcacctgaagtcaggagttcaagagcagtctggccaacatggcgaaaccccatctctactaaaaatataaaaattagccaggcattgtggctcatgcctgtaattccagctactcgagaggctgaggcaggggaatcatttgaacccgcgaggcgaggttgcagttagctgacatcgtgccactgcactccagagccttttaagactctgtcttaaaaaaaaaatatatatatatatatatatggactattagtatccccattttacagatgaggaaaatgagacttcatagagtttggggtgcctgtggtcatatctataattgtgaaaaagtcagattccaaagcattttaccaatattgcctaagtgagtgggagggaagggaaggctctctggagtcgggctatgctggacagcggggttcggaaactctggtgaataaagtggtagttgtttctatgaacatggagtgagaaggcccaatcctaaacacaccagtgcttaaggcagctgcagagaattaaaggcaatagaaaaaggggagctggatggcaggagcttggatggggaagacttcaagggcaggtgaagatgccaacagcttcctgcctggaggaccgaagaagggttgggcttcactgcagacctccaggagacagatttgcttgttgggacagagtagggaggtgaaagcgaggtgaggaagttcgggggtgggggaggtgcacacagctccactaaagagctggaagaggccgatggagtattcatgagacggctgatccaggaaggactgtggcatattaatatggaaaaggcctgtttgtttgtgcttggagaggaaggagccagaggagaggggagcaaggtgggcgggagctggggagagcctgcagcaagatctgcagagcccgaggtgctctcggcctgggccctggagaggacgtagggtaagtgatggggcacaggctgtgcgtcagggggaaggtgctggggcctgaaggtcccgaggggaacctcagacggccttatgccttctcacaaagaaactggaccatcatctccgacccgcaccccggtcgcccctcgaggacagagggtgggcgcaggaggctggaccgagcggggcggagctggatgcctggcgccggcctccctcccggcaaccccgccggtcctctcaggtgacagctcacgccggcccccgccccgccccccgcatattcaggagccccagcccaccctgcccgcgaacagccagcgctggaggagcgccgggagactctgccgtcggtgcgtgcgcggacacgcacccgtcccccttggtctcgccgccagccatggccgcc

SEQ ID NO: 1235 - DNA, 2300 bp, Homo sapien
ccaacatgatgaaacctcatctctactaaaaagacaaaaattagccgggagtggtggcgtacgcctgtaatcccagctactccagaggttggggcaggagaatcgtttgaatccaggaggcggaggttgcagtgagctgagattgcgccactgcactccagcctgggtgacagggcaagactccatctcaaaaaaaaaattaaaaaatgtgacattaacattcatccttgaggtggggtctctgttccctccccttgatcatgggcagacctttgcaattgcctcaacagtaagaatgtggtgaaggtgccactgcatgacttccaaggacgggtcctgagtggcaattctcttcagtctggtgctctcctactccctctgagctgctatagaggatgttcagctaccttgaagctgccatgttggagaaacttcatggaaagcccacaaagagataaaggagagaactgtccaagcaactccagctgttccggccccagcggttgaaggcttcccagtactgacatcagacatgtgagtgaagaagccttctaggtgacatcaggcccagccaccatctgactatgaccttataacagaccccaggccagaccgaaccagcagagtcactctcaaattcctaatccaaagaaattgtcattttaagctgctgaatgttagggtgatttgttatggtgcaacaggtaattaatacatcaatgtgtgctgtccagactgtgaaactcatcctctttccataatttccacacacaaaaagaaaacttactcacacaaggcctttcttgtggttagcccacaaaagatggagagataagtgatgtgaaacaaacaacttaaaattgaatttggacatcccagttctaaaaatcctttataggtttaccccacccaccccaagcaatgcccaccatccctctcttacatcctcctcctcttgctctcatcttccaacaaacttcaaattcttcttcactctgttaggcagagcaattacattctctcaagctctttctcccaaactcagctccaggacaacctttcaaaatccagagccctttgctaacctgcccaatggagttggacttttctagcttcaactaggttcatcattttagctgatctgcctgtggccagcttccccacattggatgccaacctagtaaaacagtcatccataaatcataaggaaagctaaaatgtatcaagcacctactatgtgctggttcgaggttaaatgcctcgcatgagtcatctcattcaatttccacaaaaaccctttaagataaggacaatttgctgggcacggtggctcatgcctgtaatcccaacactttgggaggctgaggcaggcagatcacctgaagtcaggagttcaagagcagtctggccaacatggcgaaaccccatctctactaaaaatataaaaattagccaggcattgtggctcatgcctgtaattccagctactcgagaggctgaggcaggggaatcatttgaacccgcgaggcgaggttgcagttagctgacatcgtgccactgcactccagagccttttaagactctgtcttaaaaaaaaaatatatatatatatatatatggactattagtatccccattttacagatgaggaaaatgagacttcatagagtttggggtgcctgtggtcatatctataattgtgaaaaagtcagattccaaagcattttaccaatattgcctaagtgagtgggagggaagggaaggctctctggagtcgggctatgctggacagcggggttcggaaactctggtgaataaagtggtagttgtttctatgaacatggagtgagaaggcccaatcctaaacacaccagtgcttaaggcagctgcagagaattaaaggcaatagaaaaaggggagctggatggcaggagcttggatggggaagacttcaagggcaggtgaagatgccaacagcttcctgcctggaggaccgaagaagggttgggcttcactgcagacctccaggagacagatttgcttgttgggacagagtagggaggtgaaagcgaggtgaggaagttcgggggtgggggaggtgcacacagctccactaaagagctggaagaggccgatggagtattcatgagacggctgatccaggaaggactgtggcatattaatatggaaaaggcctgtttgtttgtgcttggagaggaaggagccagaggagaggggagcaaggtgggcgggagctggggagagcctgcagcaagatctgcagagcccgaggtgctctc

SEQ ID NO: 1236 - DNA, 2300 bp, Homo sapien
aaaagctgaagatttaaacttaagcattcttgccccagagtctgtgtgcttaaccacaaagccatgagatctctcactaggtgggaacaatttgagaaacactgccataggcaatggagagccactaaaggattttttaagcaggaagtgtgagtccatcagaattggcatttaaaagctccctctagagagcacggtgaaggattaatttaaccagatttagactaaggcaggaaggctatttgcagagtgaggagatgaagatggggagggcttgaactaaggtacaatcaccactcaccgcaattaactgggttttgttgttgttgttgttgtttgagacagggtaacggggtacattgggggttggaggggtggttcttactgtgttgcccaggctggattccaactcctgggctcaagtgatgctctggctctggcatcctgagtagctaggactacaggtatgtgccaccacacccagtaactagttaatcttgactgtctatttcaactgaaaaatggttatggtaatacctacttggatgggttttctgaggaaaaacaccccaatgaacttgtgtgtttttaaaagtcaagtcccctaggcatggctagaagggaagaggcttagccagaaaatttaattgttgtgattaataaagtaatagaaatgtttagttttcctctgatgagatgaaagctttgaggggatcctggtcttgggagaaagtaaagaaatggaggagagggtttcaccagagtttagataactcttagcatctgcttactatcttccctgattaattatttccatggcagccagagtgaccttttaaaaccacaaatcggatcatgctgtttccctctcccctagtacagtgcctgatacttagaaatttctcagtaacatcgtgctcagtgaatgaatgaatgaatgagtgaatgaaaacacaagccagatggcaggtggatccctaaggaaaaggacagccaatgagaaattatctgtagcaacggtggctttggatgatgatgtttaataatcatttttaaggagttgcctgttgtgtgctatgctttaatcactgtcccccacccttcccaaataacgttcagtaaaagtctgccacaaaaaactcgctgttttgtgagaatttaagaaatggaagaagaaacaaactgtctgggcaccaggccaaacaatatccaaaaaggcaggagtcacagaggagagctaatgagtattagtgggagcaggtattccaagtgagaggtgaccagagtcctctgaaaatgtggggagggggtgacgttcctatatcctgggttaggggcttggactcttatatttggctgttggaaaaaacaagctggaggactttggggtatcaacaaccctcaggttacataaggatgatcatagggtcgttgtgaggattatgttgggatagttcatgcaaagcgcttaacacagtgcctagcgcatagtaagagctcagtaaatgttagttgttgtcttccttcactttcttccattccctccactccctttctaccaggctccattcattctcttccaaggacacgcagggggcgtgcccaccccttccctccgcccccacccaaggcccgccccccgcttctccacggattggttcccgagaggcggagctgaaggaagagcccagtgcggcgcggtgggggcggggcgcatgcgcgagctgggcagggtggaggtggggaggaagagctgccggaagtaggcggtggaggtggtagcggagctgacggcagctgccagggaaaccgaggcgcgggacgcaaggccagcagacaggccggccagagggtcatctgcgtccggcacccaggaggctcgtggtccgcctttgcctgggctgagggtctctggccccgcagcctctcttggaggcgggcctgtccctaagcccgccaaggggcgccgcgccgaggggctgcggagtgggggacggacgcccccgacccgggaaggggcgtccggcggggccggaggagagggctctccccgctcaggaggtgcccctgggcgggggaccgggagtcctcaaccccggactgaggcaggggtctctgggggcgaggagggcgcgtcgccctctgcccccgccggcaccctggccatgacaggcaagtcggtgaaggacgtggatcggtaccaggctgtcctggccaacctgctgctggaggaggataacaagttttgtgcagattgccagtctaaaggtagcgcatcccacctggcgggccaggggtcc

SEQ ID NO: 1237 - DNA, 2300 bp, Homo sapien
ggaagaggcttagccagaaaatttaattgttgtgattaataaagtaatagaaatgtttagttttcctctgatgagatgaaagctttgaggggatcctggtcttgggagaaagtaaagaaatggaggagagggtttcaccagagtttagataactcttagcatctgcttactatcttccctgattaattatttccatggcagccagagtgaccttttaaaaccacaaatcggatcatgctgtttccctctcccctagtacagtgcctgatacttagaaatttctcagtaacatcgtgctcagtgaatgaatgaatgaatgagtgaatgaaaacacaagccagatggcaggtggatccctaaggaaaaggacagccaatgagaaattatctgtagcaacggtggctttggatgatgatgtttaataatcatttttaaggagttgcctgttgtgtgctatgctttaatcactgtcccccacccttcccaaataacgttcagtaaaagtctgccacaaaaaactcgctgttttgtgagaatttaagaaatggaagaagaaacaaactgtctgggcaccaggccaaacaatatccaaaaaggcaggagtcacagaggagagctaatgagtattagtgggagcaggtattccaagtgagaggtgaccagagtcctctgaaaatgtggggagggggtgacgttcctatatcctgggttaggggcttggactcttatatttggctgttggaaaaaacaagctggaggactttggggtatcaacaaccctcaggttacataaggatgatcatagggtcgttgtgaggattatgttgggatagttcatgcaaagcgcttaacacagtgcctagcgcatagtaagagctcagtaaatgttagttgttgtcttccttcactttcttccattccctccactccctttctaccaggctccattcattctcttccaaggacacgcagggggcgtgcccaccccttccctccgcccccacccaaggcccgccccccgcttctccacggattggttcccgagaggcggagctgaaggaagagcccagtgcggcgcggtgggggcggggcgcatgcgcgagctgggcagggtggaggtggggaggaagagctgccggaagtaggcggtggaggtggtagcggagctgacggcagctgccagggaaaccgaggcgcgggacgcaaggccagcagacaggccggccagagggtcatctgcgtccggcacccaggaggctcgtggtccgcctttgcctgggctgagggtctctggccccgcagcctctcttggaggcgggcctgtccctaagcccgccaaggggcgccgcgccgaggggctgcggagtgggggacggacgcccccgacccgggaaggggcgtccggcggggccggaggagagggctctccccgctcaggaggtgcccctgggcgggggaccgggagtcctcaaccccggactgaggcaggggtctctgggggcgaggagggcgcgtcgccctctgcccccgccggcaccctggccatgacaggcaagtcggtgaaggacgtggatcggtaccaggctgtcctggccaacctgctgctggaggaggataacaagttttgtgcagattgccagtctaaaggtagcgcatcccacctggcgggccaggggtccagccgcgccggggtggtgggggtgggctgcgtgaagaggcggtttctgaagcttaggccgcccaactcggcttataagtggtaacgcgtgctgcgcttgcagtgagcctactgggctttctgcagctgggggattggtatgggtagagcttgcgagggcgagtctgtgtgtgtcggggagggtggaggtgatggtgcgggtggaagttgcctggcgtgttcaggtgagaatgtctgtatttgagggctctgaatgagttctgggccggctgtccagagagagctcccagcatgtcacttgcaaagctggggatgaactgcattgcgtgcgtgcgtgcgtgcgtgtgtgtgtgtgtgtgtgtgtgtgtgtgagagagagagagagagaatgacgaggaggaggaggagggaagtgagatggcggaaaggaaaactgcttaaatgatttttaaaggtggtgatttttgcttcctgctatttggttagcaactcctgtcattttgcagccttgctaagatctgacaagagtgcttaggtgactttattcttctggatgtgtgcagtgggaaactgccttatgcagtgacacagtgcggatttctaggcagtgtagccctggctt

SEQ ID NO: 1238 - DNA, 2300 bp, Homo sapien
tttaaactaaagaaaagctgacacatggaggaatgagcagagtcaataaacaggtggttatggtaaaaattatttcacttatgttctagcagaaatgtctgataatctaatattgtagtttaggccttgaatgttgtaatttgtactttattgccctgttcctgactttcacagggccgcgatgggcctcttggaacattggtgtgttcatctgcattcgatgtgctggaatccacaggaatctgggggtgcacatatccagggtaaagtcagttaacctcgaccagtggactcaagaacagattcaggtacttagcccaagagtgagtcagctgcttccatatatctatgtaaaaggaattccagatgaatttcagtcaaacctggcacaaaggtgaagataaaggaaaatttagttgttaaacacttaacatcagattcttgtaccctaacagaaatttttattctttctatttaagatacaagttattctacctatattttacctccttaaaaacagaaatagtctacggtctaggattccatgggcccacgaaagtattaagagggatctttgggtgattttctaagactcttagcatttgcaggtctaaaatttatagtttcaaatattcacttttggtcgggcacggtggctcatgcctgtaatcccagcactttgtaaggccgaggtgggtggatctcttgagtctaggagttcaagaccagcctgggcaacagagtgagacacctgtctctacaaaataaagaattaaaaaattagctgggcctggtggtacgtacctgtaatcccagcagtttgggaagctgaggtgggaggattgcttgagcccagaagttgaagctgcggttagtcatgatcatgccattgcactctagcctgagcaatagagtgagaccctgtctcaaaaaaataaataaataaaaattcactttttaaaaaaacctccaaatcatagacttatgggaaaattttattactaaaatgcatacatgaatcttttttttaagacagagaaaatattttaatggtacataatattaaaatgtatccatttttgtaaactcatcatttctgatatttttagacacatacaaatgtggaattagataacatttaaaatttcaaaaattttaaataaatttaaacataattaaccttaaaagtatattaaataggacaatgtgtatattagatttattgttatcatctttaaaaagctgtaacagctggaatgcatacatgaatcttgcatgctgttagcttggtgggcttggagtgagactcctaagttaatgagtctggctggcctaagagctgtaccttgatatagcttcattattttttattctcttcctacattgaaacgctttaatttcaattttttctttcttgggagtaaaagggaagccccccgccccccaaatccagttgctaaagttggtaatggaaatcagaggttacgcttaaccagaaaatggctttagaaattgctttagattgtatttatagatgtattaaaggtctaaaaaggtgagttacatttttcagttacacttcactctgttttatgaaggaaattatatgccatggagatagtcgggaatttggagatttaaaaagctcttgggatttatccctcacaagtgttaaggagtctacttaaaagcctaatgggaaacacatttattggaattgattaatagtataaactcagaatgataacactgatcattgcctgccaagtagacattttaattggtagctgtgtatctaagagtttcaaatgagatcttgatttattactgaattgaatgtatcttggtacacaaatatttcagtaaaaggaacctatggagtgggggaaagacagcttggggcaaatgattgggaaatcctagtaaggtagagggaatcatgaattggaaatcagaatacacaagtttaaatgttggttctgacactctctaggttggttcttcaattgtacagtagtggaattgggtgagaagtttttcagttctttcttgatctgacgttccatgtttctacattctctttggtcacagtgcatgcaagagatgggaaatggaaaggcaaaccgactttatgaagcctatcttcctgagacctttcggcgacctcagatagacccgtatcttttctggagcaacttagaaggctgagtggtattttgatgcttggggagagtcagacaagactccagtcctgtaatgtgactgggtcatctctatgtggattagtcagtgtccttgct

SEQ ID NO: 1239 - DNA, 2300 bp, Homo sapien
agcgattcttttgcctcagcctcctgagtagctgggattacagacacacaccaccacacccaactaatttttgtatttttagtagagatgaggtttcgccatgttgaccacgctggtctcgaactcctgagctcaggtgatccacccgccttggcctcctaaagtgctgggattacaggtgtgagccaccatgtccggccgaaaaagttgaaattttgattgggatgcatcacagtttatgtgaactggaggaagagtgacatacttagaatgttctatttcaactcgtgaatgtgttgtatcactattctcaccatttaaacaaaaaatttggagttttatttataatttcctgcataattcttgtttattcttagctgtatttttctgatattttattatgaaaacatatacatatacagaaaaattgaaagaattttacattacggcatccctataccactacttagattctaccattaacattttattgtatttcatgctgtatttttgttgagtagcagataggaacatagactgcctgtgttcaccacttgtaagccacatgatcttggcaagttattcaacttctctaaatctcagttttcttatctgtaaagtgggaataataatagtacttacttccagtggtttctgtgatgacaaaataagttaaaatatgaaaggcacttaggacagagcctcatattctgtaactattatatgctagtgtattcatcagcttgggctgctgtaacaaaataccattgactgggtggcttaaaccacggatatctggccgggcgcagtggctcatgcctgtaatcccagcactttgggaggccgaggcgggcagacaccgaggtcaggagtttgagaccagcctggccaacatagtggaaccccgtctgtactaaaaatacaaaaaattagctgggcgtcgtggcgggcgcctgtaatcctagccacttgggaggctgaggcaggagaatcgctttaagccaggaggcgaaggttgcagtgaaccgaggtcacgccactgcagtccagccctgcggacagtgcgagactccatctcaaaaaaacaaacaaacaaacaaacaaaaaaccggaaatttattttctcagtgtggagactagaagccccaagtaaggtcgagttgggttcgtttctgactaggactatattctaaccttaattacttccataaaggccttatctctaaatactctccaaatacaatggaggttagggcttcaagataaattttggggaatccaaacattcggttcataacagctagcaagtactataattgtattctatttcctcatttgttgtttttgtaaactgttgatgtagaaatgtatttggagtgatgtactcaaattttgttggagggagaaaactcagcaataaaacagcattacagtataatcgcttttgtggaaaatatataacaatgcatgaaatacgttgtgtgtgtgcaggaaaggttgtacaccaactgttagcaaggttaccgctgcttgctgaaattacaggcaataatttttttgtttttgtgtattttctggcatttcagaaatacaaggtaagcaataaacatgagaacttttattgaatactagaagagaaaactgttgtggtattcttttaacaatataccggaatccattcaactgtctgctgagaataaataactggcatgtacataatatttagggaaagtgctatggattattttacaccagtgtcgtttcaccaaaaaacgtgatgccgatggctcccttttgtcacgggtttcaaaggctcaccctaacgttcacgtgcattttcccagcggaggaaagatggttgttcttcatcagagtctggggcccaagaacgcaggctccatctcctcccgcaggagccaggctgatgatgctcgcagggatcggatactgggagcccctgaacgcagccaacccggcgcgcaccggtgggggcgtctgcgctggcggagcggctccccgggaggacgctgggaaccatgctctagccagccgctgcgcaggcgcactgggccccgactgcccgccgcagcgctacgtgggagcttggccgcgcagtgccggaacccggctgcagcggtgggaaggcgggggcgtgccggcccagcggggagagggtgagcgggtggctgtcccgggcttggggagctgggcgagccgggaagcgcgagttccgcccgcggccaccctgtcgcgcgcggtgctctccgcagccccggagtcgtgctcagacaaaggctggg

SEQ ID NO: 1240 - DNA, 2300 bp, Homo sapien
gtggcgggcgcctgtaatcctagccacttgggaggctgaggcaggagaatcgctttaagccaggaggcgaaggttgcagtgaaccgaggtcacgccactgcagtccagccctgcggacagtgcgagactccatctcaaaaaaacaaacaaacaaacaaacaaaaaaccggaaatttattttctcagtgtggagactagaagccccaagtaaggtcgagttgggttcgtttctgactaggactatattctaaccttaattacttccataaaggccttatctctaaatactctccaaatacaatggaggttagggcttcaagataaattttggggaatccaaacattcggttcataacagctagcaagtactataattgtattctatttcctcatttgttgtttttgtaaactgttgatgtagaaatgtatttggagtgatgtactcaaattttgttggagggagaaaactcagcaataaaacagcattacagtataatcgcttttgtggaaaatatataacaatgcatgaaatacgttgtgtgtgtgcaggaaaggttgtacaccaactgttagcaaggttaccgctgcttgctgaaattacaggcaataatttttttgtttttgtgtattttctggcatttcagaaatacaaggtaagcaataaacatgagaacttttattgaatactagaagagaaaactgttgtggtattcttttaacaatataccggaatccattcaactgtctgctgagaataaataactggcatgtacataatatttagggaaagtgctatggattattttacaccagtgtcgtttcaccaaaaaacgtgatgccgatggctcccttttgtcacgggtttcaaaggctcaccctaacgttcacgtgcattttcccagcggaggaaagatggttgttcttcatcagagtctggggcccaagaacgcaggctccatctcctcccgcaggagccaggctgatgatgctcgcagggatcggatactgggagcccctgaacgcagccaacccggcgcgcaccggtgggggcgtctgcgctggcggagcggctccccgggaggacgctgggaaccatgctctagccagccgctgcgcaggcgcactgggccccgactgcccgccgcagcgctacgtgggagcttggccgcgcagtgccggaacccggctgcagcggtgggaaggcgggggcgtgccggcccagcggggagagggtgagcgggtggctgtcccgggcttggggagctgggcgagccgggaagcgcgagttccgcccgcggccaccctgtcgcgcgcggtgctctccgcagccccggagtcgtgctcagacaaaggctgggaggctagggccgggggcgttttgctttgtggggaggacttagcctctcatttggggaggaggaggcggggtctagcggtttcgcggtttgctacagccgactagtgaaagagctgggattccaaatccccggctactttacacataattactgccccaaacaaagaattgggttgtattcgtctctttgtgcttcctgacatgtgcgcggtgctttgaattttgtgggctgtgtctgcccaccgtctccgtgtatcttttggaaacattttacagtgatccatatatgttctagcgttctgccctatgactgagcctccttagtcctttgctgattctaatgtcttctgctcagcatctgcaggggctgctgagagtaaatacttggcgcctccagctgctggccaaggagacagatggagctcaagttgggagatacgccctgagagccgatgatagacacaagtccagatctcggattttgatactgtatgttccctgggttcctgagagaggacattgaggagtaggagtcggcgattaaggagatcggtacaattgggaagcctcctgtcagagcttccagcaatttcctcatcagaggtggacaagccctatgggctaagacagagggtcctcagaaaggagtgcggacgccgtcatgctgcagcagctcctgatcaccctgcccaccgaggccagcacctgggtgaagttgcgtcatccaaaggcggccacggagcgggtggccctgtgggaggatgtgactaagatgtttaaagcagaaggtaagaataaactgatgggtgggagggaggaaaagcagtcccctctagtgtgagaaggaatgagtcacttgagtggaagcatctcttagggagacgagtgggtggagggtttccggagttgttgattgtggctcctagtctggggttttcctaag

SEQ ID NO: 1241 - DNA, 2300 bp, Homo sapien
ccaccttacatacttctgacagcttcttttctctacttcttcacttgcatccatatcagctctctagacggcagaatcacatttgaggatgatccagaactcctgtacctagtatatatattttgtccttccattctcaccgtggcaattaattttttaaagtgcaaggaatatggatctttttttttattatttctttcagacttgaagagcaaaacaaaaaccaaagagtcagccttacagaatgatatttcgtgggaagaactacattgtggcctaatgatggaaagatttacaaaaggaagcagcatgtattccaccttgggaagaatctccaaatgtaataagctagaaagccaacaagagaaccaaagaatgggtaaggggcaaatccccctgatgtgcaagaaaacattcactcaggagagaggccaagagtctaatagatttgagaaaagaattaatgtgaagtcagaagttatgccaggaccaataggtcttccaagaaaaagagatcgtaaatatgacacacctggaaagagaagcagatacaacatagatttagttaatcattcaaggagttatacaaaaatgaaaacctttgagtgtaatatttgtgaaaaaatcttcaaacagcttattcaccttactgaacacatgagaattcataccggggagaaacctttcagatgtaaggaatgtggaaaagcctttagccaaagttcatctcttattccgcatcagagaattcatactggtgagaaaccctatgaatgtaaggagtgtgggaaaaccttcagacatccttcatcgcttactcaacatgttagaattcataccggggaaaagccctatgaatgtagggtatgtgagaaagccttcagccagagcattggactgatccagcatttgagaactcatgttagagagaaaccttttacatgcaaagactgtggaaaagcgtttttccagattagacaccttaggcaacatgagattattcatactggtgtgaaaccctatatttgtaatgtatgtagtaaaaccttcagccatagtacatacctaactcaacaccagagaactcatactggagaaagaccatataaatgtaaggaatgtgggaaagcctttagccagagaatacatctttctatccatcagagagtccatactggagtaaaaccttatgaatgcagtcattgtgggaaagcctttaggcatgattcatcctttgctaaacatcagagaattcatactggagaaaaaccttatgattgtaatgagtgtggaaaagccttcagctgtagttcatcccttattagacactgcaaaacacatttaagaaataccttcagcaatgttgtgtgaaatatactaaacatcaaagaatctatgttggagcacaagattctaaatcagtggttccctgatccctcaaaaatccatttgtttttggatttccaaaaacgaacattaaaaaaaaatggtttggcacaatgttcccaactcttaattttgccatattaaaaacacaacacctattatcagcattgtttcagaaaagaaaggacattttaatatttttaaatgtaggaacagttcccccctccatttttttttttttttgttttttgagatggagtcgctctgtcacctgagctggagtgcagtggcgtgatctcagctcacagcaacctccacctcccaggctcaagcaattctcctgccttagcctcctgagtaactgggattacaggtgcctgccaccacacccagctaatttttgtatttttagtagagacagggtttcaccatggtggccaggctggtctcgaaccattcaggtgatccgcccatctcggcctcccaaagtgctgggattacaggtgtgagccaccgtgcctgcccctcccccacccccgacccagacccttttttaaaaaacagtttcactcttgcccaggctggagtgcagtgatgtcatagttcactgcagcctcaaactcctgggctcaagcagtcttcctgcctcagcttcccaagtagctgggcctacagatgtgcaccaccatgtctggctaatttattattattattattattattattattattatcattattattattgtagagacagtctcactatgttgctggactggtctcaaactcctggctccaagcagttctcccacctcagtctcccagtatgctgcgattacagacatgagccaccgtgtctggccaggaacagcctgttatattacgtcagctttatgacagactcccacatttat

SEQ ID NO: 1242 - DNA, 2300 bp, Homo sapien
acagccttttactctagccctttatatggctagaagaggtagaaattaaaatgttgcttctcatttctagaagaaaaaatgttaaagggagttttctagcattgatagataacttactgtacacgagatgcttatttatattttatggttttatatagagcaagaattggcaaactttctgtaaagggccagatagtaaatacgttaggtgttgtgggccatgtggtccctgtcacacctattcaacttccccattttagtacaaaacagccagagacaatatataaactacagtatctgaaccttggcactaccaatattttggaccggataatactttgctataggaagctgcccagtgcatcctgggatgtttaggggaatccttggcttctacccacaagatgccagcattcaatgctgatagctgcccctcccccagttgtgacagtcaaaaatgtctccagacatggccaggtgtacctagaggccaaaattgtccctggttgagacccactgatgaatgtgtgcaatagtggttcccataaactgcatttaaaaaacagctgttaggtttcgtttggctcaagggctgtcatttttcactcctccccccatagagtatgtaaaatgattagaaatgacaacagactatcatttagtatcagattagtgtgtgtatatgccataaattatttccttagcaattcctttagtatttttgttgcaataattctttaaacgctacatttgtaatgctgtcttggagcctaggaattatttttggagatatttatgcagacttccctctataatgatcggttttttattatggttaatccataaatattttgagatgtatctctaaaaaacgagcactctttgaaaacataaccacaatgccattattatacctacaaaaattaaccacaattccttaaaacataatgatgcctttttgaagagagatatattgagacttcattctggggagaaacctttcagataactttatttaccttttcctttgccaagcatacaacattagatttgaaatatgctttgtatcaagtggaagtgtctcttaagatagcccctagaacaacacatcaagaggcccaccaaagaggaccagagaaaggtgactgaaggagccatactcaggcagggaaatacggagagaaagcagaggaattggctcctaatgcttcactgtacttaatgaaatagatactccatccttacagacataattggaagtaagtcaagttcaacttctttgttttatatggagatagaacagtttcaatcacgtgagtattataagtgtgaattatctaaagtaaagctataaatccagaatatataccagtatctctagaatttttcatattactacatttacttaaaaaaaaagctggcctctaactcttaagtcctgtatgactgatgggcagaaaaagagtgaggtatacactgtttcttaaaattgttctaccatgtttctatggtcttagatttcccaagaatttgaatttctccaattgcttatttccctgaaagacatgactatgacttttctctgtagttcctgcctcagtgatctcatacagtctttggcttaaaataccgtctctgtttaacagctgccagattcacatctccagcccagacctctcccgaactccagccttgttctaacctttgggccgtttcactagctgttgcagatgccctatacccttaccttctcatctttgctcaattgttgccttcttactgaagcctatcctgtccatactatttaatactgcagctgtctaccttccagatcgagaaatcccatacccctttcacctgctctatgtttttcatatcacctatcaccctagatacttcacatatttgtgtttattgtttactgttgtttcccctggctataatgtaagctccatgtgggcaggggcctttgtttttttcactgatatatcacaagtgcctaaaacagtgcctgacacgcagaagggactcagtaaatatgtattgaatggttttgatttgaactgaattgaactatgtatccatgatgcaagtaaagaaatgtaatccatatactttcctacctacattttatatgtgaggaaatattttttgtttcctttttcttttctgtgcaagtggaccaatatttgagaatcgtatacctttgagaatcatagctgatatactttaagataaaagggtatttctgtgttaatttggtttggttgtttttgtttgtttgttgagacaaagtctca

SEQ ID NO: 1243 - DNA, 2300 bp, Homo sapien
tagatttagtcatgttttttactttgttctgtttttactgcaccaggcaagtggaccccagtttggttctataacaatttgtagttttactataatgcgtggatttcttctactaggtgtagatttctttgactagataaataaaagggtttcttttatttatcccactagagagttatatggcatcttatatctgtgacctggttcctttcataggtactaaaaatattcagcccttatttcttcaaatactgtctctgccctagctttatctctcgttaaacttagttcgatcctcttactgtattctctatctctcttactctgtcttctgtagggtacattttttgtttctcaatgctttattctagataatttcttgtgacctaccttcctttcaatttattctacattcagcagtgtctaatctgccattaactgagttcttaatttagttactgtatttctcaatcatagaagagaagtctatttacttctttttttaaatctgctctatcactttgtatagtttttaggtacctgccaaaattgtccaagttatcttttttatttcttcaggcaaagaaaatatgattttattttactttttttcctaaaaactctaataggtaagcaagaaaatatacatatgttttaagccagggtcttgctctgtcacccaggctgaagggcagtggtatgatcgtgacttactgcagcatcaacctgctgggctcaagcgatcctcccatctcagcctcttgaagagctgggacttcagggctgtgccaccatacctggctaatttttgatattttgtagagacagggttttgccatgttgcccaggctggtcttgaactcccgagctcaagcaatccacctgccttggcctcccaaagtgctgggattatagacataaaccactgtgtccagcccaagaaaatattattttgcggtttgcatcaaataattctaaaagcagttgtttctgcaggtctatttccaatgtttgtgtttctgctggttctcactaagaatctagtttctttgtgtacctggttatctttaattctgtatttgacattgtctatgaaaacttatgtgtaggaaaaatgtcggccctacaattataaggctttcctccacctatttgcttttgccaagcatctggtgacaccatagtcagagacagtcttaaaccaagataatgtctgagacaggcaatttgatgcagtctgtaaattccttttaagctgttccattttcaattcatcctcaccctgaggctgttgccctttggggtcccagttattgtaaggagggtcttcttcttcttcttcttttttttttttttttgagatggagttttgctcttgtcgctcaggcatggagaaaccccatctctactaaaaatacaaaattacaggcatggtgatgcgtgcctgtaatcccagctactctggaggctgaggcaggagaatcacttgaacccgggaggcagaggttgcggtgagccaacatcgcgccactgcactccagcttgggcaacaagagcgaaactccgtctcaaaaacaaatttatatattatatatatatgtatatatatatacacatacacacacacacacacacacacgtattccagaattttatttttaaattttattgttgttttctacagtgggttgatacaaatatcctagcccatcatctccccaccctgctttccttttcttcatggtcctcacaatcgcctggggtattatctatttatttttctatttgttattgtcaattaatttcaatgtaattaagttccaagaaagcaggaactgcgttttgttaactgctgtatacgcagggccaataagaatgtgggggtagatcttacacactcagaatagataactgaatgaatgaatgaatgaatgagtgaatgaatgaatgacagggaaggcgcttcaccggaaaggctgaaggaggtctcccaaggaccgctgtgaggaaacggggggcggcgtgggtgggtggccgctacccacggttccggacggccctcgggggcgcgctcgggcggcttccagcttccgggttcgagggcgcgcgctgcttcccgggagagggcgggctccgtggcagccccctgtgggcggagccggcggccggggctcacaacccgccggaagacgcgcgggttgtggcagctgcagcgggaccgcgtggggtgggccccgggaccgccagggctgcagcgagagcggccggcggtgcaagcggccgggagggcgcggccggag

SEQ ID NO: 1244 - DNA, 2300 bp, Homo sapien
cttccgagtagctgggactacaggcatgcaccaccatgcccagctaatttttgtatttttagtagagacagggtttcaccatgttggccaggatggtcttgatatcttgacctcatgatccgcccgcatcagcctcccaaagtgctgggattacaggcatgagccactgcgcccggcctacagttgattcttgagcagcgcaggtttgaactgtgcaggtccacttctatatagacttttttcaataaatatattgaaacattttttggagatttgtgacaatttgaaaaaacttgcagatggaccatgtagcctaggagtatcaaaaaaattaagaaaaagttaggtatgttatgaatacataaaatatatgtaggtactagtctattttatcatttactaccataagagatacacgtatctattataaaaagttaaaaattttcaaagcttatgtgcacagactattcatggtgccattctcagttgagagaaatgtaaacaaatgtaaagatgcagtattaaatcactactgcataaaataaactatagtacacctagtgtattagtatgataattttatagctatctcctgtggctattgtagtgcgctcaggtgtttcaagtatttacttaaaattcagtgtgatgctaagcatctctgcattagcacttcatctctccggtaaattgcatatcacagtaaaaagtgatctctcaggccgggcgcggtggctcacgcctgtaatcccagcacttcaggaggctgaggtgggcgaatcacctgaggccaggagttcgagaccagtctgaccaacatggtgaaacccggtctctactaaaaatacaaaaattagctgggcgtggtggcgtgcgcctgtaataccagctacctgggaggctgaggcaggagaatcacttgaacccgggaggtggcagtgagctgagctcgcaccactgcactccagcctggacaacagggtgagactctgtctcaaaaaaaaaaaaaaaaaagtgatctctaagccgggcacggtgtctcatgcctgtaatgcgaacactttgaggggccaaggcaggagtgcatgtgtatatacatacatacatgtgtgtgttttgtatgtatacacacacacacacacacatagtttattcatgtgttttgatttgttctatttccaaaccctttcgtctctctggtggttaaggtgaggggctcctcctagagctgtggctgagctctggctatcatgcagctttaatttgattgagtatacttctgattagcccatgccacaattgctgagggcttttctttttatctttttggcatttgagcttaggaagggattagactacagttccagacagttttgttcatttttgcattaaactccagcagggcctcagaattcaagttcagtaagaatgcacaggtctttgtgacaataagtgcgtgaggtggtgggggaacccctatcccaccctgttcctcatctccacctctcttgatttcatttctttccactctctcatcaaccagcctacctccagccatgctgttcactttcctgttcctcaagccaaggacactgtcaccttaggtcctttgcacctgcccaggatgctcttctctcagatttccatgtggttcttccctttactgaatttatgtctccggtcaaacatcacccttttagagagtcttccccaaccactttacataaaagatcatcctaccctcactgtggttctcccaatgtctcttatcctgcttaatttttttctaaggtatgtatcaccatctgtctttctatatattacattatttatagtaatctccagattagagatccagacagactacagttccagacagttttgttgatcagatttggagatcagaggatctccaaacagatccagagaaggctcctgataaaagtaagtttagaatctctcagaatttagaatactgtcagaactccttggaacttaacagaggtggtctccggctaaaaatgaatgtatttgatgttctaggaattgttgactttcaaggacatatctattgacttcacccaggaagagtgggggcagctggctcctgctcaccagaatctataccgagaggtgatgctggagaactacagcaacttggtgtcagtgggtaagacttggctatccatgcatccagaaacccacccattacaggagagtcattattttaaattattgatgtgtagattccttgaggcttgatttgggttctgtattaaagatgtcttattccctttgaa

SEQ ID NO: 1245 - DNA, 2300 bp, Homo sapien
gagacagggtttcaccatgttggccaggctggtcttgaactcctgacttcaggtgatccgcccgcctcggcctcccaaagtgctaggattacaggcgagagccaccgtacctggcctcaacttacatatttctaagaaaaagaacattttcctacataaccacaaaatcattatgacactcaggagacctataattgattgataatattatctaaaacacaagtcacttcaaaattttcccaactgacgcaccagagtagctgggactacaggcacgtatcaccacccccagctaatttttgtattttttgtagagacgtgttttcaccatgttaccccagctggtttctgaactgagctcaagggatccacccacttcggcctcccagagttctaggattacaggtgtgtgagccactgcactcagcctgtagttgtcttaatttaatgtttctctttctttcttttcttttctttctttctctttctttctttttctttccttttttctctttctttttttcctttttttttttgagacagagtctcactttatcacccaggctggagtgcagtggcctgttgtcggctcactgcaaactccgcctcccaggttcaagtgattctcctgcctcagcctcccaagtagctgagattacaggcacctgccaccacacttggctaattttttgtatttttactagaaacggggtttcactatgttggccaggctggtctcaactcctgacctcaagtgatccgcctacctgggcctcccaaagtgttggtattacaggcatgagccaccatgcctggccaatttaatgtttttctatttttgttttaaaatatttacctattctgaagtccaaagatattttcctatattatattctgaagactttatagtttaggatttcacatttaggtcttaatccagctacaattgatttttgtgatgaaatgagagatagaggtcctgttttctgttttgtttttttttttgagacggagtctccctctgttgcccaggctgaagtgcagtggtgtgatctccgctcactgcaacctccgcctcccggttcaagcgattctcctgcttcagcctcctgaatagctgggactacaggtgtgtgccaccacacccagctaatttttgtactttttagtagagacagggtttcaccatgttggccaggatggtctcgatctcttaacctcgtgatccgcccacctcagcctcccaaagtgctgggattacaggcgtgagccaccgtgcccggccttcatattgtcatagaaccttcactgaatagaccatcttttctccatggctgtatgatgccacctttgtcataaatccagttttcaagtatgcgtgataaaccgtaaagaaaagcaaagagtcaagtatctgcttttggtaaaataaataaataaataaatataaataagaaaagcaaagtgttataaaagtcgggctagtggttttctcaggaagtgtatctgtgaagaacctgacactattcttttttcgctctaatgacttggctgttcataattatacttatctttggtttatatttcagaataaaattgtgttatatttatcaataaaaggttagttaaaagtaagcaaacagaaaaaaaaaaagaaatattgatgaggggagcgccagcatctctcaaaagtgagttcgtggttttgctctcaatggaaaagccggcgggaggtgctaaggtggggatgctgaatccacggatggccaagcggagacgcggcacttcaccgggggcagcgaggggcccagaccttgctcggattgtcccggtggtaactgggagacctcgccagtgagggaagttacagatcagctgcgcccggaattaaacgacccacagacaacggcgcaaacagagggactgacctgctttagtgagctcccaaaacctgctctcgcataagcacaccctcctccgctcacagagacggatttctgccccagccgcagcctcgcgaggtaggcggcgccgcgagggcctctgggaaggcggtccgtgggcagccgcggggcactctgggactgggctctgggcggcttttttgcgagtggcgggccgactgtgtagtccgctccggcagcgcgctctgcccggcttcctcagtctcctcgccgggagcgtccgggagcagctccgaggccgcggcgaaaccaggtggagtccgaggttcggaggagtatcagaggttaggggaaggccggagaatgggctgggaggctgcgtttcggagcttaggg

SEQ ID NO: 1246 - DNA, 2300 bp, Homo sapien
gtaatgaatttattctactacccatgtctttaatatatgtcctttctgttgagagagaggagaggagaggggaggggaggggacgggaggggaggcagagagagagagatgtgtttattgcatagaaaatgctagtaaagtcagtgggtactaatatcacttgatcttagccaaaaggctgagaagcgataatggctactaatatcaagccagttcttaatggtgccaggcaatagtactacatttccttaatctattcacttgctcacattcataaatcatactttatcgaatctcagatgccattgattataagttgtattattattttatatactaataaaaaacaatgctcctgattaaactatggaatgccatcacttgtaagacagcaatttcacagatgttaaaatatgaaaaaatcatgtttcaaaatcatcataatacggtattcatcttttctgtcaagtctaaaatactttccccctatcttcatttcagcttcctatttcactgggaaaatagaagcactcagaacagggcatcctctttctcctaccaccatatttgtccacctgtttggatctgtacttataaactctgcctccccttttatttcaatggagatgaattatccatactcttacttagaatgatccctgtgattgtgtactggattccatcccttctcttctcaaggacattcctccgagtaactagcctgtctatcctgaattgtgtatttcccgcctctactggatcttttgttttattttattaactaattcatttatttgagacagagcctcgctctgtcgcccaggctggagtgcagtggtgtgatctcggctcactgcaacctctgcctcccgggttcaagtgattctcccgcctcagcctcccaggtagctgggtttacaggcgtctgccaccacgcccggctaatttttgtatttttagtagagacggggtttcaccacgttggccaggctggtctccaactcctgacctcaggtgatctgcccacctaagcttcccaaagtgctgggattacaggcgtgagccactgcgcccagcctagatccttttaattagtacataaacttactataatttcttccatcttttttattttatttttttgagacagagactagctctgtcgcccatgctgcagtgcagtggcgggatcacggctcactgcagtctctactgtctgggctcaagcgatcctcccatctcagcctctcaagtagttgggacttcaggcgggtgccatgccaggctagttttttattttttgtagagatgagggtctcactatgttgcctaggcagtttcagactcctgggctcaaccaatcctcccactttggcctcctgaaatgttaggattacaggcataagccaccacactcagccccatctttgaattaaaaaaaaaaaaaaaattagaacgtggaaaaacgcaacaacaaaagattaacaaaatccctatcccatgatagccttatttttctgctcaccttaaaaacaaaacttcttaaaagtattgcgtatatttgctttctccatttcctctcctcccatccttccctccaactcctatcaaattttcatcagactttatcaaacttccaccactgccaaaatggcgtttcaacatcactggtgaccattgctacagtggcccattcttaattctcattttacttgacctatgagcaacatttgagacaatgggtcactcccttcttgaaacacttccttcccttggttttgcagatctaaactctcctacttttccatctacttcatggattattccttctcagtcttctttgttggatcctcttcacctctccgacttaacctggtgcattgctagaagaaaccctgctgagtaagagcaaattgtttttagcataccgccgattttactttccagtatttaaaaatgctgtgtatccttttaaatgaaaacgacttaaaaagcgtggctctcaggctagcaatagagataccaacccgggaatctccgcaccaccccccaagaggaagcagcgtctgacgtcttccggaaacgagctccactggccttatgggaaatgtggtctccgacggatggcctacacccgggaggagtccaggaactctaggtggacagttacttccgcacacgcgtagtaggacggtagccggtattcaatcttcaaatcagcgccgcgggaagtgcgggcgggtgttgctcccctgtctctggacgacgctgtgactgatcccaggcttggagccggagct

SEQ ID NO: 1247 - DNA, 2300 bp, Homo sapien
caataccatactgctttaaatacattgactttatagtatgttttagtatcgggtaagacaaatcccttttcattacttttcttcctggactttttattcctgtatgtttattcttctatatacacttaagaatcaaccccctctccacccacctcccatccagtccttctggtaaccaatatagaactttgaagatactgaaattatatgcaaaatatacattgcacatctccagagagatagtgctaagttttcatcagatgtgcaaagggaacccctggtttacctgtctctgtgaaaggggccagggaggagcacacaggaagcctgattcctctctgtgctcccacccctcacctccaccctcgttccaggtcctgccctggcctccatcccacctcccctaatctagtcccccttgctgctccagagtaacccattctaccacccaggccctagtccaggcctaggcctgaggtagaatagctgataacaaagctttaattaatatgtaaatataatcaggagccccagctccacctctgaccagctatggaacgcactttgaggcttttcacattgtagggcctcagtttatgcttctcacagaccaggtgagaagggaaggcgtaggatgactatgcctcctagcaatccccaggaggatcctttaatcccaataattttcctttttctccccaccttcccactccccatttacttttttttgagacagagttccccctgtcactcaggctggagtgcagtggtgcgacctcggctcactgcaacctccgcctcctgggttcaagtgattctcgtacctcagcctcccgagtagctgggactatagttgtgtgccaccacacctggctaatttttgtatttttagtagagatggggtttcaccatgttggccaggttgatctcgaactcccagcctcaagcaatccacccaccttggcctcccaaaacactggtacaggcatgagccaccgcacccagctcccatttacattttaattcatgccctcagcagggagactactggttttacatgcctccagcaaatattaattattctgtcctctctgtcagtgggtggaattcaaaacactggagcccaagagtggaactgaccagtcctaagcaaggttaaatatacaagttggggcaggcacgaccctaggaaagacttcatacagtatcctcccgggctgcagaagaacccaggactccaggagtctatttggaagtttatataggcagatgccaggccctagaacagagtttctcaacctcagaaacctgctgacatttcgggcctgacaattctctggcgcaggggctgtcctgtgcattgaaggcgtgtagcagcatccctggtctcttctcatgagacgccagtagcaacctcctcgttgggaaaaccaaaaatgtctccagacatggtcgaatgttccctggggggcaaaatcgccccaagtttaaaaccattgctctagaagtagagagcgcaggggaagcaggttaacttgggcttcagggccggccactctacttccttctgtctgaaagggacattataaagtctttctcttcataccaggcacttgggcaagtcttttctcctatctgagcttcagattttccatctgtaaaatggacttgacgtttgtaagtcgtttcttctcttaccatctgacgttcctggaactgcttcagggcagggcagggcagggggcgccgtggtgcctgtgaggtcctgggaggtgccccaaagaaaaggaaggatgagaaagaacagatagggtaggtggtggagaggggaggccgggcaggaggcaagagagtcctagggacacggagaggaatgaggcttccccagaccccgcttcttggaagcctcattaatgtaggtcccccaaccacaacccggcaagccaaactccccggattcccctaggccccgcccaccaccaaggtccggcccactggccccgcccatccacgcggccccgcccccggcaggccccgcctccccttcgcctcccgccggcccaagcttgggctttgcacccggcggcgactgaaaacggtggctgctgcggagccggcagcgcaggcgggcggagcggagctgcccccgtggtggcgggcgatgcccccgtgagcctccctcgccgcccctccccgccccgcgtgcctatccactcggagtccgcgccagcctggggccgggccgcgcctactgccgggttcgcggggcggggtcccggggcagcacctgccccgccttg

SEQ ID NO: 1248 - DNA, 2300 bp, Homo sapien
tctactcatatttcattggtcaaaacaaggccaagcttgacgacattagggtgagaagtctttcaccctaatctcctagggacaggccagatagcaacggctttagaaagggaagggcggaggctattgataataaagactatagcaaggactaatattaggcttatatgtatcaattgactgttatcagttataacattgactattaaaatactgaaatactctagtactacctggtaaatagctgctgtcccaaacctcctgaccactcccttcccctgggatcccttgggacctcctattcacaaaccagcaactgaagggttaacacctagcacagacgtatacctccaggatcctagctgcatttctaattctgcttcatctatgcttgagcactacttgttgttaaatatacttaatatcactcttagctaatttcctctatgtagatttttatttatttctgagggcaacccaacttccaggctcttggaaggaaatagactgcagcccctaagtgtgatcaatacttaattataacaataatcactaataataacttgtgctgcttcattgtaactaaatgtacacttttacattttttggcaagcatagtatatgcaataagtactcaataaacatctgtagagagacttatttagcttttttccattagctacatctgtctctacaatctcaacatactattctcttgaatctgtttttaattttatgccatttctcatgtctgaaaatgtcattataagtaactttttttttttctgagacagggcctcgcactgtcgcccatgctagagtgcagcgagacactcgtagctcttaccagtaacttctttataacacttttgcaatttacgaagcactctcacattatttcattcactctccccaacattaccaaaagttaggaattagatctttttacagatgaaggaattgagactccctgaagtcaagtgtcttatagttaggttttgttcattcattcatcaaatagagtgcctgatgtgagatttattgaaactggatttgaaaacaattttcctgaattcaagtcgagggtttactccactattctcaattactttatcaccagggttataaacccaaaggaagtgagtaacaacagtgtgattttattgaggacccatgcaacactagtctcagaaaggctccagtgtcatttgtaaaattcaaggttaccatcagcagaggcagtcattcctctctgcgcttgttacctaatgcactaactctcactgtaggtaattccattcaagacacatttgatgactatacctacaggttttgaagttattcggatggggttttgacacttactagctgtggggacttagatcaagttacttaacctttttgagcttcagttttatcatttgtaaaatggatacaatcctgatgcctttggaccaagtggtcacggaaatgaaagagataagtatgaaaaaatccatgctcatagtagctgtggtttccaactgcgtgataaaactttaaaatctgcattcaaataagaacaactatgtcgacgtaaggttacaagctaactattcttggtaagtactgttctttattctagaggacatcactttacagtttggtgctaaatgctcttttatgaatttaaggtgccagtagctgtctacttgaacggcatgcttaatctggaacgccatgtcgaccttcatcccccagttctttctccccaaattaaaaacacaaatacacacacacgcccctacttagttcctaaaactcaagggcacgcgcacacacctacttatttcctaaaattcaagctcgcaccaaggagatccacaaggataggcagggtggtggaggtcactgggcagcgcctccggatcccccgaaagggggcggggtcaaaactcagatctcgagctcccgaaagggggcggggttaaaactctcagatctcattccgcctccctctgtcgtcgccccttcccaattctcgcgagacctcaaggagcacagcttctgcgcaccgcacgatactgggagtccaggcgccaagggagggggaagggaaaaggggaaacggtgcaaacggcgtggccgccatcttgcttgtgcccccgcttcgcgcgcgctccgttctccgtgacgcacacttccccctcccctccgccgcgcctgggcctctgcattgcccgactccgtaggagcgcgggggcggctcctgctcttcctggactcctgagcagaggtgtgtgagtgtgcgggagtttctg

SEQ ID NO: 1249 - DNA, 2300 bp, Homo sapien
agggttaacacctagcacagacgtatacctccaggatcctagctgcatttctaattctgcttcatctatgcttgagcactacttgttgttaaatatacttaatatcactcttagctaatttcctctatgtagatttttatttatttctgagggcaacccaacttccaggctcttggaaggaaatagactgcagcccctaagtgtgatcaatacttaattataacaataatcactaataataacttgtgctgcttcattgtaactaaatgtacacttttacattttttggcaagcatagtatatgcaataagtactcaataaacatctgtagagagacttatttagcttttttccattagctacatctgtctctacaatctcaacatactattctcttgaatctgtttttaattttatgccatttctcatgtctgaaaatgtcattataagtaactttttttttttctgagacagggcctcgcactgtcgcccatgctagagtgcagcgagacactcgtagctcttaccagtaacttctttataacacttttgcaatttacgaagcactctcacattatttcattcactctccccaacattaccaaaagttaggaattagatctttttacagatgaaggaattgagactccctgaagtcaagtgtcttatagttaggttttgttcattcattcatcaaatagagtgcctgatgtgagatttattgaaactggatttgaaaacaattttcctgaattcaagtcgagggtttactccactattctcaattactttatcaccagggttataaacccaaaggaagtgagtaacaacagtgtgattttattgaggacccatgcaacactagtctcagaaaggctccagtgtcatttgtaaaattcaaggttaccatcagcagaggcagtcattcctctctgcgcttgttacctaatgcactaactctcactgtaggtaattccattcaagacacatttgatgactatacctacaggttttgaagttattcggatggggttttgacacttactagctgtggggacttagatcaagttacttaacctttttgagcttcagttttatcatttgtaaaatggatacaatcctgatgcctttggaccaagtggtcacggaaatgaaagagataagtatgaaaaaatccatgctcatagtagctgtggtttccaactgcgtgataaaactttaaaatctgcattcaaataagaacaactatgtcgacgtaaggttacaagctaactattcttggtaagtactgttctttattctagaggacatcactttacagtttggtgctaaatgctcttttatgaatttaaggtgccagtagctgtctacttgaacggcatgcttaatctggaacgccatgtcgaccttcatcccccagttctttctccccaaattaaaaacacaaatacacacacacgcccctacttagttcctaaaactcaagggcacgcgcacacacctacttatttcctaaaattcaagctcgcaccaaggagatccacaaggataggcagggtggtggaggtcactgggcagcgcctccggatcccccgaaagggggcggggtcaaaactcagatctcgagctcccgaaagggggcggggttaaaactctcagatctcattccgcctccctctgtcgtcgccccttcccaattctcgcgagacctcaaggagcacagcttctgcgcaccgcacgatactgggagtccaggcgccaagggagggggaagggaaaaggggaaacggtgcaaacggcgtggccgccatcttgcttgtgcccccgcttcgcgcgcgctccgttctccgtgacgcacacttccccctcccctccgccgcgcctgggcctctgcattgcccgactccgtaggagcgcgggggcggctcctgctcttcctggactcctgagcagaggtgtgtgagtgtgcgggagtttctgtgcgagggtgatagggaagcggcggcggggggaggggcagcgcttcccgccttcgccagagacctcacttcctcgcgcggccgctgctgtagctcggtccgtcctgcccgccgccatgttgtgctcttgcctggcccgctgctgtcgccgccgccgcgctcgtggggtccgtgtgcctcgtcggcccggcccgcgggctttctcccattggcggaaggcgacggcgggggggctcgctcgtgattggtcggtggcggggaggccgcggacctggcaccttattggacgcgccagctccggtctagggggtgatgaaggaa

SEQ ID NO: 1250 - DNA, 2300 bp, Homo sapien
ggtggatcacttgaggtcaggagttcaagaccagcctggccaccatagtcaaaccctatctctactaaaaatacaaaaattagctgggcatggtggtgggtgcctgtagtcccagctactaagtagatcacttgaacccaggaggtggaggttgcagtgagtcaagatcacgccgctgcactccagcctaggcaacagagtgagactccatctccaaaaaaaaaaaaaagagagagagagagaaaaatttatcctcgtccaggcacagtggctcacgcctgtaatcccagcacttcgggaggcaggggcaggagaatcccttcagcccagaagttcgagaccagcctgggcaacatggtgagaacccatctctaccaatttaaaaaaagaaaaaaaaaaaacaagaaaagaaagaaatagaaaaattagcgggggtggtagcacacacctgtagtcctagctactcaggaggctaaggtgggaagatcgcttgagcccaggaggcggaggctgcagtaagccgagatcgtgcctctacaccccagcaacaccccagcttcggtgacagagccagaccctatctcaaaaaaaaaaaaaaaaagaatgaaagaaataacgaatttatcctctggaatgtcaaactctgtgactgccctaaataaatcagttagtccatcaaattataatgtgcttttagtaatacatcgtcagccctctgcatctaaggatttaaccaaccatgggtcaaaaatatttttaaaaattgtgtctgtacggaacatatgcagactttttttcttgtcattattccctaaacaatacagtataacaactacatatatagcatttacattttattaggtattatacataacctagcgattatttaaagtatggaggaagctgggcaaagtgacatgcacctgtagtttcacccaagttggaagctgcagtgggaagattgcttgagcccaggagtttgaggctgttgtgccctgattgtgcctgcatagctactgcattgcagcctagcaacatagtgagacaccatctcttaaaaacaagtatacatgggaatgtgcaagtgttttatgcaaatactataccattttatattagggacatgagcacccaaggattttggtatccatgagagggttggctggggagtatcctggaaccagtctcccatggataccaggggatgattgtattcactaatgttctagcttttttgtcattccccccaaccccttatcattatatttccttcttaggttcctggttgactttctagaaatgccacttccattgtccctgccgctaacttcatacattaccttaaaattttcctatttaaattagtttgtgttttaaaataaagtgctttgccttgataccagtctgtgcctttaaagtgccactaacataatgacagatgccttttagaaatcatgcaaactattgtatggccattggcatcactctgttagtgttaaagaagctgtattttctttggattagccctacccagttttgtttttcttctgttaatgctcaacagaaaactgaagatggtcacaactttccgaccttgtgcacattgcttctctggtctattgccataggataccgtagcagtatcttacagacatctttgatggccaatcagaagcagttaaattaccttaaattttttaaatggaactctgacagccaataagaaatcccgtgggtgggaacactaacaaccctttggcttgtttttaagaacaattctaaattttcaatattctgttttagaagcacatgatgccctagtgcagctgctatgtgcatttgccagacatttccacgccttagagttccccatagtttgaagtctgaatctgacccctgttctgcttctcaaggtaactttaaaacaggaagtgtacaaaagaggtaactgatgacgtgaacagccaatcgtggctttgtgttcttagccgataaagcagttcagccaatgggaccactgtggaggcaaggtttggtgtcaaatagcatgctagattgaatgcctttgactgttaaagtggaaggaggctgcagggcttcattggagcctcggagtttttcactgaggcaggggtcagctgaaagacaaagaaaaatggcgaatagtttgttggggggtgggaggacagctgttcgggttttcagtggagtggacattccagactcatgtttctgcatctcctgctgccttttgtttcctccgtcctttggggggtagggataggagtgacttaaattct

(The sequence listing continues in the following parts.)
